(19) United States
(12) Patent Application Publication
(10) Pub. No.: US 2004/0048254 A1
(43) Pub. Date: Mar. 11, 2004

(54) Diagnosis of diseases associated with tumor supressor genes and oncogenes

(76) Inventors: Alexander Olek, Berlin (DE); Kurt Berlin, Stahnsdorf (DE)

Correspondence Address: DAVIDSON, DAVIDSON & KAPPEL, LLC, 485 SEVENTH AVENUE, 14TH FLOOR, NEW YORK, NY, 10018, US

(21) Appl. No.: 10/221,714

(22) PCT Filed: Mar. 15, 2001
(86) PCT No.: PCT/EP01/02955

(30) Foreign Application Priority Data
Mar. 15, 2000 (DE) 100-13-847.0
Apr. 6, 2000 (DE) 100-19-058.8
Apr. 7, 2000 (DE) 100-19-173.8
Jun. 30, 2000 (DE) 100-32-529.7
Sep. 1, 2000 (DE) 100-43-826.1

(51) Int. Cl. C12Q 1/68; C07H 21/04; C12N 9/99; C12P 21/02; C12N 5/06

(52) U.S. Cl. 435/6; 435/69.2; 435/184; 435/320.1; 435/325; 536/23.2

(57) ABSTRACT

The present invention relates to the chemically modified genomic sequences of genes associated with tumor suppressor genes and oncogenes, to oligonucleotides and/or PNA-oligomers for detecting the cytosine methylation state of tumor suppressor genes and oncogenes which are directed against the sequence, as well as to a method for ascertaining genetic and/or epigenetic parameters of tumor suppressor genes and oncogenes.

### FIELD OF THE INVENTION

[0001] The levels of observation that have been well studied by the methodological developments of recent years in molecular biology, are the genes themselves, the translation of these genes into RNA, and the resulting proteins. The question of which gene is switched on at which point in the course of the development of an individual, and how the activation and inhibition of specific genes in specific cells and tissues are controlled is correlatable to the degree and character of the methylation of the genes or of the genome. In this respect, pathogenic conditions may manifest themselves in a changed methylation pattern of individual genes or of the genome.

[0002] The present invention relates to nucleic acids, oligonucleotides, PNA-oligomers and to a method for the diagnosis and/or therapy of diseases which have a connection with the genetic and/or epigenetic parameters of genes associated with tumor suppressor genes and oncogenes and, in particular, with the methylation status thereof.

### PRIOR ART

[0003] There exists a need for the development of alternative methods of treatment and diagnosis of cancer patients. Current methods of treatment, such as radiotherapy and chemotherapy are often accompanied by unpleasant side effects, and are ineffective against many forms of cancers.

[0004] The genetics of cancer is complicated, involving multiple dominant, positive regulators of the transformed state (oncogenes) as well as multiple recessive, negative regulators (tumor suppressor genes). About 100 oncogenes have been identified. The oncogenes fall into several groups, representing different types of activities ranging from transmembrane proteins to transcription factors. About 10 tumor suppressor genes are known at present. They represent loss of function in genes that usually impose some constraint on tumor suppressor genes and oncogenes or cell growth; the release of the constraint is tumorigenic. In addition to loss of heterozygosity and spontaneous mutation in genes, there exists a further mechanism which may lead to tumor formation. The epigenetic misregulation of genes has been shown to be involved in the formation of tumors. The best characterised epigenetic parameter is that of genomic methylation, the covalent modification of the C5 position of cytosine. Methylation anomalies in cancer include point mutations, global hypomethylation, hypomethylation of individual genes, hypermethylation of CpG islands and loss of imprinting.

[0005] The high rate of mutation within CpG islands can lead to cancer. Methylated cytosines bases may spontaneously deaminate to form uracil. The mismatch repair may then be impaired by DNA-MTase, leading to a cytosine to thiamidine transition. A good example of this is the p53 gene. A mutation in this gene is present in more than 50% of all tumors, of which an estimated 24% are cytosine to thymidine transitions at CpG dinucleotides.

[0006] Decreased levels of global methylation is a common in many forms of tumors. Hypomethylation of individual genes has also been observed. An inverse relationship between levels of methylation and cell proliferation has been observed in the bcl-2 gene (lymphocytic leukemia) and the k-ras proto-oncogene in lung and colon carcinomas.

[0007] The p16 gene is a key tumor suppressor genes and oncogenes regulatory gene. The p16 protein halts cell-cycle progression at the G1/S boundary, and the loss of p16 function may lead to cancer progression by allowing unregulated cellular proliferation. Hypermethylation mediated inactivation of the p16 gene has been demonstrated in brain, breast, colon, head and neck, and non-small-cell lung cancer and in high grade non-Hodgkin's lymphoma.

[0008] The role of methylation in tumorigenesis is reveiwed by Singal and Ginder ‘DNA Methylation’ Blood, Vol. 93 No. 12 (Jun. 15, 1999): pp. 4059-4070. Further examples of methylation linked oncogenesis include:

[0009] Head and neck cancer (Sanchez-Cespedes M et al., “Gene promoter hypemethylation in tumours and serum of head and neck cancer patients” Cancer Res. Feb. 15, 2000;60 (4):892-5) Hodgkin's disease (Garcia J F et al “Loss of p16 protein expression associated with methylation of the p16INK4A gene is a frequent finding in Hodgkin's disease” Lab invest December 1999; 79 (12):1453-9):

[0010] Gastric cancer (Yanagisawa Y et al. “Methylation of the hMLH1 promoter in familial gastric cancer with microsatellite instability” Int J Cancer Jan. 1, 2000; 85 (1):50-3):

[0011] The identification of the methylation dependant regulation of cancer genes has opened up the possibility of creating alternative methods of cancer treatment and diagnosis. Treatment with DNA methylation inhibitors has been shown to restore gene expression of the key tumor suppressor genes and oncogenes gene p16, Bender et. al. “Inhibition of DNA methylation by 5-aza-2′-deoxycytidine suppresses the growth of human tumor cell lines.” Cancer research 58; 95-101 (1998). This resulted in heritable levels of gene expression leading to suppression of growth in tumor cell lines.

[0012] Methylation based therapies could have considerable advantages over current methods of treatment, such as chemotherapy, surgery and radiotherapy. They may even provide a means of treating tumors which are resistant to conventional methods of therapy, as demonstrated by Soengas et al “Inactivation of the apoptosis effector Apaf-1 in malignant melanoma” Nature 409; 207-211(2001). In addition to the development of methylation specific therapies, experiments with Min mice have shown that inhibition of DNA methylation can suppress tumor initiation, Laird et. al. ‘Suppression of intestinal neoplasia by DNA hypomethylation’ Cell 81; 197-205 (1995). Furthermore, DNA methylation analysis may provide novel means for cancer diagnosis.

[0013] 5-methylcytosine is the most frequent covalent base modification in the DNA of eukaryotic cells. It plays a role, for example, in the regulation of the transcription, in genetic imprinting. and in tumorigenesis. Therefore, the identification of 5-methylcytosine as a component of genetic information is of considerable interest. However, 5-methylcytosine positions cannot be identified by sequencing since 5-methylcytosine has the same base pairing behavior as cytosine. Moreover, the epigenetic information carried by 5-methylcytosine is completely lost during PCR amplification.

[0014] A relatively new and currently the most frequently used method for analyzing DNA for 5-methylcytosine is based upon the specific reaction of bisulfite with cytosine which, upon subsequent alkaline hydrolysis, is converted to uracil which corresponds to thymidine in its base pairing behavior. However, 5-methylcytosine remains unmodified under these conditions.

[0015] Consequently, the original DNA is converted in such a manner that methylcytosine, which originally could not be distinguished from cytosine by its hybridization behavior, can now be detected as the only remaining cytosine using “normal” molecular biological techniques, for example, by amplification and hybridization or sequencing. All of these techniques are based on base pairing which can now be fully exploited. In terms of sensitivity, the prior art is defined by a method which encloses the DNA to be analyzed in an agarose matrix, thus preventing the diffusion and renaturation of the DNA (bisulfite only reacts with single-stranded DNA), and which replaces all precipitation and purification steps with fast dialysis (Olek A, Oswald J, Walter J. A modified and improved method for bisulphite based cytosine methylation analysis. Nucleic Acids Res. Dec. 15, 1996;24(24):5064-6). Using this method, it is possible to analyze individual cells, which illustrates the potential of the method. However, currently only individual regions of a length of up to approximately 3000 base pairs are analyzed, a global analysis of cells for thousands of possible methylation events is not possible. However, this method cannot reliably analyze very small fragments from small sample quantities either. These are lost through the matrix in spite of the diffusion protection.

[0016] An overview of the further known methods of detecting 5-methylcytosine may be gathered from the following review article: Rein, T., DePamphilis, M. L., Zorbas, H., Nucleic Acids Res. 1998, 26, 2255.

[0017] To date, barring few exceptions (e.g., Zeschnigk M, Lich C, Buiting K, Doerfler W, Horsthemke B. A single-tube PCR test for the diagnosis of Angelman and Prader-Willi syndrome based on allelic methylation differences at the SNRPN locus. Eur J Hum Genet. March-April 1997;5(2):94-8) the bisulfite technique is only used in research. Always, however, short, specific fragments of a known gene are amplified subsequent to a bisulfite treatment and either completely sequenced (Olek A, Walter J. The pre-implantation ontogeny of the H19 methylation imprint. Nat Genet. November 1997;17(3):275-6) or individual cytosine positions are detected by a primer extension reaction (Gonzalgo M L, Jones P A. Rapid quantitation of methylation differences at specific sites using methylation-sensitive single nucleotide primer extension (Ms-SNuPE). Nucleic Acids Res. Jun. 15, 1997;25(12):2529-31, WO Patent 9500669) or by enzymatic digestion (Xiong Z, Laird P W. COBRA: a sensitive and quantitative DNA methylation assay. Nucleic Acids Res. Jun. 15, 1997;25(12):2532-4). In addition, detection by hybridization has also been described (Olek et al., WO 99 28498).

[0018] Further publications dealing with the use of the bisulfite technique for methylation detection in individual genes are: Grigg G, Clark S. Sequencing 5-methylcytosine residues in genomic DNA. Bioessays. June 1994;16(6):431-6, 431; Zeschnigk M, Schmitz B, Dittrich B, Buiting K, Horsthemke B, Doerfler W. Imprinted segments in the human genome: different DNA methylation patterns in the Prader-Willi/Angelman syndrome region as determined by the genomic sequencing method. Hum Mol Genet. March 1997;6(3):387-95; Feil R, Charlton J, Bird A P, Walter J, Reik W. Methylation analysis on individual chromosomes: improved protocol for bisulphite genomic sequencing. Nucleic Acids Res. Feb. 25, 1994;22(4):695-6; Martin V, Ribieras S, Song-Wang X, Rio M C, Dante R. Genomic sequencing indicates a correlation between DNA hypomethylation in the 5′ region of the pS2 gene and its expression in human breast cancer cell lines. Gene. May 19, 1995;157(1-2):261-4; WO 97/46705, WO 95/15373 and WO 98/45560.

[0019] An overview of the Prior Art in oligomer array manufacturing can be gathered from a special edition of Nature Genetics (Nature Genetics Supplement, Volume 21 January 1999), published in January 1999, and from the literature cited therein.

[0020] Fluorescently labeled probes are often used for the scanning of immobilized DNA arrays. The simple attachment of Cy3 and Cy5 dyes to the 5′-OH of the specific probe are particularly suitable for fluorescence labels. The detection of the fluorescence of the hybridized probes may be carried out, for example via a confocal microscope. Cy3 and Cy5 dyes, besides many others, are commercially available.

[0021] Matrix Assisted Laser Desorption Ionization Mass Spectrometry (MALDI-TOF) is a very efficient development for the analysis of biomolecules (Karas M, Hillenkamp F. Laser desorption ionization of proteins with molecular masses exceeding 10,000 daltons. Anal Chem. Oct. 15, 1988;60(20):2299-301). An analyte is embedded in a light-absorbing matrix. The matrix is evaporated by a short laser pulse thus transporting the analyte molecule into the vapor phase in an unfragmented manner. The analyte is ionized by collisions with matrix molecules. An applied voltage accelerates the ions into a field-free flight tube. Due to their different masses, the ions are accelerated at different rates. Smaller ions reach the detector sooner than bigger ones.

[0022] MALDI-TOF spectrometry is excellently suited to the analysis of peptides and proteins. The analysis of nucleic acids is somewhat more difficult (Gut I G, Beck S. DNA and Matrix Assisted Laser Desorption Ionization Mass Spectrometry. Current Innovations and Future Trends. 1995, 1; 147-57). The sensitivity to nucleic acids is approximately 100 times worse than to peptides and decreases disproportionally with increasing fragment size. For nucleic acids having a multiply negatively charged backbone, the ionization process via the matrix is considerably less efficient. In MALDI-TOF spectrometry, the selection of the matrix plays an eminently important role. For the desorption of peptides, several very efficient matrixes have been found which produce a very fine crystallization. There are now several responsive matrixes for DNA, however, the difference in sensitivity has not been reduced. The difference in sensitivity can be reduced by chemically modifying the DNA in such a manner that it becomes more similar to a peptide. Phosphorothioate nucleic acids in which the usual phosphates of the backbone are substituted with thiophosphates can be converted into a charge-neutral DNA using simple alkylation chemistry (Gut I G, Beck S. A procedure for selective DNA alkylation and detection by mass spectrometry. Nucleic Acids Res. Apr. 25, 1995;23(8):1367-73). The coupling of a charge tag to this modified DNA results in an increase in sensitivity to the same level as that found for peptides. A further advantage of charge tagging is the increased stability of the analysis against impurities which make the detection of unmodified substrates considerably more difficult.

[0023] Genomic DNA is obtained from DNA of cell, tissue or other test samples using standard methods. This standard methodology is found in references such as Fritsch and Maniatis eds., Molecular Cloning: A Laboratory Manual, 1989.

[0024] Problem Definition

[0025] The present invention is intended to provide oligonucleotides and/or PNA-oligomers for detecting cytosine methylations as well as a method which is particularly suitable for the diagnosis and/or therapy of genetic and epigenetic parameters of genes associated with tumor suppressor genes and oncogenes. The present invention is based on the discovery that, cytosine methylation patterns are particularly suitable for the diagnosis and/or therapy of diseases associated with tumor suppressor genes and oncogenes.

[0026] Description

[0027] The object of the present invention is to provide the chemically modified DNA of genes associated with tumor suppressor genes and oncogenes, as well as oligonucleotides and/or PNA-oligomers for detecting cytosine methylations, as well as a method which is particularly suitable for the diagnosis and/or therapy of genetic and epigenetic parameters of genes associated with tumor suppressor genes and oncogenes. The present invention is based on the discovery that genetic and epigenetic parameters and, in particular, the cytosine methylation pattern of genes associated with tumor suppressor genes and oncogenes are particularly suitable for the diagnosis and/or therapy of diseases associated with tumor suppressor genes and oncogenes.

[0028] This objective is achieved according to the present invention using a nucleic acid containing a sequence of at least 18 bases in length of the chemically pretreated DNA of genes associated with tumor suppressor genes and oncogenes according to one of Seq. ID No. 1 through Seq. ID No. 536 and sequences complementary thereto and/or a chemically pretreated DNA of genes associated with tumor suppressor genes and oncogenes according to sequences according to table 1. In the table, after the listed gene designations, the respective data bank numbers (accession numbers) are specified which define the appertaining gene sequences as unique. GenBank was used as the underlying data bank, which is located at the National Institute of Health at the internet address www.ncbi.nlm.nih.gov.

[0029] The chemically modified nucleic acid could heretofore not be connected with the ascertainment of genetic and epigenetic parameters.

[0030] The object of the present invention is further achieved by an oligonucleotide or oligomer for detecting the cytosine methylation state in chemically pretreated DNA, containing at least one base sequence having a length of at least 13 nucleotides which hybridizes to a chemically pretreated DNA of genes associated with tumor suppressor genes and oncogenes according to Seq. ID No. 1 through Seq. ID No. 536 and sequences complementary thereto and/or a chemically pretreated DNA of genes associated with tumor suppressor genes and oncogenes according to sequences according to table 1. The oligomer probes according to the present invention constitute important and effective tools which, for the first time, make it possible to ascertain the genetic and epigenetic parameters of genes associated with tumor suppressor genes and oncogenes. The base sequence of the oligomers preferably contains at least one CpG dinucleotide. The probes may also exist in the form of a PNA (peptide nucleic acid) which has particularly preferred pairing properties. Particularly preferred are oligonucleotides according to the present invention in which the cytosine of the CpG dinucleotide is the 5th-9th nucleotide from the 5′-end of the 13-mer; in the case of PNA-oligomers, it is preferred for the cytosine of the CpG dinucleotide to be the 4th-6th nucleotide from the 5′-end of the 9-mer.

[0031] The oligomers according to the present invention are normally used in so called “sets” which contain at least one oligomer for each of the CpG dinucleotides of the sequences of Seq. ID No. 1 through Seq. ID No. 536 and sequences complementary thereto and/or a chemically pretreated DNA of genes associated with tumor suppressor genes and oncogenes according to sequences according to table 1. Preferred is a set which contains at least one oligomer for each of the CpG dinucleotides from one of Seq. ID No. 1 through Seq. ID No. 536 and sequences complementary thereto and/or a chemically pretreated DNA of genes associated with tumor suppressor genes and oncogenes according to sequences according to table 1.

[0032] Moreover, the present invention makes available a set of at least two oligonucleotides which can be used as so-called “primer oligonucleotides” for amplifying DNA sequences of one of Seq. ID No. 1 through Seq. ID No. 536 and sequences complementary thereto and/or a chemically pretreated DNA of genes associated with tumor suppressor genes and oncogenes according to sequences according to table 1, or segments thereof.

[0033] In the case of the sets of oligonucleotides according to the present invention, it is preferred that at least one oligonucleotide is bound to a solid phase.

[0034] The present invention moreover relates to a set of at least 10 n (oligonucleotides and/or PNA-oligomers) used for detecting the cytosine methylation state in chemically pretreated genomic DNA (Seq. ID No. 1 through Seq. ID No. 536 and sequences complementary thereto and/or a chemically pretreated DNA of genes associated with tumor suppressor genes and oncogenes according to sequences according to table 1). These probes enable diagnosis and/or therapy of genetic and epigenetic parameters of genes associated with tumor suppressor genes and oncogenes. The set of oligomers may also be used for detecting single nucleotide polymorphisms (SNPS) in the chemically pretreated DNA of genes associated with tumor suppressor genes and oncogenes according to one of Seq. ID No. 1 through Seq. ID No. 536 and sequences complementary thereto and/or a chemically pretreated DNA of genes associated with tumor suppressor genes and oncogenes according to sequences according to table 1.

[0035] According to the present invention, it is preferred that an arrangement of different oligonucleotides and/or PNA-oligomers (a so-called “array”) made available by the present invention is present in a manner that it is likewise bound to a solid phase. This array of different oligonucleotide- and/or PNA-oligomer sequences can be characterized in that it is arranged on the solid phase in the form of a rectangular or hexagonal lattice. The solid phase surface is preferably composed of silicon, glass, polystyrene, aluminum, steel, iron, copper, nickel, silver, or gold. However, nitrocellulose as well as plastics such as nylon which can exist in the form of pellets or also as resin matrices are possible as well.

[0036] Therefore, a further subject matter of the present invention is a method for manufacturing an array fixed to a carrier material for analysis in connection with diseases associated with tumor suppressor genes and oncogenes in which method at least one oligomer according to the present invention is coupled to a solid phase. Methods for manufacturing such arrays are known, for example, from U.S. Pat. No. 5,744,305 by means of solid-phase chemistry and photolabile protecting groups.

[0037] A further subject matter of the present invention relates to a DNA chip for the analysis of diseases associated with tumor suppressor genes and oncogenes which contains at least one nucleic acid according to the present invention. DNA chips are known, for example, from U.S. Pat. No. 5,837,832.

[0038] Moreover, a subject matter of the present invention is a kit which may be composed, for example, of a bisulfite-containing reagent, a set of primer oligonucleotides containing at least two oligonucleotides whose sequences in each case correspond or are complementary to an 18 base long segment of the base sequences specified in the appendix (Seq. ID No. 1 through Seq. ID No. 536 and sequences complementary thereto and/or a chemically pretreated DNA of genes associated with tumor suppressor genes and oncogenes according to sequences according to table 1), oligonucleotides and/or PNA-oligomers as well as instructions for carrying out and evaluating the described method. However, a kit along the lines of the present invention can also contain only part of the aforementioned components.

[0039] The present invention also makes available a method for ascertaining genetic and/or epigenetic parameters of genes associated with the cycle cell by analyzing cytosine methylations and single nucleotide polymorphisms, including the following steps:

[0040] In the first step of the method, a genomic DNA sample is chemically treated in such a manner that cytosine bases which are unmethylated at the 5′-position are converted to uracil, thymine, or another base which is dissimilar to cytosine in terms of hybridization behavior. This will be understood as ‘chemical pretreatment’ hereinafter.

[0041] The genomic DNA to be analyzed is preferably obtained form usual sources of DNA such as cells or cell components, for example, cell lines, biopsies, blood, sputum, stool, urine, cerebral-spinal fluid, tissue embedded in paraffin such as tissue from eyes, intestine, kidney, brain, heart, prostate, lung, breast or liver, histologic object slides, or combinations thereof.

[0042] The above described treatment of genomic DNA is preferably carried out with bisulfite (hydrogen sulfite, disulfite) and subsequent alkaline hydrolysis which results in a conversion of non-methylated cytosine nucleobases to uracil or to another base which is dissimilar to cytosine in terms of base pairing behavior.

[0043] Fragments of the chemically pretreated DNA are amplified, using sets of primer oligonucleotides according to the present invention, and a, preferably heat-stable polymerase. Because of statistical and practical considerations, preferably more than ten different fragments having a length of 100-2000 base pairs are amplified. The amplification of several DNA segments can be carried out simultaneously in one and the same reaction vessel. Usually, the amplification is carried out by means of a polymerase chain reaction (PCR).

[0044] In a preferred embodiment of the method, the set of primer oligonucleotides includes at least two olignonucleotides whose sequences are each reverse complementary or identical to an at least 18 base-pair long segment of the base sequences specified in the appendix (Seq. ID No. 1 through Seq. ID No. 536 and sequences complementary thereto and/or a chemically pretreated DNA of genes associated with tumor suppressor genes and oncogenes according to sequences according to table 1). The primer oligonucleotides are preferably characterized in that they do not contain any CpG dinucleotides.

[0045] According to the present invention, it is preferred that at least one primer oligonucleotide is bonded to a solid phase during amplification. The different oligonucleotide and/or PNA-oligomer sequences can be arranged on a plane solid phase in the form of a rectangular or hexagonal lattice, the solid phase surface preferably being composed of silicon, glass, polystyrene, aluminum, steel, iron, copper, nickel, silver, or gold, it being possible for other materials such as nitrocellulose or plastics to be used as well.

[0046] The fragments obtained by means of the amplification can carry a directly or indirectly detectable label. Preferred are labels in the form of fluorescence labels, radionuclides, or detachable molecule fragments having a typical mass which can be detected in a mass spectrometer, it being preferred that the fragments that are produced have a single positive or negative net charge for better detectability in the mass spectrometer. The detection may be carried out and visualized by means of matrix assisted laser desorption/ionization mass spectrometry (MALDI) or using electron spray mass spectrometry (ESI).

[0047] The amplificates obtained in the second step of the method are subsequently hybridized to an array or a set of oligonucleotides and/or PNA probes. In this context, the hybridization takes place in the manner described in the following. The set of probes used during the hybridization is preferably composed of at least 10 oligonucleotides or PNA-oligomers. In the process, the amplificates serve as probes which hybridize to oligonucleotides previously bonded to a solid phase. The non-hybridized fragments are subsequently removed. Said oligonucleotides contain at least one base sequence having a length of 13 nucleotides which is reverse complementary or identical to a segment of the base sequences specified in the appendix, the segment containing at least one CpG dinucleotide. The cytosine of the CpG dinucleotide is the 5th to 9th nucleotide from the 5′-end of the 13-mer. One oligonucleotide exists for each CpG dinucleotide. Said PNA-oligomers contain at least one base sequence having a length of 9 nucleotides which is reverse complementary or identical to a segment of the base sequences specified in the appendix, the segment containing at least one CpG dinucleotide. The cytosine of the CpG dinucleotide is the 4th to 6th nucleotide seen from the 5′-end of the 9-mer. One oligonucleotide exists for each CpG dinucleotide.

[0048] In the fourth step of the method, the non-hybridized amplificates are removed.

[0049] In the final step of the method, the hybridized amplificates are detected. In this context, it is preferred that labels attached to the amplificates are identifiable at each position of the solid phase at which an oligonucleotide sequence is located.

[0050] According to the present invention, it is preferred that the labels of the amplificates are fluorescence labels, radionuclides, or detachable molecule fragments having a typical mass which can be detected in a mass spectrometer. The mass spectrometer is preferred for the detection of the amplificates, fragments of the amplificates or of probes which are complementary to the amplificates, it being possible for the detection to be carried out and visualized by means of matrix assisted laser desorption/ionization mass spectrometry (MALDI) or using electron spray mass spectrometry (ESI).

[0051] The produced fragments may have a single positive or negative net charge for better detectability in the mass spectrometer. The aforementioned method is preferably used for ascertaining genetic and/or epigenetic parameters of genes associated with tumor suppressor genes and oncogenes.

[0052] The oligomers according to the present invention or arrays thereof as well as a kit according to the present invention are intended to be used for the diagnosis and/or therapy of diseases associated with tumor suppressor genes and oncogenes by analyzing methylation patterns of genes associated with tumor suppressor genes and oncogenes. According to the present invention, the method is preferably used for the diagnosis and/or therapy of important genetic and/or epigenetic parameters within genes associated with tumor suppressor genes and oncogenes.

[0053] The method according to the present invention is used, for example, for the diagnosis and/or therapy of solid tumors and cancers

[0054] The nucleic acids according to the present invention of Seq. ID No. 1 through Seq. ID No. 536 and sequences complementary thereto and/or a chemically pretreated DNA of genes associated with tumor suppressor genes and oncogenes according to sequences according to table 1 can be used for the diagnosis and/or therapy of genetic and/or epigenetic parameters of genes associated with tumor suppressor genes and oncogenes.

[0055] The present invention moreover relates to a method for manufacturing a diagnostic agent and/or therapeutic agent for the diagnosis and/or therapy of diseases associated with tumor suppressor genes and oncogenes by analyzing methylation patterns of genes associated with tumor suppressor genes and oncogenes, the diagnostic agent and/or therapeutic agent being characterized in that at least one nucleic acid according to the present invention is used for manufacturing it, possibly together with suitable additives and auxiliary agents.

[0056] A further subject matter of the present invention relates to a diagnostic agent and/or therapeutic agent for diseases associated with tumor suppressor genes and oncogenes by analyzing methylation patterns of genes associated with tumor suppressor genes and oncogenes, the diagnostic agent and/or therapeutic agent containing at least one nucleic acid according to the present invention, possibly together with suitable additives and auxiliary agents.

[0057] The present invention moreover relates to the diagnosis and/or prognosis of events which are disadvantageous to patients or individuals in which important genetic and/or epigenetic parameters within genes associated with tumor suppressor genes and oncogenes said parameters obtained by means of the present invention may be compared to another set of genetic and/or epigenetic parameters, the differences serving as the basis for a diagnosis and/or prognosis of events which are disadvantageous to patients or individuals.

[0058] In the context of the present invention the term “hybridization” is to be understood as a bond of an oligonucleotide to a completely complementary sequence along the lines of the Watson-Crick base pairings in the sample DNA, forming a duplex structure. To be understood by “stringent hybridization conditions” are those conditions in which a hybridization is carried out at 60° C. in 2.5×SSC buffer, followed by several washing steps at 37° C. in a low buffer concentration, and remains stable.

[0059] The term “functional variants” denotes all DNA sequences which are complementary to a DNA sequence, and which hybridize to the reference sequence under stringent conditions and have an activity similar to the corresponding polypeptide according to the present invention.

[0060] In the context of the present invention, “genetic parameters” are mutations and polymorphisms of genes associated with tumor suppressor genes and oncogenes and sequences further required for their regulation. To be designated as mutations are, in particular, insertions, deletions, point mutations, inversions and polymorphisms and, particularly preferred, SNPs (single nucleotide polymorphisms).

[0061] In the context of the present invention, “epigenetic parameters” are, in particular, cytosine methylations and further chemical modifications of DNA bases of genes associated with tumor suppressor genes and oncogenes and sequences further required for their regulation. Further epigenetic parameters include, for example, the acetylation of histones which, however, cannot be directly analyzed using the described method but which, in turn, correlates with the DNA methylation.

[0062] In the following, the present invention will be explained in greater detail on the basis of the sequences and examples with reference to the accompanying figure without being limited thereto.

### FIG. 1

[0063] FIG. 1 shows the hybridisation of fluorescent labelled amplificates to a surface bound olignonucleotide. Sample I being from pilocytic astrocytoma (brain tumor) tissue and sample II being from astrocytoma grade II (brain tumor) tissue. Flourescence at a spot shows hybridisation of the amplificate to the olignonucleotide. Hybridisation to a CG olignonucleotide denotes methylation at the cytosine position being analysed, hybridisation to a TG olignonucleotide denotes no methylation at the cytosine position being analysed.

### Sequence ID Nos 1 to 536

[0064] Sequence ID Nos 1 to 536 show sequences of the chemically pretreated DNA of genes associated with tumor suppressor genes and oncogenes according to the invention. Sequences having odd sequence numbers (e.g., Seq. ID No. 1, 3, 5, . . . ) exhibit in each case sequences of the chemically pretreated genomic DNAs of different genes associated with tumor suppressor genes and oncogenes. Sequences having even sequence numbers (e.g., Seq. ID No. 2, 4, 6, . . . ) exhibit in each case the sequences of the chemically pretreated genomic DNAs of genes associated with tumor suppressor genes and oncogenes which are complementary to the preceeding sequences (e.g., the complementary sequence to Seq. ID No. 1 is Seq. ID No. 2, the complementary sequence to Seq. ID No. 3 is Seq. ID No. 4, etc.).

### Sequence ID Nos 537 to 540

[0065] Sequence ID Nos 537 to 540 show the sequences of oligonucleotides used in Example 1

[0066] The following example relates to a fragment of a gene associated with tumor suppressor genes and oncogenes, in this case, MYC in which a specific CG-position is analyzed for its methylation status.

### EXAMPLE 1

[0067] Methylation Analysis in the Gene MYC Associated with Tumor Suppressor Genes and Oncogenes.

[0068] The following example relates to a fragment of the gene MYC in which a specific CG-position is to be analyzed for methylation.

[0069] In the first step, a genomic sequence is treated using bisulfite (hydrogen sulfite, disulfite) in such a manner that all cytosines which are not methylated at the 5-position of the base are modified in such a manner that a different base is substituted with regard to the base pairing behavior while the cytosines methylated at the 5-position remain unchanged.

[0070] If bisulfite solution is used for the reaction, then an addition takes place at the non-methylated cytosine bases. Moreover, a denaturating reagent or solvent as well as a radical interceptor must be present. A subsequent alkaline hydrolysis then gives rise to the conversion of non-methylated cytosine nucleobases to uracil. The chemically converted DNA (sequence ID 531) is then used for the detection of methylated cytosines. In the second method step, the treated DNA sample is diluted with water or an aqueous solution. Preferably, the DNA is subsequently desulfonated (10-30 min, 90-100° C.) at an alkaline pH value. In the third step of the method, the DNA sample is amplified in a polymerase chain reaction, preferably using a heat-resistant DNA polymerase. In the present case, cytosines of the gene MYC are analyzed. To this end, a defined fragment having a length of 831 bp is amplified with the specific primer oligonucleotides TTTTGTGTGGAGGGTAGTTG (sequence ID 537) and CCCCAAATAAACAAAATAACC (sequence ID 538). This amplificate serves as a sample which hybridizes to an oligonucleotide previously bonded to a solid phase, forming a duplex structure, for example TAAGGATGCGGTTTGTTA (sequence ID 539), the cytosine to be detected being located at position 60 of the amplificate. The detection of the hybridization product is based on Cy3 and Cy5 flourescently labeled primer oligonucleotides which have been used for the amplification. A hybridization reaction of the amplified DNA with the oligonucleotide takes place only if a methylated cytosine was present at this location in the bi sulfite-treated DNA. Thus, the methylation status of the specific cytosine to be analyzed is inferred from the hybridization product.

[0071] In order to verify the methylation status of the position, a sample of the amplificate is further hybridized to another oligonucleotide previously bonded to a solid phase. Said olignonucleotide is identical to the oligonucleotide previously used to analyze the methylation status of the sample, with the exception of the position in question. At the position to be analysed said oligonucleotide comprises a thymine base as opposed to a cytosine base i.e. sequence TAAGGATGTGGTTTGTTA (sequence ID 540). Therefore, the hybridisation reaction only takes place if an unmethylated cytosine was present at the position to be analysed.

[0072] The analysis was carried out on two tissue samples, Sample 1 from a pilocytic astrocytoma (brain tumor), and Sample 2 from an astrocytoma grade II (brain tumor). From the results (FIG. 1) it can be seen that Sample 1 was unmethylated at position 60 of the amplificate whereas Sample 2 contained a mixture of both methylated and unmethylated cells at the same position.

### EXAMPLE 2

[0073] Diagnosis of Diseases Associated with Tumor Suppressor Genes and Oncogenes

[0074] In order to relate the methylation patterns to one of the diseases associated with tumor suppressor genes and oncogenes, it is initially required to analyze the DNA methylation patterns of a group of diseased and of a group of healthy patients. These analyses are carried out, for example, analogously to example 1. The results obtained in this manner are stored in a data base and the CpG dinucleotides which are methylated differently between the two groups are identified. This can be carried out by determining individual CpG methylation rates as can be done, for example, in a relatively imprecise manner, by sequencing or else, in a very precise manner, by a methylation-sensitive “primer extension reaction”. It is also possible for the entire methylation status to be analyzed simultaneously, and for the patterns to be compared, for example, by clustering analyses which can be carried out, for example, by a computer.

[0075] Subsequently, it is possible to allocate the examined patients to a specific therapy group and to treat these patients selectively with an individualized therapy.

[0076] Example 2 can be carried out, for example, for the following diseases: Solid tumors and cancers.

TABLE 1
Listing of preferred genes associated with tumor suppressor genes and
oncogenes according to the invention.

| | Database entry No. (GenBank, internet address |
|---|---|
| Gene | www.ncbi.nlm.nih.gov) |
| BRCA2 | (U43746), |
| E2F1 | (M96577), |
| ELE1 | (X71413), |
| MN/CA9 | (Z54349), |
| PVT1 | (M26714), |
| SAC2 | (AK001725), |
| TEM8 | (AK025429), |
| TM4SF1 | (X01394), |
| TNFSF11 | (AF053712), |
| AXL | (NM_021913 & NM_001699), |
| CCND3 | (NM_001760), |
| CSF1R | (NM_005211), |
| MGMT | (NM_002412), |
| NOV | (NM_002514), |
| SFRS8 | (NM_004592), |
| TNFRSF6 | (NM_000043), |
| TPD52 | (NM_005079), |
| AKT1 | (NM_005163), |
| BCL2 | (NM_000633 & NM_000657), |
| CBL | (NM_005188), |
| CBLC | (NM_012116), |
| CRK | (NM_005206 & NM_016823), |
| DCC | (NM_005215), |
| EPHA1 | (NM_005232), |
| EPHA3 | (NM_005233), |
| ETS1 | (NM_005238), |
| ETV5 | (NM_004454), |
| ETV6 | (NM_001987), |
| FGF3 | (NM_005247), |
| FGF4 | (NM_002007), |
| FHIT | (NM_002012), |
| GLTSCR1 | (NM_015711), |
| GPS1 | (NM_004127), |
| GROS1 | (NM_022356), |
| HIC1 | (NM_006497), |
| IGFBP7 | (NM_001553), |
| KISS1 | (NM_002256), |
| KRAS2 | (NM_004985), |
| LATS1 | (NM_004690), |
| LOC51213 | (NM_016383), |
| MUC1 | (NM_002456), |
| MUC2 | (NM_002457), |
| N33 | (NM_006765), |
| PTTG1IP | (NM_004339), |
| SE20-4 | (NM_022117), |
| SE70-2 | (NM_022118), |
| SFN | (NM_006142), |
| ST7 | (NM_013437), |
| SUPT3H | (NM_003599), |
| SUPT6H | (NM_003170), |
| TEM1 | (NM_020404), |
| TERT | (NM_003219), |
| THRB | NM_000461), |
| TIMP2 | (NM_003255), |
| TMEFF1 | (NM_003692), |
| TNFAIP6 | (NM_007115), |
| TNFRSF10A | (NM_003844), |
| TNFRSF10B | (NM_003842), |
| TNFRSF10C | (NM_003841), |
| TNFRSF11A | (NM_003840), |
| TNFRSF1A | (NM_001065), |
| TNFSF12 | (NM_003809), |
| TNFSF13 | (NM_003808), |
| TNFSF15 | (NM_005118), |
| TNFSF18 | (NM_005092), |
| TP63 | (NM_003722), |
| TSSC1 | (NM_003310), |
| VDR | (NM_000376), |
| YES1 | (NM_005433), |
| FOXG1A | (NM_004471), |
| GRF2 | (NM_005312), |
| HSPC070 | (NM_014160), |
| RAB3A | (NM_002866), |
| RAB5A | (NM_004162), |
| APC | (NM_000038), |
| BMI1 | (NM_005180), |
| CHES1 | (NM_005197), |
| SMT3H1 | (NM_006936), |
| TIAM1 | (NM_003253), |
| VAV1 | (NM_005428), |
| MCF2 | (NM_005369), |
| MSH2 | (NM_000251), |
| ERBB4 | (NM_005235), |
| FOXG1B | (NM_005249), |
| TACSTD1 | (NM_002354), |
| TRA1 | (NM_003299), |
| FOXG1B | (NM_005249), |
| TACSTD1 | (NM_002354), |
| FLI1 | (NM_002017) |

The application's sequence listing, which the Patent Office published only in electronic form, follows.

SEQUENCE LISTING (540 sequences)

SEQ ID NO: 1 - DNA, 18183 bp, Artificial Sequence
  chemically treated genomic DNA (Homo sapiens)
tattgtttgagttttaattatgttatgtatattattttgattaaaaagaaaaattaatttaaaaaaatgagtatattaatattattaattttttttttttagagaaaaatgtttaatagttaggtttagatttgttaattataaaaatatagtagttttattgtaatgagattttttagaaagcggatttattttaaggtagtttagatttggtttttagttgagaattatagtttggaaatattaatagaaaaattagtgttatttgaaggatagttatttgtgtagtttgtgtatgaaattatgggtttgaattaggtttttatttaagatgcgggggtgtggggtttgtgttttgttgaagttgtggttgtaaatttttgttttaggatgaaaggtggggttttttgttatatttgaattttagttgttatttttattttatagttagtgtttttttttttttataaaataaattgattttttggttttttggaaaatttttagattgttttttggaattatttttatatagtatgtttgttaatttgagtttttgattgagttttagtgagatgtaggtaggaatatagatttgatatagaaatagtttttttttggaaataataatagttattgtttatcgagtattttttgtgttttgggtattttttttatatgatttttaatttttataataattttgtgagataattatttttatgattattttttattttttagatgagaaaattgaggttttgagaggtgaagtcgttgtttatggttttttagtgagtggtagatttgagatttagcgttagtttttgtgatatataattcgtgattagtaggtagtgttattcgattgaaaaaatgtgagatttaaagggatgtatgtgtttttatatagtggtaaaaattggtatgatagaaatgatgttttaagttatgttattttttagttggatatatattggatttatagagttagagtatttggtaggtttttgttggataatgtttgttgaattagagaaagtgggttttgttggtatttgtatgtgaaatattgtgtatatattttaagatttttgttgttttttttttaaagttattagttatgttggaaatagtgaaggggttagttagatttggggttattttgttttggggttttaagttaggttttttgttaggtttatttgtttttgttttatttgtatttatatttagttttgttgttgagagatggagtatttatattttgaattttgttttttttttttgatatatttttatggtgggtgtttgtttaatttttttttaataggattaaattttaaattaaaaaaaaaatttagttttttttttttaattatttaagaagagtttttttttggtaatttgttttagaattatgtttattttaaatttagaaattgtttttaaatgaattaaattttagaaatatttatttttgttcgttttatttttagtgaaaataagtaattttttttttttttaaaatagtggattttttttttttttttttttttttgaaatgtagttttgttttgttgtttaggttggagtgtagtggtgtaattttggtatattgtaatttttattttttaggtttaagcgatttttttgttttagtttttcgagtagttgggattataggtgtgtattattatgtttggttaatttttgtatttttagtagagataggatttttttatgttggttaggttggtttttaatttttgattttaggtgatcgtttattttagttttttaaagtgttgggattataggcgtgagttattgtgtttggtttttaaatagtggatttttattttatatatgtatatagattatttgggagttttagatttagtttattgtatatattttgattttagattagaaattaagatttcgtattttaagtaagttttatattatttaaaatagattgtttatggattatgtttttagaaatattgtttagattttatgttttaatgttggggagtttattttttttttttaaatattttttttttttttgagatggagtttcgttttgttgtttaggttggagtgtggtggtgcgattattgtttattgtattttttattttttaggtttaagtaattttttgttttagtttttcgagtagttgggattatagatgttcgttattacgtttagttaatttttttgtatttttagtagagatggggttttattattttaaaaaaaaaaaaaaaattttaaatagttttagttttttgaattatttttttttaagatatgtttttttaatagttaatgttatttattttattttttgattttatttatattatttattttttatttaaattggaaattttttgttattttataaagtttaagatttttttatttttttattttttggttgtgtgaatttggatagaatatttttttttttttttttagttagtttttttatttgtgaaatggaattaaattatataaaattattaggttattgtgaggtttaagagtgtttggtatatattatatgtatattaaaaatgtatttttttttaaattaatgtaatatagtaaataagttagtttatagtttttaatttttttttttttttttttttttttagttaatagtttttgggttttaggttgattagaaggaattttttttggggtgtttttttggtaagaagattgaagtttttttttatttgtttgtaatagaatgtttttcgtattttttaaaagcgttaaaagttggatatggaaagtataggttaggtttgatatagaagtgtagtttggtagtttttttagtatttattgttattaatttagtattttgttagatttgttgatgtacggttttataattaaaattaaaaagatttgggtatagtttataagtattatttattttaagaggatttaagaggataagattattttagattcgagtagaatattagtaataataattagtttaaaaaaataaatatatattaatataaagaatagtataaggtaagtaaatatttgggtttatattaatagacggtatttaaggatatggttagaatttttaaaatgtttaataatgtgtaatttttggtattaagtcgttaatttgaatatggttttttaatatgaaatgttatataatgatagattttattatagtttgatttaaggtttttgaattttttaaaagggtaataaaatagatagatattgtatttttttattagttggtattggtggtatttttttgagtgttatttttggtattacgtgtagaggttgatagatttaagataatattaaatatgttagtagttattatacgtaggttgtttagtagaatgatagcgttttttagattttagaaagtatttagagttattgtatttattttttgggggttttgtagttttgtatttttagatgatgggagttgtaaatttttttgatggtgtttttttggatgtttatgaggtttgatttggtattacgattttagtagtaggtttatttaatggtagtaaaaatatatgttgtatgttgattagaatttggtaggatatatgtggaaagttaatgatattttggtcgagaatttttgtgatatatattggttatattttgtttaattggagtttttatgtgttgtttttggtagagttaagtgaagattttgttatttagttatttttgaggtattgaagatattcgggtttttgttattataggataggttagaaagtagttagggttttataattaaggttttttttgaaatatataatgataatgttagttatttgattaaagatatttaatgttttaatttatttggaatttatttttgatgtgaagggttagtattatttattggtcgggagtttgatttttggagttaggtagatttgggttgagtttattttcgtttgtttttagttgtgggtaaggtgtttgatttttttgagtatttgtggggtttgtttgtttttaaatttgaagaattgggataatttgtttttttatagaattattacgtagatgtaatatagttaatgaaggtaatatggtatataggaagagtataatatacgttagtttttattttttatggttagaagatgtggattaaatttttttttttatagttttgtgattaatattatttatgaaagaaataaatgaaataaatttttttttttgttatgaggggaatttatttgattttattgaattatttggtgttattgagttttttattgtttttttttgatttagatttttgggtgtgcgttagtaatacgattgtgattgttgttgttttataatattgtttgtggttagtttaaataagagtttaaaataattgaatgaaatggattttaaataatggtttttttatttttatttcgtggtattcggttaaaggaagaggaaaagttttttgttaaagaaaatgaattagagaagaggtttagatcgtgttttcgaaaatttttattgtagggattaagtttttttattttgaatttatattcgtttgttcgtagttttattttatattttggtttggatgtgcggttttatcggggtgtcgtgcgtacgtgtggttgttttgtgggtgttagttttgattttttttttagatatttattgttttagttttaattataggacgcgcgttgagtagaaatgagattagttagtattggtaattgtagaggaatttgtatttttattagcgttttcgggttagagggtttgtttggtatcgcgtattgggaaattcgttaaaagcggtgtaggttggagacgttttaggtcgcggtggagttgcgcgcggtttttaaagtggagtggagtaggtttgtatttttttcgtcggggttgggacggcgtttttaggcggagaaagattttcgcgggtcgcgcgcggttttttttttgcgaggatcgttattggttcgggttggttttggaaagcggcggtggttttgggtcgggttcggtttcgggaacgttaggggtttttgggtgcggacgggcgcggttaggagggggttaaggcgtaggcggcggcggggcgggggcgggtttggcgggcgtttttttcgggttttttgttaataggcgcgtttcggttaggcggagacgcggtcgcggttatgggcgggcgcgggcgcgcggggcggcggtgagggcggttggcggggtcgggggcgtcgggggggcgcgcgggtcgagtcgggtttgagtcgggttcgcggatcgagttgggagaggggtttcggttttcgacgtgttggcgcgggaaaatgttggagatttgtttgaagttggtgggttgtaaatttaagaaggggttgttttcgttttttagttgttatttggaaggtaagttcgggtcgtacgggttgggttgagtagtcgcgcgttttttcgttgttgttgggttttttttaggtttcgtcgttcgcgcgttttcgtttgcgtttttttcgggttttgttttttttttttttttttttttttttttttttttttttttagtttttttatattttgtttttttttttttttttttgtgtttgttttttttttttttttttgtttttttttttttttttttttttgtttttttttttttttcgcgatggtttttaggcgtcgtcggcggagcgtggtttttagtttcggtattagtttcggtagagttacgtcggatggtgacggcggcgttcgggattttatagtgcgggttttttcgaaaaagtttgagaaagttaattcgttaggttttaatatttttgggattttacgttgtggaatttttatcgttaattgggattgtgtgttaaaaagatcgattcgtgtttgtgaaaatatgcgatttttattaagtattatgtatataaggagtattattttattatttatggatatagaattttaagtgatttttttattttttttatttttattttatttatagattacgaagaggttttaggaattcgttttttttttaggggaggggagtttatttaagaaggcgtttttaaggagttttttagagtattggggtgttatgttcgtttttttaagtgaagtttagggttaggagggttttatttttgcgttttttttatttattttttttttttaattatatttgttttattttattttttttttttgttgtagtttttagttttataaatggaaaaaaagtaaattaagggttatgggtttttattttcgtagtttttaggtgggtatgaaattgatttgatttgagattggtgtttttagattattgtttttagtagaaaggttatttgtgttttagagatggagttgtatttggatttttttgttgtttttaattaagaatataagagtaaaaatgtggtcgggcgcggtggtttaagtttgtaattttaatattttgggaggtcgagacgggtggattatttgaggttaggatttcgagattagtttggttaatatggtgaaattttatttttattaaaaatataaaaaattagtcgggcgtggtggtatacgtttgtaattttagttattcgggaggttgaggtaggagaattgtttgaattcggtagggggaggttgtagtgagttaagatcgcgttattgtattttagtttgggcgatatagtaagattcggttttaaaaaaaaaaaaaaaaaaaaaagagtagaaagaaatgtgaagtttattttagattaagtaggatttttgttagaatgttatgtttttttttttaaaaaagtaggagaaataaataggttttatttattttttaatttatttttttttttttaatttttgattttattttgaaggtttgtttggagttatatatgtagatcgtattagtgatgtgggtgaaatttgtttgttttttttgttatagtttgtgtattttattttttttttgtttttgggattttagggggttgaatggtttagagaaggtttatttaggtggagtgggtttatagagtttagtatttggagggtggagattgtttatttgtttttaaaagttgatgtttgagtattttaaattatttttaattaatatatcgtttattttttttaagttgtttaaaattttgagtatatttttatttatatttgtatcgagttagtgttaggtattattatttttattttgtagatgggtgtttaaggcggggatgaatggatttttgtaagtgtagagttggagtaaagtttaggttatagttttgttaagttattgttttgtttttttgggagtaaatcggagatttagtatggatttggttggtttaattattgttttgggaaaaaaatttaaaatttattttaatatgttttgaaatgaattataatgttgattttaaagttttaaaaaaaaaaaaaagttttagtatagtagattgttttgggttaaatttttttttaggaaggtgttattttaggaatttttttttattgagttttttttttttcgttgttatagttaattagagaaagtaaatggaattattattttgtagttggtagattttaataagttttagcgatagttttttaaagattggaagtgttatttgttttttgggaaaaatagtttttaatatttggatgagtaatttaggttttttatttttattgatagtttaaattagttaattagtgtcgattagttagttagtgtttattgacgtttatttagggttttaggtattttttgttagggagagaattgaatgagattaagttttttattgttttattaaagaagtttttattataaatgtggtttgatggtgtatgttatttgttatttagtttagttgttaaagtaatattggtaaatataaagatggttagtaattattaaatgtttattatgtgttaaatattgttttattattttatgtgatttgatatagttatattttatgatagtattatgattatttttattttatagatgaggaaattgagttattaaaaggttaggtaatttgtttagggttatagagttagtgagtgggggtattggaatttgaatttatgttatttggtttgggagagtttatttttagttattggatgttttattgatgttttttttggaatttattgtgatttttaaaatggtatttttagaaatttttttaattaatttttgaaatgtaagggtagttttttttttttttttagaaatttgattttggtaaaatgattagttttaatagtaggattaattttttttaaatgtatataaaaatatttgtatgtaagaaattttaaaagggtatttagtgaaaagtaatttttttttttatttattttttttatttagaggtaattattttggagttttatgtgtgtttttttagaaatattgtgtgtatatataagtatttattataatatgtgaattttgttttttagttttttgtgaatatgtatgtttatagtagtatttatttattaggatcgtatttagttttgtaatattcggtttattttgaatattgaattttttgattattttttttttttggagacgttaaagaaaatatgaatattagttttttgaatttagggttttttttttattttatttttatttgtttatgtgtttgtatttatatatattgtgtttgaatattgtatatgtatgtgatagttgtgtattgtagaattaaaaattaatgtttgtgaattgaattttttttgaattttttgttgttgttgttattgttgtttttggagatagggttttgttttgttatttaggttggattgtagtggtataattatagtttattgtagttttgagtttttggttttaagtaatttttttattttagttttttaagtagttggggttgtaggtatatgttatttgattaattaaaattttttttttttttttgtagagatagggttttattatttttattagtttgttcgggttaagttagtgttgaattattggttttaagtgatttttttattttggtttttttaaagtgtatttttataggtatgagttattgtatttagtttgaattttcgaaatttattttaagggtttatttttaaatgtttttttttagtagttaattttttagcggatgttttatgtggtgttagttatatagatacgtttttagaatttgagttttggagaagtttatgtttgttttttgtttttttttgaggttattagatattttttttgtttagtaataaagaaagtgagattttttttgttatttaataaaaggttagtttgtttattttattttgggtgttattaatattgttgattatttataatgttataggttttggtattgagtatattatgtgtagttttatttaatttttatattagtgttttgaggtttttagaaaagaggaagggttttagtttaggtggtagtattttttaatttggaggtaggagattttagtttttttttgatttttttgagttttcgtgtttttatttttaagatagagagattaatttttgtttagttattttagaggattgttttgagggtttataagatgattgagggaaagttttgaaattggtaagagttaaatgtatgtttgtgttatgttgatacgagatttttttgagatgttttttagtttaggtaggtttatggtttatatagcgtttttagggttttatttttttgtataggtaggtagttttcgagttagttagtttggatttaaatgttatttgtgtttttggttggttttgcgtatttatcgaggtttattgtattttggtgtttttatttttaaaataaggtttgtagtaatttttattttattgagttgttgagagattttatgtaaattgtttagtagggagtttggtatagaataagagtttagtagaaaagtaagttgttgttattttaagtaaatatttagtagtttaaaatggtggttttattagtttttgtaatggttgaagtgatgatagaatttagttaattttatttatagttttttttgttaataaagtagtttgtttttaagtgtgttttgatgcgtataattaatattttttgtttttgatttttggttgaaaaatgttttttttttttcgtattttttgttattttcgtagtgaatatttttattgtggaagagaaatttttattggtttatggttggtattttattttttttgtttagagataatatttttatagttttaaacgtgaaaattgaaaatttggtgttatttattattttgtaaaattaagttattgtaattgtgttagtataattattgatttgaaataaaagtagaaaataaattaatgggtagtttttttaaatatataagaattaaagattaaatgggatattggaagattttaattttttttttataatggtggattttaattaaatatatagaagaataatttataaaataaatttataggtttgtttgtttttttttagtgttaatttttaaaattattttttttttaattaaaaaaaatagagatgggttttattatgtcgtttaggttggttttaaatttttgggtttaagtaatttttttattttagttttttaaagtgttgggattataggtatgagttattgtatttagtttaaaattgttttaaaagtagatagtataatgaatttttatgtatttatgatgtggttttaataattattagtttatagttagttttgtttttttatataataaagttatagttttaaagttattaggaagaatagtttgttaattataattatttagttttgatagtgtaattttgtttttagatgggtagaatcgttattttggaataggggtgtttaattttggtttttttgggttatattgggagaaaaattgttttgggttatacgtaaaatatattaacgatagttgatgagttaaattaataaaataaattttataaaaattttatttttttttttttttgagataagagttttattttgtcgtttagattggagtgtagttgtacgattttagtttattgtaagtttcgttttttgggtttacgttatttttttgttttagtttttttagtagagggtattataggcgttcgggggttttattatgttagttaggatggtttttattttttgatttcgtgattcgtttatttcggttttttaaagttttgggattataggcgtgagttattgtatcgggttaaaaattttataatgtttttaagaaagtttgtaaatttgttaggttatatttaaagtcgttttgggttatatgtagttcgtgggttatgggttgaataagtttgttttagaaattggtttttaggtcgggcgcggtggttgacgtttgtaattttagtattttgggaggtcgaggtaggtggttatttgaggttaggagttcgagattagtttggttaatatgttgaaattttgtttttattaaaaatataaaaaattagttaggcgtagtggggagtgtttgtaattttagtattttgggaggttgaggtgagtagattatttgagattaggagtttaagattagtttggttaatatggtaaaatttcgtttttattgaaaatgaaaaaaaaaaaaaaaaaaaaaatttagttaggcgtagtggtttatatttgtaattttagttatttaggaggttgaggtaggagaattacgtgaatttgggagttggaggttgtagtgagtttagatcgtattattgtattttagtttgggcgatggagtgagattttaatttaaaaaaaaaaaaaaaaaaattttaattggtttttattaaagtttttttatgtttgttattgttttttagtaataataataatttatattttttgtgagaaatatattataatatagagaagtataaagaaaatgtaaggttagatacggtggtttacgtcgataattttagtattttgggaggttgaggtaggtttattatttgaggttaggagttcgaaattagtttggttaatatggtgaaattttatttttattaaaaatataaaaaaagtagtcgagtgtggtggcgggtatttgtaattttagttatttaggaggttgaggtaggagaattgtttgaattcggaaggtgaaggttgtagtgagtagagattacgttattgtattttagtttgagtgttaagaacgagatttcgtttcgagaaaaaaaaaaaagaaaagtaaatttaaagtatttaaaattttattattttgagttaattattgtttatagtttggtgaaattttttttcgttttttatttttttatagttgggattatgtttatatattggaatgtaatataaatatttaatatattattgcgagtatatttttaaatttaaatattttttttaaaaatattttgagtggtttttaaaatatattttattttatgtatgtagtataaattaatttattttgtgttgatagatattttgtatttgtttttttttgtgttgttgtttaaaattagtgtatagaaataattgtgttgattatttaggataaatttttagaggtaaattagatattaaattttttatagatttttggtttatattttagttgtttttaatttatatatttattattagtattgtatgagagtgttcgtttttttgaaattttatttatattggttgttagcgttaaaaagatgtatttgtagatttggtaaggaatttgtattttagtgattattattaagcgtttatatattttttatgtttaatggtaattttttttgtttttttttgagacgatgttttattttgttgtttaggtagagtgtagtgtcgcgattttggtttattgtaatttttgttttttaggtttaggtgatttttttgttttaattttttagtagtttggattataggtatgcgttattatgttcggttaatttgtgtatttttagtagagacggggttttattatattggttaggttagttttaaatttttgattttaagtgattgttcgttttggtttttcgaagtggtgggattataggtgtgagttatcgtatttggtttttaatgataatgtaaattttttgtgaattgtttattcgtggttttgttttattttttttatagtggagggattttttttttttttgttggtatgtaaagtttttgtgtgttaagaatgttttgttttatagtttttttaatataatgatagtggaagttcgtaattggtttttatttgattgatttgttaaattgatcggtattttttatttttttataaaatatgtttttatagtttttgtgttttatggtatatgggatggggtagttatattattattgtttgttgttgtatatgtttttgtttataagagttagttatgtttgtttttaagtttggtttttttagatatagttgttgttgtaattatttggttgatatgaaattaatgaaatgtaagtgtgaaaagagaattgtttttaggaaaattaagatgaatgttttagaaagatttagtaaaggaagataaatttaataaattattatagaattaggtgtaagataatagtaaatgattggaatgaattatagaaatttagaaagttttgatagtgggaatgcgtagtgaatggttttaagttttttttttatttgtaggaaattgaagttggaagtgagatgatatatttattatagggaggatttatagaagaaaatattaagttttaattatatgtttatatttcgttttgtttatttattttttgaaatggagttttattttgttgtttaggttggagtgtagtggtatgattttagtttattataatttttgttttttgtgtttaagcgattttcgtgttttagtattttgagtagttggggttataggtgtgtattattacgtttaattaatttttatatttttagtagagacggggtttcgttatgttggttagtatggttttaaatttttgattttaggtgatttgtttgtttcggttttttaaagtgttgggataataggtatgagttatcgtatttagttttatatatttatattttaaaggatagtttttggttttatagttaagattattaaattaatgtatattaaatgggggtggggattacgttgttgttttttgtttgtttttgtttgtttgtttgtttgtttgtttttttgagagagtttcgttttgttatttaggttggagtatagtggcgtgatttcggttttttgtaagtttcgtttttcgggtttacgttatttttttgttttagtttttcgagtagttgggattataggtgttcgttattacgtttagttaatttttttgtatttttagtagagacggggttttatcgtgttagttaggatggtttcgattttttgatttcggggattatatattttaataaaattgataatttttaatagtgatggcgttaggtgtatttttagagttaatgtaaatagtcgagaaagggggttaaatatatgattaagttttttttatattttaggagatgttagtattgtaagattttgttttttgaaattatttttgtttttcgttatttagaaaaattattaaatattgtaataatgtaatttaggatttatttttttagagaaatagtttttgaaggttgattttagttagtagtatagaagcgagatttgaagttttttatggtttatgttttgttggtttattttaaagagatgttttagagtatatttatttttgaaagttttcggttatgttttcggaagtttgattaggtgggttttttttttttttttaaaagataattttttttttaaagataatttagaattagttttatttttgagatggtattattatttaggaaagaatgcgtgaggattttttaaatttatagagaaggaaaattaaaataattttgttattatttgtttggtttaagtatttggtagattttttagttttttttaaattagaattttttttttttttttttttttttttttttttttgagatggagttttattttattttttaggttggagtatagtggtataatttcggtttattgtagttttatttttcgggtttaggtaatttttcggttttagttttttgagtagttgggattataggtattcgttattaatttttatatttttgtttggttaatttttgtgtttttagtagagatggggttttgttatgttggttaggttggtttcgaatttttgattttaggtgatttgtttattttagttttttaaaatgttgggattataggggtgagtttttacgtcgggtttttttttttaagataataaaaattattaaatattataatgatatgatttgggattatttttttagagaaatagtttttaaaggtttattttagttagtgatttttatttttattatttatttattttttgagatggagttttattttgtttgttaggttagagtgtagagacgagattttagtttattgtaattttcgttttttagatttaagcgatttttttattttagttttttgagtagttgggattagtagttggaattataggcgttcgttattatgttcggttagttttttttattttagtagtgacggggttttatcgtgttgtttaggttggttttgaatttttgagtttaggtttaggtaatttgtttgttttagttttttaatgttttagggttataggtatgagttattgtgtttggtttagttagtgatttttaaattgtagttttttaaatgagtattttggattttattttataatgttttttaattgtaagatttatttgaggttatttgatttgttggtttgtaagaattcgtttatacgttgtttttattataaagaaattttggagtatttgagttttgtttaaaaaaaaaaggtaagaagaaattttaggaataaataatttatttgattttgtaatgaataatatttatatattttttaatttaagagttgttgattgatttttaatttttagaatttgttttagataaaatatggaagtttagtaatagttttttttattttgtaataataattgttataaggttaaaaaaaaaaatttatagaagaatatatttgagggtggtcgtgggggtaagaaagttggaaggacgggtggggtgtgttaatagttttgttttgtgaagtaagtttttagagacgttgttttagttggaagaataggtagtgaaggtgtgcgtttgttacggagaataggattttagtgatttagttggtatttagagaggtgggggtgattattaaaaaaatagttttgtttttgggagcggagaggattgggatagaaagtatttgttttttattttaagtttttttgtacgatttgattttttttttttttttttttttttttttttgagatggagttttattttgttatttaggttggagtatagtggtacgattttggtttattgtaattttcgttttttaggtttaagtaatttttttgttttagttttttaagtagttgggattataggtatttgttattatgttcggttgatttttgtatttgtagtaaagataggattttattgtgttggttaggttggttttgaatttttgattttatgatttattttcggtttttttttttgatacggagtttttcgttatttaggttggagtgtagtggcgtaatttttgtttattgagatttttattttttgggtttaagcgatttttttgttttagttttttgagtagttgggattataggtgtgcgttattatgttcggttaatttttgtatgtttaatggagatagggttttattatgttggttaagttggttttaaatttttgaatttaggtgatttatttattttggttttttaaagtgttgggattacgggcgtgagttattatgttcggttaaagtaagaaatttttattgtatattttaagtaaaggtaaatgtatatgtggatagattgttttaatttgattaaagttatattgaatttatgaattttagaagtttaaattattggggaataataattattattttggagtgaaaatatttaatttttataagatttagtaaaggaagagttttttaaaaattattttaatgataatagtatgtatagatgttaagaaatgaaataggaatgtgtaatgttggaaatataaatatttttgtttttgagaataaaattaatttttttttttaatttttttttttttttttttttttttgttttttttttttttttttagaagttttttagcggttagtagtatttgattttgagttttagggtttgagtgaagtcgttcgttggaattttaaggaaaattttttcgttggatttagtgaaaatgattttaattttttcgttgtattgtatgattttgtggttagtggagataatattttaagtataattaaaggtaaaagggttgtgggtagttagtggtggttgtaggagatagaaatttgggaattgcggtttgatttattattttttgttcgttaaaggagtagttttgaaatttggattgtagggatatttaaaataataattgtatgtttttaagggagtcgattttttttagaggagtttttgtataatagttttgggtaaaaatagaatttgttttattttttatattgaaaaggatagttggataaaatattgaacgtaattttttttttaagaaaaagtattatttttttaaaatgttttatattaggaatagagtatttgaataaatataattgatttataaaaattgaggttatatatttatttatttgtttagtataaataggaagttttaaatgtaaacgtgaatttttatatatttataaatgtatatttttatgtggatttgttaaaatgaaattggtatttaggaatttggagatttttagtagttatataagaattaatgaaaaagaacgaagttggtttttaaagttgatatgtttgatttggtttttttttttttagg

SEQ ID NO: 2 - DNA, 18183 bp, Artificial Sequence
  chemically treated genomic DNA (Homo sapiens)
tttgagaagaaaggaattaaattagatatattagttttggaaattagtttcgtttttttttattgatttttgtgtaattattaaaaatttttaaatttttaaatattaattttattttaataagtttatataaagatatgtatttataagtgtatgagaatttacgtttatatttgaagttttttgtttgtattgaatagataggtaagtgtatagttttagtttttataaattaattatgtttatttaagtgttttgtttttaatataagatattttagggaaataatgtttttttttaggggaaaaattgcgtttagtattttgtttagttgttttttttagtataaaaaatagggtaagttttgtttttgtttagggttattgtataagaatttttttaaggagagtcgatttttttagaaatatgtagttgttgttttggatatttttgtagtttagattttaaagttgtttttttaacgagtaaagggtggtaggttaaatcgtaatttttagatttttattttttgtaattattattagttgtttataatttttttatttttagttatgtttagagtgttatttttattggttataaaattatatagtgtaacgaaaaggttggggttatttttattgggtttagcgagaaggttttttttggagttttaacgagcggttttatttagattttgaggtttaaagttagatgttattggtcgttgaagggtttttggaagagaaaggggggaatagaaaaaagaaaaaggaagagaaaattgggagaaaaaattagttttatttttagaagtaaaaatatttgtgtttttaatattatatatttttattttattttttaatatttgtatatattattattattaaggtggtttttaaaaaattttttttttattaaattttgtggaaattaagtatttttattttaaggtggtaattattgttttttaatagtttgagtttttaaaatttatggatttaatatgattttagttaaattaaaatagtttatttatatatgtatttgtttttgtttaaaatatgtaatgaaaattttttgttttagtcgggtatggtggtttacgttcgtaattttagtattttgggaggttaaggtgggtggattatttgagtttaggagtttgagattaatttgattaatatggtgaaattttgtttttattagatatataaaaattagtcgggtatggtgacgtatatttgtagttttagttatttaggaggttgaggtaggagaatcgtttgaatttaggaggtggaggttttagtgagtagagattgcgttattgtattttagtttgggtaacgagaaatttcgtgttaaaaaaaaaagtcgggggtggattatgaggttaggagtttaagattaatttgattaatatagtgaaattttgtttttattataaatataaaaattagtcgggtatggtggtaggtgtttgtagttttagttatttgggaggttgaggtaggagaattgtttgaatttgggaggcggaggttgtagtgagttaagatcgtgttattgtattttagtttgggtgatagagtgagattttattttaaaaaaaaaaaaaaaaaaaaaaaagaaaagttaaatcgtatagaagggtttaaaatgaaagataaatattttttattttagtttttttcgtttttagaggtagagttgtttttttggtgattatttttatttttttaagtattagttagattattggagttttatttttcgtaatagacgtatatttttattgtttgtttttttaattaggatagcgtttttgaggatttattttataagataaggttattaatatattttattcgtttttttagtttttttgtttttacgattatttttaaatatgtttttttgtaaatttttttttttaattttgtggtaattattattatagaatagaaaaaattgttattaaatttttatgttttgtttgaaatagattttaaaagttggaaattaattaatagtttttaaattagaaaatgtgtgaatattatttattatagggttaaataggttatttgtttttgaagtttttttttgttttttttttttgaatagggtttaaatgttttagaatttttttgtgataaagataacgtgtagacgagtttttgtaaattagtaaattaaataattttaagtagattttatagttgaagaatattgtggagtgaaatttaaaatatttatttaaggaattataatttaaaaattattaattgggttaggtatagtagtttatgtttgtaattttagaatattgggaggttgaggtaggtagattgtttgagtttgagtttaggagtttaaaattaatttgggtaatacggtgaaatttcgttattattaaaatagaaaaaattagtcgggtatggtggcgggcgtttgtagttttagttattagttttagttatttaggaggttgaggtaggagaatcgtttgagtttgggaggcggaggttgtagtgagttgagatttcgtttttgtattttagtttggtagatagagtgagattttattttaaaaaataaataaataataaaaataaaaattattaattgaagtaaatttttaggaattgtttttttgaaagagtaattttaaattatgttattatgatgtttagtaatttttattattttaaaaagagaggttcggcgtggaggtttatttttgtaattttagtattttgggaggttgaggtgggtagattatttgaggttaggagttcgagattagtttggttaatatggtaaaattttatttttattaaaaatataaaaattagttaggtaaaaatatgaaaattagtggcgggtatttgtaattttagttatttaggagattgaggtcggagaattgtttgaattcgggaggtgaggttgtagtgagtcgagattgtgttattgtattttagtttgggaaatggagtaagattttattttaaaaaaaaaaaaaaaaaagaaaaagagaggaaaattttaatttgaaaagaattgaaggatttattagatgtttgagttaaataaatggtaataaaattgttttagttttttttttttatggatttagaggatttttacgtatttttttttgggtaataatattattttaggggtgggattgattttgaattatttttaaaaaaaaaattattttttaaaaaaagaaaaagaatttatttgattaaattttcggaaatatgatcgagaatttttagaaatgaatgtgttttaaaatatttttttgggataaattaatagaatataaattatgaagagttttaagtttcgtttttgtattattaattgaagttaatttttaggaattgtttttttgaaagggtaagttttaaattatattattataatatttggtaatttttttgaatggcggggggtaaagataattttaaggaataggattttgtaatattgatattttttagagtgtagaagaagtttagttatatgtttggttttttttttcgattatttatattggttttaaaagtatatttagcgttattattattagggattattaattttattaaaatatgtgattttcgaggttaggagatcgagattattttgattaatacggtgaagtttcgtttttattaaaaatataaaaaaattagttgggcgtggtggcgggtatttgtagttttagttattcgggaggttgaggtaggagaatggcgtgaattcgggaggcggagtttgtagggagtcgagattacgttattatattttagtttgggtgatagagcgagatttttttaaaaaaataaataaataaataaataaataaaaataaataaaaaataataacgtgatttttatttttatttagtgtatattggtttggtagttttgattgtagggttaaagattgttttttgaaatgtaggtatgtggggttgggtgcggtggtttatgtttgttattttagtattttgggaggtcgaggtaggtagattatttgaggttaggagtttaagattatgttggttaatatagcgaaatttcgtttttattaaaaatataaaaattagttgggcgtggtggtgtatatttgtagttttaattatttaggatgttgaggtacgagaatcgtttgaatataggaggtagaggttgtagtaagttgagattatgttattgtattttagtttgggtaatagagtgagattttattttaaaaaataagtaaataaaacgaaatgtggatatgtgattagagtttgatgtttttttttgtaagttttttttataatgaatatattattttatttttagttttaattttttatagatggagggagaatttagagttatttattacgtatttttattgttaaagttttttagatttttgtaatttattttaattatttattgttgttttatatttaattttgtagtaatttgttaaatttatttttttttattgagtttttttaaagtatttattttaatttttttagaaataattttttttttatatttgtattttattggttttatattaattaagtaattataataatagttatatttgaaagaattaggtttggaaataaatatgattggtttttgtggataggaatatatgtagtagtagatagtggtagtgtggttattttattttatgtgttatggggtatagggattatggaggtatgttttataaggaagtgaagagtgtcggttaatttagtaagttagttaagtggaagttagttacgagtttttattgttattatattagaaaaattgtgaggtagagtatttttgatatataaggattttatatattaataagaaaaagaaaaatttttttattatggaaaaaatggggtaaagttacgaataaataatttataaaaaatttatattattattaaaggttaggtgcggtggtttatatttgtaattttattatttcgggaggttaaggcgggtaattatttgaggttaggagtttgagattaatttggttaatatggtgaaatttcgtttttattaaaaatatataaattagtcgggtatggtggcgtatgtttgtaatttaagttgttaaggagttgaggtaggagaattatttgaatttgggaggtagaggttgtagtgagttaaggtcgcggtattgtattttgtttgggtaatagagtgagatatcgttttaaaaaaaaataaaaaaaattattattaaatatggaaagtgtgtgaacgtttgataataattattgaaatgtaaattttttgttaaatttgtagatatatttttttgacgttgatagttagtgtgggtaagattttagagaaacgggtatttttatataatgttagtagtaggtgtataaattgagggtaattggaatatgaattagaagtttataaagaatttaatatttgatttatttttaggaatttattttaagtgattaatataattatttttatatattaattttaaataatagtatagaaaagggtaagtataaaatatttattaatataggataagttagtttatgttgtatgtataaaataggatatattttaaaagttatttaaaatatttttggaaaaaatatttaagtttgagaatatattcgtaataatatattaagtgtttatattatattttagtatataggtatggttttaattatgaaaaaatagaagacgaggaggaattttattaaattgtgaatagtagttaatttagggtggtgggattttaagtgttttaaatttattttttttttttttttttttcgagacggagtttcgtttttgatatttaggttggagtgtaatggcgtgatttttgtttattgtaatttttatttttcgggtttaagtaatttttttgttttagttttttgagtagttgggattataggtgttcgttattatattcggttattttttttgtatttttagtagagatggggttttattatgttggttaggttggtttcgaatttttgattttaggtgataagtttgttttagttttttaaagtgttgggattatcggcgtgagttatcgtgtttggttttatattttttttatatttttttatattatggtatattttttataaaaaatgtggattgttgttattattagaaaataatgataaatataaaaaagttttaatagaagttaattgaaatttttttttttttttttttgagttggagttttattttatcgtttaggttgaagtgtagtggtgcgatttaggtttattgtaatttttagtttttaggtttacgtgatttttttgttttagttttttgagtagttgggattatagatgtgagttattgcgtttggttaagtttttttttttttttttttttttatttttagtagagacggggttttgttatgttggttaggttggttttgaatttttggttttaagtgatttatttattttagttttttaaagtgttgggattataggtattttttattacgtttggttaattttttatatttttagtagagatagggttttagtatgttggttaggttggtttcgaatttttgattttaggtgattatttgtttcggttttttaaagtgttgggattataggcgttagttatcgcgttcggtttgaaaattaatttttagagtaagtttgtttaatttatggtttacgggttgtatatggtttaggacggttttgaatgtggtttaataaatttgtaaatttttttaaaaatattataagatttttggttcggtgtagtggtttacgtttgtaattttagggttttgggaggtcgaggtgggcggattacgaggttaggagatggagattattttggttaatatggtgaaattttcgggcgtttgtagtattttttattagggaggttgaggtaggagaatggcgtgaatttaggaggcggagtttgtagtgagttgagatcgtgtaattgtattttagtttgggcgatagagtgagatttttgttttaaaaaaaaaaagaaatgagatttttgtgggatttgttttgttggtttagtttattagttatcgttagtatgttttacgtgtggtttaagataattttttttttaatgtggtttagggaagttaagattggatatttttgttttagagtaacgattttatttatttgaggataaagttatattattaaaattaagtaattataattagtaagttattttttttaatggttttgaaattgtaattttattatgtaagaaaataagattgattataagttgataattgttaaagttatattataagtatatgggagtttattatgttgtttatttttgagatagttttaggttgggtgtagtggtttatgtttgtaattttagtattttgggaggttgaggtgggaggattgtttgagtttaggagtttgagattagtttgggcgatatagtgagatttatttttattttttttaattaaaaaagagatagttttaaaaattgatattaaaaaagaataaataaatttatgaatttattttataaattgtttttttgtgtgtttaattaagatttattattatggaggaaaagttaaagttttttaatattttatttgatttttagtttttatgtatttaagaaagttatttattgatttattttttgtttttattttagattaatgattatattggtataattataatgatttgattttataaggtggtaagtggtattagatttttagtttttacgtttgaggttgtggaaatattgtttttggataggagaaataaaatgttaattatgagttaatgggaattttttttttataatgaaaatatttattacgggaataatagagggtgcgaggaagagaagatattttttagttaaaaattaaggataggaagtattaattatacgtattaaaatatatttagaaataaattgttttattagtaagaaaaattatgggtgggattggttgaattttgttattattttaattattatagaaattggtaaagttattattttaggttgttaaatatttgtttaaagtaataatagtttatttttttgttaggtttttgttttgtgttaggttttttgttaaataatttatatgaagttttttaataatttagtgaggtagggattattataggttttattttagaaatgggaatattaaggtatagtgagtttcggtgaatgcgtaagattagttaagagtataggtggtatttgggtttagattggttggttcgggagttgtttgtttgtgtagaagaatgagattttaggaacgttgtgtgagttataaatttgtttggattaaagagtattttagaggaatttcgtattaatataatataaatatatatttaatttttattagttttagagtttttttttaattattttatagatttttaaaataattttttaaggtggttgaatagagattggtttttttgttttagaggtaaaaatacggaagtttagagaggttagaggaaaattgggattttttgtttttaaattgaaaagtattgttatttaaattggggtttttttttttttttagaaattttagggtattggtgtgaaaattaagtgaggttgtatatgatgtgtttagtgttagggtttgtgatattgtaaatggttaataatgttaatagtatttaaaatgaaatggatagattggttttttattaggtaatagaaagagttttattttttttgttattgaataagggaagtatttgatgattttaggagagagtagaaagtaagtataagtttttttaaagtttaagttttaaaagcgtatttgtatggttggtattatatgaagtattcgttggaaagttagttgttgaaaagaagtatttaaaagtgggtttttaaaataaatttcgaaagtttaggttgagtgtagtggtttatgtttgtagggatgtattttggggaggttaaggtgggaggattatttgaggttagtagtttaatattggtttggttcgggtaaattagtaaaaatagtgagattttgtttttataaaaaaaaaaaaaaaattttaattagttaggtagtatatgtttgtagttttagttatttgggaggttgaggtgggagggttgtttgagattaggagtttaaggttgtagtgagttgtgattgtgttattgtagtttagtttgggtgatagagtaagattttatttttaaaagtaataataataataataataaaaagtttaagaagagtttagtttatagatattagtttttgattttatagtatataattgttatatatatgtataatatttaggtataatgtatgtaaatataaatatatgaataaatgaaaataaaatgaaaagaaaattttgaatttaaaaggttagtgtttatgttttttttgacgtttttaggggaaagaaataattagaaaatttagtgtttaaagtagatcgaatattgtaaagttaaatgcggttttggtgaatagatattgttataaatatgtatatttataaaaagttggagagtaaaatttatatgttataataaatgtttatatgtgtatatagtatttttagaaggatatatataaaattttagggtgattgtttttaggtggggaaaatgaataggagagggaattattttttattaaatatttttttaggattttttatatataagtatttttatatatatttaaaaaaaattaattttattgttaaagttaattattttgttaggattaggtttttagaaaagaaaaagagattatttttatattttagggattaattggaggagtttttggagatattattttgaaaattatagtgaattttaaaagagatattagtagagtatttagtggttaaaagtgggtttttttaagttagatagtatgagtttaaattttagtatttttatttattggttttgtgattttagataagttatttaattttttggtgatttagtttttttatttataaaatggaaataattatagtgttattatgaaatataattatattagattatatagagtaataaaatagtatttggtatatagtaagtatttaataattgttagttatttttatgtttattagtgttgttttgatagttaggttgagtagtaggtagtatgtattattaaattatatttatggtggaagtttttttgatagaataatgaaaaatttgattttatttaattttttttttgatagggaatgtttgggattttgagtgggcgttaataaatattgattgattgatcgatattgattgattgatttaggttgttagtgaaagtggaaagtttggattatttatttagatgttaggaattattttttttaaaagataaatagtatttttagtttttaaaagattatcgttgaggtttgttaaagtttattaattataaaatgataattttatttattttttttaattaattataataacgaaaagaagaaaatttagtaagaaagaatttttagagtgatatttttttagaagaaggtttaatttaaggtagtttgttgtattagaatttttttttttttttgagattttagagttaatattataatttattttaagatatgttggaatgagttttagattttttttttaaaataataattaaattagttaggtttatattaaattttcggtttatttttaggaaaataaaataatgatttggtaaagttgtgatttaaattttgttttagttttgtatttataaaagtttatttattttcgttttaggtatttatttgtaaagtggagatgatgatgtttaatattaattcgatatagatgtaaatgagaatgtgtttagaattttgagtaatttggaaaaaataagcgatgtattaattgaagatgatttggaatgtttagatattaatttttagggataaataaataatttttattttttaaatgttaggttttgtgagtttattttatttagatgagttttttttgggttatttagttttttggaattttagagatagaagaggagtgaggtatataaattgtggtaagaagggtaaataggttttatttatattattagtgcgatttgtatatgtgattttaagtaggtttttagggtagagttagaggttaaggaaagaaaaataggttagaaaataaatgaggtttgtttattttttttgtttttttaaaaagaaaaatatggtattttagtagaaattttatttgatttaaagtgagttttatatttttttttatttttttttttttttttttttttttgagatcgagttttgttgtgtcgtttaggttggagtgtagtggcgcgattttggtttattgtaatttttttttgtcgggtttaagtaatttttttgttttagtttttcgagtagttgggattataggcgtgtattattacgttcggttaattttttgtatttttagtagaaatagggttttattatgttggttaggttggtttcgaaattttgattttaaataatttattcgtttcggttttttaaagtgttgggattataggtttgagttatcgcgttcggttatatttttatttttatatttttagttgaaaataatagagaagtttaagtgtaattttatttttgaagtatagatagtttttttgttgaaggtaatggtttgggagtattagttttaaattagattaattttatatttatttagaagttacgaaagtgaagatttataatttttaatttattttttttttatttataaaattaaagattataataggaaagaaaaataaaataaaatagatgtaattagagaaggagagtaggtagaaagaacgtaaaagtgaagtttttttggttttgagttttatttaaggaaacgaatatgatattttagtattttgggggattttttggaaacgtttttttaaatgggttttttttttttgaaaagagagcgaatttttaagattttttcgtggtttgtagataagatgggggtgggggagatggaaagattatttgaaattttgtatttataaatggtagagtggtgttttttgtgtatatgatgtttaatggaaatcgtatgtttttataaatacgggtcgatttttttaatatatagttttaattaacggtggaaattttataacgtgggattttagggatgttaaggtttggcgagttggtttttttaaattttttcgggggagttcgtattgtggggtttcggacgtcgtcgttattattcggcgtggttttatcggggttggtgtcggggttgggggttacgtttcgtcggcggcgtttaggggttatcgcgagaaagagaaagagatagagagagagaaaaagagagagataagagaagagaaaagagatagatatagagagaaagaaagagagatagaatataagagaattgaagagaagagaagagaagagggaagaaagaaaaaaaagataagattcggggagggcgtaggcgggagcgcgcgggcggcgaggtttaggaagggtttagtagtagcgggagggcgcgcggttatttagtttaattcgtgcggttcgggtttattttttagataatagttggaggacgaggatagtttttttttggatttgtagtttattagttttaggtagatttttaatattttttcgcgttagtacgtcgggggtcggaattttttttttagttcggttcgcgggttcggtttaggttcggttcggttcgcgcgttttttcggcgttttcggtttcgttagtcgtttttatcgtcgtttcgcgcgttcgcgttcgtttatggtcgcggtcgcgttttcgtttggtcgggacgcgtttgttaataaagggttcggagagggcgttcgttaggttcgttttcgtttcgtcgtcgtttgcgttttaatttttttttggtcgcgttcgttcgtatttaggggtttttggcgttttcgaggtcgagttcggtttaaagttatcgtcgttttttaaagttaattcgggttaatggcgattttcgtagggggaaggtcgcgcgcggttcgcggaggttttttttcgtttggaagcgtcgttttagtttcggcggggagggtgtaggtttgttttattttattttagaagtcgcgcgtaattttatcgcggtttggggcgtttttaatttgtatcgtttttggcgagttttttagtacgcggtgttaggtaaattttttgattcgagaacgttggtgaaaatgtaaatttttttgtagttattaatattaattggttttatttttatttaacgcgcgttttgtgattaaggttgaggtagtgggtgtttggggaggaagttagagttggtatttataggataattatacgtgcgtacgatatttcggtgaggtcgtatatttagattaggatatgaggtgaggttgcgaatagacgggtgtgagtttagagtgagaggatttagtttttataatgagaattttcggaggtacggtttgggttttttttttgatttattttttttaatagagaattttttttttttttttggtcgagtgttacggggtgagggtggggggattattgtttaaaatttattttatttaattattttaaatttttgtttggattgattatagataatgttataaagtagtaataattatagtcgtgttattggcgtatatttagaaatttaggttagagggaaataataaggaatttaatggtattaaataatttaataaaattaggtaagttttttttatgataggaaaaggaatttattttatttattttttttataaatggtgttaattataaaattgtaaagggggaagtttagtttatattttttagttatgaagagtaagagttgacgtgtattgtgttttttttatgtgttatgttatttttattaattgtattgtatttgcgtaatgattttgtgaggaaatagattattttaattttttaggtttaaaaataaataaattttatagatgtttagagaagttagatattttgtttatagttggaaataggcggagatggatttaatttaggtttgtttggttttaaggattaggttttcgattagtggatgatgttgattttttatattaagaataaattttaagtggattaaagtattggatatttttggttaaataattagtattgttattatatgttttagagaaagttttggttatgagattttggttattttttagtttattttgtaatgataaaaattcgggtatttttagtattttaggaatggttaagtaataagatttttatttggttttgttaaaaatagtatataaaaattttagttggataggatgtaattagtgtatattataggggttttcggttaggatgttattaattttttatatgtgttttgttaaattttgattaatatataatatgtatttttattgttattgaatggatttattgttagagtcgtggtattagattaggttttatgagtatttaagagggtattattagggaagtttgtagtttttattatttggagatgtaggattatagggtttttaggggatgggtgtagtgattttggatgttttttaggatttgggaggcgttgttattttgttggatagtttgcgtgtggtgattgttaatatgtttagtgttgttttgaatttgttaatttttatacgtaatgttaaaaataatatttaaaagggtgttattagtattaattagtgaaaaaatatagtatttgtttgttttgttgtttttttggaaagtttaggggttttggattagattataataaagtttgttattatatagtattttatattaaagggttatatttaaattggcggtttaatgttaagaattatatattattaggtattttggaaattttagttatatttttgaatatcgtttgttaatataggtttagatatttgtttgttttgtgttgttttttatattggtatatgtttatttttttaagttaattattattattaatattttgttcgagtttaaaatggttttatttttttaaatttttttaaaatgaataatgtttataaattgtatttaaatttttttaattttagttataaaatcgtatattaatagatttaataaaatattgaattagtggtaatggatattgaaaaaattgttaaattatatttttgtattaaatttggtttatattttttatatttagtttttgacgtttttgaaagatacgaagagtattttgttataagtaaataaaggagagttttaatttttttattagaagaatattttaagaaggattttttttaattagtttaagatttaaaagttattagttaaaaagaaagggaaaaggaaagaaattaaagattgtgaattaatttgtttgttatgttgtattagtttgggaagaaatatatttttaatgtgtatgtaatatgtgttaggtatttttaagttttatagtaatttaatgattttgtatagtttaattttattttataagtaagaaaattgattgaagggagagggggaagtattttgtttaagtttatatagttaggaggtaggaaggtaggaaagttttgaattttgtaaaatggtagaaaatttttaatttaagtgaaaggtggataatatgagtaagattagaagatgaaataagtaatattaattgttgggaaaatatgttttaggagaaaataatttagggaattagagttatttaagattttttttttttttttgagatggtgaaattttatttttattaaaagtataaaaaaattagttgggcgtggtagcgggtatttgtaattttagttattcgggaggttgaggtagagaattgtttgaatttgggaggtggaggatgtagtgagtagtgatcgtattattatattttagtttgggtaatagagcgagattttattttaaaaaaaaaaaaaatatttagaaggaaaggataaattttttaatattaaagtatgggatttgaataatgtttttaaaagtataatttatggataatttattttgaataatgtggggtttgtttaaaatgcggagttttggtttttagtttagaattagaatatgtgtaatgggttggatttgaagtttttagatgatttgtatgtatatgtaagatggaaatttattgtttgggggttagatatagtagtttacgtttgtaattttagtattttgggaggttaaggtgggcgattatttgaggttaggagttaaagattagtttggttaatatggggaaattttgtttttattaaaaatataaaaattagttaggtatggtggtatatatttgtaattttagttattcgagaggttgaggtaggagaatcgtttgaatttgggaggtggaggttgtagtgtgttaagattgtattattgtattttagtttgggtagtagagtaagattatattttaaaaaaagaaaaaaagaaaagaaatttattgttttggaagagggaagagttgtttatttttattgggaataggacgaataggaatggatatttttaaaatttaatttatttgaaagtaatttttgaatttaagataggtatagttttagaataagttattaaaagaggattttttttggatgattagaggagagagattgaattttttttttaatttggaatttagttttattaagaaaaagttgggtaggtatttattatagaagtgtgttaagggaaggaggtaggatttaggatgtggatgttttattttttagtagtaagattgggtgtgagtgtaggtggaatagagatagatgaatttgataggaggtttggtttgggattttaggataaggtgattttaggtttggttgatttttttattgtttttagtatagttagtagttttagggggggaatagtaaagattttgaggtatgtgtatagtattttatatgtaaatgttaataaagtttattttttttgatttagtaaatattgtttagtaagagtttgttaggtattttagttttgtgggtttagtgtatgtttaattaaaggataatatagtttaaaatattatttttgttatattagtttttgttattgtatagggatatatgtatttttttaagttttatatttttttaatcgggtagtattatttgttggttacgagttatgtgttataaaggttagcgttgagttttagatttgttatttattggggggttatgggtaacgattttattttttagagttttaatttttttatttgaaaaatgggaggtagttataagagtagttattttatagggttattatgaagattaggaattatgtagggagagtgtttaaagtatagaaggtgttcgataaatagtagttattgttatttttaaaagaggattatttttgtattaggtttgtgtttttgtttatattttattgggatttagttaagagtttaaattaataaatatgttatatgaaaatgattttagaaagtagtttggaggttttttaagggattaggaaattaatttattttatgaagagaaagaaatattagttgtgaggtaggagtagtaattaaggtttaaatgtaatagagagttttattttttattttaaagtaaagatttgtaattatagttttagtaaaatataaattttatattttcgtattttgaatgggggtttaatttagatttatgattttatgtataggttgtatagatgattgttttttaaatgatattgatttttttgttggtatttttaggttataatttttagttggggattaaatttgaattgttttagagtaaattcgttttttagaaaattttattatagtaagattattatatttttataattaataagtttaaatttaattgttaaatatttttttttagaaggagaaaattaatggtattagtatgtttatttttttaaattaatttttttttttaattaaagtaatatatataatatggttaaaatttaagtagta

SEQ ID NO: 3 - DNA, 6802 bp, Artificial Sequence
  chemically treated genomic DNA (Homo sapiens)
aattattgttgttttattattgatttaaaagtaatattaagttttttgtttgtagtcggttttaggtttatatattttttattggttattttttgtgtatagttattggtttgttagtggtttcgtggtgaagtagagtttattaatgtttagggtattttaaggttcgttttttattgtattgttattggtagatttcgttgtttgttggggggggtttgttgcggagagaggttttttgggttggtagagaggagttggtggttgaggggtttgagttaaatttgtgttttcggttttagagaaatgtgtatgtacggttaattttttcgaaatgaatagttgagaggacggcggtgggagggggttttagagatggcgttttttaggtcgtagtaggggtcggtgaggtcggcggttttggaaaatgagagtcgtacgttttagaggaggtttttaggtacgtaggattgttgggtggatttgggattttttaaggaggtgtttatggttcgtatttttgttaaatattttttattaaacgaagttttggagtatttttttttttttttttttggttagggtagtttgaattttaatgtttttagttataaaagtagtattataacggtagtcggtgaatattttagattttaaaaaatttttagatatatttttgagattttaaaatgaataataataaaaattaataagtattttgataattttatatttttttttagatggataattataagggggatgttagaaaattataattaattagtttgggttttaatttttgttttaatatatggtatttttaatggtttaaatatggtggtgatgataatgataaaaagttaaaaaggttaggcgttgtgatatgcgtttgtggttttagttttttgggaagatggtttgagtttaggaggtcgaggtcgtagtgagttgtgattgtattattgtattttagtttgggtgatagagcgagattttgtcgtaaaataaaagaaaattaaatttaaattattttaaaggattttatgttttaaagtgttaggtatttgtaaggtatttggttgaagtgttagttgagatgggtgtgaagtgagtttatgagtttttgggggagaaagtattgtttttgagtgggttatgttttttatttttttttttttttttttattttgtaaaagtaatgagtttttgttggtattttttttatttttttgtaaacgttgaacgatggagttagaggtttgtttttaaatattgtttagaaattaaagtttttaaataaattaaatatttaagtgaattgaaatgtaaaatgtatttttttatttttttttttaaagttttttattgagttttaaataggagttgtttttgattttattggtattgaggtgtttgttagggtttttgtagtgggagatggagatttagggtttagggatttaattttagaaaaaagaatttttttaaaataatttttttaattaataagaatttttaagaaataaatgtttagaattatgtttgtggtttttttttttttttttttttttgttatgtagtttttattttggtatattatatataaagtaaaatatatttatttttagtgtagagtttaatgaggttgggtaaggtggtttatgtttgtaattttagtattttgggaggtcgaggtgggaggattatttgagtttaggagtttaagaatagtttgggtaatatagtgagattttatttatatagaaaattttaaaaattagttgagtgtggtggtgtatgtttgtaattttagttatttgggaggtcgaggtgggagaattatttaagtttaggaggttaaggcgtagtgagttatgatcgtgttattgtattttagtttgggtgatagagttagattttgttttaaaaataaaaaaagataataataaaaatagagtttaatgagttttgataaatgtatatagaatattttaattatttgtaaaagttttttaatgtattttttagttatttttttttaaaataatatttaatgtgattttttttattatagattagttttgtttggtttagattttatatgggtggaatatagtattttttttttgtgtttggttttttttattttgttttatgtttacgagatttatttatgttttttttatatgttagtaatttatttttttttattgttgagtagtattttataattttattgttgtatttttttgttagttttgtttttggatatttgggttgtttttagttttttgttattaagaaaaagttaatttgaatatttgtatataagtttttgtgtagatatattgtaatagtagtatgttgtagttggtttattagagcggattttgtgtattttttttaaatttggtttagcgattgttatattggtagtttgaaataagttatggggatagtataaattagagttgttttttttttggagcgttggttgttaaatatttattagtatattattggatatgtgtttttatttttttagagtaaatatttaggagtgagattgttggattgattgtatggtaggtttatgtttaattttatatgaaattgttaaattgtttttaaagtgtttgtgttattttatatttttaatagtaatgtatgaaagttttaattgttttatattattattaatatatagtattgttagtttttttaattttatttattggagttgggtatggtggtttatgtttgtaattttagagtgttgggagaacgaggttaggagttcgatattagtttgggtaatatagtgagattttgtttttaaaaaaaaaaaaaaaatttttttagttattaaatggtgaagattcgaatagaaaagtggagttggggttaggtgtggtggtttaagtttgtaattttagtattttgggaggtcgaggtgggtagattatttgaggttaggagttttagagtagtttggttaatatagtgaaatttcgtttttattaaaaatataaaaattagttaggtatggtcgtgggcgtttgtagttttagttatttaggaggttgaggtaggagaattatttgaatttaggaggcggaggttgtagtgagttaagattttgttattgtattttagtttgggtgatagagtaaggttttgttttaaaaaaaaaaaaaaaaaaaaaaaagaaagaaaagaaaagaaaagaaaaggggagttgggaaatggaaattatatgggaggttagtaggtagaatttttgtttttttttttatagatagagaaagttatgtgataaatatagattgaaatatgttgaggtttttttttatttatgatttttttttgattttttttattatattgttaaaggatgttaaatttttaaataggagaatgtagttatttgaaatataataggttatttatggtgttggggaaataattaaaaagagaatttcgtgttaatttaatgaattttttttataaagtagataagaatgaaaagtttttttttgttttttgttttattgagatagggttattttgttatttaggttggagtgtaagtggtaagtggcgtgattttagtttattgtaatttttgttttttgggtttaagtgatttttttgttttagtattttaggtagttgggattataggcgcgcgttatcgcgtttagttgattttttttttttgtatttttagtaaagacggggttttgttatgttggttaggttggtttcgaatttttggttttaagtgattcgttcgttttggttttttaaagtgttgggattataggtattagttatcgtattcggtaggaatggaaagttttataattgaataagtattatattagattgtgatgtatattataaataatttgttaaagaggttttaaagatagaaagaaattttattcgtttatgtagtaggtagatatagtttattataaatatatttttaaataataatttgtgtttaagaaatttgacggtattatttggtatatatattttattttaaatttatttggtaattagggtggttatttgtgttagttaattgtttttatttaaaggaaaacgaaaatttatatttttatgataagtaggtaataatttgaagttaggtacgtagattaaatttttacgaagatagggaaagataggggtgttatttttattgatgtttatattttaaagagatggttataaggtttttaagaaaaatatttcggggatgtaaaattggtaagagatttagtttttaaaaggatttatatatattttaaagggatagagaaaattttatagttataagttttttaaaggaaatgttttaagagagacgttttttttttttgatattagggaaaattcgatttttaaaaatttgtgtttattttataatatttttatatattgattggtatcgtgtttttttttaggttcgtatttttttttttatttggttatttgtgattagttttttatagttttaattaattttatttttaaaggaagttttttagatagtaggtcgttttttttaggtttagttttttagttttcgttatattagagattcgttgtttttaaaggttatgaattatagttttttagagttggtgaatatcgtcgattattggttttgattttaatttattttaaagatggtaaaaattgagatacgggaaaattataaaagggtgtttagggtattggtttaaaaagggtatttaaggattttttcgtttagatgttaaagttttaaggttagttttaaatgatttgtgttttgttttatacgtttatgttattgttggggttaaagttttaggtacgtaggttttgttttaattgcgtttgcgcgagttaggacgagcgtttgttttagattttgacgttttaggcggttttttttaattcggaatacgatttatatttcgttggttttgttttgatagacgtgattttgatttaataagggtggaaggttgagtttcgtagagttaataacgagagttcgagaggcgacggaggcggattttgtgaggaaataagaagagaggtttaagatggagacggcggcggttgtagcggcgtgataggtgagggcgggttcgggagggttcggtttttggagcggttgtcgggtacgggtagggagttcggatcgaaagtttagttttaggatggttgcgtttgggtttcggcgttttttgttcggaatcggaggagtggtttgattcggggcgagattatcgtcgatagcgggggtggggtgggtaataggaataggcgggtaaggttgcgggtgatggtttcgttcgttgttagtggtggtgcgtttgcgtagagtcggaagttttttggtaggcgggattcgatcgagtggtgtcgggatttcgttttaattttcgttaaggtgtttaatgatttttttttattaattgcggggagtgtgtggaaacgcggtttatttttcggtttttttattttggattagtgtttgatcgttttcgtcgggagaatgttaggattttcgtttttgtaatcgttttttatgattttttatttagtttagattagtaatatgtttgtgattttttataggttgttaaggagaattttggagttttttttttatttttattttttttttcgtaatattatattttttttttttttttgttatgataatgtttggtggtttattattatttttttagttcggtttaatgtttggttatttttatttttatttttttttttattatagtttttagtgacgtttgttatatttttttttcgtatagtatgtagtgattttttttttttatgaattttttattatagaggtttgggatttttattagttatttaataacggtgtttgtggttttaatattaatattatattttagggtttagggatgtttatagtgttttttaaggatatgtttggtgtaatttttattttttttaaattaagggtagtatttgataatttttttttttttattatcgtgtttgcgattttttttttattatagtaattggtatttttttcgttttttgttaaaaaattaggatattttgggaggttgaggcgggtggattatttgaggttaggagttcgagattagtttggttaatatggtgaaatttcgtttttattaaaaatataaaaaattagtcgggcgtggtggtatacgtttgtagttttagttatttaggaggttgaggcgggagaatggttttaatttgggaggtggaggttgtagtgagttgagattatgttattgtattttagtttgggtaataagagcgaaattttgttagaaaaaaaaaaaaatagaaaaaaaaaaaaaaaaaatttaggatattttgttcgtgttttttatgtatttgacggtttagtgtagtgtgtattgatttttttattggtttttagtatagagttttgtgtgtttttttattttttaagatagtatgttttgttttttttttttgttttttttttcgtaattttgtgtagtgaagttgagattttggtatttaagagtgagataagtaataggagggtttgagtagagaaggaattggaaggattttagatgtgagtaggattttttggattgtcgtgtgaaaattaggttgtagggggcgataggagtttggattttgaattttattttgttttttgttattttgtttttagattattattattggatttttgaatttttgtttgtttttttgtagg

SEQ ID NO: 4 - DNA, 6802 bp, Artificial Sequence
  chemically treated genomic DNA (Homo sapiens)
tttataagaaggtagataagaatttagaggtttaataatgatagtttagaagtaaagtggtaggggataaaataaaatttaaagtttaggtttttgtcgttttttgtagtttaatttttatacgatagtttaagagattttgtttatatttgaagtttttttagttttttttttgtttaggtttttttgttgtttgttttatttttgagtgttaaggttttagttttattgtatagggttgcgggggagagaatagggaagggggatagagtatattgttttggagggtagaggagtatataagattttgtgttggggattaatggggaagttagtatatattgtattgagtcgttaggtatataagaagtacgaatagaatgttttgggttttttttttttttttttttgtttttttttttttttgatagagtttcgtttttgttgtttaggttggagtgtaatggtatggttttagtttattgtaatttttattttttaagttgaagttattttttcgttttagttttttgagtagttggaattataggcgtgtgttattacgttcggttaattttttgtatttttagtagagacggggttttattatgttggttaggttggtttcgaatttttgattttagatgatttattcgttttagttttttaaagtgttttggttttttaatagagaacgggggaaatgttagttattgtggtgagggaggagtcgtaggtacggtgatgggaaagagaggattattagatattgtttttagtttggggaagatggaggttgtattaaatatgtttttaaagggtattgtggatatttttaagttttggggtgtaatgttgatgttaggattatagatatcgttgttaggtggttaatggaagttttaagtttttatgatgaggaatttatggggggggggggttattatatattatgcggaagggagatgtaataggcgttattagggattgtaatggggagaagggtggaaatggaaatgattagatattgagtcgaattggggaggtaatggtggattattagatattgttatagtaaaaggagaaggaaggtatggtgttgcggggagaaaaatggaggtaaagagggagttttaaaattttttttgataatttgtgaggggttataggtatattattggtttaaattgaatgagggattatggaaggcggttatagaggcgagaattttgatattttttcggcgggggcggttagatattgatttagaataaggaaatcggggagtgaatcgcgtttttatatatttttcgtagttggtaaggaaaggttattggatattttagcgggggttaagacggaatttcggtattattcggtcgggtttcgtttattaaagggttttcggttttgcgtaggcgtattattattagtagcgggcgaaattattattcgtagttttgttcgtttatttttgttatttattttattttcgttgtcgacgatggtttcgtttcgggttaaattattttttcggtttcgggtagggaacgtcggggtttaagcgtagttattttggagttgagttttcggttcgggttttttgttcgtgttcggtagtcgttttagaaatcgagttttttcgggttcgtttttatttgttacgtcgttatagtcgtcgtcgtttttattttgggtttttttttttgtttttttatagagttcgttttcgtcgtttttcggattttcgttattggttttgcgggatttagttttttatttttattgggttagggttacgtttgttaaggtaagattaacggaatgtgagtcgtgtttcggattaggaggggtcgtttgaaacgttaagatttggggtaagcgttcgttttgattcgcgtaggcgtagttgaggtaagatttgcgtgtttagggttttaattttaatagtggtatagacgtataaagtagaatataggttatttggggttgattttagggttttggtatttgggcggagaaatttttaagtattttttttgggttagtgttttaagtatttttttatgattttttcgtgttttagtttttattatttttgaaatgggttggaattagaattaatgatcggcgatgtttattagttttaggagattgtagtttatagtttttgaggatagcgggtttttggtgtggcgggggttgggggattgggtttaggaggggcggtttgttgtttgggaggttttttttaggaatggggttgattaggattatgaaaaattagttataggtggttaggtgaagagggaagtgcggatttggaagggagtacgatgttagttaatgtgtggaggtattgtggggtaaatataaatttttaaagatcgaattttttttggtgttaaaagagaaagacgttttttttagagtattttttttagaaaatttgtaattgtaaaattttttttgtttttttgagatgtatgtaagtttttttaaaagttaaattttttgttagttttatattttcggaatgttttttttaagagttttgtagttatttttttgaaatgtaaatattaatgaaaatagtatttttgtttttttttgttttcgtgggaatttgatttgcgtgtttggttttaagttattatttgtttgttatagagatatgagttttcgtttttttttggataaaggtaattaattaatatagatagttattttaattattaggtgaatttgggatgaagtatgtgtattaaatggtgtcgttaagttttttgagtataagttattgtttgagaatatgtttgtaatgggttgtatttgtttgttatataaacggatgagatttttttttgtttttgaaatttttttagtagattgtttgtgatgtgtattatagtttggtgtaatgtttatttagttataaaattttttatttttgtcgggtgcggtgattgatgtttgtaattttagtattttgggaggttaaggcgggcggattatttgaggttaggagttcgagattagtttggttaatatggtaaaatttcgtttttattaaaaatgtaaaaaaaaaaagttagttgggcgcggtggcgcgcgtttgtaattttagttatttagaatgttgaggtaggagaattatttgaatttaggagatagagattgtagtgagttgagattacgttatttgttatttgtattttagtttgggtgatagagtgattttgttttaataaaataaaaaataaaaaaaaattttttatttttgtttattttgtggagaggatttattgggttggtacgagattttttttttaattatttttttaatattatgaatggtttgttgtgttttaagtgattgtatttttttgtttggagatttagtattttttggtaatgtaatgggaaagattagaggaaggttataggtgagggggggttttaatatattttaatttgtatttattatatggttttttttgtttataagaaggaagatagaagttttgtttattggttttttatataatttttattttttaattttttttttttttttttttttttttttttttttttttttttttttttttttttgagatagagttttgttttgttatttaggttggagtatagtggtaagattttggtttattgtaattttcgttttttgggtttaagtgatttttttgttttagttttttgagtagttgggattataggcgtttacgattatgtttggttaatttttatatttttagtagagacgggattttattatgttggttaggttgttttgaaatttttgattttaagtgatttgtttatttcggttttttaaagtgttgggattataggtttgagttattatatttggttttaattttatttttttattcggatttttattatttaatggttaaaaaaattttttttttttttttagagataggattttattatgttgtttaggttggtgtcgagtttttggtttcgtttttttaatattttaggattataggtatgagttattatgtttaattttaatggataaaattaaaaagattgataatattatgtattgatgataatgtagagtaattggaatttttatatattgttattgggagtgtaaagtggtataagtattttagaaatagtttggtagttttatataaaattaaatatagatttgttatgtaattaatttagtaattttatttttaggtatttattttagagaaatgaaaatatatgtttaatggtgtgttggtaaatgtttgataattaacgttttaggaagaaaatagttttaatttgtattgtttttatggtttattttaggttattaatatgatagtcgttgaattagatttaaaagagatgtataaaattcgttttggtgagttagttataatatgttattattataatatgtttgtataaaaatttgtatgtaaatgtttagattagtttttttttaatagtaaaaaattggaaatagtttaggtgtttagaaatagaattgataaaaaaatataataatgggattatggaatattatttagtaatgaaagggaataaattattgatatataggaagagtatagatgaatttcgtagatatggggtaaaatgaaaaaagttagatataaaagagaaatattgtattttatttatatgaaatttaaattaggtaaaattaatttatagtgaaggaaattatattagatgttgttttgagggagaatgattgagaagtgtattaaagaatttttgtaggtgattggaatgttttgtatgtatttgttagaatttattgaattttatttttattattatttttttttatttttgagatagagtttggttttgttatttagattggagtgtagtggtacggttatggtttattgcgttttgattttttgggtttaagtaatttttttatttcggttttttaagtagttgggattataggtatgtattattatatttagttaatttttaaaattttttgtgtagatggagttttattatgttgtttaggttgtttttaaatttttgggtttaagtgatttttttatttcggttttttaaagtgttgggattataggtatgagttattttgtttagttttattgaattttatattgaaaatggatatattttgttttatgtgtaatatattagaataagaattgtatggtaaaaaaaaaaaaaaagaagaaggttataaatataattttaaatatttgttttttagaaatttttattggttagagaaattattttgaaaaaatttttttttttgaaattaaatttttagattttgaatttttattttttattgtaggagttttggtaaatattttagtgttagtggggttaggaataatttttgtttggagtttagtgaggggttttggggaggggaataggggagtgtattttatattttaatttatttaaatatttaatttgtttaaaaattttaatttttaggtagtatttgaagatagatttttggttttatcgtttaacgtttataaaaagatgagaaaaatgttagtaaaagtttattgtttttgtaggatgggggaaggaggggaagggtaggggatatagtttatttaaaggtaatgtttttttttttaaggatttatagatttattttatatttattttaattggtattttagttaagtattttataggtatttgatattttaaagtatgaagttttttaaagtgatttaggtttggtttttttttgttttgcgatagagtttcgttttgttatttaggttggagtgtagtggtgtaattatagtttattgcggtttcgattttttgggtttaagttatttttttagaaagttgggattatagacgtatgttatagcgtttggtttttttgattttttgttattattattattattatatttaaattattagaagtattatgtattaagataaaaattaaaatttaaattagttgattatagttttttgatattttttttgtaattatttatttggaaaaaaatgtaaagttattaaagtatttgttggtttttattgttgtttattttaaagttttagaaatatgtttgaaaattttttaaaatttgaagtgtttatcgattgtcgttgtaatgttatttttatagttgaggatattaaggtttaggttgttttaattagaggggaaaaggagagagtgttttaggatttcgtttgataaaaagtgtttaataagggtgcgggttatgggtatttttttaaggaattttagatttatttagtagttttgcgtgtttggggattttttttaaaacgtgcgatttttattttttaaagtcgtcgattttatcggtttttgttgcggtttggagagcgttatttttgggatttttttttatcgtcgtttttttagttgtttatttcgggggagttgatcgtgtatgtatatttttttgagatcgggaatataggtttgatttaggttttttaattattagtttttttttgttaatttagggagttttttttcgtaataggttttttttaataggtagcgagatttgttaatagtagtgtagtagaaggcgggttttgggatattttgggtattgataggttttattttattacggagttattgatagattaatagttatgtataggaggtggttaatgggaggtgtgtgggtttgagatcggttataaataaggaatttaatgttgtttttaaattagtgatgaggtaatagtaatt

SEQ ID NO: 5 - DNA, 6591 bp, Artificial Sequence
  chemically treated genomic DNA (Homo sapiens)
aggaaaaatttttttttttttttttttttttttgagacggagtttcgttttgtcgtttaggttggagtgtagtggcgcgatttcggtttattgtaagtttcgtttttcgggtttacgttatttttttgttttagtttttcgagtagttgggattataggcgttcgttattacgttcggttaattttttgtatttttagtagagacggggttttatcgtgttagttaggatggtttcgattttttgatttcgtgattcgttcgtttcggttttttaaagtgttgggattataggcgtgagttatcgcgttcggcggaaatatttttaaattaaatgtttgttaggaatgtttattgtattgttggtttttagtatatgaattattattatttttaattatattagagtatttagtaatggtttttttaattggggtaaaaacggaatgatttttgtggttaaagttgttttaaatttttgtatattataataaacgaaaagtgaagtttattagtttgtaagttagtgaagatttatagattttattttttttttttaattttttttagaagttattatttaggaaggaatttttttttttattgaatggtattttcgttaatatttttgtaaagtgtatatgaaaaagttatgtgtgtataaatatatatgaagaatttttaagaatttatttgtaaaatattatttagagttttatatgttttgaaatattttaaaataaaaatatttataaaatgtatattttttgattaaaggtttttttttttttttttttttttttttttttaagaaaaagattttataaagattgtcgtaaggtggtattaaaatttaatgaaaattttaattttgttttggtttttgaggagtgtagaatgatttataggagatatttggtaaataaataaaattaaataaattaggttaaagattagagatagattaatattttttttttgtttgaaatataatttttttgttttataggtgtggatatattatgttataagatgaatatgttaataaagttaattgttaatatgatttgtttttggttggtggcggtggtttacgtttgtaattttagtatttggggaggtttaagtgggtggattatttgaagttaggaatttgagattagtttggttaataagggaaaattttgtgtattgaaaatataaaaattagttaggtatggtgttatacgtttgtaattttagttattcgggggtttgaggtaggagaattgtttgaatttaggaggtcgaggttatagtgagttaagattatattattgtattttagtttgggtgatagagtaggattttgttttaaaaaataaaataaaataaaatgatttgtttttatagaagaattaaattttatttttgtttgaggaagtgtattatgaagggtaagggatagggaggggtttgttcggtatattatttagttgggaaaagtttattttgtgtgtggggtagttttggaagtagttagtttttgtagagtttgttaaagtattttggattaaaaaaaaaaaaatattatgaaaagaagttattaaagaagttattgtagaatatagatttatttgtttattttggtatttttattaattgtatagttttagaaattattgtaatattgagatttgagtttggaatattttatataatatttttggaaattagaatacgaaggagtttaattcgtttttcggattttttgttttttaaagaaaaaaatatatggtataaagttttgttttatattttttggtatttgaagtttaaggatatagttaagttttttaagttatattaagattaaggaaagcggcgttaataatatagttataaaaggttttgattaaaagaagaaaaatttgtgtaaataagatttttttaataggaaaaaaaaaaagtttttagattgtatttttaaattaatgaatagaaaaattatttatttgttgatagattagttttttagatttgaaaaataaattttttttttttttttcgtttcggttaataataataaaaaaaagttggttggtcggttgttgtagtgatgtgaatttagtttgagggaagtatagtatttttagtcgtttaaataagacgttttttttaggaagggttttaggtttagtagtattattgttttatttgatttgattttatttgtggagttatatggggatttagtttttaatatatgaattatatgtgaaaatatcggggtttagttatagttggttgtatgggtttgtttaatgattttttttttaatgtttatttttttttttttttttgagttagggttttattttgttatttaggttggagtggggtgttgtgattatagtttattgtagttttgtttttttgggtttaagtaatttttttattttagttttttgagtagttgagattataggtgtaggttatttttttttttacgttattttattttattttttttagggatagggacggggttttgttatgttatttaggttggttttgaatttttgagtttaaataattttttagtttgggttttttacgtttagggattataggtatgaggtattgtgttcggtttggttagataattgttaaagcgaagtgtggaattgaggtaagaaatttttagaaaattttatttgcgtttttgagtattcgggttaattttttatagttatttattgatttttgtaaatgttaggtattgtgttgggtttttaagatgcggagataagatagaattttggttttttaataattgatagagatcgagatagagacggagataggaggtaattatttttcggttatgtggtgggttttttttttgttgaaaaaatagtttgtagatattttttatgtaatggatagatagagtttagtttatgttgttaatattttagtatttatgagttttagtatatgtagtttttagagtttgtttcgtttttttttatttttttgtttgtgtttaggttgttttttttgttcgggagtttttttcgatttttttttttttttattttttttttttttttttattcgtagaaatcggttgatttgggttttttcggattatcggtattgttattttatgtaggatttataggataaatgagtttagttttggtgtgtattaggaggttacgttttaatagaggggatattttttaattcgttgtgttttatttgttagttttttatttttttttttttttttagttttaagttttttcgtttgtttaggggttttggggtggttggattttattgaattcggaatattgtatattttattgtataatagtgtatattttattgtatattttattgtataatagtgtatattttattgtatattttattgtataatagtgtatattttattgtatattttattgtataatagtgtatattttattgtatattttattgtataatagtgtatattttattgtatattttattgtataatagtgtatattttattgtatattttattgtataagtgtatattttattgtatattttattgtataatagtgtatattttattgtatattttattgtataatagtgtatattttattgtatattttattgtataatagtgtatattttattgtatattttattgtataatagtgtatattttattgtatattttattgtataatagtgtatattttattgtataatttattttagatagttttttgttttaagaatcgggattagagtttatagtgaaaagaggggtcgaaggggtttttttttgttcggtaattttttttaagtgttcgagtttcgatttttttttttcgttgttaagtttgggttatttcgtatttttttttttaatttttatttagagatttaagttgggggttgggaagggtaggggcggcgggatttggaagagttagtttgtagttagtcggtcgtttttcgggtttaaattcgaggttggtttacggcgagtattcgggtggggttttaaattataggaggggttatttttaaaagaaaagagaaaatatttttgtttgggaataaaagtgtgtgtgtggggtgtgtgtgtgtgtgtgtgtgtttgtttatttaaaaataaaattacgttaaaagagttgttttttttttataggttcgattattcgtcgggagtttgttaggaagaggggtaattttggatgggagtcgttaacgttttattgagtgaagtttgtttcggaatcgttcgtttagattttggaggttttagatagttagttttcggatttcgcgcgtaaacgttgcggcgaaggaggggattcgggtatcgttagagtttcgtagcggtagtagtagcgtagatttttcggtcgttgttttttttagttcggcggtttgggtcgttaattaagttggttttgtttcgttttcgggttgtagggggcggttaattagagttaagtttcgtagcgatgagtttagtcggttggttttttattggacggttatattaagaaagtggtcggattttttaaatagcgggcgttagggtcgtagtttttatttgttatcgtagtttggttggagttgttgttttgtatgtttagcgaggttcggagagattcgggagagagttaggtcgagtttatcgttcgagtttgttgttcgagttcgcgttacgtataaagtcgtcgattttcggtttggggtgagtagagcgattatcgttcgggagtagcgcggcgagacgtacggtgcgttttatgttttcgcgtttttatcgttttcgtcgcggtagtcgaagcgtagcgagagaacgcgttatcgcggggttcgggtgtagttagcgattttttcgttatttgcgcgtagttcgaggtgagtagtgagcggcgagcgggagggtagcgaggcgttcgcgggtttttttttgttgttcgggttcggttcgtttatggcggttattcgtaagaagttggtggtggtgggcgacggcgcgtgtggtaagacgtgtttgttgatcgtgtttagtaaggacgagtttttcgaggtgtacgtgtttatcgttttcgagaattatgtggtcgatattgaggtggacggtaagtaggtggagttggcgttgtgggatacggcgggttaggaggattacgatcgtttgcggtcgtttttttattcggatatcgacgttatttttatgtgtttttcggtggatagttcggattcgttggagaatattttcgagaagtgggttttcgaggtgaagtatttttgttttaatgtgtttattattttggtggttaataaaaaagatttgcgtagcgacgagtatgttcgtatagagttggttcgtatgaagtaggaattcgtgcgtacggatgacggtcgcgttatggtcgtgcgtatttaagtttacgattatttcgagtgttttgttaagattaaggaaggcgtgcgcgaggttttcgagacggttacgcgcgtcgcgttgtagaagcgttacggtttttagaacggttgtattaattgttgtaaggtgttatgagggtcgcgttcgtcgcgtttgtttttgtcggtacggtttttttttttggattagtttttcgcgagttcggagaaggggagattcgtgttttataaggattttatcggtttgtttggtatttgtttgttgacgtttttggtttgcgttaggatttggcgtgggtatcgggcgtttttattttagtgtttgtgtgcgtttagttgtgttgtataggtttgggttttttattgagtgttaagggttttttgagtatgtttttttgaagagtcgggttttagagtgtgtggttgtgtgtttgttcgatttttttcgttttatttttattttattttcgtttttgattttcgggggcgagattggcgcgggagtgtggtcgcgttttattagatgttcgttttttattagcgggagtttgatattttttgtttgtaatatagatttcgggtattgcgggaggggagggttgttggggaggatggggggatgttatataaatatagatataattttattttcggagttaagatggtgttatttaagggtggtgatgggtgagcgttttggtttaggttgggttagattttcgtttaagtatgaataggatttgattatttttttaatttttggggaagatatttgtaattgatttggggaggatatagttttagtatagttttttttgcgggttagttcgttgcgaattttttattagttatcggagggaggagggaggatgcgttgtggggttgtttttgttataagcgaattttgtgtttgttttagaagtgaaaattgtttagtttaagaaattgatgttatttgatttatttaaaggttaaaatttgtttttttattttttgtataattgttttattgtttgatatttaatgtattcgttatttgtatacgatagtagtattttgattatatttgtacgttgtaattttatttatttttgatgtttttaaaaaatgatttttaataaggagagggaaaagaa

SEQ ID NO: 6 - DNA, 6591 bp, Artificial Sequence
  chemically treated genomic DNA (Homo sapiens)
tttttttttttttttttgttaaaagttattttttaaaaatattagaagtagatgaggttatagcgtataagtgtggttagaatgttattgtcgtatgtaaatgacgagtgtattaagtgttaaataatgaaataattgtgtaaagaataaaaaaataaattttagtttttaaataaattaaataatattagttttttggattgaataatttttatttttaggataggtataaagttcgtttatggtaaaaataattttatagcgtattttttttttttttttcggtagttggtggagggttcgtagcgggttggttcgtaggagaggttgtgttgaagttgtgttttttttaagttagttgtaaatgttttttttaggggttggaaagatggttaagttttgtttatgtttgggcgggagtttggtttagtttgggttagagcgtttatttattattatttttaaataatattattttagtttcgaaaataaaattatatttatatttatataatatttttttattttttttagtagtttttttttttcgtagtattcggggtttatgttatagataagggatattaagttttcgttggtgaagggcgaatatttgatggggcgcggttatattttcgcgttaatttcgttttcggggattagaggcgggggtggggtgaaaatggggcgaggggagtcgaatagatatatagttatatattttgaggttcggttttttagaaaagtatgtttaggggatttttggtatttagtggggagtttaggtttgtgtaatatagttggacgtatatagatattgggatgggggcgttcggtgtttacgttaagttttggcgtaagttagaggcgttagtagatagatgttaggtaggtcggtggggtttttgtgggatacgggttttttttttttcgggttcgcgggggattggtttaggagggggagtcgtgtcggtaggggtaggcgcgacgggcgcggtttttatagtattttgtagtagttgatgtagtcgttttgggagtcgtagcgtttttgtagcgcggcgcgcgtggtcgtttcgaagatttcgcgtacgttttttttggttttggtagagtattcgaggtagtcgtaggtttggatgcgtacggttatggcgcggtcgttattcgtgcgtacgggtttttgttttatgcgggttagttttgtgcggatatgttcgtcgttgcgtaggttttttttgttggttattaggatgatgggtatattgggatagaagtgttttatttcggggatttatttttcggggatgttttttagcgagttcgggttgtttatcgagaagtatatgagaatgacgtcggtgttcgggtaggagagcggtcgtaggcggtcgtagtttttttggttcgtcgtgttttatagcgttagttttatttgtttgtcgtttattttaatgtcggttatatagttttcgaagacggtgggtacgtatatttcggggaattcgtttttattgaatacgattagtaggtacgttttgttatacgcgtcgtcgtttattattattagttttttgcggatggtcgttatgagcgggtcgggttcgggtagtaggagggggttcgcgaacgtttcgttgttttttcgttcgtcgtttattgtttatttcgggttgcgcgtaggtggcgagagggtcgttagttgtattcgggtttcgcggtggcgcgttttttcgttgcgtttcggttgtcgcggcgggggcggtgggggcgcgggggtatagggcgtatcgtgcgtttcgtcgcgttgttttcgggcggtggtcgttttgtttattttaggtcggggatcggcggttttgtgcgtaacgcgggttcgggtagtagattcgggcggtggattcggtttagttttttttcgggttttttcgggtttcgttgagtatataagataatagttttaattagattgcggtggtagatgagggttgcggttttagcgttcgttatttaaagagttcggttatttttttaatatagtcgtttaatgggaaattagtcggttgagtttatcgttgcggagtttagttttgattggtcgttttttgtagttcgagggcggggtagggttagtttgattgacggtttaggtcgtcgggttgggagaggtagcgatcggggagtttgcgttgttgttgtcgttgcggggttttggcggtattcgggttttttttttcgtcgtagcgtttgcgcgcggggttcgggagttggttgtttggagtttttagggtttgggcgagcggtttcgagataggttttatttagtggggcgttggcgatttttatttagaattgtttttttttttggtaaattttcggcgggtggtcgggtttgtgggggaggggtagtttttttaacgtggttttgtttttaaataaatagatatatatatatatatatatattttatatatatatttttgtttttaaataagagtgttttttttttttttttggaggtggttttttttgtggtttagggttttattcgggtattcgtcgtgggttagtttcgggtttggattcgagaggcgatcggttggttgtaaattggtttttttaagtttcgtcgtttttattttttttaatttttagtttaggtttttaggtgaagattaagggaagaggtgcggagtggtttaagtttgataacggaaagggaaggtcgaggttcgaatatttggaggaagttatcggataggaagaagttttttcggtttttttttttattatgaattttgatttcggtttttaaaatagagaattgtttgagataaattgtataatagaatatatattattgtataatagaatgtataatagaatatatattattgtataatagaatgtataatagaatatatattattgtataatagaatgtataatagaatatatattattgtataatagaatgtataatagaatatatattattgtataatagaatgtataatagaatatatatttgtataatagaatgtataatagaatatatattattgtataatagaatgtataatagaatatatattattgtataatagaatgtataatagaatatatattattgtataatagaatgtataatagaatatatattattgtataatagaatgtataatagaatatatattattgtataatagaatgtataatagaatatatattattgtataatagaatgtataatatttcgggtttaatagaatttaattattttaagatttttgagtagacgaaaaggtttgaggttggagaagaggggaggagtaaggggttagtaaatggggtatagcgggttagggggtgttttttttattggggcgtagttttttgatgtatattaggattgaatttatttattttgtagattttgtatgaaatgatagtatcggtgattcggaaagatttaagttaatcgatttttacggataaaagaggaagaaggggatagggggaaaggggagtcggggagggttttcgggtaggagaaatagtttgaatataagtaggaaggtgggaaggagcggggtaaattttaggagttgtatatgttggggtttatgagtgttaaagtattaatagtatgggttgggttttgtttatttattgtatgggaaatgtttgtaaattgtttttttagtaaaggagggatttattatatgatcgggaggtggttgttttttgttttcgtttttgtttcggtttttgttagttgttggagggttaggattttgttttattttcgtattttgaagatttagtataatgtttggtatttataaggattagtaaatgattgtggggaattaattcgaatgtttagaaacgtaggtggaattttttgggggttttttattttagttttatatttcgttttaataattatttaattaggtcgggtatagtattttatgtttgtgatttttgggcgtgggaggtttaggttggagaattgtttgagtttaggagtttaagattagtttgggtaatatgataaaatttcgtttttgtttttgagaaaaataaaatgggatggcgtggggaggagagtggtttgtatttataattttaattatttaggaggttgaggtgggaggattgtttgagtttaggagggtaaggttgtagtgagttatgattataatattttattttagtttgggtgatagaatgagattttggtttaaaagaaaaaaaaaaagtaaatattaaaaagaaaattattaagtaaatttatgtagttaattgtgattgaatttcggtgtttttatatgtaatttatatgttaagagttaggtttttatatggttttatagatgaaattagattaaataaggtagtagtgttgttaagtttagagttttttttagagggaacgttttatttagacgattggaagtgttgtgttttttttagattggatttatattattataataatcggttaattagtttttttttgttgttgttggtcggggcgggggggggggggggggtttgttttttagatttaaggaattgatttgttagtaagtaaatagtttttttgtttattgatttaaggatgtaatttggaagtttttttttttttttattagaaaagttttatttatataaatttttttttttttagttaaaattttttatagttgtattgttaacgtcgttttttttggttttaatatagtttgggaaatttggttatgtttttaaattttaaatattaagaaatatgaaataaagttttgtattatgtgtttttttttttaaaaaataaagaattcggaaaacggattgaattttttcgtgttttgatttttaggaatattatatgaggtgttttaagtttaaattttaatattgtaataatttttaaaattatgtagttggtaaaaatgttaaagtaaataaatagatttgtgttttgtagtaatttttttagtaatttttttttatggtatttttttttttttagtttaggatattttgataagttttgtagagattggttgtttttaagattgttttatatataggataaattttttttaattaggtgatatgtcggataagtttttttttgttttttgttttttataatatatttttttagatagggataaaatttgatttttttatgagaataagttattttattttattttattttttgagatagagttttattttgttatttaggttggagtgtagtggtatgattttggtttattgtaatttcggttttttgggtttaagtagtttttttgttttagattttcgagtagttgggattataggcgtgtgatattatgtttggttaatttttgtatttttagtatatagggtttttttttgttggttaggttggttttaaatttttgattttaagtgatttatttatttagatttttttaagtgttgggattataggcgtgagttatcgttattagttaagaataagttatgttaataattaattttattaatatatttattttatgatataatatatttatatttgtgagatagggaagttgtattttagataaaaggaggatattaatttatttttaatttttaatttaatttatttggttttgtttgtttgttaggtgttttttgtaaattattttatattttttaaagattagagtagagttggaatttttattagattttagtgttattttgcggtaatttttatggggttttttttttaaaaaaaaaaaagaaagaaaagaaaagaaaatttttggttaaaaagtatgtattttatggatatttttattttaaaatattttagagtatataaaattttgaataatgttttataagtagatttttagaaattttttatatgtatttatatatatataatttttttatatatattttataaaaatattaacgaaaatgttatttagtggaaaaaaaaatttttttttaaatagtaatttttaaaagaaattagaagagaaagataaagtttatggatttttattaatttatagattaatggattttatttttcgtttattataatgtatagaaatttaaaataattttagttataaaaattatttcgtttttgttttagttaagaaagttattgttggatattttggtatagttagaagtaataataatttatgtattaggaattagtaatgtaatagatatttttgataggtatttaatttaaaaatattttcgtcgggcgcggtggtttacgtttgtaattttagtattttgggaggtcgaggcgggcggattacgaggttaggagatcgagattattttggttaatacggtgaaatttcgtttttattaaaaatataaaaaattagtcgggcgtggtagcgggcgtttgtagttttagttattcgggaggttgaggtaggagaatggcgtgaattcgggaggcggagtttgtagtgagtcgagatcgcgttattgtattttagtttgggcgatagagcgagatttcgttttaaaaaaaaaaaaaaaaaaaaaaaaatttttttt

SEQ ID NO: 7 - DNA, 3952 bp, Artificial Sequence
  chemically treated genomic DNA (Homo sapiens)
gaatttatagttgggattcggaagtatttttaggcgtattttttgaggagtaggtaggaattggatttttggaaattttaggtttagggaagaaagcgaattgtgaggaggaacggtggtttgggtttgaacggttttgagaggtttttaagtttgggggatgacgttgggttgtacgattttaggaataagagggtggatatttttttttaattaatatattcgcgtcgggttttgggatttttcggcggatatttttttttagtttcgtttttcgcgaggttttaggtgtagtaggagcgggtggtcgtttggttataggagggtagtagcggttttttttgattttatttcgagtattttttaattttttcgacgtcggtttttttttaggggattgaaggttgggtagagtttgagtttattcgggtcgtgtttttttcgttcgttcggttttttcgtagtttaggaattttttcgtggtttttttcgatttggaggggtggacgtttttggtttttagttttcggtttgcggagggggtcggtggttgcggttttgcgcggggtcggggcgggtcgagttaagggtcgttttcggtcgattttttttttgtcgggttcgtttttttcgtcgcggcgttggaggagggcggggcggggttttggggttagtttgagttttcggtatcggtcgcgtagttggaggcggcggagcggaaggtattttgggtcggggttgcgggcggtggggcgttttgggaattcgtttttaggagagtattttttttttttcgttggttcggagatcggggttcgtgcgaggaggggtttcggtttgggcgtggatttcgttttttttaagcggagtcggtattcgggttgggcggtggtcggatcgcgtcggttttttttcgggttgtagcgagggggttcggatttgtcggtaggggttttggttttttgaggttcgagtcggagtttttttttttttttttttagtttttcggaatttgtttcgtcgggcgaggggcgagggaattttaatttagacgttttagtttttagggtgggcggtcgtaggggatttagagtgggatggggtgggaatttttttaggttaggagggaggtatggcgggaataggggcgggatgtgattattggggtttgttattgttcggtagggtttggacgtcgttttggacggtttttggagttcgtttgtgttgaggataagggagatggggaaggatttaattttgtgtgtgtgtgtgtgtgtgtgtgtgtgtgtgtgtgtgtgtggtgtgtgtgtgtgtgtgtgtgtgtagagagagagagagagagagaaaatgagattgagaattttttttttttatattcgaattaagaaagagtattttggggtttgggattgggatttcgaggtcgagtttcgtttttattttggttttaaagttgagaatgtagtattttttggtatttttagaacggattttttttttaggtgtagggtgggtcggtaaagttaatcggtcgttttggattatttgggaatttaagagagcgattggagagaggtttgatgtagttatattgttttgttttggggaaggttttagaagttttaggttttattttaggttttgtgtggggtttagttgttttttttaaggggttagtgggatagtttttttggggttgttttttatagggagttgtttatgttattttggttttgggtttagtgttttggtttgggttgtttgttgttttggtttaattatagtttggagggaaagttttttaattgggttggaggttttaggttttttaacgtatgttttaatttcgggtttttgttttttgttttttattattttggtgtcgtttgaattattttgttggggggatagtagtggtatatttatgtttaagtgattggtttttattttagtagtgattgttttttattaatattgtttattttaggttggggttattttagtttatttttataaaatagggtaaggtgaattaatggagtgggtggaggagttggaagaaattttagcgttagttatcgggatagaatttttaaggaattttttttttggaggatggtttttatttttggaggcgatttgtcgatagggtgaatgtttttttgtttgttttttggggaattagagagagttcgttttgtggtgggaagagtgtggttgtgtattttgaatttttgtaaattttttgatttatgtttataaaattaatagttttgtgaatgtgtttggaggtaagggaagggttatttaggatttatgttgaagggaagaggtttggggttggagtattcgttttttaaagggtagtgtgaggtggtggtggggtgtggggagtagaggcgtttagttagtttagtttgataggatgtgggattgagagaaaaagttaggtttgaggttgagattaggttatcgtcgtttttttaattgttttttgtttggttggtgttgggattggtttttatttgtttttttttttggggttttttttagtttagattttagttttttttttttttttaatagttttgattttattttagttttagagttcgttttttttttttgtagtttgggaattttagtcggttggaggttagtttttttttttagggaaggaggaagtgagggaagttgcgaaggtgtgatgaattgtgtagatgttcgttgtgtgtgttgggggtgggggatatatggaagttcgggaagttgattttttgttttgagttatagggaggggtgggtagggtatgcgggtgagttggattgagggaggaaggggttgttttagagtgggtggaggtgattttttggtggattttttttagttattgtgttgtggtagatgtatggttttttatagtgtggttattgttttttgtcgggggttgagtgatttagtgttgttggtaggtttaggaggaaggggggaggaaggtagtttgtttaaattcgagttgtgggtattgttgggattgagttttttttgtattatttggggttttggggatcgggtggggtggattagggaagttggttggttgttatttttgttttttgtttgggtttttttgtttttgtttttttttttgtttttgaggtgatatgtcgaagaggtacgattttgagttatatagttttgttttgggtgttgtttttgttttttataagttatagttttgaatttgtgttaattttattgagttttagttttttggtttgttaaaatggaaagtgtattatttattttttaggtatttgggtatcgaaggagataatttttgttaaaatgttcgatagagtgtttggtatttaggggttttataattattttttttttatttatttattatttggtagttggttttgttattttggttttagagagggattttttatttgtgattggataggtatgatttgtgttgagggatagtttgttttagattggattttagagattattaaattgtaaatgtattaaaattttggtaattaatgaagtttgattcgaaattttgatgtgtgaagtagatagaagtttgttttttggacgtttcgtatttttgagtagttttttagttatttggagtttttaggttggtaagtggattagattgaaatttatgttttttagtttttaagtggggttattatttattttttattattgtattttaatttatcgagggagatttgtttttgatttagagattaggaattttaagttttgttgtcgtataattggtgttttgttagaatatgtttgagtaagttttttgtttttttgttagatgtttcggtttttagggaggtttgggggttttagagaagtgtttttggatttaatggtttttttttaaatttttaatacgttttttttggtagt

SEQ ID NO: 8 - DNA, 3952 bp, Artificial Sequence
  chemically treated genomic DNA (Homo sapiens)
gttgttaggaaagacgtattggggatttgaggaaaagttattaagtttaaaaatatttttttagggtttttaaatttttttggaaatcgaggtatttagtaaagggatagggggtttgtttaggtatgttttggtaaaatattaattgtgcgataatagagtttgaaatttttaatttttgggttagggataggtttttttcgatgggttagaatatagtggtgggaggtagatgatgattttatttgggagttggaaaatatgagttttaatttaatttatttgttaatttggggattttaggtagttagagagttgtttagggatgcgggacgtttagggagtaagtttttatttattttatatattagggtttcgagttagattttattggttattaggattttgatgtatttatagtttaataatttttaaggtttaatttagaatagattgttttttagtataagttatatttgtttagttataaatgaggagtttttttttaggattagagtagtagaattagttattaggtggtaggtgggtaaaggaagaatagttatagagtttttaggtgttaggtattttgtcgggtattttggtaggaattatttttttcggtatttagatgtttggaaggtagatggtgtattttttattttgataaattaggaaattaaggtttagtgaggttaatatagatttagagttgtggtttataaggggtagggatagtatttaaagtaggattgtgtgatttaaagtcgtgttttttcgatatgttattttaggggtaggagggagagtagaagtagggaaatttagatagaggataggggtagtagttagttagtttttttggtttattttattcggtttttaaagttttaagtaatataaaggaggtttagttttagtaatgtttatagttcgagtttgggtaggttgtttttttttttttttttttttaggtttgttagtaatattgggttatttagttttcggtaggggataatgattatattgtagggagttatatatttattatagtatagtgattgagaagaatttattagggaattatttttatttattttggaatagttttttttttttttagtttagtttattcgtatgttttgtttatttttttttgtgatttagggtaaggagttagtttttcgggtttttatgtgttttttatttttagtatatatagcgagtatttgtatagtttattatattttcgtagttttttttattttttttttttttggggaggggaattgatttttagtcggttgaagtttttaggttgtaggaagagagggcgggttttggagttgagatgaagttaaggttgttgggaagggggagggggttagagtttgggttgggaggagttttaaaagaagagataaatgagggttagttttagtattaattaggtagggagtagttaagaaagcgacggtaatttgattttagttttaaatttagtttttttttttagttttatattttgttaaattgggttgattgaacgtttttattttttatattttattattattttatattgttttttaggaagcgaatattttagttttaggttttttttttttaatatagattttgagtggttttttttttgtttttagatatatttataaaattgttggttttgtggatatgagttagagaatttataggagtttaaagtatatagttatattttttttattataaaacggattttttttgattttttagaagataagtaagaaggtatttattttgtcggtagatcgtttttagaaatggaaattattttttaaaaagagggttttttgggaattttatttcggtgattgacgttgggattttttttaatttttttatttattttattagtttattttgttttgttttgtgaagatgggttggggtagttttaatttggggtgggtagtgttgatggagggtaattattattggggtgaaagttagttatttaggtatgagtatgttattgttgtttttttagtagggtaatttagacggtattagagtggtgggaggtagaggatagaaattcggggttgaggtatgcgttaagggatttggagtttttagtttaattagaagattttttttttaggttatgattgggttagaatagtaggtagtttaggttaggatattaggtttaaggttaagatggtatggataattttttgtgagaggtagttttagagggattgttttattgattttttaagaggggtaattgagttttatatagggtttggaatggagtttggaatttttggggttttttttaagataagatagtgtggttatattagatttttttttaatcgtttttttgaatttttagatgatttagagcggtcggttgattttgtcggtttattttatatttagggaaggaattcgttttggagatattaagagatattgtatttttaattttaaaattagagtgagggcgggattcggtttcgggattttagttttaaattttaggatatttttttttggttcgagtatgaagaaggaggatttttaattttattttttttttttttttttttttttatatatatatatatatatatatattatatatatatatatatatatatatatatatatatatatatagagttggatttttttttattttttttatttttaatataagcgggttttaggaatcgtttagggcggcgtttagattttgtcgagtagtggtaggttttaatggttatatttcgtttttattttcgttatattttttttttggtttggaggaatttttattttattttattttaggttttttgcggtcgtttattttgggggttggggcgtttgagttgaagttttttcgtttttcgttcggcggggtaggtttcgggaagttgggaggagaagggaaggggtttcgattcggattttaggaggttagagtttttgtcggtaggttcgggttttttcgttgtagttcggggaggggtcgacgcggttcgattatcgtttagttcggatgtcgatttcgtttggagggaacggggtttacgtttaggtcgaagttttttttcgtacgggtttcgattttcgggttagcgaggaagggaaagtgtttttttggggacgagtttttaagacgttttatcgttcgtagtttcggtttagggtatttttcgtttcgtcgtttttagttgcgcggtcggtgtcggaggtttagattgattttagggtttcgtttcgtttttttttagcgtcgcggcggggagggcgggttcggtagggggagggtcggtcgggggcggtttttggttcggttcgtttcggtttcgcgtagggtcgtagttatcggtttttttcgtaggtcggggattgggggttaggggcgtttatttttttaggtcggggagagttacggggagatttttggattgcggaggagtcgggcgagcggggggagtacgattcgggtggatttagattttgtttagtttttaattttttaggggaggatcggcgtcgggaaagttaagaggtgttcggggtggggttaggaagggtcgttgttgtttttttgtggttaagcggttattcgtttttgttgtatttgggatttcgcgggaagcgggattgggaaagggtattcgtcgggaggttttagggttcggcgcgggtgtgttggttggggggagatgtttatttttttgtttttaggatcgtatagtttaacgttattttttaaatttgaagattttttagagtcgtttagatttagattatcgtttttttttataattcgtttttttttttgggtttggaatttttaggagtttaatttttatttattttttaaagggtgcgtttagaaatgttttcggattttagttgtgaattt

SEQ ID NO: 9 - DNA, 8169 bp, Artificial Sequence
  chemically treated genomic DNA (Homo sapiens)
  unsure 2047, 2136, 7481, 7492, 7502..7503, 7505, 7511: n is a or g or c or t
ggaattatatggtttttagtaatagtatgttgttatttattatagtaattttttttggttatatggaaaaatttagatatattaagaaaagttaagagtataaaattaagttatattggagaaaaacgttgtttttttacgtttttaagataaatattttaatgttaggttaaaatagtaatgttagaattaaaaaaagttaaagaggagaataattattttaggttttttttaggggagaaaaaaatgaaggaaatgatatattgatttgtaaattatgtatagtaagaaattgtaaaagatgaatttttgtaatatgaatttgagaaataaaaaaaaaaaaaataattgtattttaaggaatgaaattattattttaaattaagaagataatatttttaatttaaaattaggaaaattaaatagatgttaaggagaagatatttgtttaaaaatagagtataaatttaaaaattaaaattttttaaaattttattaaaattagataatattttaagaaattttgttgttttaaatataaggaattagattttggttttgtattagtgtttgttttttggttttttatttgagaacgtttaatttttagaaaaatatataaataatttgtttttaattttagttaagttaataatatataaaattttttttattagtttattttttattagttttttttaattttagattttttatttttttaatttttattttttagttttataatttttttttttttaaaaatgtgggataattaattattttattttatttgattatgatatagatatttattttgtatatatgatttaatataaaattttaagattttaaattatatgagtttatttataaatatttattttatttatagttaatttattttttaataattatatttatattttttataaaaattgagatattagatggagttggttattattttaagtttttttaaattaaataattatatagtttgttaatatgaggtgtttatttatataagagttataaagttaaatatatgggtatttgtagataatttagaaaatataatttttgtttttttttttagaggtaaaggtttattttgttgtttaggttagagtgtagtggtgtgattatagtttattttagttttgaattttgggtttaagggattttttttttttagttttaagagtagttgggattataggtatatgtttggttaatttttaaatttttttatggagattgggttttgttatgttatttaggttgattttaaatttttgggtttaagtgatttttttattttggtttttttaagttttggtattgtaggtgggagttattatttagttatagttgtttttgttaaataatattaaattaattttatttattaaagaattgtataaatatatattattttgttttaggtttggtttatagttttatgattttaatagtataggtaaatataaaattgattagtgttggtgtttagaaattgatatgttaaaatatggtatttgatacgttaaattaaagaagttttaaggtttttttgattttttttttaattttattattttttttaaagaagttgaagtttttttatttgtttaataattagatttattaaggagagtaattgttggtttttttttttttgttattttatttgttaaagaaaagaagattaaaatgtaattatatttaagtagatttttatagaagtataatgattgtttttaaggattatttaaattttaaagaaaattatttataagttaatatttgttgtttaatttaattatttttttattaattatttattgttttttaataaattttttttttttttttataatttgttttattagaatttaagttttttattttttttgtaattttaagattagtgtataaatttttataatttattgagttaggatttttagtaattttggggggcgagagtatagttttaatatagtaatatagtaaaatatttatgatatgtagaagacgtttntatttattttattattaatataaatttattattttttaaagaattgagttatatgatttaaaaaaatagggttaattattatgttttgntgtggtgtttatttatttaaattaattagattaatattttttaagggattgtggtttattatattgaattttattatgtagatataatatataatataatatatgtatatatgtgtaaatatatttaaataaatatatatataaaggttttttagtttttattttagaattttagttgtgagatagtaaaatatataaatttgttggtttatagagaatagttggatttaaattatttttttggtaaaatgagataaaggttatgaattaaattttggtaaaatagtttgagttaattattagtgtagggattaaagggaaattttagtgaaggtttattgaaaaattaatttgtaaaaggtagattaattggagaaaaagtatataaatgtatttaatatgtatatatgggagtttgtagaatgatgatttaagtatatagaggaaattgtttatttttaatttaggattaataaaatatagatagttatgtagaaatatgattggatagaaagagtatgagttaatgttaataaaatgagtggggaaatttagtgaaaaaagttaaattttgtaaaatatttagaggtttattttgagttaaatatgagtgattacggtttgtgatatagtattaggaggttttgagaatatgtgtttaaggtgtttggattatagtttttttttatatattttaggaagatagaagatataggtaaaaatattagttaatatatgtaaggtatatattggtttgatttggaaagtcggtatattttggaggaggaggggtttggttagtggtggtaggagggaggttgtggaagttagggtttttgttatatatgtgaagtttgtaatatgttttagaaagaatagatggtatatgtattttaaaaggtaaatgattttaaacggtgttagatttttagttaaatttttttcggattagagaaagatttggaaagggaaggagattgtttatagaatataaatttttttcgtaaaagatagttttgtataggattattttaaaatatgttagaaatatattttggggtaaaatattttgatcgtttttagggttgttatttgttatgtgatgttatgattagaattaggttggaatttgttttgagataggtttttattttgttgtttagtttggagtatagtgtttttgattacggtttattgtagtttcgattttttttgatgtgggaggtttaagtgatttttttatattagttttttaaatagttgggattataggcggttattattatattgggttaaatttttttaaagtagagataagttttttttatgttgtttaggttggtttttaatttttggttttaatttttttattttttaggattataggcgttaggttagattttataggtttttagatttttacgtattaggtatttggtagggggagggattatagtggtagaagagtagtattagtggtttatattatatattttggttttagttggttggggtatataaaattaggtgttatcgttaacgattaggtttatagggtattgttgttaaaatttgttgttaataatttttatatattttttaaaacgttcggtaggcggtggtgcgtatttttaatgtattcgtcgttagttttataggtaagggagaaagaagttagacggagttcggagatgtggagggtagacgtaggcgtatttggaaaagggattggcggtgggaggcgtagagggaaaaaggaacgatataatcgggttttttagtcgttggcgaagttcgatggggcgttttgcgagggttcggcgagggttttgttaggatagtagtagtgcgtttaaggagtgagaggtattcggggttattggagttagatttttaattcgttttagtgggaggcgaagaataacgaaagtttcgtatttttatttttttaatggttaatgatattaaaggtttttatatggttatttgttatttgtatatttttagtgaaatgtttgtttatgttttttgattattttttaattggatttttaaaaataattgatttttgagttatttatatattttagatattggttgtatgttagatatatggtttgtaaatatttttttttaggtaaatttttttagtatcgttatagggttttttataaagtaaaagttttaaatttatggagtttaatttattaatatttttttttatcggttttgttattaatgttaatttaagaattttttgtttagttttagataatagtttgttgttttttaaaatcgttttgtaattttattcgttatagttatatttagttatttaatttttatgtaagggttatttttggcgggggggaatttatagatgttttgtttttttagtattatttgtggaaaagattatttgttttgtattaaattgtttttggattttcgtttaaaattagttggatcggtttttgttggtaaagttttgtttgaagtttattttaataggtgagaaaaagtttatagtttaatagtttttttttaatttgtaatttcgttttgaatttttggattagtttttcgattgttgtagatgttaagcggatttcgcgtcgttttgcgttgggttagttttttacggttggttttttattacgtattgcgtaagcggaatttatgtttgttatttatattttttgcgttttcgtatttcgtttttgtgcgtaagtcggaatataaaatcgcggaggagtgagtttttggggtgtttagttggttgtcgcggtagttttttcgagtagcgtatttgttttttaggttgtttggttcgtgttttcgagaaaggtaagtttttttttcgtttttttaggggtatttgaaaataataagtgttagataaagtagtagatgttgttgcgtagtagaagtttatgggcgagttgtttttgaaattggaattaggttttttttggcgcgattacgtaagaattattcgtagttttgcgtttttggtaggttttgtaattgtattttggatagtttcgttgggaagttagtattttttaatatagaagaacgaggtttgataagtgtgcgagtttaaaggttgatatagtgtttattattatagttgcgtaggtagttagtgtttaggaagtaatagtggagttatgtagtgtgaaagtaagattgaaatgggcgaggagggtagtagtcgttatagttattagagagaaatttgattttgtaggtgcgtggtgatgtttatgagttaggttggtgtcgtaatagtagcggcgggattttgagtttcgtacggtcgttgggtttggacgttttttggtttttggaaatttttattttttttttagtttgaggttaggtggtttgggaaggtggaaggagtgtggaggggagtggggggggggggggtttattgtttgagaatgagaattttttttatatttggaaattttagttattacgtgtgttttttattaatttttttttttttattttttttttgatagagacggcggtttttttatgttatttaggttagttttgaatttttgtgtttaagcgatttttttattttgattttttaaagtgttggaattataggtatgagttaatgcgttcggttgttttattaattttttatgaatgaatttgtatatatattttttagagtaggaagtaatgtaaaatagaataattagtaatgtatattttttaatgtgggatgttggtggttaagagatatttggtttttattggaatttttgatattaatatggagtttataatagttgtggagagtgtagataaggttaggatttttgtgattagagaatttttagtgcgtgaagatttaaggaaagttggattgttgatttttgttaataaataagatgtgaaagattgtattattgtagtagaaattttttagttttttaagttaaattttattaaaggttattattgttaaaggaattgtgtttaggatttggatagttgatgttattatttaatattagatgatattaattaattatattttatagattggaataaagtgttagattttatttgaaagttgtaaaaatgaatggtttagatatatgtatgtatttattttatattaatttttttatttattgtattaatttttttggttttttttaattaagaatataaaattatttatttaaattttgttatttaagtttagaatatttttagaattatattattttaaagaagttagattagaattagaagtaagttaagtttgaagatataataattagtaataatattttttttttttaaatgaaaattttaatatggggtgggtatgttgtgttatatttgtaattttaatattttgggaggttgatgtaggaggattatttgaatataggagtttaagattagtttggataatatagtaaaattttgtttttataaaaaataagaaaattagttgggtatggtgttatatgtttgtagttttagttattcgggaggttgaggtgagaggattgattgattttaggaggttgaggttgtagtgagttatgatcgtatgattgtattttaatttgagggatagagtaagattttgatttaaaaaaaaaaaataaaaaaaaaaaaattattattaaaattttaatatggatatattatttttttatgggatttgtatattttaaaaagggtttttttttttagtattgggagagtatgtgtttaattacgtagttagtaagataggttagtttatatagggagtgtgttatttataaaaagttttttttttttttttggtattgtatatgatataattatagttgtatttgaagagaagtgtattttaaggattattattatttagaaatatgtataaatttttatatttagtgttataggaatgatattgttttgtattatttttatttttgtttagaggttagttatgtggtttgtttgtatggtgtttagaattttttttatttgatttaggatgtttttgaagtagtttttttgggtagttgtttggtatttaggatatatttgtgagaaaagttttttataaatttaatttattatgtttatttttgaatttaaaaagtttattgattgtttaaattttgaaattttttttatttttataaggttgaattaaaagtattttgttaaaggtagtagttatggtaaaagaaaaattattgttttgtagaaaaatttatttaatatttataattttttttaattagagattagattttgaagagaaaggtttatatatatatatatatatatatatatatatatanttttgtttttnttttttgttnntntttttntatttattgttattgtgattaaggatttatgaattaagattttttttttagtttttggtggtatatggtgatagtatgtttagagtaaaggtgttttttatgttttttttggggttgtattgattgtaggtattttttttttttatattttatattattgatattaaaaattttttttttttttttgtattgatgattttgtagttttaattagggcggcggtgttattttaaatgttattttggtatttagttttatagagtggggaaaatttttttatttgtttttttttgattgtttagttttttttaattaaaattttaattttataagcgaggaaatgagagtgttttttgtaggggtgtagtgagaatttaataaaatagtttaaggaaagaaaataaaaggtagtattgttgtattttttagatggtaaaaagtaaattattatgtttgtttaatatatattatttgttggtttttcggtttagtaggttgaattgtgtgtttgggaatttttttttcgttgtgtgtatttttttacgttatagggtggattttttttagagttttagtggagtagttggttaggttgatatgatttgataatattgtaggttattattattattttttatcgttttattttttttttagg

SEQ ID NO: 10 - DNA, 8169 bp, Artificial Sequence
  chemically treated genomic DNA (Homo sapiens)
  unsure 659, 665, 667..668, 678, 689, 6034, 6123: n is a or g or c or t
tttaggaagaaagtgagacggtgagagatggtagtggtaatttataatgttgttagattatgttagtttggttagttgttttattaggattttgaagagagtttattttgtgacgtaaaggggtgtatatagcgagaagaaaatttttaggtatatagtttagtttgttagatcgagggattagtaggtgatatatattaaatagatatggtggtttgttttttattatttagaaagtgtagtaatattattttttgttttttttttttaaattgttttattaaatttttattatatttttataagaaatatttttattttttcgtttgtaaaattaagattttaattgaagaggattgaatagttaaagagaaataggtgagggaattttttttattttatggggttgaatgttaaggtgatatttagagtgatatcgtcgttttggttaaagttatagagttattagtataggagaaaggagggggtttttggtattagtggtgtgggatgtagagaggggaggtatttgtagttagtgtagttttagaagaggtatggggagtatttttgttttgagtatgttgttattatgtgttattaagagttgagggaggggttttagtttatgaatttttagttataatgatagtgggtgngaaaanannaataaaaagnaaaaataagantatatatatatatatatatatatatatatatatgaatttttttttttaggatttaatttttgattagaaaagattgtaaatattgaatgagtttttttatagaatagtggttttttttttgttatggttattatttttaataaagtatttttaatttagttttatggaaatagagaaaattttaggatttgaatagttaatgaattttttgagtttaggaataaatatagtagattaggtttgtaagaaattttttttataggtatattttaaatattagatagttgtttagggggattgttttagaagtattttaggttagatggaaaaagttttaggtattatgtagatagattatatagttggtttttggatagaggtaggaatagtataaggtaatgttatttttgtggtattaggtatagaaatttatatatgtttttaggtgatgatggtttttaaaatgtatttttttttaggtatagttatgattgtgttatgtataatattagaaagagaagagaggttttttgtgaatagtatattttttatataaattagtttgttttgttggttgcgtagttgaatatatatttttttagtattggggaaaaggattttttttagaatgtgtaagttttatgagagagtaatatgtttatattagagttttggtggtggtttttttttttttgttttttttttttgagttagggttttgttttgttttttaggttggagtgtagttatgcgattatgatttattgtagttttaattttttgggattaattaatttttttattttagtttttcgagtagttgggattataggtatgtgatattatgtttagttaatttttttattttttgtagggatagggttttgttatgttgtttaggttggttttgaatttttgtgtttaagtgatttttttgtattagttttttaaagtgttgggattataggtgtgatataatatatttattttatattagagtttttatttgaaaaaaaaaaatgttgttgttggttgttatatttttagatttaatttgtttttaattttagtttggtttttttaagatagtgtgattttaagagtgttttaaatttaagtggtaaaatttaagtagatgattttatatttttgattaaagggggttagggaggttaatatagtaaatggggaaattgatataaaataaatatatatatatatttaaattatttatttttgtagtttttaggtaaaatttagtattttattttagtttatgagatgtggttagttgatattatttaatattaaataatgatattagttatttaaattttgggtataatttttttagtaatgatgatttttaatagaatttagtttaaaaaattaggagatttttgttatagtgatgtaattttttatattttatttattaataaaaattaataatttagttttttttaggtttttacgtattaagagttttttagttatagaaattttagttttgtttgtattttttataattattataaattttatgttagtattaagagttttagtaaagattaaatattttttggttattaatattttatattaggaaatgtgtattattaattattttgttttatattattttttgttttaggggatgtatgtataaatttatttatagaaaattggtaaagtagtcgggcgtattggtttatgtttgtaattttagtattttgggaagttaaggtgggaggatcgtttaagtataggagtttaagattagtttgggtaatatagggagatcgtcgtttttattaaaaagaaaataaaagaaaaaaaattggtaaaggatatacgtgataattgaagtttttagatgtgaagagaatttttatttttaggtagtggattttttttttttttatttttttttatattttttttatttttttaggttatttggttttaggttgagggggaggtgaaagtttttaggaattagagggcgtttaaatttagcggtcgtgcggagtttaaggtttcgtcgttgttgttgcggtattagtttggtttatggatattattacgtatttgtaaggttaggtttttttttggtggttgtggcggttgttatttttttcgtttattttaattttatttttatattatatgattttattattattttttgaatattagttatttacgtagttgtaatagtggatattgtgttaatttttaagttcgtatatttattaaatttcgtttttttatattaaaaagtgttagttttttaacgggattatttaaagtgtagttgtaggatttgttaggagcgtagggttgcgggtggtttttgcgtaatcgcgttaagaaagatttggttttagttttagggataattcgtttataaatttttattgcgtaatagtatttgttgttttgtttggtatttgttgtttttaagtatttttaaaaaagcgaaagaaagatttatttttttcggaggtacgaattaagtagtttagaagataaatgcgttgttcggagagattgtcgcggtaattaattggatattttaagagtttattttttcgcggttttatatttcgatttgcgtataggagcggggtgcgggggcgtagggagtgtgggtaataggtatagatttcgtttgcgtaatacgtggtaagaaattagtcgtgaggggttggtttaacgtagagcggcgcgaggttcgtttggtatttataataatcgaggggttagtttagaagtttaaggcggggttataggttggggaggaattgttaaattgtggatttttttttatttgttggaataagttttaggtaaaattttgttaataaaaatcggtttaattgattttagacgaaagtttaaaagtagtttaatgtaggatagataattttttttataaatgatattgaaaagataggatatttatagattttttttcgttaaaaataatttttatataaaaattaagtggttagatataattgtgacgagtaaaattataaaacggttttaaaaaataataaattattgtttaaggttaggtaaaaggtttttaaattgatattagtggtaagatcggtaaaaagaaatgttgatgaattagattttataaatttaaaatttttgttttgtgaaagattttgtaacgatattgaaaaggtttatttaggagaaaatatttataagttatatatttggtatataattagtatttagaatatgtaaataatttaaaaattaattatttttaaaaatttaattagaaaatagttagaagatataaatagatattttattgaagatatgtagatggtaaataattatatgaaaatttttaatgttattagttattagagaaatgggaatacgaggttttcgttgtttttcgttttttattagggcgggttgagggtttggttttagtagtttcgggtgttttttattttttgggcgtattgttattattttggtagaattttcgtcgaattttcgtaggacgttttatcgagtttcgttagcggttaggaagttcgattgtgtcgtttttttttttttttgcgttttttatcgttagttttttttttaaatgcgtttgcgtttgttttttatattttcgagtttcgtttggttttttttttttttgtttgtgaagttggcggcggatgtattgaaagtgcgtattatcgtttatcgagcgttttggggagtgtgtggaagttgttggtagtaggttttgatagtagtattttatgggtttagtcgttgacggtagtatttggttttgtgtgttttagttagttgaggttagggtgtgtggtgtgggttattggtattgtttttttgttattataatttttttttttattaggtatttggtgcgtagaagtttaaagatttgtgaggtttagtttggcgtttgtaattttagagaataaggaggttgaggttaggagttagagattagtttgggtaatatggggagaatttgtttttattttaaaaaaatttagtttagtgtggtggtggtcgtttgtagttttagttatttgggaggttgatgtgggaggattatttgagttttttatattaagggagatcgaggttgtagtgagtcgtgattagaggtattgtattttaagttgagtagtaaagtgagaatttgttttaaaataaattttaatttgattttggttatagtattatatgataggtagtagttttaagggcgattaaagtattttattttaaaatatatttttgatatattttggaatggttttgtgtaaagttattttttgcgagggaaatttgtgttttgtggataatttttttttttttttaggtttttttttgattcgggagagatttaattaagagtttgatatcgtttaaggttatttattttttgaggtatatatgttatttattttttttgaagtatattataggttttatatatgtaataagaattttggtttttataattttttttttgttattattggttaaatttttttttttttaaaatgtatcggttttttaggttaaattaatgtatattttatatatattgattgatgtttttgtttgtattttttgtttttttaaaatgtataaaagaaaattatagtttaaatattttggatatatgtttttaggattttttgatgttgtgttataggtcgtggttatttatatttggtttagaataaatttttaaatattttatagagtttggttttttttattgggtttttttatttattttattggtattagtttatattttttttgtttaattatatttttatatggttgtttatattttattaattttaagttaaaaatagataattttttttatatgtttgggttattattttgtaggtttttatgtatatatattaaatatatttgtatgttttttttttaattaatttgttttttgtaggttgattttttagtgagtttttattgaagtttttttttggtttttgtattggtaattaatttaaattgttttattaaaatttgatttatagtttttattttattttattagaaaaataatttggatttaattgttttttataaattagtaagtttatatgttttattattttataattaaaattttaaaataaaagttagaagatttttatgtgtatatttgtttaaatatatttatatatatgtatatgtattatgttgtatgttatgtttatataataagatttagtgtggtaggttataattttttaagaaatgttaatttgattggtttaaatagatgggtattatantaaaatatagtaattaattttatttttttaggttatgtgatttaattttttaaaaagtaatgggtttatattggtgataaaataaatanaaacgttttttatatgttataaatattttgttgtgttattgtgttggggttatgttttcgttttttaagattgttggaaattttgatttaatgagttatagaagtttatatattagttttgaaattatagaaagaatggggggtttggattttggtaaaatagattatgggaggagaagaggaatttattgaggggtaatgaatgattggtgagagaatgattggattgagtaatagatattaatttgtaaatagttttttttggaatttaaataatttttggaggtagttattgtatttttataaaggtttgtttgggtgtggttatattttggtttttttttttttaatagatgagataataggaggaggagaattaataattgttttttttggtgggtttggttgttaggtagataaaggaattttagtttttttgggaaggatggtggggttggaggaaaagttagagagattttgaggtttttttagtttagcgtgttaaatattatgttttggtatattagtttttgagtattagtattggttagttttatatttgtttgtgttattaaggttatgaagttataaattaggtttaaagtaaagtgatatatatttatgtaattttttgataaataagattaatttaatattatttaataaaaatagttgtggttgggtagtgatttttatttgtaatgttaaaatttggagaggttaaggtgggaggattatttgagtttaggagtttgagattagtttgggtaatataataagatttaatttttataaaaaaatttaaaaattagttaggtatgtgtttgtgattttagttatttttaaggttgaggaggggggattttttgagtttagagtttaaggttagagtgagttatgattatattattgtattttagtttgggtaatagagtgagtttttgtttttaaggaaaaaaataaaagttgtattttttgagttatttatagatatttatgtatttaattttatggtttttatgtgggtaaatattttatgttaataggttatataattatttaatttaaaaaaatttgaaataatgattagttttatttaatattttaatttttgtaagaaatataggtataattgttaaaaaataaattaattgtaaatgaaataaatgtttataaatgaatttatgtaatttaaagttttaaaattttatgttaaattatatatataaaataaatgtttgtattatagttagataagataaaatgattggttattttatatttttaaaaaaagaaaaattataggattaagaggtaggggttaggaaaataaaaggtttaaagttgaagaggattaataaaggatgagttaataaaagaagttttatgtgttattgatttggttggaattaaaaataaattgtttgtgtgtttttttaaaaattaaacgtttttaggtaggggattaggggataggtattgatatagaattagagtttggttttttatatttaaaataataagattttttgaagtattatttgattttaataaaattttaaggggttttgatttttaaatttatattttgtttttaaataggtattttttttttgatatttatttaatttttttagttttgggttaaaaatgttgtttttttgatttaaagtggtaattttattttttgaggtatagttgttttttttttttttattttttaaatttatattgtagaagtttattttttatagttttttgttgtatatgatttgtaggttaatatgttattttttttattttttttttttttggagaaggtttgagatgattatttttttttttggttttttttggttttaatattgttgttttggtttgatattagaatatttattttgaaggcgtagaaaagtagcgtttttttttagtataatttaattttgtgtttttggttttttttgatatgtttgaatttttttatataattagaaaaagttattgtggtaagtaatagtatgttgttattaagaattatgtagtttt

SEQ ID NO: 11 - DNA, 7875 bp, Artificial Sequence
  chemically treated genomic DNA (Homo sapiens)
atagagttttattttattatttaggttggagtgtagtggcgtaatttttttttattgtaattttcgtttattggatttaagtaattttttagttttcgtttttggagttattatgtttagttaatttttatatttttggtagagatagggttttattatattggttagtttgattttaaatttttgattttaagtgattcgttcgtttagttttttaaagtgttgggattataggcgtgagttatagataggcgttttattatgaagaatttagaaaagtatgatgatttagaaaataaatgttatttattgtttatagatagttgtggagtttttggtgaagttttttttttttgttgaattttttagaaggtttttggggtagcgtttagggtttatttagtttttagtttttgtagttaagttttagggtttatttttgttttgtcggttttatgatgttagatttagttagtattttttttattgagggaatagtagttattagtatgaggttttgttttttttattgagtttttttcgtttagattttagggtttttattatttttttggttagtttttttttagtttttttgtttttattttttttttagtttagtaattgttttttttttatttagttttacgtaggtagggggagagtttttagtttcgtggtaataaataatatcgatttattggtaatattttattttttttttgaggtttttattgttttttggtgtaatagggttattttttgtttgatgtttgtttatggatgggttatgcggatttgaagttttgtgtaggtatttttgtttgtttgttgtagttattattttaaagttatttttatgagttggtttttttttgttggggaaaagttgggtgtggggagagaagttgaggtagggtttgtatgtttgttagatttgttggttttttttttttagtatttttattattttaagtagttatatgttttaaagaaaatgttaaattgttatagttgtagtttatttgtttgatatatcgtttttttttaatttttatatttttattatttgtttttttgtttgattattaataaatagtataggtttttagggttagaggtttttgtagtttttatattagcgttggttttttggttttatttttttttttgtttttttttatttttttgatttcgttagattttgtcgtttttacggtttggtgttgggtttgattattttaatattttttattttttatatttattttatttataagttttatgagttttatttttagaatgtttttgaattttaattttttttttggggtattttgtttttgttttattttgggttattaatgttttttttataaataattgttataatttttaattattttttttatttttattttttacgtttaattttttatgtaatagattttagtaagttatttcgttttttgtgcggttgagtatagtagttacggtggttattgaaatttattaatacgaaattaaatatttagttttttagttgttttagttacgttttagatgtttagtaattatacggggtagttcgtggttgttatattgtgtagtatagattatagaatatgtttatggtattggtaagttttatcggatagtgtaggtttagaatttttgagtagtttttttttgtatttagaataaaatttaaattttgtgtaggtttataaggttttgttttatttttgattttattttttattgtttatattagttttattttttaatttggttgttttttaaatagaattttgaagtttttttgttttttgtttatttggtttttgtttttaggattagtttaggtattattttttttggtaagttttttttcgaattgtgtttttttttataggatatatatatttttgttatagtcgggttgtgaatgttttattatttttttttttatatataggtatcgttttcggtgatttatttgttttttaggttatgtatatatttggttttttattttattagatttggttgagtatttattttgagtttattatatgagagatataggggaataagataaataggtttgtgattttgtagagtttagatttagttggaatagatattgagtgggggattatagagtgttatgtgtgtttaaattttatgtttatgtttatgttttgttgtatttttttttagggagggatggatgataagaaaattttataggaaaggtttagaggtttaggataggggtgtttttagggaagttttgaggagagaatagtgtttttggggttagaagaggttgttttataagggagaaagttattatttggacgtgtttttgtgtttaataaaaagttatttgttatgttaagagaatagagtatgtaaatttaaattaaatagttttagagtttatttagagatagggttttgttttgttatttaggttggagtgtagtggcgtgattttagtttattgaagttttaaatttttaggtttagtgtaatttttttattttagttttttgagtaggtagaattataggtacgaggtattatgttaggttaatttttaaatttttttgtagagatggagttttattatgttgtttaggttggttttgaatttttgggtttaagcgatatttttgtttcggttttttaaaatattaggattataggtatgggttattgtgtttgtttttattatatttattttaaagaagaggttattgagggttgggtgtagtggtttatatttgtaattttagtattataggaggttaaggcgggtagattacgaggttaggagtttaagattagtttggttaatatagtgaaatttcgtttttattaaaaatataaaaaattagttgggcgtgatggtaggcgtttgtaattttagttatttgggaggttgaggtagtagaattatttgaatttaggaggtagaggttgcggtgagtagagattattttattgtattttagtttgggtaatagtgtgagatttcgttttaaaaaaaaaaaaaaataggttattgaggatgagagtattgtttagtatggtattattgggattttagtttttttagtggttagggtattatttgtattttagtttttttatatgtaaaatgggttatttgtagtttgatgggaaggggatgagaaggttcgttgggtttaagggattaggatggtaggaggttagtaaggtttgtagagggtagtagtgagttgcgtatcgtttatttagtttagaaattggggtttatgggttttttagggtaggaatgttttttaggggtattaatattaataggtaattacgaaatcgatttttatatattatttattaggttgtgttttatgtttgttttatttgggtattttatgtaggatgtttttaatattttgtatcgtggtttataggattgggtggaagataggatagtttagagtagggagtgaaataaaatttttgatggttttttagggaagtttggaaatttgagatagggtaaagagtagggagtttgatgagtataaaattaaaatatttaaattagtttgtcgggttaggggaaaaggaagtaggattgggtatatgaagaatagatgataaaattgaggtttagagaggttgagagagatattgttgaggttatatagttaggagtcggtaggaagttttgaatttaagtagggttggtttggttattagtttgggtttagttttttagattggattttaaagtatttgttttagatgacgttggtattgggaggagggtatgataatttttaatatttatatagggataatagtatttggaggtagatgtgttttttattttaaggaaattgaggtagagagggagaggtggttaggatttaagtttagtaatttatttgttaaattttgttttttttttttttaatttagcgggttggtttgggtatttttagtttgtgtttattagagtttttgtagagtgttttttattgtgttttagatttttgtgtttttagagaattattaaaggttttgttttattttttgttttgggttgttttttatttagttttgtgaattttagtgtaggttggtcgtttttttagagggaggttaattagggaagttttgagttaggtcgttttggaaaaattatattgatttttggagtttaagagaggttaggggataaatatatggtttagtatataggaaggtaggtgtgggtattgagtgatttgagggagaaatttttatttattatttattatgtggttttgttgtgataaattcgtgtggtagttatttatagtagatttataacgtgagaggttcgttgaaataagggtgttggtattggttatttagtttggttttttttgttttgcggggtgatttgtttggttttggtttttttgtgagttgggttttgttgggtggtttttagtgtgtttagttttgaggttggtgagaggttaggttgtgaggtgtgaggaatttatttgcgtttttatggaaggtgtttttcgtatcgttgggttagatttgtttggttttgtagatgtttacgatggtggtttttgatacgacgattgggtagtgtcggtgacgtttatggtattgcggcgtggtaggggtagaggggggaggttgtttttgtcggaggattgttgcgagttttgttagagagagtagtttttgtttcggaatatgaggtaggtggtggggtttggggatacgcggttggattggtcggagaagtttttttggtcggaggggagttaagtgtttttgttttaggattgtagaattggtttagatttttgtattggaaaggtttttatggattagggagttcggtgttttttttacgggggatttttgggttgcgagttgtatagtttaattcgttgttgttagggttttagttttttaaaaggtatagggacggggggagggtggcggttcgatgggggagtcgtttttagggggttttttcgttttgtgtttacggcgcggtttttttaagaggttcgtttggtttcgttattcgcgtcgcggttattttttttcggtttttttttttttgcggcgtagagtgcgggtcgggcgggagtgcggcgagagtcggttggttgagtttagcgttcgaggaggcggcggcggcggcggcggtacggcggcggcggggttgtggggcggtgcggaagcgagaggcgaggagcgcgcgggtcgtggttagagtttggcggcggtttggcggagcggagagtagcgttcgcgtttcgtcgtgcggaggagtttcgtatataatagcggcgcgcgtagttcgcgttttttttttcggcgcgtttcgtttcgcgcgtcgagcgtttcgtttcgttttatttgttattagggagtgggcgggtattgttcgtcgtcgtcgtcgtcgcgcgggttatgggggtcgttcggcgttcggggtcgggttggcgaggcgtcgcgtcgtcgttgagacgggtttcgcgcgtagttcggcggcgtaggtaaggtcggtcgcgttatggtggattcggtgggtttcgcggaggcgtggaaggcgtagttttcggatttagagttttcgcgtatggagttgcgtttagtgggcgatatcgagtaggagttggagcgttgtaaggtttttattcggcgtttggagtaggaggtgaattaggagcgttttcgtatgatttatttgtagacgttgttggttaaggaaaagaagagttatgatcggtagcgatggggttttcggcgcgcggcgtaggttttcgacggcgttttcgagtttcgagcgttcgcgtcgcgttcgtagttagcgttcgtcgacggagtcgattcgtcgttcgtcgaggagttcgaggttcggttcgacggcgagggtttttcgggtaaggttaggttcgggatcgttcgtaggttcggggtagtcgcgtcgggggaacgggacgatcggggatttttcgttagcgtggcggcgtttaggtttaatttcgagcggattcgtaagggttatggttagttcggggcggacgtcgagaagtttttttacgtgaacgtcgagttttattacgagcgcggtttggtgaaggttaacgataaagaggtgtcggatcgtattagttttttgggtagttaggttatgtagatggagcgtaaaaagttttagtacggcgcgggttcgagcgtgggggatgtatttaggtttttttatcggggacgtttttcggagagtagttgcggcgtcgacggcgattacgaggacgtcgagttgaattttcgttttttgaaggataatttgatcgacgttaatggcggtagtaggtttttttggtcgtttttggagtattagttttattagagtatttacgtcgggggtatgatggaaggggagggtaagggttcgtttttgcgtagttagagtatttttgagtaggagaagcgttttatttggtttcgtaggttttatttttttcggagttttgaggattgcggaggcggttatatttcggattgtagttttaatgagaattttatttttagcgaggaggattttttttttggttagtttagtcgcgtgtttttaagttttattatttatcgtatgtttcgggataaaagtcgttttttttcgtagaattcgtaatagtttttcgatagtagtagtttttttacgtcgtagtgttataagcggtatcggtattgttcggttgtcgtgttcgaggttattatcgtgggcgttcgtaagatcgggtagatttggtttaacgatggcgagggcgttttttatggagacgtaggtgagttttttacgttacgtgcgtgggtatatttgtacgggggaggaaaattatagacgagtaggggatataaaatagaagttgggagggaggagtggatagttttgagtgtattaggtgtatttgtggtttacgcggattttgtattcgaataaattttattttttttttttttttgaatgtatattgttagtgtttggaatggaattgggttgaggatggttttgtgagggatgggaggtggtttgtttttttggttttagagtaatgtgtttgtgaagtatagtttgtgagttgaaggaagatgttttaggtagtaatttttttgttatgtgttttttttatgtcgggtagtgaggatggtataaaagtcggagttatttttagcgtttatatcggatgttgttagtagggattgatttatgttttgggtatttttcgttattttattgattttgttttggaggggttatatgatacgtttgtgaaatttgagatatgttagttgtttttaggttatagaagtgttaggtttgtttgttaattagtagttttgaatataagttatagtaggtgagaataggaattagaaggaagtgaggcgataggtagttgtgatttagtgggttatcgaaaattaattgtatggagattttatttgggggtgaagtagagttatattcgttttgatttgtttggttttgatgggaggttttatttatgattatttattattaggtttttttatggtggtaatttagttttatttgttgattttttagtgtgtttttgttgttttattttgttaaggataagtatttataggtgtttatttggggtttttaatttgtggttagattttagtattaagattaaaattatgggattgtacgtttaatttttgtgttagatgtaaatattattaggtattttgggttatgggattatgttttgagatttagatatagtttgttattggggtaaggaaagggtgggttgg

SEQ ID NO: 12 - DNA, 7875 bp, Artificial Sequence
  chemically treated genomic DNA (Homo sapiens)
ttagtttattttttttttattttaatggtaaattgtgtttggattttaaaatatagttttatgatttaaaatgtttgatggtatttgtatttagtatagaagttaggcgtataattttatagttttaattttagtgttagaatttgattatagattgggagttttaaataagtatttgtgggtgtttatttttggtaagatgaggtagtaggagtatattggagggttagtaaatggggttgggttattattatggaggagtttggtggtgaataattatgggtgaagttttttattaaagttaggtagattagaacgggtgtggttttgttttatttttagataaaatttttatgtagttgattttcggtggtttattgagttataattgtttgtcgttttatttttttttaatttttatttttatttgttgtgatttgtgtttaggattgttggttagtaagtaaatttgatatttttatggtttaggagtagttagtatattttaggttttataaacgtgttatataatttttttagaataggattagtggggtggcggggaatgtttaagatataaattagtttttgttaatagtattcgatgtgggcgttagagatgatttcggtttttatgttatttttattgttcggtatggagagagtatatagtaaggaggttattgtttgaagtatttttttttaatttataagttgtattttataaatatattgttttagaattaaaggaataaattattttttattttttataagattatttttaatttaattttattttaaatattaatagtatgtatttaggaaggaggaggggatggagtttgttcgggtgtaggattcgcgtgaattataagtgtatttgatatatttaaaattatttattttttttttttaatttttgttttgtattttttattcgtttatggtttttttttttcgtgtaggtgtgtttacgtacgtggcgtgaggaatttatttgcgtttttatggaaggcgttttcgttatcgttgggttagatttgttcggttttgcggacgtttacgatggtggtttcggatacgataatcgggtagtgtcggtgtcgtttatggtattgcggcgtggggggattgttgttgtcgaaggattgttgcgagttttgcgagggagagcggtttttgtttcggaatatgcggtaggtggtggggtttggggatacgcggttggattggttagaggagaagtttttttcgttggaggtgaggtttttattggagttgtagttcggggtatagtcgttttcgtaatttttaaaatttcggggggagtaggatttgcggggttaggtaaggcgttttttttgtttagaggtgttttggttgcgtaggagcgggtttttgttttttttttttattatgttttcgacgtagatgttttggtagggttggtattttaggggcggttaagggggtttgttatcgttattggcgtcgattaggttgttttttaggaagcgggggtttaattcggcgttttcgtagtcgtcgtcgacgtcgtagttgtttttcgaggagcgttttcggtaagggggtttggatgtattttttacgttcgagttcgcgtcgtgttgggattttttgcgttttatttgtatggtttggttgtttagggagttgatgcggttcgatatttttttgtcgttgatttttattaggtcgcgttcgtggtgaaattcgacgtttacgtagaagggtttttcggcgttcgtttcgggttggttatggtttttgcggattcgttcgaagttggatttgagcgtcgttacgttggcggggggttttcggtcgtttcgttttttcgacgcggttgtttcgggtttgcgggcggtttcgggtttggttttattcggagaattttcgtcgtcgggtcgggtttcgggtttttcggcgggcggcgggtcggtttcgtcggcgggcgttggttgcgggcgcgacgcggacgttcggggttcggaggcgtcgtcgggggtttgcgtcgcgcgtcggaagttttatcgttgtcggttatagttttttttttttttggttagtaacgtttgtaggtagattatgcggaagcgtttttggtttattttttgttttaggcgtcgaatggaggttttgtagcgttttagtttttgttcgatgtcgtttattgagcgtagttttatgcgcgggggttttgagttcgggaattgcgttttttacgttttcgcgaagtttatcgggtttattatggcgcggtcggttttatttgcgtcgtcgggttgcgcgcggggttcgttttagcggcggcgcggcgtttcgttagttcggtttcgggcgtcgggcggtttttatggttcgcgcggcggcggcggcggcgaataatgttcgtttattttttggtggtaggtgaggcggagcggggcgttcggcgcgcggggcggggcgcgtcggggggaagggcgcgggttgcgcgcgtcgttattgtgtgcggggttttttcgtacggcgaggcgcgggcgttgtttttcgtttcgttaggtcgtcgttagattttggttacggttcgcgcgtttttcgtttttcgttttcgtatcgttttatagtttcgtcgtcgtcgtgtcgtcgtcgtcgtcgtcgttttttcggacgttaagtttagttagtcggttttcgtcgtattttcgttcggttcgtattttgcgtcgtaggaaggggagggtcggggggaggtggtcgcggcgcggatgacggagttaggcgggttttttaaaggggtcgcgtcgtgggtatagggcgggggggttttttggaggcggtttttttatcgagtcgttatttttttttcgtttttgtgttttttgggaaattgaggttttaataatagcgaattggattgtgtaattcgtagtttaggggtttttcgtaaaaaagatatcggattttttggtttataaagatttttttaatatagaggtttgggttagttttgtagttttggaataggaatatttggttttttttcggttaggaggattttttcggttagtttagtcgcgtgtttttaagttttattatttattttatgtttcgggataagagttgttttttttggtagaattcgtagtagtttttcgatagaagtaattttttttttttgtttttattacgtcgtagtgttataagcgttatcggtattgtttagtcgtcgtgttagaggttattatcgtgggtatttgtaagattaggtagatttggtttaacgatgcggagggtattttttatggagacgtaggtaagttttttatattttatagtttggttttttattagttttagggttgggtatattagggattatttagtagggtttaatttatagagaggttaggattaggtaggttatttcgtaaggtagggagggttaggttgagtaattaatgttagtatttttgttttagcgggttttttacgttgtggatttgttgtgggtggttgttatacgggtttgttatagtaggattatatgatggatgataaatagggattttttttttaggttatttaatatttatatttgtttttttgtgtgttgagttatgtgtttgttttttggttttttttgagttttagaggttaatgtagtttttttaggacgatttgatttagaatttttttgattagtttttttttaagggggcggttaatttgtattgaggtttatagggttgggtggaagatagtttagagtagggagtgaaataaaatttttgatggttttttggggatatagagatttgagatatagtggagagtattttgtagggattttgatgggtataaattgaaaatatttaaattagttcgttgggttgggggaaaaggaaataggatttggtaaatgaattattgggtttgagttttgattatttttttttttttgttttagtttttttgaagtgagaagtatatttgtttttaagtgttgttgtttttgtgtggatgttagggattattatgttttttttttaatgttagcgttatttggagtagatattttgaagtttaatttaaaggattgagtttaggttagtagttaggttagttttgtttgggtttagggttttttgtcgatttttggttgtgtgattttagtagtgttttttttagtttttttgagttttagttttgttatttgttttttatgtgtttaattttgttttttttttttttgattcggtaggttggtttgggtattttaattttgtgtttattagattttttgttttttgttttgttttagatttttaggtttttttagagaattattaaagattttgttttattttttgttttgagttgttttgttttttatttagttttgtgggttacggtataaaatgttgagagtattttgtataaaatgtttagatggggtaaatataaaatataatttgataaatggtgtgtaggggtcgatttcgtgattgtttgttaatattagtgtttttggagaatatttttgttttggaaaatttatgggttttagtttttaggttgggtgggcggtgcgtagtttattgttgttttttgtaggttttgttaattttttgttattttggttttttggatttagcggatttttttattttttttttattaggttgtaaatagtttattttgtatgtgaggaaattgagatgtaaatgatgttttggttattaaaggggttggaattttagtagtgttatattgagtagtgtttttatttttagtggtttatttttttttttttttgagacggagttttatattgttgtttaggttggagtgtagtggagtgatttttgtttatcgtaatttttgttttttgggtttaagtgattttgttgttttagttttttaagtagttggaattataggcgtttgttattacgtttagttagttttttgtatttttagtagagacggggttttattgtgttggttaggttggttttgaatttttgatttcgtgatttgttcgttttggttttttgtagtgttggaattataggtgtgagttattgtatttagtttttaatggttttttttttaaaatgggtatgataaaggtaggtatagtggtttatgtttgtaattttggtgttttgggaggtcgaggtaggagtatcgtttgagtttaggagtttaagattagtttgggtaatatagtgagattttatttttataaaaaaatttaaaaattagtttggtatggtgtttcgtgtttgtagttttatttgtttaggaggttggggtgggaggattgtattgagtttgggaatttgaggttttagtgagttaggattacgttattgtattttagtttgggtaatagagtaagattttgtttttaagtaaattttgaagttgtttagtttgagtttgtatgttttgtttttttggtatagtaaatggttttttgttaggtataaggatacgtttagatagtggtttttttttttgtgggatagttttttttggttttaaggatattgttttttttttaggatttttttgaaagtatttttattttgagtttttgggttttttttgtagagtttttttattatttatttttttttagggaggaatgtagtagggtatgggtatgggtatggggtttagatatatataatattttgtaattttttatttagtgtttgttttaattagatttaaattttgtaaggttatagatttgtttgttttgtttttttatgttttttatatagtgagtttagagtaagtgtttaattaggtttggtggaatgaggaattagatgtgtgtatggtttggagggtagataggttatcgagagcgatgtttgtgtatgggggaggaagtgataaggtatttatagttcggttatagtaaaggtgtgtgtgttttgtgggagaaggtatagttcggggaaaggtttgttaggggaggtgatgtttgagttggttttaaggataaggattaggtaggtaaaggataaggaggttttaaagttttgtttgaggagtagttaggttgggagatgaggttggtgtaggtagtaggaagtgggattagaggtgaggtagggttttgtaggtttgtataaagtttgggttttattttaaatgtaaggaaaagttgtttaaaggttttagatttgtattgttcgatagaatttgttagtattatgggtatgttttgtaatttgtgttgtataatgtggtagttacgagttgtttcgtgtgattattgagtatttgaaacgtggttggggtagttgaagaattgaatgtttggtttcgtgttagtgagttttaatggttatcgtggttgttgtatttaatcgtataggaagcggggtgatttgttggggtttgttgtatggaaggttgggcgtgggaggtgggagtagggggagtggttggggattgtggtaattgtttatgaggaaggtattggtgatttagaatagggtagaagtaaggtattttagagaaggggttagaatttaggagtattttggaagtaaaatttatgggatttgtagatggagtgggtgtggggaatgagggatgttggggtgattagatttaatattaggtcgtgggggcgataaagtttggcggagttaaaggagtgagaaaaggtaagagagaaagtgggattagggggttaacgttagtatagaggttgtaaaggtttttagttttaggagtttatgttatttattggtgattaaataaagaaataggtggtgaggatgtggggattgaaaggaagcggtgtattaagtaaatgagttatagttgtgatagtttagtattttttttgaaatatatggttatttgagataatgagagtgttagaaggaaggagttagtaagtttagtagatatgtaagttttgttttagtttttttttttatatttagtttttttttaatagagggaggttagtttatggggatgattttgggatggtgattgtaataggtaagtagaggtgtttgtatagggttttaggttcgtatagtttatttatgagtaggtattaggtagagggtgattttgttgtattaaggagtaatgaagattttagagagaaagtggagtgttgttagtgaatcgatgttgtttgttgttacggggttggagattttttttttgtttgcgtgaggttgggtggagaagggatagttattggattaggggggaagtagaggtagagggattgagaagggattggttagggagatgatggggattttggagtttgagcggagaagatttagtgaagaaggtagagttttatgttgatagttgttgtttttttagtgggaaggatgttagttgagtttggtattatgaggtcggtagggtagaggtgggttttggaatttggttgtagaagttggaggttggatgggttttgagcgttattttaggagttttttgaggggtttagtaggaggagggggttttattaagggttttatagttgtttatgagtagtgggtgatatttattttttaaattattatgtttttttaaattttttataataaaacgtttatttatggtttacgtttgtaattttagtattttgggaggttaggcgggcgggttatttgaggttaggagtttaagattagattggttaatatggtgaaattttgtttttattaaaaatataaaaattagttgggtatggtgattttagaggcggaggttggagaattgtttggatttagtaggcggaggttgtagtgaggggagattacgttattgtattttagtttgggtgatggagtgagattttgt

SEQ ID NO: 13 - DNA, 5430 bp, Artificial Sequence
  chemically treated genomic DNA (Homo sapiens)
agaatttatattttttgttttttaagaaatagtagtagtttttttttttgggaagtatatgttgaatataatggtaattttagagaatagttatattttgttttttttaagaggttgatgttttaaaataatattaaatataatgtttgaaatatattatgggattaataaatgtatgttatatagattaataatattatagatattttattttggtatgtagtaaaataataatttaaaattattaatattttttaatttttacgatgttttatatattgtacgatgaatgatttatttttttaattgatgttgattatatagtttagtttatttattgtatatgttattgtgttagaatagataatattgtagatatggttttttgttattttatagtatatagtttttaaggaaagaaatttattaaataattgttttaaaattaagtttaaatatttttattgaaggaagggatggggttaaaaggaaaattagtggaatattatataatttggaatgtatgaggatattatttgaggaaattgaaatttatttcgggatttgaagggggagtagttttggttagggaaaggagaagaaatgaagataaagatattgttaaagaaatggagtagtgtgggtcgatgttttttggtaagaatgagtagggagtatgtggtagaagtattttatttatattattttgtttttagattattgtttgaagtaggtacgtttatttgttaattatttttttttttagaagatttatagaggataaaagatttagtaatttgtataaggttatagagatagtaaattgtgggttgaatttgaatgtaggaataaaaagtttatatttttatttattaagaagagatcgttttttgttgtaatatgttttagagggtggtttcgtgagtagaatataggatgaattgtttttcgaattatattaatagttaataaatatttgaaatttatgtttgtgattttggtgtagtaggtttgtaattaaatatttaaagaatttttatttgtttttgatttaataaaaatttaaagaaggataaatttgtatttgtgaggaagatgtaatatattataaattattattaaaagtttttagatgtaaaaatttaaagtttgtaaatgattagtattttttttataaaaggatagtattttagtaaaagtggtattttttatatattttttttttttgatatgttagaaagacgtttaataaagtatttaaatttttaataattatttagattggaaatttagagattatttttaatagtttattaattaggtttttgatttttggtattattataaaacggtgtttttttttatttatagtaataatgaggttttgttttttttatttggaaaattgaggtaataatattaattttataagttatttagaggattagggaatatatatgtgtatggaaattattatttaagaaagaataagagtaggatagtagaagaggtggatagaatattatttatgaagtttagatgtaagaaagattttagtgtttttaatatattttataattaacgttttataatagttattagtgtttttgttagaggcgcgtgaattagagtaattttattttaaatagaagttgggtaaaatgaggttgaaatttattgagttgtatttttagacggttaaggtattttaagttataggatgagataggaggttagtataaaatataggttataaagattttgttgataaaatagtttgtagtaaaggagtcggttaaaatttattaaaattattaaaatttattaaaattttatggttattagagtatttttggttgtttttattgttgtagttttattagggttatgatagtttagagatgttatagtaatgtttagaagttatttaatatgttttaaaaaggggaggtatgaataatttattttttgttgagtatattattaagaaataattataaaaatgggtaattagtagtttttggggttgttttgtttgtggagtagttatttttttatttttttattgttttaataaatttttttttattttgtattgtggattcgttttgaatttttttttgtgtaagatttaagaatttttttttgggatttggattgggatttttttttagtaattttttgaggtagaaataatgttaaaggttaagtaatagttttatttttggtgtttttttgaggaggttgttttaatggggaatgaaagtggaattcgaatttatttaattgtatagtgttttagtggaagaaatgtaataattattttaaatatatagtaagtgaaatggttaggaagtatggagttgtggtaataagagaatttagtattggttaaaggggggatattttttgttgttgtttgttttatatgtttttaaatataaaaatgtatttaagttatataattgagtatgtttgtattttaaggggaaggattggattattaatagacgaatttaggtttggaaggaagagtaggtagaaattataatttaaaatatagataaaagaatgagttagaatagtaaattgttaagatagtatattttttgtaaatgggatggattagaaattatatttatttgtattagtttaaatagtgtttttttgtaattatatattgaattcgtttttttgaagattttggaggttaaattaaagtaaagattatagggttaaattgtttttatagttcgttttatttatatttttgagttatttaggaatgtgttattatgtagtatttgtgtgattgaataggtgtaaattttaagttgatatttatatatagttgatattatgttaaagatgtgttaaaaattttagttaagaagtatttttatttttagttatgattttttttttgttttggatttttgtattttatattaggtatgaacgttagttaattttgtttttgaaatttttagatacgtatttatataggtagaattttatttttaaaaaagtttattgattgatgtgtatttaattagtagttgaggtggtattttagttatcggataggagtttttatgaatttagttttttattatttaataatgggtttattttttgtttttattagagatgaaatttttttgggttatttagtattatagttgattttttttaataattaggatttgatgttttttttttggttataggatttatttatttttatagtttagtttggatttgttaattttggcggtttaatgtgattaattagggatagttaagattattatttttattagttatggttttttagagaaatagaattaataagatattatatgtaggtatattttgttttattatattttgttttattgtgttttgtagatattgtgtttgtcgtaaattgaaagtttgtggtaattttttattaagtaagtttattagtattattgtattatttttttaatagtatgtgtttattttatgtttcggtgttattattttggtaatataatattttattttttttattattgtattgattatggttatttgtgattagtgatatttgttgtgatattttaattgttttgtggtgttacgaattatgtttttgtaagatagtgaatataattaataaatgttgtttgtgttttgattgttttattgattggtagtttttttgttttttttttttattttggaagtttttattttttgagatataagaatattggaattggttaattaataattttgttgatggtttttaggtgtttaagtgaaaggaaaagttttatattttttatttttaattaaaataaagtaatgattaaataaagaaagatatgttaaaagttgagataggttaaatgataggttttttgtattaaatagttaagtgtgaaggtaaaggaaagttattgacggaaataaaatatgttattttagtgaatatatgaatgataagaaagtaaaatagttttattattgatatggagaaagtttggtttggatgaagattaaatttttataatatttttttgtgttaaaatttaagttatagtatggttttaatttttttttattttataaaggttgagaggggtgaggaagttttagaaaaaaaagttggaagttagtagaggttgatttatgaggtttgaggaaagaaattatttttataatttaaaattgtacggtgaagtagtaagtgttgatgaagaagttgtagtaagttatttagaaaaatttaattaagattattgaagatggttgtgttaaataatagattttgaatatagataaaacggttttttattagaagaatatattatttaggatttttatagttggagaggagaaattaacgtttggttttaaagttttaaaggataggttgatttttttgataggggttaatgtagttggtgtttatgttgaaattaatgtttaattattatttggataatttaagagtttttaagaattatgttaaatttattttgttcgtgttttataaatggaataataaagtttggggaatagtatatttgtttatatcgtggttgattaaatattttgtgttttgttgagatttattgtttaaaagatgaaagatttttttttaaaatatgatcgtttattgatgatttatttgttagttaagagttttgatggagatgtatgaggagtttaatgtttttatgtttgttaatatagaatttattttttagtttttggattaaggagtaattttgaatttttagttttataatttaagaaatatattttataaggttatagtttatgtagatatgatttttttggtggaattgggttatgtaaattgaaaatttttaggaaagaatttattattttagatattattaagaatatttatgatttatggaaggaggttaaaatatgaatatttataggagttttgaaaaagttgattataatttttatagatgattttgaggggtttaagattttagtggaggaaataattgaagatgaggtggaaataatagattatagaatgagaagtttttttagggataattattatttatatgattgttttttagataaattaatattaatgttttttaaaagtgagttaggttgttgggtggtggtttacgtttgtaattttagtattgtgggaggttgaggtaggaggattgtttgaattaaggtatttaagaagagtatgggtaatatgatgagattttcgtttttattaaaaatttaaaaattagttgggtagggtatgatgatgtatatttttaattttagttatttgagggtttgaggtggtaggattatttgaatttaggaatattgaggttgtagtgagttatgattttgttattgtattttatattgtatgataga

SEQ ID NO: 14 - DNA, 5430 bp, Artificial Sequence
  chemically treated genomic DNA (Homo sapiens)
tttgttatgtagtatggagtgtagtggtaagattatagtttattgtagttttaatgtttttgggtttaagtgattttgttattttaagtttttaagtagttgggattagggatgtgtattattatgttttgtttagttaatttttaaatttttggtagagacgagggttttattatgttgtttatgttttttttgaatattttggtttaagtaatttttttgttttagttttttatagtgttaggattataagcgtgagttattatttagtaatttaatttatttttaaaaaatattagtgttggtttatttgaaaagtaattatgtgaataataattatttttaggagggttttttattttatgatttgttatttttattttatttttagttgttttttttattgaagttttaaattttttaaagttatttatgagggttgtaattaatttttttaaaatttttataaatatttatgttttgatttttttttataaattatgaatgtttttaatggtatttggaatggtgaatttttttttgaaggtttttaatttatatagtttaattttattagaggagttatatttgtataagttatagttttataaaatgtattttttaaattataagattggaaatttagaattattttttgatttaaaggttgaagaatggattttgtgttagtaggtatgaaaatattaagttttttatatatttttattagagtttttggttgatagatgaattattaataagcggttatattttaaaaagaaattttttattttttgagtaataggttttaataggatataaaatatttagttaattacgatgtaaataaatgtgttgttttttaggttttgttattttatttatagagtacgggtagaatagatttagtataatttttaagggtttttggattatttaaatgataattgagtattggttttaatataaatattagttgtattagtttttgttaagagagttaatttgttttttgaagttttgaagttaagcgttgattttttttttttagttataaaagttttagatggtatgtttttttaatagaaggtcgttttatttatatttaaaatttgttgtttagtatagttatttttagtgattttagttagatttttttggataatttgttgtagtttttttattagtatttgttgttttatcgtgtaattttaggttgtagggatggtttttttttttaaattttatgaattaatttttgttagtttttagtttttttttttggagtttttttattttttttagtttttatagaatggaagagagttagggttatgttatggtttagattttggtataagagaatgttgtggaggtttgatttttatttagattaaattttttttatattagtaataagattgttttgtttttttattatttatgtgtttattgaagtagtatattttattttcgttaataatttttttttgtttttatatttggttgtttggtataagaggtttattatttggtttattttagtttttgatatgtttttttttgtttaattattgttttgttttgattaaaaatgagagatatgggatttttttttttatttgaatatttagaagttattaatagggttgttaattgattaattttaatatttttgtgttttagggaataaggatttttaagatgagggagaagaataggggaattgttagttagtgaagtagttagaatataagtaatatttattaattatgtttattgttttataagggtatggttcgtggtattataaaataattaaaatgttatagtaaatattattgattatagataattataattagtataataatgaaaaaaatgaaatattgtattattaaaatgatgatatcgagatatgaagtgagtatatgttgttggaaaaatgatgtagtggtgttgatagatttgtttgatggagggttgttataaatttttaatttgcgataaatatagtatttgtaaagtatagtaaagtaaagtataataaaatagggtatgtttgtatatagtattttattggttttgtttttttggggaattatgattaatagaggtaatgattttaattatttttaattaattatattaagtcgttagagttgataagtttaggttggattgtgagaatgagtaagttttatggttaagaaaagaatattagattttaattgttaagagggattagttgtgatattggataatttaggaaaattttatttttagtgaaaataaaggatagatttattattggatggtaaagaattaaatttatgaagatttttattcggtgattaaagtattattttagttattgattaagtgtatattaattagtggatttttttgaaaataaaattttgtttatgtgggtgcgtatttgaagattttaaaggtagagttaattgacgtttatatttgatgtaaagtataaaaatttaaaataaaaaaaagattataattaagggtgaaaatattttttgattagaatttttgatatatttttgatataatattaattatgtgtaagtattagtttggaatttatatttatttagttatataaatgttgtatgataatatatttttgaatgatttagaagtataaatggaacgagttgtgaaagtagtttgattttgtaatttttgttttgatttgatttttagggtttttagaaaaacggatttagtgtataattataaaagaatattatttaggttgatgtaaatgaatatgatttttagtttattttatttgtaaagaatgtgttgttttggtaatttattattttgatttatttttttatttgtgttttgagttgtagtttttatttatttttttttttaaatttaggttcgtttattgataatttaatttttttttttagaatataaatatatttaattgtataatttgaatatatttttgtatttaaaaatatatgaaataaataataataaaaaatattttttttttaattaatgttgaatttttttgttattatagttttatattttttggttattttatttattgtatatttagaataattattatattttttttattaaagtattgtgtaattgaatgaattcggattttatttttattttttattaaaatagtttttttaggaaggtattaaagatgggattgttatttgatttttaatattatttttattttaaagggttattggaaaggggttttaatttagattttaagagaaagtttttggattttgtataagaaagaatttagggcgagtttatagtgtaaagtgaaaggaagtttattaagatagtaaaggaataaaagaatggttattttatagatagagtagttttaagggttgttggttgtttatttttatggttattttttgatgatatgtttaataaggggtagattatttatgttttttttttttagaatatattgggtaatttttggatattgttatggtatttttaaattgttatggttttggtgggattgtagtagtgaggataattagaggtattttgatggttatagagttttggtgggttttggtggttttggtgggttttggtcggtttttttattgtaaattgttttattagtaaggtttttatgatttgtattttgtgttgattttttgttttattttgtgatttagaatgttttaatcgtttaggaatgtagtttagtaggttttagttttattttatttagtttttgtttaagatggaattgttttggtttacgcgtttttgataaaagtattgatgattgttgtaaaacgttaattgtgaaatgtgttaagagtattggaattttttttatatttgagttttatgagtgatattttatttattttttttgttgttttatttttatttttttttgaatagtagtttttatgtatatatatattttttaattttttaaatagtttataaagttggtattattattttagttttttagatgaagaaaatagaattttattgttattgtagatagaaaaaaatatcgttttgtgatggtgttaagaattaaaagtttaattaatgagttattaaaaataatttttagatttttaatttggataattgttaaaaatttagatattttgttgagcgtttttttaatatattagaaaaaaaaaatatgtaggaaatgttatttttattaaaatattgtttttttgtaaggaaaatattaattatttgtaaattttagatttttgtatttgaaagtttttaatagtaatttatagtatgttgtattttttttataaatataggtttgtttttttttaaatttttattggattaagagtaaatgaaaattttttgaatatttagttataaatttattgtattagaattataaatatgagttttaagtatttattaattgttgatgtagttcggaaggtaatttattttgtgttttgtttacggaattattttttaaaatatgttataatagaaggcggtttttttttaatagatgaaaatgtgggttttttatttttgtatttaaatttagtttataatttgttatttttatggttttatgtaaattattgagttttttgttttttatgagttttttaaaaagggaaatgattagtaaataaacgtgtttgttttagataatggtttggaagtaagatgatgtgggtgaggtgtttttattatatgttttttgtttatttttgttaggaagtatcgatttatattgttttatttttttggtaatatttttatttttatttttttttttttttttaattaaaattattttttttttaggtttcggagtaaattttaatttttttaaataatatttttatatattttagattgtgtaatattttattagttttttttttggttttatttttttttttagtgaaaatatttgaatttaattttagagtagttgtttaatggatttttttttttggaaattatatgttataaaatggtaaaagattatgtttgtaatattatttattttaatatagtggtatatgtagtgaataaattgaattatgtaattaatattagttaaaagaataagttatttatcgtatagtgtgtggaatatcgtaaaaattaagaaatattagtaattttgaattattattttgttatatattaaaataggatgtttataatattattaatttgtatagtatgtatttattaattttataatatgttttaggtattgtgtttaatattattttaaaatattaattttttaagaaaagtaaaatgtgattattttttagaattgttattgtatttaatatatattttttaggaaaaaaaattgttgttattttttaaaaaataaggaatgtaaatttt

SEQ ID NO: 15 - DNA, 6277 bp, Artificial Sequence
  chemically treated genomic DNA (Homo sapiens)
gtgcgttaagattatgttattgtattttcgtttgggtgatagagcgagattttgttttaaaaataaaataaaaaattggttcggtgtggtggtttatgtttgtaattttagtaatttgggaggttgaggtggaaggatcgtgaatttaggagttgaagattagtttgggtaataaagtcggattttgtttttttaaaaaaattaagtttaattaaatatttttaaaaataataaattagttattagaattataaatttgtattgtttttgataatgtaatgtattgttttgtaaaatattataattaagattgttattttaaggattttgaagtttgtgaagattaggtatttttttgaaattttaagataattattttttagttttttttattttttgtttttatttagaattaagtttattattaaaacgtagttttgttgacgttaagtatttatttatatgatatgtaattattggggtcgttaaaatttgggtagaatttttgttaatttattaggattttaggtaaaaaattaggaaaatgaagtgattgatttagtttgttaaaagcggatattttgaaatattattttttaattttaagaaatattttttgttaggtgcggtggtttacgtttataattttagtattttgggaggtcgaggaaggtagattacgaggttaggagatcgaggttattttggttaacgcggtgaaatttttatttttattaaaaatataaaaaattagttgggcgtgatggcgggtgtttgtagttttagttattcgggaggttgaggtaagagaatggcgtgaattcgggagatagagttcgtagtgtattagtcgcgatcgtgttattgtattttaggttgggcgatagagcgagatttagttttaaaaaaaaaagaaaaaaaagaaatatatttttttattcgttagggaaattaattttcgttttttttttttaaattatataattggaaattaatttagatattttggagtttttttagttggtgggttaattaagagaaaataggaagtgggagattttagtttagttggattatatttaggtttttataaggaattttttttggttggtatgtaaaaaaatttttttagtaagagtattaattttgaacgtgtgtaaatacgaaagttatggttaattttatttgttttttaggtttatagttagtagagttagatagttgggttttaggtttttagtttttataattgatattattgttaagtttatgtgattgatttattttgttttggtataagttagttttttttttatatcgattttttttttttttagttttaataaaatttttttaatgaaataaatttggtaattcgaattttggttattgtttttattagaggtttgtataagttaagttatttaagttgaggtcgggagtggtggtttatgtttgtaattttagtattttgggaggttaaggtaggaggatcgtttgagtttaggagtttaagattagtttgggttggtttttgagaaagcgagattttgtttcgaaaaaaaaaaaaaaaagtgtggtttgaaagttgagtgtttgataaaaaggagaaatagtgtttttttaaaattaaaggtttttaattaagatttttttaacggggtttcgaaaaaaggagaatgggatgagaaggatatatgggtagtgttattttttaatttgtagattttattttagttttttagttatcgttttttagtattttatgtttttaagatagtgttattattttaaggatttttttttattttttttgtttgggttttttttttattgaggagtcgtggttttttattagtagaagtcggatgtttttgtgttcgaaattggtgggtttttggttttattgattttaagaatgaagttgcggatttttacggtgagtggtatagtttttaaagatgatgtgtttagagtttgttttttttgatgttcggacgtgtttagagttatttttttttggtggattcgtggtttcgttggttttaggagtgaagttgtagatttttgcggtgagtgttatagtttttaaggcggtatgtttggagtttgttcgtttttttcgtttggagttgtttattttttttggtgggttcgtggtttcgttggttttaggagtgaagttgtagatttttgcggtcggtgttattagtagataaatgttatgcggatttaaagagtgagtagtagtaagatttattgtaaagagtataagaataaagtttttatagcgtggaaggagattagagcgggttgttgttgttggtttaggtagtttgtatttttttttttttttttttttttttttgagatggagtttttttttgttatttaggttggaatgtagtggtgtaatttgggtttattgtaagtttcgtttttcgggtttacgttatttttttgttttaatttttttagtagaggggattataggtatttattatcgtatttagttaatattttgtttttttagtagagtcggggttttattgtgttagttaggatggtttcgattttttgatttcgtgatttatttttttaggttttttaaattgttgggattataggtgtgagttattggtatttagcggggtagtttgtttttatttttttatttgattttatttatattttgttgattggtttattttatagagagttaattggttcgttttgatagggtgttgattggtgtatttataatttttgagttagatatatatagagtgttgattggtgtatttataattttttagttagatataaaaattttttaagtttttattatatttgttagatatagagtattgattggtgcgtttataaatttttagttagatatagagtgttgattggtgtatttgtaaattttgagttagatatagagtattgattggtgtatttataattttttagttagatatagaagttttttaagtgtttattagattagttagatatagagtgttgattggtgtatttttaaattttaagttagatatagagtgttgattggtgtatataaaatttttaggttagatataaaagttttttaagtttttatttgatttaggagtttagttggttttatttagtggattttgcgtagggttgtgtcgggcgtttgtattttttttagtttttgggtagtcgatgggatcgggcgttgaggagtagggggcggtgttcgtcggggaggtttaggttacgttggagtttataggggttgggagggggttcgggtatggcgggttgtaggttttgagttttgttttgtgtagggcggttggggttcggtgagaatttaagcggggtgtaggcgggtcggtagtgttgggggattcggcgtattttttgtagttgttggttcgggtgttaggtttttgattgttcggggtcgggggtgcggggttcgttgagttcgcgtttatttggaattcgcgttggttggcgagcgttgcgcgtagttttagtttttatattcgtttttttttttatattttttcgtaagtagagggagtcggttttggtttcggttagtttagagaggggtttttatagcgtagtggcgggttgaagggtttttttagtacggttagaatggacgttaaggtcgaggaggcgtcgagagcgagcgagggttgttagtacgttgttatttcgtattttgaattatagattttttaatttttcggcgtttttcgtttattcggttttttagaatacgaagggtttttttattttgttattaaaacgattagttgttcggagatacggaaaaagtcgttttttttttttgtaggattttttttttgaatttttttaaatttttttagtgtgacgtgattttatttttagttaatttaggttgtttttttattagtttttcgttttttggggaggcggtaatgtaaagatcgttcgttgttagttttgtcgttatttttgtggggtgaatttaatatggcggataaagatagtaattagtttcgttttttcgcgttttcgttaagaagattggtttttattatttgttttttaaaacgattattttattgattggtggcgattgcgtcgacggagacggggtaaaagtaagttgaattcgaaaaataataaatattggggttgaggggtggaattacgagtgcgtagatatgggttagagcgtattttttttgttttaggtaaattcggcgtttattgcgttttcgtaggttattgattttataagattatttgttttagatttttggggttggatgggaattgtagtttttttaaagagttgtacgtatttttttaaggtttagtttttgtttttaaaatacgaaaatataatattttagtttataattgttgataagtataagcgcgtataggtttttaatttatttattggattttcgtgagaattgtgttcgttttggtattggatgtttttttttataagattatagtttttaaggaatattgtggcgaagattttttatttcgtaacgtatgttggaaataattatttttttttatttttttaataatttttattatttatatttatcgaaattggagatttttattagggcggaaagagtgggggattgggatttttttttacgattgttttggataataggtagcgattttgattttcgtatagtaattattgtgatgtaataagtcgtaattggaagagtagaggttagagggtaggtattttatggtaaatttaggtagaattttttttttttcgtttttttttttttacgttattcgggggtagattgggtggttaatttagagtttcgagagacgtttggttttttttgttttttttattttttgattgtattttgatttcgtattttgagaggttgttgtttagcggtagttttttggttttcgtggtaacggaaaagcgcgggaattatagataaattaaaattgcgattgcgcggcgtgagttcgttgagattttttggacgggggataggttgtggggttttttagataattgggtttttgcgtttaggaggtttttattttttgttttgggtaaaggtagtagagtttcgggaaagggatagggggtttaagtgatgttttggggtattggcgtgggagagtggattttcgaagttgatagatgggtattttttgacggggggtaggggcggaatttgagaggcgtaaggcgttgtgaattttggggaggggggtagtttgtaggtcgcgagggaagcgttgaggattaggaagggggtattgagtgttcgtgggggaattttcgtgataggaattggaatatgttttgagggggatattatgtttttaaaaacgtcggttggttatgaggttaggagttttagattagtttgattaacgtggtgaaatttcgtttttattaaaaatataaaaattagtcgggcgtggtgtcgttttagttatttaggaggttgaggtaggagaatcgttagaattcgggaggcggaggttgtagtgagtcgagatcgcgttattgtattttagtttgggcgatagagcgagattgttttaaaataaaataaaataaaataaaataaaaaatatcggttggtatgtatgagaggatgggattttgtggaagaagaggtgttaggaatatgtttgggaaggggaggagataggattttgtgggagggagaatttaagaattggatttatttgcgttattgagaaagcgtaagagggaagtagaggagcgttagtagtaatagatgttgtcggtagggatgtgtttgaggaggatttagagatgagagtaggttattgggaaaggttaggggcggggaggttttgattggtgttggtttggtcgttgttgattttggttttatgtaagaaaaagaaaataattagaaatattggagaaagttaaggttattattatttattcggttagttatttttttgtagtttttttttttttggagaaaggaaaagatttaaggggttggtagtaatatgtgaaaaaatttagaatttatgttgtttaattataaaaagtaatttttagaatttttaaaaataaaggacgttgttattagttttttggtttgtattattttaaaattttttaaattttaaatttattttattttaaaatgataaaatgaagttgttattttataaattttttaaaaagatatatatatatgtttttttaatgtgttaaagt

SEQ ID NO: 16 - DNA, 6277 bp, Artificial Sequence
  chemically treated genomic DNA (Homo sapiens)
attttaatatattagaaaaatatatatatatatttttttaaaaggtttataaaatgataattttattttattattttaaaataaagtaaatttaagatttggaaggttttagaataatataaattaaagaattaatgataacgttttttatttttaaagattttagaagttgttttttgtaattagataatataaattttgaatttttttatatattgttgttaattttttgggtttttttttttttttaagaaagagaaagttatagaggagtgattgatcgggtaggtggtggtagttttagttttttttaatgtttttggttgtttttttttttttgtataaaattaaaattaataacgattaaattaatattaattaaggttttttcgtttttaattttttttagtgatttgtttttatttttggattttttttaagtatatttttgtcggtagtatttgttattattgacgtttttttattttttttttgcgtttttttaatggcgtaaatggatttagtttttaagtttttttttttataaaattttgtttttttttttttttagatatatttttggtatttttttttttataaggttttatttttttatatatattagtcggtgttttttgttttgttttgttttgttttgttttgagatagtttcgttttgtcgtttaggttggagtgtaatggcgcgatttcggtttattgtaattttcgtttttcgggttttagcgatttttttgttttagttttttgagtagttggagcggtattacgttcggttaatttttgtatttttagtagagacggagttttattacgttggttaggttggtttggaatttttgattttatgattagtcgacgtttttaaagatatagtgttttttttaaggtatattttagtttttattacgaggatttttttacggatatttagtgttttttttttgatttttagcgtttttttcgcgatttataaattgtttttttttttagggtttataacgttttacgttttttaggtttcgtttttatttttcgttaaagaatatttatttgttagtttcggaaatttatttttttacgttagtattttagagtattatttgggttttttgtttttttttcgggattttattatttttatttagagtagagggtgaaggttttttgagcgtaggggtttagttatttgagaaattttatagtttgtttttcgtttaggaagttttagcgagtttacgtcgcgtagtcgtagttttaatttatttgtaattttcgcgttttttcgttgttacggaaattaaggggttatcgttaagtagtagttttttagaatacgaaattaaggtataattagaggatgggagggatagaaagagttaagcgtttttcggggttttggattggttatttagtttgttttcggatgacgtaaaaggaaagagacggaagaggaagaattttatttgagtttgttataaagtgtttgttttttagtttttatttttttagttgcggtttattgtattatagtaattgttgtacgaaggttagaatcgttatttattgtttaaagtagtcgtaagaagaggttttaattttttatttttttcgttttaatggaggtttttagtttcggtaaatataagtaataaggattgttgggggggtggagggaaataattatttttagtatgcgttgcggaatgaaaggttttcgttatagtgttttttagaaattgtagttttatggagaggaatatttaatattagagcgggtataatttttacggaaatttagtggatagattggagatttgtgcgcgtttgtatttgttaatagttatggattggagtgttatgttttcgtattttgaaagtagaaattaggttttaaaaagatacgtataattttttagggagattataatttttatttagttttaggagtttggggtaagtagttttgtaaggttagtggtttgcggggacgtagtgagcgtcgaatttgtttggggtaggggaaatgcgttttggtttatgtttgcgtattcgtagttttattttttagttttagtgtttgttatttttcgggtttagtttgtttttgtttcgttttcgtcgacgtaatcgttattagttaatggggtggtcgttttgagggataagtggtaagagttaatttttttggcgaaaacgcggagaaacgggattagttattgtttttgttcgttatgttagatttattttatagagatagcggtagagttggtagcggacggtttttgtattgtcgtttttttagggggcgggaagttggtaaggaagtagtttgggttagttaggggtggggttacgttatattaagagggtttggagaagtttaagggaggaattttgtaaagaagaggggcgatttttttcgtgttttcggatagttaatcgttttagtgataggatgagagagtttttcgtgttttgagggatcgagtgggcgaaaagcgtcggagagttggagagtttgtggtttagaatgcgaggtgataacgtgttagtagttttcgttcgttttcggcgttttttcggttttggcgtttattttggtcgtgttggaggagttttttagttcgttattgcgttgtgggggtttttttttgggttggtcgaagttagagtcggttttttttgtttgcggggaagtgtggagggagaggcgggtgtgggaattggggttgcgcgtagcgttcgttagttagcgcgagttttaggtgggcgcgggtttagcgggtttcgtattttcggtttcgggtagttaggggtttagtattcgggttagtagttgtagagggtgcgtcgggttttttagtattgtcggttcgtttgtatttcgtttgaatttttatcgggttttagtcgttttgtatagggtaaggtttaggatttgtagttcgttatgttcgagtttttttttaatttttgtgagttttagcgtggtttgagttttttcgacgggtatcgttttttgttttttagcgttcggttttatcgattgtttaagggttgagaggagtgtaggcgttcggtatagttttgcgtaggatttattaggtgaagttagttgggtttttgagttagatggggatttggaaaatttttatgtttagtttgaggattttatatgtattagttagtattttgtgtttagtttggggtttggggatgtattaattagtattttgtatttagttaatttggtgggtatttggagaatttttgtgtttagttaaaggattgtaaatgtattaattagtgttttgtgtttagtttaaggtttgtaaatgtattaattagtattttgtgtttagttaaaggtttgtaaacgtattaattagtgttttgtgtttagtaaatgtagtggggatttggagaatttttatgtttagttagaggattgtaaatgtattaattagtattttgtgtatatttagtttagggattgtaaatgtattaattagtattttgttaaaacggattaattagttttttgtaaaatggattaattaataggatgtgggtggggttagataagggaataaaagtaggttgtttcgttgggtgttagtggtttatatttgtaattttagtaatttgggaggtttagaggggtggattacgaggttaagagatcgagattattttggttaatatagtgaaatttcgattttattaaaaagataaaatattagttgggtgcggtggtgggtgtttgtaattttttttattggggaggttgaggtaggagaatggcgtgaattcgggaggcggagtttgtagtgagtttagattgtattattgtattttagtttgggtgatagagggagattttattttaaaaaaaaaaaaaaaaaaaaaaaaaaatgtaggttgtttgagttagtagtagtaattcgttttggtttttttttacgttgtggaagttttgtttttgtgttttttgtaataaattttgttgttgtttattttttgggttcgtatagtatttatttgttggtaatatcgatcgtagaggtttgtagttttatttttgaagttagcgagattacgaatttattaggaggaatgaataattttagacgggaggaacgaataaattttagatatgtcgttttaagagttgtaatatttatcgtaaaggtttgtagttttatttttgaagttagcgagattacgaatttattagaaggaggtaattttgaatacgttcgaatattagaaggaataaattttggatatattatttttaagaattgtattatttatcgtgagggttcgtaattttatttttgaagttagtgagattaagaatttattaatttcggatataagaatattcggtttttattgatggaaggttacgattttttagtagaaagagggtttaggtaaagaaaatgagagagagtttttggggtggtgatattattttgggaatatggagtgttaggaaacgataattggaagattaggatgaaatttgtaagttaaaaaatgatattatttatatattttttttattttattttttttttttcgagatttcgttaaagagattttggttagggatttttggttttggaaaggtattgttttttttttttgttaaatatttaatttttaggttatatttttttttttttttttcgagataaagtttcgtttttttaaagattagtttaggttggttttgaatttttgagtttaagcgatttttttgttttggttttttaaagtgttgggattataggtatgagttattattttcggttttagtttggataatttggtttgtataggtttttggtggagatagtaattaaagttcgggttgttaggtttgttttattaaagggattttgttgaggttgaaagaaaaaaaaatcgatgtggaggaaaagttaatttgtgttaagataaggtgagttagttatatggatttaataataatgttaattatgaaagttgaaggtttaggatttagttatttgattttattggttgtagatttaaggagtaggtagggttaattatagttttcgtgtttatatacgtttaagattaatgtttttgttgaaagaatttttttatatgttagttaaagagagttttttatggagatttggatatggtttagttaagttagaattttttattttttgtttttttttagttggtttattagttggaggagttttagaatatttaaattaatttttaattgtgtaatttgagaaaaagagacgaagattaatttttttaacgagtagggaagtgtgtttttttttttttttttttttttgagattgagtttcgttttgtcgtttagtttgaagtgtagtggtacgatcgcggttagtgtattgcgaattttgtttttcgggtttacgttatttttttgttttagtttttcgagtagttgggattataggtattcgttattacgtttagttaattttttgtgtttttagtagagatgggggttttatcgcgttagttaggatgatttcgattttttgatttcgtgatttgtttttttcggttttttaaagtgttgggattataggcgtgagttatcgtatttggtaggaagtgttttttaaagttggaaagtggtattttagaatattcgtttttggtagattgagttagttattttatttttttgattttttgtttaaggttttggtgaattgataaagattttgtttaaattttaacgattttagtaattatatgttatatgaatgaatatttgacgttagtaggattgcgttttggtggtgaatttggttttaggtagaaataaagaatggagaaaattgggggataattattttagggttttaaaaaagtgtttgatttttatagattttagggtttttaaaataatagttttaattgtagtgttttatagggtagtgtattatattgttaaaaatagtataggtttatggttttaatgattggtttattatttttaaaaatgtttaattgaatttaatttttttaaggagatagggttcggttttgttgtttaggttggtttttaatttttaggtttacgatttttttattttagttttttagattgttaggattataggtatgagttattatatcgggttaattttttattttatttttgagatagagtttcgttttattatttaggcgggagtgtagtggtatgattttggcgtat

SEQ ID NO: 17 - DNA, 6104 bp, Artificial Sequence
  chemically treated genomic DNA (Homo sapiens)
tagttttgaagtaggtagatatgtttatatttttttttgagttagtgtttggatttaggggattagattttttatttgatatggtagagagataagttatgttttaggtttttaaaaggagtttggaaaatataattaatttaagttaaatatttttattatttttttgtatatataataaagataaaaatatttattttattaaattgttgagagtaagaaagataatatatatatagtgtttggtatacggatggaatttagttgatggtagttataatatttataatattttttttttgttttaatttaatatgatttatatgattttttatatttattgtatatgtaatattttttagataattttatatttaggttattagtaaaatattgatattttttttagtatttatatagatgttttttttttaaagtttttagtaaaatttttattggggaattttagttgttttttatttttttttttttttatttttatttttatattaaaggtttttatttttaaggtatataatatgatattttgatatatgtatattttgtgaaatgattgtaataattaagttaattaatatattattattttatatagttttttgtgtgtgtgtgtgtgtgtgtgcgtttagagtttttgagatttattttttttgtaaattttaagtatatgttaattatagttattaggttgtatattaggtttttagaatttatttattttataattgaaaggttgtattttttaattagtattttttttttatttttaatcgtagttttaaataattattattttaatttttgttattgagttcgatttgttttttgagattttatatataagtgagattatgtattacgtgtttttttgtgttttatttattttgtgtgttataatattttttaggtttagttatgttggtataaatgataatattttttttttttgaataatattgttgattaatattttattgtgtgtgtgtgataaatatatattatattttttttaataatttatttattaatggatatttaggttgtttttgtattttggttattgtgaatttcgttgtttttttggtagttatttttgtatttttttttttagaagtagttttattgtagtttaaaagtgttttaggaaaatgatttagaagtaattattttttttggtatgttttttagtaaatacgatgatggaaagttttgatttttgtttttttttaaatagtgtaatcgatttttagttgggattttttttagttaatttgatagttttacgtttttattaggttgaagaaaatgtatgtgttgtgggttgttgtattattgttgttggtggtgttgttgttattgttgagattttgtggttgagtttatattataaaggaattgtagagtagtaataaatttaatttgagttttgaatttaagtttttaggtgtgatttttttaattacgtggaaatttacgtaagaatttttaattagattttatgtttatttttattttttaagtaaagggtataggaatttggtttaaacgaatgggaataaatattatagttagattttattggagtgttgtaaaaatgtttttttttaaaattagattgttttaaaattgattttggtttttagatttttaagttaggaagtaagatagtaaaaattaagggttaaatagttaagcgattatttttttaaaattagtattttttttggcgattttcgttagattatgttttgtttagtattgaaatttagagaagttttaggaatagcgggatgaaatttaagtgattcgtttacgggaagttttatttttttttcgttcgtttagtaaattcgggatgggtttagagaatgatttcgtattttgtattagaagattttagtttttagagagaattttagacgaaatttttatttttttgttttatttttgaaaatttttatttgggaatcgatttgttgtgataaataaaatgggaggagtttggttgaatagtttgtggatttcggaaagtaaagcgaaatgtcgttttaattaggttcgaattttttgtaagttattttgtgaaattggtgaatttgttagaatgaatttttatttatttaattttggcggatcgtttattagggtgtttggtatggtgttaattgttggagaaaatgatttttaaataaaaacgaaaaaaattttcggtttttagtaaggagttaggtaatttttataaatttaaggagtgtttgagaggtgagttaatgatcgttttttttgttttaaagagatagatttttatagttagttttgaaattgttcggggttatattagcgttttttggacgtagattttggttagcgttttacggtattagtttttgatttgtagttgttaaagatttgatagtggggagtacgtgtttattttgaaggttgaagatatatattatagttaggagtagaatttcgattttttaaagtgatatggttataaaatttgcgtttattggtttttattttgcggttatcgtggtacgggcgaaagttatgaattttttttttaggaaaatatatattatagatatatatatttataaacggttttaggaggtttttatgttagaaatttttggttttggaaaaaaattattttcgttgaagtatgtggtagttgagcgtaaatatttttttgttatagttttagtggtagaggtttaagtattacgttttatttagtgttcgtattgcggttttcgtaattttttaagtagttttgtatcgaaaatttaggtcggagattcgagtttaaattgttgaaaagttttaaggtttcggatagggttttagtaggggttatttttttttaggattcggggtttattgtgtttaagattcgttatttaagttttgttttgcgcgtacgttgtttgttttacgttttgcgttgatacgcgtcggtgttttttcgggttagttttagtttcgggttttgtggtcgttttgtcggcgattttgcggagagcgagttttagatatttagtttttagtttcgagttgttattttttcgttgtagttaagaaggaggagattaattaagggtattttagaagttaggcgttttcgttgttttttttgagtacggaggttattaattttttagggggaagagatgtagcgcgaggtaggggtgtcgtgttaagaaatttcgacgtttttggggattgaggataaaggtgcggatacgatttcggggtatttggagtttcgtgattcgcgttacggacggtatatttaggggttaatttttgttttgttttaaagaattttaagttagagtttttgttttcgtttatagtttcgggatgtcgttgttgcgtttatcgtataggtagcgttcggatcggttgtagtagatcgcgcgttgcgcgttttatcgggagatggtggagacgttgaaaagttttttttttgttattttggacgttgtgggcggtaagcgttttagtttttatttttgttgagttgaacgtttaggtatagtggaattgaaattcggttttgcgggatgtgagagttgttgaggttacgcgtaattgggtgtgatggagggcgtttgttcgtgatgtgtgtaggtttgatgtaagtaggttatcgtcgtgcgagtgtgtggatgcgatcgttcgagagattcggaggtaggtttgggatacgtttgagtgaatattttaggatatttttttggttagtatttgttttttagtgtttgtgatttagagtgggtatatgttgggagatagtaatgggtttgggtgtgtgtaaatgagtgtgatcggaagcgagtgtgagtttgatttaggtagggattatatagtattgttatatttgtttgttttttagtagaggattgaagtgcgggggtgggggtacggggtcggaatagaatgtttttgggatattttggtaaatagtagtcggaagtaaaggggtagttgtgtaaacggtttaggtaggtgatggatggtagggtaggaagggggaggtttagaggtttggatggaggttttcgtatttgtattttgtaatttattttttaggtttagtaggttatcggttttttttttatatatgtaatggatttgaagagtatttcgggatagttcggggagatggagattcggaaagtatttatggagattttatagaattttttgtgcggattaggaaatttttgtagatttttgtttatttgaggtttaggcgttgggttgttttttataatatttttttaagatgagattgtggtttttattttaaagatgagtatattgagtttttgtgaagttatttgtttatgattatataattaggaattgggttaattgtaattgaatttttgtttaataaagtttttgtttttagtttcgttttttgttttttacgagttttggttttttgtgggtaatattagttattggagttagattttttgggtttagaatttatttttaggggtattaatttttaaaattttatttgggtaggggtttgggattagagttggaagagtttttataattttggatttttttcgttaaatcgtgaaattaggggtggagtggggcgagggtttaaaattaggtcggattgagaggtgaaatttattatgacgttaaattgtttttaaattttcgtttattttaagggcgttatttgttggtgtttttattattttttattatttttattaatgattttaatgtaaatataagtgggacggttttgttggattttttaggttttggaagtatgagggtgacgtaatttaggggtaaaggattttttcgtttattggttgttgtgtattggcggaattttttcgatttatagcggcgggaataagagtagtcgttggcgttgggaggtattagagatattgtttagtttaagtgtcgtcgtcgtttttatagggttttgttggacgtcgtcgtcgtcgttgttatcgtttttgatttaagttatttttcgttaggtgagtttcgagattttggtttaggtatatgtttttttttttttttttttttattcgttatttttttatttttttttttttttttttttttttttcgttagtttttttattagatagtttttgttagttcgcgatttatattaggttcgtgttttaggttggatcggatagttttaatttttcggttcgttttttttgttcggttgcggattttagttttattttttcgtattgtatataggtttaggttagtttcgggatatttaggttttttagggatcgcgtatagagtttgaggtaagagaaatttttcgtagacggtgcgattagggacggcgtttggagtttagtagttttagggaaattggtttagaatttggaatagagcggatgggtggtaaataggtacgacgattgagggataagtagttttaaattgtaagttttagttataggttttgggagtaaagagagaaagttttgggttttaatttaagagtaaaatttggtttttgtaggggattgaggtgttagtaggcggagtttaggttgagtattaaaattgatttttttattttttagattttaattgtagagataatttttgtggatagattttattttttttattaaggtgtatgtaaaagttttagaagaggaggatagttttgggtttttttatgggattagtttttgtgataggggtttgggagtatgttttttatagagatttggttaataggtttatatgtatttgtgtggttttggggagaagggtaggattgagattttttttatttagttttttttttaggatcgtttttttagttttattagattgtgtatgttataggtttattgaattttttagaagtttattgtgttgatgaggaaataaaaaagaagagaaatataatgattagtttgaagttataaagttagagcgttagaagtaagatagaaaattaggataggagttaaggtttgtgggtttttagaatttcgaattggcgtaggtggtttattttattttttttttgtaga

SEQ ID NO: 18 - DNA, 6104 bp, Artificial Sequence
  chemically treated genomic DNA (Homo sapiens)
tttgtaagggaagaatgagataaattatttgcgttagttcgaagttttaggagtttatagattttggtttttattttggttttttgttttgtttttaacgttttggttttgtggttttagattggttattatatttttttttttttttgtttttttattagtatagtggatttttgggaggtttagtgggtttgtagtatgtatagtttgatagagttggaggagcgattttagagggagagttgagtgggggaggttttagttttatttttttttttaaagttatatagatatatataaatttgttagttaggtttttgtggaggatatgtttttaggtttttgttatagaagttgattttataaggaaatttagagttgttttttttttttggggtttttgtatatattttggtgggaggggtgggatttatttatagagattatttttgtaattggaatttgagaaataaaagaattaattttagtgtttagtttaagtttcgtttgttggtattttagttttttgtaggaattaagttttatttttaaattgggatttaagattttttttttttgtttttagagtttgtgattggggtttgtagtttagggttgtttgttttttagtcgtcgtgtttatttgttatttattcgttttgttttaggttttgaattaatttttttgggattgttgggttttagacgtcgtttttgatcgtatcgtttgcggaaagttttttttgttttaggttttgtgcgcggtttttggggagtttgagtgtttcgagattggtttaagtttgtgtgtagtgcgagagagtaagattggagttcgtagtcgagtaggaagagcgagtcgggggattgagattgttcgatttaatttagggtacgagtttggtataaatcgcggattaatagagattatttgatgaagagattaacggagagagagggagaggaggaaagggagtgagaaaatgacgaatggagggagagggagggagagatatatatttgagttaggatttcggggtttatttggcgggaggtggtttggattagaggcggtggtagcggcggcggcggcgtttagtagagttttgtggaagcggcggcgatatttgggttgggtagtgtttttgatgttttttagcgttagcgattgtttttattttcgtcgttgtgggtcgggaaagtttcgttagtgtatagtaattaatgggcggaggggttttttgtttttgggttgcgttatttttatgtttttagaatttggaggatttagtaggatcgttttatttgtatttgtattgaggttattgatggaaatggtgggggatggtgggggtattaataagtaacgtttttaaagtgagcgggaatttgagggtagtttgacgttatggtgaattttattttttagttcggtttggttttgaattttcgttttattttatttttggttttacgatttggcggaaagggtttaggattgtagggatttttttaattttgattttagatttttgtttaagtgagattttaaaggttaatgtttttaagggtgggttttgggtttaagaaatttgattttagtagttggtattatttatagagggttagggttcgtgggaaataagagacggagttgggagtaagaattttgttagataggagtttaattatagttggtttaatttttggttgtgtgattatgggtaagtaattttatagaggtttagtgtatttatttttgaaatggggattataattttattttgaaggaatattgtgagaaatagtttagcgtttgggttttagataggtagggatttataagagttttttggttcgtataggggattttgtaagatttttatggatatttttcgaatttttattttttcggattgtttcggggtattttttagatttattatatgtgtgaggagggggtcgatgatttgttgggtttgaggggtgagttgtaaggtatagatgcggaagtttttatttagatttttggatttttttttttttattttgttatttattatttgtttgagtcgtttgtatagttgtttttttgttttcggttgttgtttgttaagatgttttagagatattttatttcggtttcgtatttttattttcgtattttagttttttattaaagagtaggtaggtgtgatagtgttgtgtggtttttgtttagattaagtttatattcgttttcggttatatttatttatatatatttaaatttattattgttttttaatatgtgtttattttgaattatagatattaaaaaatagatattggttagaagagtattttgaggtgtttatttaaacgtgttttaagtttgttttcgagtttttcgggcggtcgtatttatatattcgtacgacgatgatttgtttgtattaaatttgtatatattacgaataggcgttttttattatatttaattacgcgtgattttaatagtttttatatttcgtagaatcgggttttagttttattgtgtttgagcgtttagtttagtagaggtagggattaaggcgtttgtcgtttatagcgtttagagtggtaagaaagaagttttttagcgtttttattatttttcggtggaacgcgtagcgcgcgatttgttgtagtcggttcgggcgttgtttgtgcggtgagcgtagtagcggtatttcggggttgtgggcggaggtaaggattttagtttgaggttttttgaggtagagtagaaattagtttttaggtgtgtcgttcgtggcgcgagttacggaattttaggtatttcggggtcgtgttcgtatttttgtttttagtttttagaagcgtcgaaattttttagtacgatatttttgtttcgcgttatattttttttttttagggggttggtggttttcgtgtttaaaggaggtagcgggaacgtttaatttttaagatgtttttaattgatttttttttttttaattatagcgagggaataataattcggggttggggattgggtatttaagattcgtttttcgtagggtcgtcggtagggcggttataggattcgggattggaattggttcgggaggatatcggcgcgtgttagcgtagagcgtgaaataggtaacgtgcgcgtagagtagggtttggatggcggattttgggtataatgagtttcggattttgaaggaagataatttttgttgagattttgttcggagttttggagttttttagtagtttaggttcggattttcggtttgggttttcggtgtagagttgtttgaagagttgcgaaggtcgtagtgcgggtattgagtggggcgtagtgtttgggtttttgttattggggttgtagtagaagggtatttgcgtttagttattatatattttagcggaaatgatttttttttaagattagaggtttttaatataagaattttttgaaatcgtttgtaagtgtgtgtgtttgtgatgtgtgtttttttaaagagagagtttatagttttcgttcgtgttacggtgatcgtaaaatgaaagttagtagacgtagattttgtggttatgttattttgaggggtcggaattttatttttgattgtggtgtgtgtttttagtttttagaatagatacgtattttttattattaaatttttggtagttataaattaaaggttggtgtcgtggggcgttaattagagtttgcgtttagagggcgttagtgtagtttcgagtagttttaagattgattgtaaaagtttgtttttttaggataggagggacggttattaatttattttttaagtattttttgagtttgtaggaattgtttggttttttgttgggggtcgaaagtttttttcgtttttgtttgaaaattattttttttagtaattagtattatgttaggtattttagtagacgattcgttaaagttaaatgaatgaaaatttattttggtaaatttattagttttataaggtagtttgtagaaaattcggatttagttagagcggtatttcgttttgtttttcgaaatttataaattatttagttagattttttttattttatttgttatagtaagtcggtttttaggtagaagtttttaggaatgaggtagggaagtaaggatttcgtttagggttttttttaaagattgagattttttggtgtaaaatgcgaagttattttttgagtttatttcggatttattgagcgagcgaaggaagggtagagtttttcgtgagcggattatttagattttatttcgttatttttggaatttttttgagttttagtattaaatagagtatggtttaacggaagtcgttaaggaaaatgttgattttaaaaaaatagtcgtttgattatttgatttttgatttttattgttttattttttaatttaaaaatttggaaattagggttagttttgaaataatttgattttggaaaaaaatatttttataatattttaataaagtttaattgtaatgtttgtttttattcgtttagattagatttttgtattttttgtttaagaaataaaaataaatatgaagtttggttgaaaatttttacgtgaatttttacgtgattaaaaaagttatatttgaaggtttgagtttagagtttaagttaaatttattattgttttataatttttttataatatggatttaattataaaattttagtagtagtaatagtattattagtaatagtaatataatagtttataatatatatattttttttagtttggtagaaacgtggagttattaaattaattggaaaaaattttaattgaaaatcgattgtattgtttaaagaagggtagaaattaaagttttttattatcgtgtttattgaagaatatgttaagagaagtagttgtttttgaattatttttttaagatatttttagattgtagtaaagttgtttttggggaagggagtatagaaatggttgttaaagagatagcgagatttataataattaagatatagaaatagtttaagtgtttattgatgaatgaattattaaagaaaatgtggtgtgtgtttattatatatatataatggaatattagttagtagtattatttagaagaaggaaatattgttatttgtgttaatatggttgaatttggggaatattatgatatataaaataagtgaggtatagaaagatacgtaatatatgattttatttatatgtagaattttaaaaaataagtcgaatttagtaataaaggttagaatggtgattatttggggttgcggttgggggtaaaagagaaatattagttaaaggatataattttttagttataagatgagtaagttttggagatttaatatatagtttggtgattatagttaatatatgtttgaaatttgtaaagagagtagattttaagagttttaagcgtatatatatatatatatatataggaaattatgtgaggtaatgatatgttaattaatttgattgttgtaattattttataaagtatatatgtattaaaatattatattgtatattttaaaaataaaaatttttaatatggaaataaaagtgaaaaaaaaaaagagtgagagatagttgaaattttttagtgggaattttgttgaagattttagaagaggggtatttgtataaatattgaagaggatattaatgttttattaataatttagatatagaattatttaaaagatgttgtatgtgtagtaagtatgaaaagttatataaattatattaaattgaaataaagaaaagatattataaatattataattattattaattaagttttattcgtgtgttaggtattgtgtgtatattattttttttatttttaatagtttaataagatagatatttttatttttgttgtatatgtaagggaatagtaagagtatttggtttgaattaattatattttttaggttttttttgaggatttgaaatatagtttatttttttgttatgttaggtaagaggtttggttttttggatttaggtattgatttagaggaagatatgggtatgtttgtttgttttagggtta

SEQ ID NO: 19 - DNA, 6012 bp, Artificial Sequence
  chemically treated genomic DNA (Homo sapiens)
  unsure 4921: n is a or g or c or t
tttattaatatgtttttttaatatttgttttttgtaggttttaaatatttttttttttttttttttttgagatggagtttcgttttgtcgtttaggttggagcgtagtggtgcgattttagtttattgtaagttttatttttcgggtttaggttatttttttgttttagtttttcgagtgtttgggattatagacgttcgttattaagttttgttaatgttttttgtatttttagtagagacggtgttttattgtgttagttaggatggtttcgattttttgatttcgtgatttattcgttttggttttttaaagtgttgggattataggcgtgagttatcgtgtttggtcgattttaaatatttttgtaaagaaaattatttattttgaagttgtaagtaatttaaaatattatatatataatatatataatatatattatatatatattttatatatatgttatatatatattattgttataagtaaaatgtaagttataaatttagagttaaaatattataaattaagtgtattattattttttttttaaatggaaacgaagataaaatgaagattgatatagaatattaagaattgttttaaaaaaaatatatatatatggatataaaaaggatgggtatttttagtagtttgtatttaaattattgatttttaggaaaagtgtatttttaggtagaatgagatgtaaaagtgtatttgaaatgtttatttatttttaatatttatttgagttttttaaaatagaaaaattgttaaggatataaatatttagattattattagttttattttttatttattggtattttttattttgtagaatattttttttgtatagagatttgatatggtttggttgtgtttttatttatattttattttgaattgtagtttttataatttttatatgttttgggaggtatttagtgggaggtaattgaaattatgggggtggttttttttatgttatttttatgatagtaagtttttataagatttggtggttttataaggagtttttttttttgtttggttgttattatttttttttttattgttttgtaaagaaagatatgtttgtttttttttttgttatgtttgtaagttttttgaggattttttagttttttggaattgtgagttaattaaatttgttttttttataaattatttatttttaggtatatttttatagtagtgtgagaatgaattaatatagtaaattggtattagaagtggggtgttgttgtaaagatatttaaaaatgtggaagtaattttggaattgggtaataggtagaggttggaagtgtggagggtttagaagatagaaaaatgtaggaaagtttggaattttttagagattttttgaatggttttgattaaaatgttgatagtgatatggataataaggtttatattgtggtggttttaggtgaagattaggaatttgttggtaattgaaataaaggtgatttttattatgtttaagtaaagagattggtggtattttgttttttttttagagatttgtggaattttgaatttgagagagatgatttagggtatttggtggggaaggaaaaaaaaagtttaaaaggtatagtatttaagaggaagtagagtataaaagtgggattggagtttttatatagaatttttattgggtattgtttagtggagttgtaagaagagggttattattttttcgtttttggaatgttggttttatcgatagtttgtattgtgtatttggaaaagttgtagatatttaatgtttatttatgaaagtagttgggaggagggttatatttgtaaagatataggggtagaggtattaaaggtttataagaatttatttattgtattagtgtgatttggatatgagatatggagttaaaggagattattttgaaggtttaagatttaaatattgttttattggattttaaatttgtatggggtttgtagtttttttgttttggttaattttttttatttggaattgatgtatttatttattgtttgtatttttattgtatttaggaagtaattaatttgtttttgatttaataggtttataggtggaagggatttgttttgttttaaaggagattttggatttggatttttgagttaatgttggaatgagtttagattttgggagattgttggaagggtatgattgtgttttgaaatgtgaggatttgagatttgggagggattaggtagaatgatatgatttggttgtgtttttatttaaattttattttaaattgtagtttttataatttgtatatgttatgggagggttttaatggtaggtaattgaattaagggggtagttttttttgtgttatttttgtgatagtaagtttttacgagatttgatggttttaaaaggggtttttttttttattttgtttttattttttttttttttgttgttttgtgaagaaggatatgtttgtttttttttttatcgtgtttgtaagttttttgaggttatttttttttatggaattgtgagttaattatatttttttttttgataaattatttagttttaggtatgtttttatagtagtatgagaatggattagtataagatttttatgatgtataagtataataaaaagaagaaagttatataaagtggggaatagaataggaagttatttataagtattaagtaaaataaatgaataatgaattagttatataatattaatttagtgttttttatttagagttgtattaaatttagtagatgttaaagatgttaaatagattattttagttattaaggagtttgtttatttaataattatttattattatggttttgaattggttattgtttaaatgttatatattatatgtagttttttaagatgtaagtttaaaagtttattttttggaagtttaaggtttggtagagaaataaaagagtgaacgtgtttggggtagaagtgagtattgtgaaatttaatggtagagttgtattagaatgtgagtgtagtggagtgagggaagtgtaagttttagttggtggatagtaaaagaaagttttttgaaggggttgatatttgggttgagtttgaaagagggtgttagttagttaatgaaggtagtgggagtatttaggtatagaagatattatgtgtaaaggggttaaagttagaaaaaaatgagataaggtttagaattggtaaattgatatgtgtggttgggtttgaatatgagaggtaaggaatggtaagagatgagatttgtgtaattatgtatttatttttttatttaaaaaatatatattgagaagtgattataggtcggtatttttgataatgttggggatatagtggttaattagatattttttgatttaatgaaatttaaaatatattaggttaaaaaatgttttaattattttgtttattatggttaatagtttttaaagtgtttttatatttattattttattttatttttttattaattttaaggttaaaagaggtatagttattgtttaatattataaattagtacgtgattaatagaggtttgaattatgttttaatttatattattaaatatttttataacgtatttgttttgtggttttgtagttgtttttttagtttgttttatattttttttgtttttttatttttttttttaaattaatagttttaattattttaatagaaaaatatgtatttttttttttttttttttaaaataaattggagtttcgtttttgttgtttaggttagagtgtaatggtataatttcggtttaatgtaatttttattttttgggtttaagtgatttttttgttttagttttttaattggttgggattatcggtacgtattattatatttagttaattttgtatttttagtagagatagggtttttttatgttggttaggttggttttaaattttcgattttaagtgatttgtttattttagttttttaaagtgttgggattataggcgtgagttattgcgtttagtttaaagataagtatttttttttttttttttttttttttagagagttttattttgttatttaagttggagtgtagtgatatgattttagtttattgtaatttttattttttgggtttaagcgatttttttgttttagttttttaagtagttgggattataggtgtacgttattacgttcggttaatttttgtatttttagtagatagggtattattatattggttaggttggttttaaatttttgatttgattttttatttgttttagttttttaaagtgttgggattatagatatgagttatcgtatttagttaaagatatgtatgtttaaaaataagttattaataatttttgtaaaggaattagtaataatgaaggttataaaatataatttatttgtggtttttttattgttttaataaaagaggtttcgttaaatgttttttagttttatgaatatgtaaaaatttatgtgtgattatagatggtagtttgggtttagaggtatttgttgtttgagtttttgtagaaatagagaagtttgttatttaaaaaaatatttatgtatatgggtatttggaaattaaataatgagaagatttttaatatgtgagttttttttttagcgggggtaagttgtgtttttgtatttgtgaatggtaattattgtaatgaattataaaatgtaaatttttaagttcgttagataaaaattatatttgaatttaagatatatttttaatgtttatataataaattttattttttatagatatttttgtagttagtgtgtgtgtttgattaaataatgtttaattaatttttaatatagtttttttttttagaataatttttgaataattaataaaatttntagttatatttattgtagtttttaatttttgggattaagtgatttttttgttttagttttttaagtagttgggattatatgtgtgtgttattatatttagttaattttttaattatttttatttattttatttgattttttgtagttttattattttttttagtttaattggatttttaagagagttataaaatgatattattttttagtaattttttatttaattattaattatatttaacgtataattaagattggttttaaatagaggatagagaaaaagaatattgtatgttgatatatgaatttatatagggggtagtaataaattttaagggatagtattttgggaaataaaaattatagaaaggtggtgttaggttgagggatattgaaatgggggtttaggtttttttgttttgatcgtgattgttagtatatggtagtagataggagagatttggtttttagttttattttgttatttaaaatttatataataggtagttagaagtttttagttaagatagagtaatagggattagattgagttttttatttgaaataattattaaaattagataaaatatgtgaagtaaatgttttttaagatattgatattaggttataaaagatagaagttgaataaggtaagttttatttttgttttgttataggtagtaagataataagggaaataaagttgaattaaaataaaattttagggtatgtatgttaatgtatagtgatagagtatagattagtgattgtttggggatatgtgtgttgagagaggggattgtaggaaggaggggttagatatatgtcggaattttggagggtgatggataagtttaatattttgattgtgttggtggtttatagatgtatatatatgttaaaatgtattagattgtatattttgaatatgtgtattttattgtttgttattttaataaagttgtttttaaaatttagatgtttttgggtaagttattaaattttgattttataaatttgtaaaatggtaataataatttattaattttagaagtttattgtttggattaaacgaggtatttgtgtgttta

SEQ ID NO: 20 - DNA, 6012 bp, Artificial Sequence
  chemically treated genomic DNA (Homo sapiens)
  unsure 1092: n is a or g or c or t
taaatatataaatatttcgtttaatttaagtaatagatttttaaagttgataggttgttattattattttatagatttgtaaagttaaggtttagtaatttgtttagaggtatttagattttaaaaatagttttattaaagtgatagataataaggtgtatatatttaaaatgtgtaatttgatatattttgatatgtgtatatatttgtaaattattaatataattaaggtattgaatttatttattattttttaaagtttcggtatgtgtttaattttttttttttgtaatttttttttttaatatatatatttttaggtagttattgatttgtgttttattattgtatattgatatgtatgttttggaattttattttgatttaattttattttttttgttgttttattgtttatagtagggtaaaagtagggtttattttgtttaatttttgttttttgtagtttgatgttagtgttttgaagaatatttattttatatgttttgtttggttttaatgattgttttaggtaggagatttaatttagtttttgttattttattttgattgagagtttttgattatttgttatatagattttaagtgataaagtggagttggaagttaagttttttttgtttattattatatattgatagttacgattagaataaaggggtttggatttttattttaatgttttttagtttgatattatttttttgtgatttttattttttaaaatattgttttttggagtttattattgttttttatataaatttatatgttagtatatagtattttttttttttattttttatttaagattagttttggttatacgttgggtgtgattagtaattaagtgagaaattgttagaaaataatgttattttgtgatttttttaagggtttaattagattgggaaaaatagtgaaattgtaaaaaattaaataaaataaataaaaataattaaaaagttagttgggtgtggtggtatatatatatagttttagttatttgagaggttgaggtaagaggattatttgattttaggagttagaggttgtagtgaatgtaattanaaattttattaattatttaaaaattgttttaaagaagaaaattatgttagaaattggttaaatattatttaattaaatatatatattgattgtaaaaatatttgtaaaaaatgaaatttattatgtaaatattagaaatatgttttaaatttaggtataatttttatttgacggatttgagaatttatattttatggtttattataatggttgttatttatagatgtaaaaatataatttattttcgttaagaggaaaatttatatattaagaatttttttattgtttgatttttaaatatttatgtatatgagtatttttttaaatggtaagtttttttatttttatagaaatttaaataataggtatttttgagtttaggttattatttgtagttatatatggatttttatatgtttatagagttgaaaagtatttaacgaaattttttttattaaggtagtgaggaggttatagataagttgtgttttatggtttttattgttattgatttttttgtaaaagttgttaatgatttatttttgaatatatatatttttggttgggtgcggtggtttatgtttgtaattttagtattttgggaggttgaggtaggtggaagattaggttaggagtttgagattagtttggttaatatggtgatattttgtttattaaaaatataaaaattagtcgggcgtggtggcgtgtatttgtagttttagttatttgggaggttgaggtagaagaatcgtttggatttaggagatggaggttgtagtgaattgagattatgttattgtattttagtttgggtgatagagtgagattttttaaaaaaaaaaaaaagaaaaagaaaatatttatttttgggttgggcgtagtggtttacgtttgtaattttagtattttgggaggttgaggtggatagattatttgaggtcgggagtttgagattagtttgattaatatggagaaattttgtttttattaaaaatataaaattagttgggtgtggtggtgcgtgtcggtaattttagttaattgggaggttgaggtaggagaattatttgaatttaggaggtggaggttgtattgagtcgagattgtattattgtattttagtttgggtaataagagcgaaattttaatttattttagaaaaaaaaaaaagaaaatatatatttttttattagagtaattgaagttgttagtttgagaaaaaaaataaaaaaataagaaaagtatgaggtaaattaaaaaggtaattatagagttataggatagatgcgttgtgaaaatgtttggtaatataagttagaatatagtttaagtttttgttggttacgtattggtttataatattagatagtgattatgttttttttaattttgagattgataaaaggatgaaataaggtaatagatatgaaggtattttggaaattgttaattatgatagatagagtaattaaaatattttttgatttgatgtattttaaattttattaagttagagaatgtttaattaattattgtatttttagtattattaagagtgtcgatttatggttattttttaatatatattttttgaatgaaggaataaatatatggttgtataaattttattttttgttattttttattttttatgtttaagtttagttatatatattaatttgttagttttgagttttattttatttttttttgattttggtttttttgtatatagtattttttgtgtttgagtgtttttattatttttattggttggttgatatttttttttaaatttagtttaggtgttaatttttttagggagtttttttttattgtttattaattgagatttgtattttttttattttattgtatttatattttgatgtaattttgttattgggttttataatgtttatttttgttttaggtacgtttatttttttgtttttttgttaagttttaagtttttagagaatagatttttagatttgtattttaagaggttatatatggtgtgtggtatttagataatggttaatttaaaattataataataaataattattgaataaataaattttttgatggttggaataatttatttgatatttttaatatttattaagtttggtgtagttttaaataagagatattaagttaatattatatagttaatttattatttatttattttatttaatatttgtgaatagttttttattttattttttattttgtgtagtttttttttttttattatatttatgtattataaaaattttgtattagtttatttttatgttgttataaggatatatttgagattgggtaatttattagggaaagaggtgtaattgatttatagttttatagggaggggtggttttaggaaatttataaatacggtggaaggggaagtaaatatgtttttttttataaggtagtaggagggagaagaatgagagtagagtgaagggggaagttttttttaaaattattaaatttcgtgagaatttattattataagaatagtatagggaaaattgtttttttgatttaattatttattattgaggtttttttatgatatgtgtagattatgggaattgtaatttaagatgagatttgagtggggatatagttaaattatattattttgtttggttttttttaaattttaggtttttatattttaaaatatagttatgtttttttaatagttttttaaagtttaaatttattttagtattaatttaaaagtttaagtttaaagttttttttgggataaggtaagttttttttatttatgagtttgttaaattaaaagtaagttagttattttttagatatagtggaggtatagatagtaggtaaatatattaattttaaatgggagaaattggttaaaataaaggggttatagattttatgtaagtttgaaatttaatgaggtagtatttaaattttaaatttttaaaataattttttttgattttatgttttatatttaggttatattgatgtaataggtgggtttttatgggtttttgatatttttgtttttgtgtttttgtaggtatagttttttttttagttgtttttatgggtggatattgagtgtttgtagtttttttaagtgtatagtgtaagttgtcggtagaattagtattttagggacgagagaatggtggttttttttttgtagttttattaggtagtgtttagtggggattttgtgtgggggttttaattttatttttatgttttgtttttttttgaatgttgtgttttttagattttttttttttttttttattagatgttttaaattattttttttaagtttaaaattttatagatttttagggaaggggtaaaatgttattagtttttttgtttaagtataataaggattatttttattttagttgttaataagtttttaatttttatttgagattattatagtgtggattttattgtttatattattattagtattttggttaaaattatttaaggagtttttaggaagttttaaatttttttgtatttttttattttttgagttttttatatttttaatttttgtttgttatttagttttaaagttgtttttatatttttgggtatttttatagtaatattttatttttggtattaatttattgtattagtttatttttatattgttataaggatatatttgagagtgggtaatttataaaagaaataggtttaattgatttatagttttagaggattagggaatttttaggaaatttataaatatggtagaaggggaaataaatatgtttttttttataaggtagtagaagggagaataatgatagttaaataaagggggaagttttttataaaattattagattttgtaagaatttattgttatgaaaatagtatgggggaaattatttttatgattttaattattttttattgagtattttttaaaatatgtggggattatgggaattataatttaagatgagatatgagtggggatatagttaaattatgttagatttttatataagggaaatattttgtaggatgagaaatgttaatgaataaaaaatgaaattagtagtaatttagatatttatgtttttaataatttttttattttaaaaggtttaaataaatattaaagataggtagatattttaagtgtatttttatattttattttatttgaaaatatattttttttaaaagttagtaatttaaatataaattgttagaagtgtttattttttttatatttatatatatatattttttttaaggtagtttttagtgttttgtattagtttttattttgttttcgtttttatttgaaaaaaaaatagtaatatatttggtttgtgatgttttaattttaaatttatagtttatattttatttatggtaatggtatatgtgtgatatatatatgagatatatatataatgtatattgtatatattatatatgtaatattttaagttatttgtaattttaggataaatgattttttttgtaaggatatttgaaatcggttaggtacggtggtttacgtttgtaattttagtattttgggaggttaaggcgggtggattacgaggttaggagatcgagattattttggttaatatagtgaaatatcgtttttattaaaaatataaaaaatattagtaaggtttggtggcgggcgtttgtagttttaggtattcgggaggttgaggtaggagaatggtttgaattcgggaggtggagtttgtagtgagttgagatcgtattattgcgttttagtttgggcgatagagcgagattttattttaaaaaaaaaaaaaaagaagaatatttgaaatttatagaaaatagatattgaaaaagtatgttaatgag

SEQ ID NO: 21 - DNA, 6862 bp, Artificial Sequence
  chemically treated genomic DNA (Homo sapiens)
tgtattagattttttattttaaagtgatttttaagaaaaaaaaaataaaatgtagttataggtagtttttggacgtttttttatttgttaagtatttttttgtttcgagttttttagttatagtgtattggacgttatcggaaggttgtagttgttatttggtgttttattatcgttgagaaggtggaatggttacggttcggttttgttattttttttagtcggatagtcgttttattacggattttagtagggtcgagtatatttttttttgttcgtttttatagatgaatatgttatcgttttagtagtataattcgttttattacgtaaaaaagtagtttttatttattcgtagggaaggagtatgttcggtattatagttggattggtgttcgagttaagcgttttgggaggttcgtatgcgtttcggaatcgtaatgcgcgttttttttaagttttacggtaaacgcggacgtagggtaattacgtggcggtggaatcgaggttcggcgggaatgcgcggaatgcgcggcgcggtttcgcgcggttttcgagttacggtttagggttcggcggcgcgcgttttcgttttttttttttattttttttagtcgtatttcggttttggttttgttatttagaattcgttgggtaagtcgtgtttcgcgtgaatatatagaaggggtttggggatcgagcgcggtttattagttttttagattttgaggatttagaattttttaaggggttcgaattcgagttttgtttttagtttttaaggtacgggttttagggattttaggggaagggcgcggggtattaggtacgtaattcgttttttcgtatttggaaaaaaattttttttttttttttttttttgtttgttgagtgtgcggataattagaattttaaggcgtttcgtaataacgatttcgttgtttttttatttatttttaagtgttaaagcgagggatggaagcgtttttaagcgttttaagggtattgaggagcgagttggagaggcgcggggatgcggggtttttttcgtagtttttcggaaagggcgggggagggcgcggtaagtttcggagtggggtatgtcgtgggagtttacgagggttttagcgcggatttttcgtcggaaaatcggttttcgcgagtcgtcgtcgtaggttttttaggtttcgcgagtttcgtagcgaagttttgcgttttcgttcgacgcgggggtttgtttagtttcgggtgggtcgcggttaggtttgattgcgggggagagggtcgaacgtgattttcgaggttatttttagttagtttttttttttgtggtcggaagtggtttttttttcgatttgggcgtttattttttattatttggtttgagaggggttggggttagtcggaaggttagggaatttttggtggatttgggggtttatattgtttagggtattagtcgatgcgttttgaggggcgggagtcgaggaattagaatcgtttttaatttttaagagttgcgtttttagtttcgggattttagatgcgtcgttggagttagggtcgtttttttatttgttgggtttgcgttttaattttagcgtatattttgtcggtagttttcggagttaggggaggggtttcgttttttcgtagttcgtcggatagacgattggggtacgggaggggcggtggtagggtggtttgtgtgtggttgaaattaattgatttggagcggaaacgtacgtttgcggttggggcgatggggggggggtgcggttgtttatgtgtcgagcgtgtggttgtttttggtgggtattggggtcggagttcgtttcggtttatttcgtagttttggggcgtttgggatcggcgttacgtaagcgaagtagagttgttatagtacgtgggtcgttacgcgtattttaaaagtaaatagtgtgggggaaaggagagttagagcgttttcggagtataggggtcggttttcgaaagcgttttttcgggcgatttaagggtttaataatggaaaattcgcggagtttgagttaagtttttttaagtcgtcgttaggtatgcggttgtaggtgattttatttgggtgcgttcgttcgttagtcgttttggtggaaaagcgggtgcgggaggtcgttggcgaaaggtcgggattggtttttgtattattcgtttttaatttaagtttcgagtttcgcggcgcgtagtcgcgttgagtttcggggtttgcgtcgcggcgcgtcggtttttgaatgaacgcgtttttttttttcgttcgaatgaaggtttttatagttagggacggtggcgaatacgcgtttgtagcggaattcgtttttttttgatcgattattcgtttaggtcgcggttatcggggcgggggttagggggcgaggaaagcgtgaaggtgattttagttaattttggatttttttttaaataacgtggttattttttcgattgggttatttgttttttgtttttaaatggttattaagaaataagaatagagtattttaaatgagtttagaattcgtagtttttgtttcgtggtgggttttaagaagatagtgtaaagtaaaattgtaatcgaaaagttttttaaagttgtttttttttttggaaaaaataaaattaaaatgttttttttgcgttttttgaagtaatgatttttaaaagtttagaggtattggttttttcgggggattcgggggtcgttaagtagggtttttttaggtgggggttgggtagttggcgtttttcgtcgggttttaaattttagcgtcgggttttaaattttagcgtttttttcgcgggtttttggacggttttttacgttcgttaatcgggtttgtaattttgcgttcgtttttgagtcgggaaattaacgaagtttttagtcgagatttgttcggttcgtttagtaatagcgtcgcgtttttattggtttatgttaattttagttttttttgttttgcgttcgggatgggggggtgaagtttttttttggatttagagtcggttgtgtcggagtgggcgagtttttttatgttttgttgtttttagtcgatttcggttcgtttcgcgtttcgggttgggttagggcgtacgcggggttcggggtttttcgttttacgggatgggagaggtcgggtgatagtttcgggttttataaattatttaggcggtcgtcgggtcgggattttatgaatgaaaaagtagttgggtcgtttttgtgcgcgggttgatgttatgaggtttggttatgcgggggttaacgcgattgtgggtgttcggggagtgggggggggtacgatcgtaggtgttttttgttggggtaatttatcgttttttatgcggaattcgggggtaattatttttttaggattcggaatattagtaattttaattttcggcgggggagggggcgcgggaggaatttattttgaaaggtgggggtggggggggtcgtattttgttgtgagtattttggcgaaggggagagggttttttttattagttttttttgagtttttattgttaagagggtacggtggtttgatgatattgaattatatttaaaaggaagtaaatgaatagtttttttaatttggggtaggtattgtaaaaataaaaataaaagttaagatagtaaaatgtttttttattttttaatgtattaaagagatagaatttgtaattttaaaaattgtgtattttaatttatatttgtttaagtttgcgataatattggggatttttttatgtaattacgaatatttatcgattttgttaaaaattagattagtatattcgtttgtttaattgataattgttttgaattatgtcggtttttgttagtttttttacgtttacgaatttagttttagggtaaattttaaaggtgaagggacgtttatatttttaataaaattaattaggaattttcggtggttttgttttaggtagaggggattaatatttttagtaatttaattttttttttaattaaaaaaaatgagttagaatggagattattgttttttagttttttatttagaggtgtgtttttttcggttaaattgtcggtacgggaagggagggggtgtagttggggattttcgtaaggatcgattggttaaggtaggaaggtagttcgaagagtttttaggttagaaggataagatgaaggaaatgttggttattattttgggttgttgttggaattttcgggtatttattttattttattttttgagcgagcgtatgttaagttgaaatttttttaatttttaggggttatttttttgggtatttgtaacgacgtttttgtgcgtcggaatgaaatttgtataggggttgtgtgttcggtttttttcgtttttgtatgttaaattagtttttgtaatttatacgtgttaatgaaaatgaaagaagatgtagtcgttgagattttttggtcgtttgttcgttcgtgggtgttttcgtggcgtttttggaaatgcgtttattttgtcggtttggatatggggtgtcgtcgcgttttagttattttttttcgtggtttttttaggttgcgtgtggtttgtcggtttttttagttgttttttattgtagagttatttttattttattttttaaatttcgggggatttattcgaggcggacggggttttttgtattttttttttttggcggggagaaaggttgtagcggggcgatttgtatttttatgaaaatcggattataggggtaatttcgtcgtagggtaggcgcggcgttttagggatggtttttgggttttgtttttcgttgttttcggcgtttggcgttcgcgttttttttttttgcgttcgttttcgtttttttttcgtttttattttttgtcgggttttgatttttgtttaataatagtaacgttatacggattataggggagttttgttgaagttgtaaagttttggagtttttagagggttgtcggcgtagtagtagcgagtagtagagttcgtacgtttcggcgaggggtagaagagcgcgagggagcgcggggtagtagaagcgagagtcgagcgcggatttagttaggatttatagttttttttagttgtttaggaagagttttagttatggaatattagtttttgtgttgcgaagtggaaattattcgtcgcgcgtatttcgatgttaatttttttaacgatcgggtgttgcgggttatgttgaaggcggaggagatttgcgcgttttcggtgtgttattttaaatgtgtgtagaaggaggtgttgtcgtttatgcggaagatcgtcgttatttggatgttggaggtgcggggttgggggcggtttttttaagatttttttgtaatttgttgtttagatttacgtttttttgttatttattttttttttttttttttcgttagaattttgaagtttgtcgtggtgtttttagggattcgtatttttaaaataaaaattgcgggtattttttgaaggaggaaggggtgggggtgggggtgttagaagtagcgtttcgtgggaggggagaagggggttcgggaggggtgttttcgggagaagttagtgttaggggtattttaatgggttcgagggtgcgggttggtaggttgggtgcgttttgtgtttttcgtttgcgttttagttcggttgcgttttagcggtcgggagtcgttaatttcggggggagggggtatagatttgatttttaaattaatatttatggatacgtatgtaagggtcgttcgtgttagtattatgcgttatttttgtttttttattgtaaagtaaaagtgtttattaataattgggggtagggtgggggcggggagcggtcgtcgggcgttggggtcgtagttaagggtcgcgcggttgtcgggagttcgcgggaggggcgtagggacgcggtatgggtagttttggggggacgtcgttagggaagggggggtttttgtttaagtagcgagtttcggggcgtttcgaacgggtagtttgggtcggagagtacggcgagttgtaaggtcgcgtggtttttaagacgttagggtttgattttcgtttgtagggatatcggtttggaggatttttttcgagcgagtcgggggtttgggagtatatttttagattttcggtgggcgtttgaggggttcgtaagtattttaaaataatttttgaaagtgcggcgtggtgtttttgcgagagggaaacgtcgttcgcgtttagggggaagggggggtttcggagtttgaatttttggggtttttttcggagtttgtaacgaatttttaattttcggtttgggtaaagggtcgttcgagggttatttttagggtttttttatgtatttagttatttttttaatatttttaaatattttttgaaaagatgacgtttggggaaatgcggcgcggcggtttgggacgttatttttgtgtttcgtaggcgcggcgtttaatttcgcggttcgtttcgcggtttcgtattttagttggtgtcgatttttagttagagggattacggagttttagggcgggttagggtttcgggggtcggtagttcgcgtcgtcgcgtacgtcgtttagttgtgttcgttttcgtttttatcgtgttagtttcgcggggatttttttttttagtttcggggagggtgggtattggggacgcgcgggggagggggcgtattacgggaagtttttgtcgtttttagtttcgatttttcggcgttttttagatttggcggttttgttaagcgcgatggggggtgcgggggcgtgcgggggggcggcgcgatttggcggcggcggttacgggtttcgtgttttcgtagg

SEQ ID NO: 22 - DNA, 6862 bp, Artificial Sequence
  chemically treated genomic DNA (Homo sapiens)
tttacggaggtacggggttcgtgatcgtcgtcgttaggtcgcgtcgttttttcgtacgttttcgtattttttatcgcgtttggtagggtcgttaggtttggagggcgtcgaggggtcggggttgggggcggtaggagtttttcgtgatgcgttttttttttcgcgcgtttttagtatttatttttttcgaaattgaaagggaaagttttcgcgaggttggtacggtgggggcgggagcgggtatagttgggcggcgtgcgcggcggcgcgggttgtcggttttcgggattttggttcgttttggagtttcgtggtttttttgattgggggtcgatattaattggggtgcggggtcgcggaacgggtcgcggggttgggcgtcgcgtttgcgagatataaaggtggcgttttaggtcgtcgcgtcgtatttttttagacgttatttttttaaaaaatatttaaaaatattaaaaaaataattaagtgtataaaaaaattttgaaaatgattttcgggcgattttttatttaggtcgggggttgggagttcgttataggtttcggggggagttttaggaatttaaatttcggggtttttttttttttttgggcgcgggcggcgtttttttttcgtaagggtattacgtcgtatttttaaaaattattttaaaatatttgcgggttttttaggcgtttatcgaaggtttgaaaatgtgtttttaggttttcggttcgttcggagaaggttttttaagtcgatatttttgtagacggggattaagttttggcgttttgggggttacgcgattttgtagttcgtcgtgtttttcggtttaggttgttcgttcggggcgtttcgggattcgttgtttgaataaaggtttttttttttttagcggcgtttttttaaaattatttatgtcgcgtttttgcgtttttttcgcgggttttcggtagtcgcgcggtttttagttgcggttttagcgttcggcggtcgtttttcgtttttattttgtttttaattattaataaatatttttgttttgtaataaaagagtaaagatggcgtataatattggtacgagcggtttttgtatacgtgtttatggatattaatttaaaaattaaatttatgtttttttttttcggagttggcggttttcggtcgttgaggcgtagtcgggttggggcgtaggcgggggatataaagcgtatttagtttgttagttcgtattttcgggtttattggggtgtttttggtattggtttttttcgaaggtatttttttcggatttttttttttttttttacgaaacgttatttttagtatttttatttttattttttttttttttagaaaatattcgtaatttttattttgaaaatacggatttttagaaatattacggtaaattttaaagttttagcgggagagaagggaggggggtgagtagtaaagaaacgtgggtttgggtaataagttgtagggaagttttaagagagtcgtttttagtttcgtatttttagtatttaggtggcgacgatttttcgtatggacggtagtatttttttttgtatatatttaaagtagtatatcgagggcgcgtaggtttttttcgtttttagtatggttcgtagtattcggtcgttgaggaggttggtatcggggtacgcgcggcggatggtttttatttcgtagtataggagttggtgttttatggttggggttttttttgggtagttggggagggttgtgggttttggttgggttcgcgttcggttttcgtttttgttgtttcgcgttttttcgcgtttttttgtttttcgtcggagcgtgcggattttgttgttcgttgttattgcgtcgatagttttttggaggttttaggattttgtaattttaataaaatttttttgtagttcgtgtgacgttattgttgttaagtaaagattaaagttcggtagagaatgggagcgggaggggggcgggggcgggcgtagggggagggggcgcgggcgttaaacgtcgggagtagcgaggggtagagtttaaaagttatttttgaggcgtcgcgtttgttttgcggcggagttgtttttgtagttcggtttttatagaaatgtaaatcgtttcgttgtagttttttttttcgttagggaagaggggtgtagggggtttcgttcgtttcgagtgggtttttcgggatttagggggtgaggtggaggtggttttgtagtaggggataattaggaaggtcggtaggttatacgtagtttggggagattacgagaaggggtgattggggcgcggcgatattttatatttaagtcggtagaatgggcgtatttttaagaacgttacgagggtatttacgggcggatagacggttaaagaattttagcgattgtatttttttttatttttattaatacgtgtaaattgtaagaattaatttagtatgtaaggacggggaggatcgggtatataatttttgtgtaagttttatttcggcgtataggggcgtcgttgtaaatgtttaagggggtaatttttaaaagttaaagggattttagtttagtatgcgttcgtttaaaaaataaaataaaataaatgttcgaaaattttagtagtagtttaagatggtggttagtattttttttattttgtttttttagtttggagatttttcgggttgtttttttattttgattagtcggtttttgcgggggtttttaattgtatttttttttttttcgtgtcggtaatttaatcgggagaaatatatttttgaatggaaagttgagaaatagtgatttttattttgatttattttttttaattaaaaaagaaattaaattgttggaaatattagttttttttgtttgggataagattatcgaaggtttttaattggttttgttgggggtgtagacgtttttttatttttagaatttgttttgggattgaattcgtgagcgtgagggggttggtaggagtcggtataatttagaataattattaattaaataaacgagtgtattgatttgatttttagtaaaatcgataggtgttcgtggttatatgagagggtttttaatattatcgtaaatttaagtagatgtaaattaaaatatatagtttttaaaattataggttttgtttttttggtgtattaaaaaataaaaggatattttattgttttaatttttgtttttatttttatagtatttgttttaaattaagaaaattgtttatttatttttttttgaatatagtttagtgttattaaattatcgtatttttttaatagtaaaagtttaaagaaaattgatagaaaaagttttttttttttcgttagggtgtttatagtaagatgcgattttttttatttttattttttagggtgaatttttttcgcgttttttttttcgtcgggaattaggattattaatatttcgggttttgggggggtaattattttcggatttcgtatggggagcgatgggttgttttagtagggagtatttacggtcgtgtttttttttatttttcgagtatttataatcgcgttggttttcgtatagttaagttttatagtattagttcgcgtataagggcggtttagttgtttttttatttataaaatttcgattcggcggtcgtttggatgatttatggggttcggagttattattcggttttttttatttcgtggggcgaggggtttcgagtttcgcgtgcgttttggtttagttcgaggcgcgaagcgggtcgaagtcggttaggggtagtagggtataaagaggttcgtttatttcggtataatcggttttgggtttaggagggagttttatttttttatttcgggcgtaagatagaggaaattggaattagtatgagttaatgggggcgcggcgttgttattaggcggatcgggtagatttcgattaggaatttcgttgatttttcggtttagggacgagcgtaaaattgtaagttcggttagcgagcgtaaagagtcgtttaggaattcgcgggggaggcgttggaatttggggttcggcgttggaatttggggttcggcggggagcgttagttgtttagtttttatttgggggaattttgtttggcggttttcgggtttttcgagggggttaatatttttgggtttttgagggttattgttttaagaagcgtagagaaagtattttgattttattttttttaaagagaaaagtaattttaaaaaatttttcggttgtagttttattttatattgtttttttaaaatttattacgaagtaggaattgcggattttgggtttatttaaagtgttttgtttttattttttggtgattatttggagataaagggtaagtggtttagtcgggagggtaattacgttgtttgaaagaaaatttaaaattaattgaaattatttttacgtttttttcgttttttggttttcgtttcggtgatcgcggtttgggcggatggtcggttaggagaaagcgaatttcgttgtaggcgcgtgttcgttatcgtttttggttgtgggaatttttattcgggcgggggaagggagcgcgtttatttaggaatcggcgcgtcgcgacgtagatttcgggatttagcgcggttgcgcgtcgcggggttcggggtttgggttgggggcgggtggtgtagggattagtttcgatttttcgttagcgatttttcgtattcgtttttttattagggcggttggcgggcgggcgtatttaggtggggttatttgtagtcgtatatttggcggcgatttgaaaggatttggtttaggtttcgcgagttttttattgttaagtttttaagtcgttcgggaaaacgttttcgaaagtcggtttttgtgtttcgaaggcgttttagttttttttttttttatattgtttgtttttggggtgcgcgtggcggtttacgtgttatgatagttttgtttcgtttacgtagcgtcgattttaggcgttttaaaattgcgaggtgggtcggggcgaatttcggttttagtgtttattagagatagttatacgttcggtatatggatagtcgtattttttttttatcgttttaatcgtagacgtgcgttttcgttttagattaattagttttagttatatatagattattttgttatcgtttttttcgtgttttagtcgtttgttcggcgggttgcggggaaacgagattttttttttagtttcgaaggttgtcggtaaggtgtgcgttggagttaaaacgtaaatttaataggtaggggggcggttttggttttaacgacgtatttgggatttcgaggttgaaggcgtaatttttgagggttaaaggcgattttaatttttcgattttcgttttttaaaacgtatcggttggtattttgagtaatatgaatttttaaatttattagggattttttggtttttcggttggttttagttttttttagattaagtggtggggagtaggcgtttagatcgagaagaaaattattttcgattataggagagaaagttggttgggggtgatttcggaggttacgttcggttttttttttcgtagttaggtttggtcgcggtttattcgaggttgagtagattttcgcgtcggacggagacgtagggtttcgttgcgggattcgcggggtttaggaaatttgcggcggcggttcgcgggagtcggtttttcggcggaggattcgcgttgaggttttcgtgggtttttacggtatgttttatttcggaatttgtcgcgttttttttcgtttttttcggaagattgcggggaggatttcgtattttcgcgtttttttagttcgttttttaatgtttttggaacgtttgaaagcgtttttatttttcgttttggtatttgggggtgggtggagggatagcggggtcgttattacggggcgttttagagttttggttattcgtatatttaataagtaggggaggggagggaaagggagtttttttttaggtgcggggaaacgggttgcgtatttaatgtttcgcgttttttttttggggtttttggagttcgtgttttaagggttgggggtaggattcggattcggattttttagggaattttgggtttttagggtttgagggattgatgggtcgcgttcggtttttaagttttttttgtgtgtttacgcggggtacgatttgtttagcgagttttgggtggtagggttagggtcggggtgcggttgggagaggtgaggggaggaggcgagagcgcgcgtcgtcggattttgggtcgtggttcgggaatcgcgcgaggtcgcgtcgcgtatttcgcgtattttcgtcgggtttcggttttatcgttacgtggttgttttgcgttcgcgtttatcgtaaggtttagaaaaagcgcgtattacggtttcggagcgtatgcggattttttaggacgtttaattcgagtattagtttagttgtggtgtcgaatatattttttttttgcgggtagataggggttgtttttttacgtaataaggcgggttgtattgttggagcgatagtatgtttatttgtaaagacgggtaggaaggagtgtgttcggttttattggaattcgtaataaggcgattgttcggttgaagaaagtgatagaatcgggtcgtgattattttatttttttagcggtggtaaagtattaaatagtagttgtagtttttcgatggcgtttagtgtattgtggttggaaagttcggagtaagaaggtgtttaataaataggaaaacgtttagaaattgtttatagttatattttatttttttttttttgagggttattttaagataaagaatttagtgta

SEQ ID NO: 23 - DNA, 5976 bp, Artificial Sequence
  chemically treated genomic DNA (Homo sapiens)
agaggggtattttttattttaatttgaattttatgattgtattttttgttaggagatgaaagggataagattgtttgaaggattaatttttagtttttaggtaggttagtggttaaaatatttaggaagtgaaagtttgttttttgttataaggaaatttggagtttgtgattttattatgcggggtttgttatttgttaggtgatagggttttttatttatttgcggtgatttgaagggtaaggtttttggttaaatattttttttttttagtgatgtttgaaattttattgttagcgttggattttagtaagattttagagaaagtttaatttttggagtttgggttttttttagttgagatgttaggaaagtaatgggttttattatttgtacggataggtttgtgtatagttttaggggatttagggattttattagagtttatttatagatattaggttaaaagttttggatagtatttataatttttttgaaagaagaaaagtttttttttagagttttttttaaagtgtaaatggttttgggaggttcgaaatgatgagttggtcggtatgaaagaattttttttagtagatgtaagagataatttgaggagttttagtggcgggggtgggggaaggagagtttgggggaggggaggttttaggtagtttataattttttttagaattggaaagggaatgtattgggttaagagggttaattatttatttttgtagagtgtttataagaattttatgaattaagtgttattaatatttttattttatagatgaggaaattaagatggtggagataaaatgatttatgttttttaattaatggtagagttagaagtgaatttaggttggagtgaagtggttttagtgtttaaatgatttttttattttagtttttagagtagttgggattataggtatgtattgttatgtttagttaatttaaaataatatttgttggggagatggggttttattatgttgtttagattggttttaaatttttgggtttaagtaatttttttattttttaattagttttttaaagtgttgcgattatagttgtgagttattaggtttgtttaggtatttttgtttgatataagagaaaatagagggtaggtatagtggtttatatttgtaattttagtattttgggaggttgaggtaggtggattatttgaggttaggagtttgagattagtttggttaatatggcgaaatttcgtttttattaaaatataaaaattagttagatatggtgacgtgtgtttgtaattatagttatttaggaggttgaggtataagaattttttgaatttgggaggtagagagtgtagtgagtcgagatcgcgttattgtattttagtcggggtaatagagtaagattttgttattaaataaataaataggaaatagagaagtaatttagtgtgttgcgaaagttatatagtatttgttttttataaggagtttttttgtgttttcgttttattttggatatttgatttattgtttttggagtttggagaaggatttgtcgagaagtttgaagaatgtattaggtttgatttgattttgttgtttttaattgttttttaaaattttttttattgaattattagagtgtaatggaagagtcgatgagagtcgttgtagagttacgaggttaaggtttgttgggtagaagaaagtaaagttttaaaggtttttagggtttagcgatggtataaaatatgtatttttatataattgagaggaaaaaaataagtagatagtatagttttatgggggaaacgtttttttttgtatttttattattttgtttaaggtacgattttagtgggaaaggaaatatcggagttttttttttttgagttttttggtgggttaagagtagagggagttaaaatacgatatttaaaagatttgattggaaatttattaaaattgaggggataggttgttggggggggcggtgttgggttgtttagaaatcgtttgtatttgagaaattatttgatggatttagaggtatttttagttttgggtgaaatattttaaatatggttttttttaggaggaagcgaaataggggttgggttttttgaaagagtaatttttattttaaatatttattgagtagttgttatgatgagttaagaattttgtttagcgattgtttttgtattagtttatgttaatttatttatataaaggagaatattgatttttttaaggttatagggttagtgagtggttgattttatttaatgttgtgtagttttaattatgtttgaaggataaagggaaaggaggtgtttttgtcggggtagataagttatttagacgtggttggttatagggagttagatagggaagttgtttaatttaatatttgtttgtttattttgtttttgttttttgatggaggacggcgggtgttggagggttattggtttaggatttgagatttttggtttttatttattttatttttgattttaaaattattttattggggatagaattttttggagaaggtgatggtggttatggtgtggttgtggtattaaaagttttattttgggggttagaagattttgggttttggtttttggttttgatattgatttgtttatgtgatattgaataagttatttgtaaattataggtttgggtgaattttaaaggttttttttaggttaatattaaaaaatagattgaaaattgtagttttagttggaagattgggattatatgagatgaagttgattgttagaagaaaggttttggaattagagaggttggttttagttttgcgttattttttattggttttaatttttttaagttttagttgtttatttattatatgggaataataatatagtttttgggttgttttgaaatgagtttaaatgagttggttagtggttgggtacggtggtttatgtttgtaattttagtattttgggaggttgaggtaggtggattatttgaggataggagtttaagattagtttggttaatatgatgaaattttgtttttattaaaaatataaaaattagttagtcgtggtggcgtatgtttgtaattttagttatttaggaggttgatagaggagaatcgtttgaatttaagaggcgaaggttgtagtgagttaagaatatattattgtattttagtttgggcgatagagtaggatttcgttttaaaaaaaaaagagttggttagtgttaaatgtttagtatagagattggtatagtaatttttaatgtttagtatttattgttattattttttttttttttttttttttgagatagagttttgttttgtcgtttaggttggagtatagtggcgcgatttcggtttattgtaagttttattttttaggtttatgttatttttttgttttagtttttcgagtagttgggattataggcgtttattattacgtttggttaattttttgtatttttagtagagacggggttttattgcgttagttaggatggttttaattttttgatttcgtgatttgttcgtttcggttttttaaagtgttgggattataggcgtgagttattatgtttggttttattgttattatttttattttttatttttgtatagagtatttatggtttaagaaatatttgttattttaattgtatgggagttttataatagtatagggagatatttttgattattatttttattaggagggtggagaaattgaggttttgggaggtggttttgatttagggaattaatttgttgatttattaatttatgaagttttatagttaaaaaagattagattaaaaaatgagaatttagtaaaggggttgaggtaggaggatcgtttgagtttagaaatttgagattagtttcggtaatatagtgagattttttttttagaaaaattttttaaaaaattaggtcgttcgaggtagagtgtagtggtttacgtttgtaatttaatattttaggaggttgaagagggtggattatttgaggttaggagttttagattagtttggttaatatggtgaaatttcgtttgtattaaaaatataaaattagtcggtgtggtggtatacgtttgtagttttagttatttaataggttgagataggagagttttttgaattcggtaggcggaggttgtagtgagtcgagatcgtgttattgtattttagtttgggtaagatagagcgagatttcgttttaaaaaatataaataaaataaataaataaaaaattaggttgttagtttagtggtttatggtttatatttgaaattttagtattttgggaggttaaggtaggaggatcgttttagtttaggagttcgagattaggttgggtaatatagggagatatagcgtttttattgtttttgttcgtttcgatttgtttttttataaaaaggtaaaagaaaaaaaaattagtttggcgtggtggtgtgtatttgtatttttagttattagagaggttggggttagaggatcgtttgagtttaggagttcgaggttgtagtgagttgtgatcgtattattgtattttagtttgggtgaaagagtgagattttatttttaaaacgaataaataaaaaattttaaaaaataaaagaatttagttaagtgtaaaagttttttttgattttaggttttagtgagttatcggcggggttgggattcgaatttagtggaattagaatcgtgtaggttttataatttatttagattttagtaattttaggttagagggttatcgcgtttatgcgaggtcgggtgggcgggtcgttagtttcgttttggggaggggttcgcgttgttgattggttgtggtcggtaggtgaatttttagttaattagcggtacggggggcggtgttttcggggtttatttggttgtagttacgtatttttttttagtggcgtcggaattgtaaagtatttgtgagtttgcggaagttagtttagattttagttcgttttagttcggttcgattcgatcgtattcggcgtttgttttcgttcggcgttttcggttagttatgggtttttggagtcgtagtttttcggcgttgttgttgttgttgtaggtatttcggattttttgatttgcgagggacgtattcgggtcgtaagtttcgcgttttagttttgcgtttttttttttttcgtcgttatcgtttttttttttttaagaaagttcgggttttgaggagcggagcggtttggaagtttcgcgcgtttcggattttttagtgatgggagtggggggtgggtggtgaggggcgagcgcggtttttttgttttttttagcgtagatcgaggcgggggcgtttggtcgcggagttcgcggggtgggttcgcgcgggcggtgggggcgtgaagcggggtgtagggggtggggtgtggagaaggggtgttttggtgtaagtcgagggggagttaggagtcgtggggacgattttcgagggaaggagaggggtattcgtagaaataaaggtatttgttatgttaagaaaggtcgtaaataggagtgagggtttcggggataagaaagtgaggtcggaggaggtgggagcgtttttcgttttgaggagtggtgtattttcggtttaaggaaagtggggtattggagaataaagatatttttaataaaatgagaaaggagattgaaagggaacggtgggttaggttttgagggggtgattcggcggttttttttcgggagtttttgggggttcggcggtcgtaggtttcggggtgggggagggtgacgtcgttgttcgttcgtttcggggttgcgggttggggtttttttttaatttcgacgtcgggagcgagggaggggcggcgttgttggtttcggtgagtaggagggaatttttcgagttattcggttttatttattttttttttattttagg

SEQ ID NO: 24 - DNA, 5976 bp, Artificial Sequence
  chemically treated genomic DNA (Homo sapiens)
tttggggtgggggaaaggtagatggaatcgggtgattcggagggtttttttttgtttatcgaaattaatagcgtcgtttttttttcgttttcggcgtcgggattgggggaggattttagttcgtagtttcgggacgggcgggtagcgacgttatttttttttatttcgaaatttacggtcgtcgagtttttaggaattttcgggagggggtcgtcgagttatttttttaagatttagtttatcgtttttttttagtttttttttttattttattggagatgtttttattttttagtattttattttttttagatcgggaatgtattattttttagagcgaggggcgtttttatttttttcgattttatttttttattttcgggatttttatttttatttacgattttttttggtatggtaggtgtttttatttttacggatgtttttttttttttttcgaagatcgtttttacgatttttggttttttttcgatttgtattagggtattttttttttatattttattttttatatttcgttttacgtttttatcgttcgcgcgagtttatttcgcggatttcgcggttagacgttttcgtttcggtttgcgttggagggggtaggaaagtcgcgttcgttttttattatttattttttatttttattattggggggttcggagcgcgcgaggtttttaggtcgtttcgttttttaggattcgaatttttttggaagaagggaagcggtgacgacgggagaggaaggggcgtagggttggggcgcggagtttgcggttcgaatgcgtttttcgtaagttaggggattcggggtatttgtagtagtagtagtagcgtcgagaggttgcggttttaagggtttatggttggtcggggacgtcgagcgagggtaggcgtcgggtgcggtcgggtcgggtcgggttggagcgggttggagtttgaattgattttcgtaagtttataggtgttttgtagtttcgacgttattgagagggggtgcgtggttgtagttaggtgagtttcggaggtatcgtttttcgtatcgttgattggttgagggtttatttgtcggttatagttaattagtagcgcggatttttttttagggcggagttgacggttcgtttattcggtttcgtatagacgcggtgattttttagtttggagttgttagggtttaggtgggttatgggatttgtacggttttgattttattgggttcgaattttagtttcgtcggtggtttattaagatttgggattagaaagggtttttatatttggttgagtttttttgttttttgggattttttgtttgttcgttttggagatggggttttatttttttatttaagttggagtgtagtggtgcgattatagtttattgtagtttcgaatttttgggtttaagcggttttttggttttagtttttttagtagttgggagtataggtgtatattattacgttaggttaattttttttttttttgtttttttgtagagagataagtcggggcggataggggtagtgggggcgttgtgtttttttgtattgtttagtttggtttcgaatttttgggttgaagcgatttttttgttttggttttttaaagtgttaggattttaggtgtgagttatgagttattgagttagtagtttaattttttgtttgtttgttttgtttgtattttttgagacggagtttcgttttgttttgtttaggttggagtgtagtggtacgatttcggtttattgtaattttcgtttgtcgggtttaagagatttttttgttttagtttattgagtagttgggattataggcgtgtgttattatatcggttaattttgtatttttagtatagacggggttttattatgttggttaggttggtttggaatttttgattttaggtgatttattttttttagttttttgaagtgttggattataggcgtgagttattgtattttgtttcgagcggtttaattttttaaaaaatttttttagagaggggattttattatgttgtcgaggttgattttaaatttttgaatttaggcgatttttttgttttagtttttttattgagtttttattttttaatttagttttttttaattgtagagttttatgggttagtgagttagtaaattgattttttaggttaggattattttttaaagttttagtttttttatttttttaatgggaataatgattagaaatgtttttttatgttgttgtgggatttttatataattaaaatgataaatgttttttgagttataaatgttttgtatagaagtgaggggtaaaaatagtaataatagggttaggtatggtggtttacgtttgtaattttagtattttgggaggtcgaggcgggtagattacgaggttaggagattgagattattttggttaacgtagtgaaatttcgtttttattaaaaatataaaaaattagttaggcgtggtggtgggcgtttgtagttttagttattcgggaggttgaggtaggagaatggtatgaatttgggaggtggagtttgtagtgagtcgagatcgcgttattgtattttagtttgggcgatagagtaagattttgttttaaaaaaaaaaaaaaaaaaaaaatagtaataataggtgttggatattgaagattattgtgttagtttttgtgttaagtatttgatattgattagtttttttttttttgagacggagttttgttttgtcgtttaggttggagtgtaatggtgtgtttttggtttattgtaattttcgttttttgggtttaagcggtttttttttattagttttttgagtagttgggattataggtatgcgttattacgattggttaatttttgtatttttagtagagatagggttttattatgttggttaggttggttttgaatttttgtttttagatgatttatttgttttagttttttaaagtgttgggattataggtatgagttatcgtgtttagttattgattagtttatttaagtttattttaaaataatttaagagttgtattattatttttatatgatagatgggtaattgaagtttagagagattgaggttaatgagaggtggcgtaggattggaattaatttttttgattttagggttttttttttaataattagttttattttatgtggttttagttttttagttggagttgtagtttttagtttgttttttgatgttgatttggaagagatttttagagtttatttaaatttatgatttgtaaataatttgtttaatgttatataggtaggttaatgttaaagttaaagattaaaatttaggattttttgatttttagagtggggtttttaatgttatagttatattatggttattattattttttttagagaattttgtttttagtgaaataattttaggattaaaaatagaatagataggggttaaaggttttaggttttgggttagtggttttttagtattcgtcgttttttattaaaagataaaaatagaatagataggtaaatgttaggttagataatttttttgtttgattttttgtggttagttacgtttgggtggtttgtttatttcgataagggtattttttttttttttattttttaagtatggttagaattatatagtattaagtggagttagttatttattagttttgtgattttggggaagttagtgtttttttttgtataagtgaattggtatgagttaatataaaaataatcgttaagtagagtttttggtttattatagtaattgtttaataaatatttggagtaggggttatttttttaaaaggtttagtttttatttcgtttttttttggggaaagttatgtttggaatattttatttagagttaaaggtgtttttgagtttattaagtaattttttaaatgtagacgatttttgggtagtttagtatcgttttttttaataatttgtttttttaattttaatgagtttttaattaggttttttggatgtcgtattttggttttttttgtttttaatttattaggaggtttagagggagaaggtttcggtatttttttttttattaggatcgtgttttgaataagataatggaaatatagaaagaggcgttttttttatggggttgtattgtttgtttatttttttttttttagttatgtaaaaatatatattttatattatcgttgggttttgggagtttttagggttttatttttttttatttagtaagttttggtttcgtaattttgtagcgatttttatcgatttttttattatattttgataatttaataaaaaggattttagaaaataattaggggtagtaaagttaggttaggtttgatgtattttttagatttttcggtaagtttttttttaagttttaaagatagtagattaggtgtttagggtgaggcgggaatatagaggggttttttgtggaagataggtgttgtgtgattttcgtaatatattgaattgtttttttgttttttatttatttatttagtgataaggttttgttttgttgtttcggttggagtgtaatggcgcgatttcggtttattgtattttttgttttttaggtttaagagatttttgtgttttagttttttgagtagttgtgattatagatatacgttattatgtttggttaatttttgtattttagtagagacgggatttcgttatgttggttaggttggttttaaatttttgattttaagtgatttatttattttagttttttaaagtgttgggattataggtgtgagttattgtgtttgttttttgtttttttttgtattaaatagggatatttaagtaggtttggtggtttataattgtaatcgtagtattttgggaggttagttgggaggtgagaagattatttgagtttaggagtttgagattagtttgggtaatatggtgaaattttatttttttaataaatattattttgaattagttggatatggtagtgtatgtttgtagttttagttattttggaggttgaggtaggaggattatttgagtattggagttattttattttagtttggatttatttttggttttgttattagttgagaagtataagttattttatttttattattttggtttttttatttgtaaaatgggaatgttgatagtatttaatttataaggtttttgtaaatattttgtaaaggtgagtgattagtttttttggtttaatatattttttttttagttttaggaaaaattgtgagttgtttggagtttttttttttttaggtttttttttttttattttcgttattaaagttttttaggttattttttgtatttattggagaaaatttttttatgtcggttagtttattatttcgaattttttagggttatttgtattttaaagagggttttagagaaagatttttttttttttaaaggagttgtaaatgttgtttagggtttttaatttggtgtttgtggatgggttttggtggggtttttgaattttttgagattgtatataaatttgttcgtgtaggtgataaggtttattgtttttttaatattttaattggggaaaatttaaattttaggagttgagttttttttgagattttgttgagatttagcgttaatagtggaattttaggtattattggggaaaagaaatgtttggttagaggttttgttttttagattatcgtagatagataagagattttgttatttggtagataatagatttcgtatgatgggattatagattttaggtttttttatggtagaggatagatttttattttttgggtgttttggttattggtttgtttggaggttaaagattaattttttaggtagttttgttttttttattttttggtaaggggtgtagttatagggtttagattggggtgggaggtgttttttt

SEQ ID NO: 25 - DNA, 10369 bp, Artificial Sequence
  chemically treated genomic DNA (Homo sapiens)
attaaaatataaatattgggtggggcgagttatcgtttgacgtttggtcgtgagatgtttcgggagtcggggttttttcgttgtagatatgacgaagggttttgttttaggaatttattttaaagaaaaagaagatgatgtgttatagtttataagtgtaggagagaattttgataaattgatagttggaaagttgagagagattttgaatatatttggattatttttgaaggtaggtaagattcgaaatttttatggtttgtattaggatttttttagcgtggtgttagttggtttcggtaaaaaggtagttagaatcgacgaataggaaaattggtaggaaggtaaagaaaatattagagttgttgttgtagtaggatgtaggtagatttaagatttggagttttttttcgtggaggtggatttttgtagagatgtttaggttgttgaggagggcgcggtgtttggtttttatgaatacgatgatttaaagtaaaaaaagaagatggttatgtcggtgaagttttatggaattggggattaggaggtttggtagaaaggagttttgtttgtttttgggtagaatttggtatgatggagacgttagttagcgagatgatgttaattagatttgtcgaaattattgagaagaattttaaaagcgttagtagtaaatcgagttttatattagatttaggttttggattgaggaataggtaatgggattattttttagtgtggttaaaggatttgacgagtttttagtttttttggaaatttattatataggtagttttaatgtagataaattattttttgtttgttgggaaaggaattatttttgatagtggtggtatttttattaaggtttttgtaaatatggattttatgagggtcgatatgggaggagttataattatatgtttagttattgtgtttgttgtaaattttagtttgtttattaatattataggtttggtttttttgtgaaaatatgtttagcggtaaggttaataagttgggggatgttgttagagttaggaataggaagattatttaggttggtaatattgatgttgaggggaggtttatattggttgatgcgttttgttacgtgtatatatttaattcgaaggttatttttaatgttattattttaataggtgttatagatgtagttttggggttaggtgttattggggtttttattaatttattttggttttggaataagtttttcgaggttagtattgaaataggggatcgtgtttggaggatgtttttttttaaatattgtataagataggttgtagattgttagttggttgatgttaataatattggaaaatatagatttgcgggagtatgtatatttgcggtatttttgaaagaattcgtgatttattttaagtgggtatatttagatatagtaggtgtgatgattaataaagatgaggttttttatttatggaaaggtatgatcgggaggtttataaggatttttatagagtttttatttcgttttagttaagataatgtttagtttagatatttaaaaatgtttttattttattttaaattggatagttgaagttaaaaggtttttgaatgaatggatgaaaatattttaaaggaggtaatttatatttaaaaatgtagaatataatgaaatttttatgttttgattttttttttattttatataaagatttatatattttttttttgagacggagttttattttgttatttaggttggagtgtaggtggtatgattttagtttattgtaattttcgttttttaggtttaagcgatttttttattttagttatttgaatatttgggattataggtgtttattattatgttcggttgatttttgtatttttaatggagacggggttttattatattggttaggttggttttaaaatttttgattttgtgatttgttcgtttcggttttttaaagtgttgggattataggcgtaagttattacgttcggttagtatatatttttaattgagaagtaaaattgtattttagatttgtgatgttaggaatatgagtaaattgaaaattattaattatttgttagaaataataaatttaattttttgtgtaaaaaaaaaaatataaatattagttgggtatggtggtgtatgtttgtaattttagttattcgggaggttgaggtagaattgtttgaatttgggaggcggagattgtagtgagttgagattgtgttattgttgattttgttttaaaaaataaaataaaataaaaaaataaaatgaaaataaaaagttagggttgtttttgtttaataatgttttatttttgtttcgttttttttttggggttttattttttgggagtttgtgtgaaggtgaatttttttgaaagttgattgtttttatttgggattttttagtttttttttgagaaatggtgatattgtttttagtattttttttttttttttaggtagtttttgtagttattattgagttttttttatattttttttttttaggtttgggttttttattttttattatttttttattttatgttgttttatcgtattttggggagggggttggattgggtatttttgttttttaggttgagtttttttttatttttatgttgtttgttttttaggaatatgtttgggtagtaggttgtggttttgattggttttttggtcgttaggaatatgttttaatatgttgagttttggtatagaagaggttggtggttattttgtttttgggttgtttgtttttaggtgaggaaggggatggtaggagataggagatttttaaagattttaggtaaattttagtttgttattttgaatagggtatgtgatttgttagtagatttttgcgatagggttgggatttgatgtatgtgtgtttgtgtgagtgtgtgttgggagttagattttgtgtgtgatttttaatagtttgtttttttgttttttttagggtagaagtttttttttagagtgtgtttgggtatatatttaagtgtatggttgtaaatttttttttttaaagtattgaatagtattagatatttagtaggtatttaagaaatattgaatgtcgtggtggtggtgagttagaagttataaaaaaaatttttttttaaaaataataataaaaagaattattttattgtgaagtttagtattataaaaatttaaataatttattataagtttttattaaaaaaaattttttttttaaagtaaatagatagataatgtttagtttatttgaaatgtttgaaagtagaggggttttaaggtagtgggagaaggtgtttgttttttgttggatatttgataattagttttttggatggtttggatgtataggagcgaaggtgtagatagtagtggggtttagagtggggttttgaggttgtgtcgtggtttttttggggtttagttataattttggtttgattttagggcgaggtaggttaagggggtttgttattgtgtttttttatttttatttgggtttttatttttatagtagaggagaaagaagtttgtttttttcgaggttagttgcgttagaggaagaagattgggtatgtttgggtagagatttttagattttgagtagtttgagatgttagtaattgtagttgttttaagtttgggttttgttttttagtgggatttttgtttagatgaataatttattttttgtaattttttaaaagtaaaattgtaaatgttttaggtatagaaaggaggtaaaggtgaagtttaggggaggttaggggtgtgaggtagatgggagcggatagatatattatttatttttgtgtttgttagaagaattagtagatatttttagaattgttttttatttatgttatttttataaattatttgtaaatgagggttatttggtatttttgttattttggagttatagaaataaaggatgataagtagagagtttcgggtaggaggtaaaagttttgtgttttaattatagttatttttttgttgtatgatttgagttaggttattagatttttttgagttttagtttttttagtagtgtatacgggttatgtggggagtatttaggagatagataatttattcgttaaatttttttttttttggttaataaagttgttgtaattatagggattttttttgtttaggtgagtgtagggtgtagggagattggtttaatgtttaatttttttgtttttttggagattaggttgtttttttttggtagtttttttaattttttttttttcggaagtatgtgataattaataattttgtatatttaagtttagtggattttaatttttttatttgtgaaataaacgggattgaaaaattattttggttttaagatgttttgttggggtgtttaggtgttttaggtgtttttgggagaggtgatttagtgagggattagtgggaatagaggtgatattgtggggtttttttggaaattgtagagaggtgtatcgtttttataatttatgaatttttatgtattaatgttatttttttgatttttttagttgtattgggtaaatttttgtttgttagagtgggttagcggtgagttagaaagggggtttattttaatagtgttgtgtttttttggagagtgttaatttattttttaagtaaaaaaagttagatttgtggtttatttcgtggggaaatgtgtttagcgtattaacgtaggcgagggattgggggaggagggaagtgtttttttgtagtacgcgaggtttcgggatcggttggtttgttggaattcggttaggtttagttggttcggcgttgggtagttaggagtttgggtttcggggagggcggtttcgggcggcgcggtgggtcgagcgcgggtttcgtttttttgaggcgggttcgggcggggcggttgtatattagggtcgcgttgagttgcgttagttgaggtgtgagtagttgtcgaagttagttttttgtggagtcggagttgggcgcggattcgtcgaggtatcgaggtatttagaggaggtgagagagcggcggtagataataggggatttcgggtcggcggtttagagtcgagttaagcgtgttcgcgtgtgtttttgcgtgttcgcgaggatgcgtgttcgcgggtgtgtgttgcgtttataggtgtttttgcggtaggtgaatgacgggcgtgggtcggtgcgcgttcggtttgcgtatacggtgtttttaagtgcgcgggtgacgagagtcgggatgtgtcggagatttcggggcggagagcgggattataagtataggaatttttggttacgtttttcgtttttggaaatttagttggggcgagggagggcgtggacgggatcgttttgggagttcgtttttggttgcggttggttttaggttttaggcgtagtttgttcgcggcgtggggatgaagttcgtgtttttggaggggtttaggaagggcgaggaaagcggagtggagtaagttcgtttaggatcggtttcgggtggttttgggatttaatttgcgtcgttttggtttaggttttaggtttaggttttttacgttattgtgtttattatttggttgagcgttgaggttagcgcgggttgttttttggtttttgggaatgtgttaggattcgttttttaaggattagcgaggaggtgatttattgtgataaggagattttagggaacggattgtatgaggttagaatttcgttcgggatggggtatagcgggattttagaagtttttttttttgttttttcgcggttttcgtttttttatcggtatagtgatttatttggttggaatagtttgtttttaaggaagtcgggtattggaggttcgggatatcgcgtcgggttttcgtttcgcggcgcgttgtaggggtcggggagttacggttttgttttgggcgggttttaattagtttgttagtcggggaagggtaagggttttttttattttttttttatcgcggtcgggagaatcgcggtttagtttgttttcgggtcggggcgttggatttcggggcgggagcggagtttacgtttggatgggaggcggggagggtttatgtttttgaggggtggggggtttggggggtacgacgttgtttagggtttttattagttgtttcgggggtttagggtttttcgatttagtttagatttttttttcgaaagttatagggttgagcggagtaggggggcgagtcgttttttggggcgtcgtcgtttggcgcggattatagcgcgtttttttcgttttaaatttttgggggatatttgcgtttttttcgtgaggaaaagtattttggagttgggttaggaatttggggcgtttaggtagttttttttttttttgtttttttttacgtcgcgtttttgggaggatttgcgagcggttttgttttcgttgttttcgtttatttttattttttagggatttgatttatttcgtgttttgggcgtggagataaggtggaggggtcggttttcggcgcgcgcgcgcgtgcgtgtttgcgcgggcgtgtgtgtgtgtgtgtgtgtgtgtgtgtgtgtgtgtgtttgtgttagagacggtataagagcgcgcggttttttaatagcggcgggagtttcggaagtttggtcggtttagcgtgacgtgttcgcggtttttcggtttttttttattttttttttttttattttagggtgacgcgtagtcggagtggaagtagttttggcgggcgagtagcgttttgtaggaaattgatttattattattttttttagcggttcgaggttttgtttacgtattttttatttcgcgcgtgattttttggaggtcggcgttttttttcggttttggcgggaatagtatataggttttttcgcggagtggggttggtcggcgcgaatcgtcgcggttatttttgggtttattcgagattaatttttatgttattattatttttttaaaggagtattttttaggtttaatagtatttattgagtttttattggaaattaaaatatggttgaagtttaaggtaggaaggttaataaaggaggttatttttaattgtttttaaaataagggtttgcgtttttgagttttttttgggttgaaagttattatgagtatgagagtagattttgatgggggaggagaggtttatgagagttataagagaaggaggggtggtagaagaggagagggtgtttgtttagattttagttttgttttgaattttcgagagttagggaatatttagtattttgatgaagttttaggcgggcgttttttttttgtgtttatgatgtattgagatttagaatgtttattttaaatatattagtgtgttttcgtttggttggtaatttaagagtgtttatttgaggaattgtgttaaatatttgtttgaatttttaatttggattaagttggtttcgggaggtagggttttagtaatttatattttgaaaaaattttttaggtgtttttttttttttttttttttttttttttttttttttttttttttttttttttttttttttttttttttttttttttttttttttttttttttttttttttttttttttttttttttttttttttttttttttttttttttttttttttttttttttttttttttttttttttttttttttttttttttttttttcgatagagttgtattttgttatttaggttggagtgtaatggtattattttggatttaagtagtttttttgttttagttttttaagtaatcgggattataggcgtgattttttcgtttttatgtttagatttttttttttttttttttttttttgagatgcggtttcgttttgttatttaggttggagtgtagtggcgtgatttcggtttattgtaagtttcgtttttcgggtttacgttatttttttgttttagtttttcgagtagttgggattataggtgttgttattatgttcggttaatttttttttgtatttttagtagagacggggttttatcgtgttagttaggatggttttaattttttgatttcgtgtttcgtttttttcggttttttaaagtgttgggattataggtgtgagatattgtatttaattatttagttaatttttatttatttttatttttagtagagatagggttttagttagttgtttaggttagttttggatttttgggtttaaatgatttttttatttttgttttttagagtattaggattataggtataagttattgtttttggtttttttaagtgattgtgatgggtttttttggttaagaaattttaaaattagagagggagtggggtttaatattatagtataggatttagggtaaataggtttgggtttagattttggttgtgttatttatgaattgtgtgatgttaggtaagttatttaatttatttgagttttggttgttttttttgtaaaaagggagttaatagatatttattttttaggaggattgatatttttaaattgtttagaatagtttttaaatataaaaatatataaataaattttaatttatgtttagtagagggtggatagaggttatttgagggttttgtttattgtattgggtgatttttttatggggtagtggtttttggtttttttagttgtatgatttaggggtaagttttatattttttttattttttgttttttaaatttggtgtgaagttattaagagtttttttttttaattagttgggacgtgaaattgtgggttttattgattataagtagtggggtgaggtggggtggagtagatgtggtatgtgtttcgggttttttgttttatgaggatttagtagagtttttatttttagaaattgtaagttgggatttgtttttaggaaaatttagttgttgttaaggtcgtgtagttatttagttttggagttaagttagagtaggtaggtaggtgttagggtttttttatgggtaaatttatttttcgtttttttttttttgaagggggaggagaggagttaggtagattagttatttttaattttttttttgtttgtaaaacggtttttttggatataggtaatacgaggtaggggttgttaggtgtttagattttagattatttgatgtgtttggtaggatgtggtttagtttgggagaaattattttttgcgttgtttcgttcggtttttttttatttttaggttattcgtttgacgatatttttgggaaaggtttttagtttatagtatttgttagttgttgtttgaaggaggtagttggtagggggaagtgataggggggaggtttagtaaaattgaaggtagagaggaataattatatttttgtttttaatgtatttttttatacgaagtgttgttggtacgttatttatattaatttagttaatttttatgtttattttttgagatagttattattattatttttattttatagatgaggaaattagagtttagataagttaagttgtttgtttagggttatttagtaaaatttggattttagtttaggtgatttggttttagagtttttttgtttaattattaggatatagttttttatttagttttgttttgtttgttttgttgtatggattttgtgattaattttttgagtatgtgtttgtagttatgttttttaaatttgtatatggttttatttatggatgaggaaattgagatttagagatattaagtggttttttaaagtttacgtagtaattggtagagttaggattataattcgggtgttttttgttttaaagtttcgggtatttttatttggtagagtagggttattttatttggggatttgggtcgggggatttaggaggttggaggaattgttagattgtttttttttttgggaattgattttttggttagggttgcgattaggaaattgttggattttggtaatttatatatatttggggggtatttatatttatgagggatatttttggggggaaaataaattgattttagttgataatatttggtggtaaataggattttggtttttgtttttgtaatagatttgtttttgttgatattagtttgttttttagttgtttgtttttttagtgattttggtgtgttaggttggttgagttttgttggtgggggttaggttttttgtgggaaggaagtaggaagattagttggaaggagtgagagagattttttggtaggaagacgttatttgaggtgatatagtaaagttcggttaggtaatatagtgtttaattttcgtcgtgattagggttttttttgtatttttgttgtagg

SEQ ID NO: 26 - DNA, 10369 bp, Artificial Sequence
  chemically treated genomic DNA (Homo sapiens)
tttgtagtagagatataaggaaggttttggttacggcggagattagatattatgttatttggtcgggttttgttgtgttattttaggtgacgtttttttattagagggttttttttattttttttagttggtttttttgttttttttttataggaggtttgatttttattagtagagtttagttagtttggtatattaaggttattgggagagtaggtaattgaagggtaagttaatgttaataaaggtaagtttattgtaagagtaaggattagggttttgtttgttattaggtattattagttaaaattaatttgttttttttttagaggtgttttttatgggtgtgaatgttttttaaatatgtgtgaattgttagagtttagtagttttttaatcgtagttttggttagaaggttaatttttaaaagaagaaatagtttgatagtttttttagttttttaagtttttcgatttagatttttaagtagggtaattttgttttgttaagtaaaagtattcgggattttggggtaaaaagtattcgggttgtggttttagttttgttagttattacgtaagttttaaaaagttatttaatgtttttaggttttagtttttttatttataaatggggttatgtataagtttaaagagtatggttatagatatatatttaagaaattgattatagagtttatgtagtaaggtagatagaatagagttgaatgaaaggttgtattttggtggttaagtaggagggttttggagttagattatttgggttggagtttaggttttattaggtgattttgggtaagtaatttaatttgtttgagttttagtttttttatttataaaatggggatagtaatagtgattgttttagaggatagatatgagaattaattgagttaatgtaggtaacgtgttagtagtatttcgtatagagaagtgtattgaaaatagaagtatgattatttttttttgtttttagttttattgagttttttttttattatttttttttgttaattattttttttagatagtagttgataggtgttgtaggttgagggttttttttaaggatgtcgttaggcgggtggtttaggggtaaggaggggtcgggcggggtagcgtaagggatgattttttttaggttgagttatattttgttaggtatattaggtgatttgaagtttagatatttggtagtttttgtttcgtgttgtttgtgtttaaggaaatcgttttgtaggtaaaaagaaaattaaaggtggttggtttatttggttttttttttttttttttaggagagggaaaacggagagtgagtttgtttatgagggagttttggtatttatttgtttgttttggtttgattttagggttgagtgattgtacgattttggtagtaattggatttttttagggataagttttaatttgtagtttttgggggtgaaagttttgttgagtttttatgaggtaggaagttcgggatatatgttatatttgttttattttattttattttattgtttgtgattagtggagtttatagttttacgttttagttggttgggagaggaggtttttggtaattttatattaagtttaaagggtaggagatggaagagatatgagatttgtttttgagttatatagttaaaaaggttaaaggttattgttttataaaggggttatttagtatagtggatagagtttttaaataatttttatttattttttgttaggtatgagttgggatttatttatatatttttatgtttgggggttgttttaagtagtttaaaaatattaatttttttaaaaagtggatatttattagttttttttttatagaagaggtaattaaggtttagataagttaagtaatttgtttaatattatatagtttataagtggtatagttaggatttgaatttaggtttgtttgttttgagttttgtgttgtagtattgaattttattttttttttaattttgaggttttttaattagagaggtttattataattatttggggaggttaggggtagtggtttatgtttgtaattttaatattttgggaggtagaggtgggagaattatttgagtttaagggtttaagattagtttgggtaattagttgagattttgtttttattaaaaataaaaataaataaaaattagttgggtggttgggtgtagtgttttatatttgtaattttagtattttgggaggtcgaggagggcggagtacgaggttaggagattgagattattttggttaatacggtgaaatttcgtttttattaaaaatataaaaaaaaattagtcgggtatgatggtagtatttgtagttttagttattcgggaggttgaggtaggagaatggcgtgaattcgggaggcggagtttgtagtgagtcgagattacgttattgtattttagtttgggtgatagagcgagatcgtattttaaaaaaaaaaaaaaaaaaaaaaaaatttgggtatgggggcggggggattacgtttgtggtttcggttatttgggaggttgaaataggaggattatttgagtttaggatggtgttattgtattttagtttgggtgatagagtgtaattttgtcgaaagaaaagaaagaaagagagaaagagaaagaaagagagaaagagaaaggaagaaagaaagaaagaaagaaagaaagaaagaaagaaagaaagaaaagaaagaaaaagaaagaaagaaagaaaaagaaagaaagaaagaaagaaagaaagaaagaaagaaagaaagaaagaaagaaaaaaagaaagaaagaaaagtatttagggagtttttttaaaatatagattgttgaggttttgtttttcgagattaatttaatttagattgaagatttaagtaagtgtttggtataattttttagatgggtatttttgggttgttagttaagcggagatatattggtatgtttgaaatggatattttgggttttaatatattataggtataaggaggaggcgttcgtttagggttttattaaggtgttggatattttttggttttcgggagtttaagataggattaggatttaggtaggtattttttttttttttattattttttttttttttatggtttttataggtttttttttttttattaaaatttgtttttatgtttataataatttttagtttaaagaaaatttagaaacgtaaatttttgttttagaaataattaaaaatagttttttttattggtttttttgttttagattttagttatattttaatttttagtaagagtttagtgaatattgttgaatttaaggagtgtttttttgaaggggtggtaatggtataggggttgatttcggatgagtttaggagtagtcgcggcggttcgcgtcggttagttttatttcgcgggaaagtttgtgtgttattttcgttagggtcgggagggggcgtcggtttttaggaaattacgcgcggagtgggaggtgcgtgggtagagtttcggatcgttggagggagtagtgatgagttagttttttgtaaggcgttgttcgttcgttaaaattgtttttatttcggttgcgcgttattttggggtggggagggggagaatgggaggggatcggggggtcgcgaatacgttacgttgagtcggttaggttttcgaaattttcgtcgttgttgggaaatcgcgcgtttttgtgtcgtttttgatatagatatatatatatatatatatatatatatatatatatacgttcgcgtagatacgtacgcgcgcgcgcgtcgggagtcggtttttttattttatttttacgtttaaagtacgggatgagttagatttttggaaaataaaaatagacgggagtaacgaaaataaaatcgttcgtaagtttttttagaaacgcgacgtggagggaggtaaggagaggggaagttgtttgggcgttttaagtttttaatttagttttaagatgtttttttttacgaagagggcgtaagtgttttttaggggtttgggacggagaggacgcgttgtggttcgcgttaggcggcggcgttttagggggcgattcgtttttttgtttcgtttagttttgtagttttcggagagggaatttgggttaggtcgggaagttttgagttttcgaggtagttgatagaggttttgagtagcgtcgtgttttttagattttttattttttaaagatatgaatttttttcgttttttatttaggcgtgggtttcgttttcgtttcggagtttagcgtttcgattcgaggataggttgggtcgcgattttttcggtcgcggtgggaaagaggtagaggagatttttgttttttttcgattgataggttggttagagttcgtttagagtagggtcgtgatttttcgatttttatagcgcgtcgcggagcggggattcgacgcggtgtttcggatttttagtgttcggtttttttgggaataaattgttttagttaaataggttattgtgtcgatgggaggacggagatcgcgaaggggtaggggagagggtttttggagtttcgttgtattttatttcgggcggggttttgattttatatagttcgttttttggggtttttttgttatagtgagttattttttcgttagtttttaggggacgggttttggtatatttttaagggttaggaaatagttcgcgttgattttagcgtttagttaggtggtggatatagtggcgtaaaggatttgaatttgggatttgggttagggcggcgtagattggattttagagttattcgggatcgattttagacgaatttattttatttcgtttttttcgttttttttgggtttttttagggatacggattttatttttacgtcgcgagtaaattgcgtttggggtttggagttaatcgtagttaaaggcgagtttttagaacggtttcgtttacgttttttttcgttttagttgggtttttaggggcggggagcgtgattagggatttttgtatttgtaatttcgtttttcgtttcggggttttcggtatatttcgattttcgttattcgcgtatttagagatatcgtgtgcgtaagtcgagcgcgtatcgatttacgttcgttatttatttgtcgtagaaatatttgtgaacgtagtatatattcgcgaatacgtattttcgcggatacgtagggatatacgcgggtacgtttggttcggttttgggtcgtcggttcggggttttttgttgtttgtcgtcgtttttttattttttttgagtgtttcggtgtttcggcgaattcgcgtttagtttcggttttataaggaattgatttcggtagttgtttatattttagttggcgtagtttagcgcggttttgatatataatcgtttcgttcgggttcgttttaaggaggcgggattcgcgttcggtttatcgcgtcgttcgggatcgtttttttcggggtttaggtttttggttgtttagcgtcgagttagttgagtttggtcgagttttagtaggttagtcggtttcggaatttcgcgtgttgtaggagggtatttttttttttttttagtttttcgtttgcgttggtgcgttggatatatttttttacgaagtgagttataaatttggttttttttatttggagaatgagttggtattttttaggaggatatagtattgttagaatgagttttttttttggtttatcgttgatttattttggtaggtaaggatttatttaatgtagttgaaaagattaggaggatgatattaatatataaaaatttataaattataaaaacgatgtatttttttgtaatttttagaaaagttttataatattatttttatttttattgattttttattaggttattttttttagaagtatttggagtatttagatattttaataaagtattttgaggttagaatgattttttagtttcgtttattttatagatgaggaaattgaggtttattgaatttaagtatataaagttgttgattgttatatgttttcgggaaggagggaattggagagattattaaaaaagggtaatttgatttttagggaaatagaagaattggatattgaattaatttttttatattttatatttatttgaatagaagaaatttttgtggttgtagtagttttgttggttaggaaggggaggatttgacgagtgagttgtttgttttttgaatattttttatatagttcgtatatattgttggggaaattggggtttagagaagtttggtgatttaatttagattatgtagtaaagaaatgattatagttggaatataggatttttgttttttgttcggggttttttgtttgttattttttatttttgtggttttaaaatgataaaaatgttaaataatttttatttgtagatggtttatggagatgatataaataaaggataattttggaagtgtttattggtttttttgatagatatagaaatgagtgatgtgtttattcgtttttatttattttatatttttgattttttttggattttatttttgttttttttttgtgtttgaaatatttgtagttttgtttttaaaaaattgtagaggatggattgtttatttgaatagaaattttattaaaaaatagaatttaggtttggagtagttataattattgatattttaggttgtttagagtttggaaatttttgtttagatatgtttagttttttttttttaacgtagttgatttcggggaggataggttttttttttttttgttgtggggatgggagtttaggtaggggtgggaggatatagtagtagatttttttggtttgtttcgttttggagttaggttaggattgtggttaaattttagaaaggttacggtatagttttaggattttattttaagttttattgttgtttgtattttcgtttttatatatttaaattatttaaagggttggttgttaaatgtttagtagaggataggtatttttttttattgttttgaagtttttttgtttttaggtattttaaatagattagatattgtttgtttgtttattttggggagaaaattttttttaataaaggtttgtaatgaattatttaaatttttgtggtattgagttttataatgaaataattttttttgttgttgtttttgggaaagaattttttttataatttttagtttattattattacgatatttaatattttttaagtatttattaagtgtttagtattatttagtgttttaaaaaaaaaagtttgtaattatgtatttgaatgtgtatttagatatattttaagggaggatttttgttttgaaaaaggtaagggagtaggttgttaaaagttatatatagaatttgatttttagtatatatttatataagtatatatgtattagattttagttttgtcgtaaggatttgttggtagattatatattttgtttagagtaataggttaaggtttatttggggtttttagaggttttttgttttttattatttttttttttatttgaaaataggtagtttaaggataaaatagttattagttttttttatgttagagtttaatatgttgggatatgtttttgacggttagaaagttaattagagttatagtttgttgtttaagtatgtttttgggaagtaggtagtatagggatggagggaggtttagtttgggggataagagtgtttagtttagttttttttttagagtgcggtggagtagtatggggtaggggaatggtgaaaggtggaaagtttaagtttgaagaaggaggatgtgaggaaggtttagtggtggttgtagaagttgtttaggaagggagaggaagtgttgggaataatgttattattttttagaaagagattggggagttttaaataggggtagttagtttttagaggaatttatttttatataggtttttaagaagtgagattttagagaagaggcggaataaagatagaatattattgagtagaggtagttttggttttttgtttttattttgtttttttgttttgttttgttttttgagataaagttagtagtggtataattttagtttattgtagttttcgttttttaggtttaagtaattttgttttagtttttcgagtagttgggattataggtatgtattattatgtttagttaatatttgtatttttttttttgtataaaaagttggatttattgtttttgataagtggttagtaatttttagtttgtttatgtttttagtattataaatttgaagtataattttgttttttaattaaaaatatatattggtcgggcgtggtggtttacgtttgtaattttagtattttgggaggtcgaggcgggtagattatagggttaggagttttgagattagtttggttaatatggtgaaatttcgtttttattaaaaatataaaaattagtcgggtatggtggtgggtatttgtagttttaggtatttaggtggttgaggtgggagaatcgtttgaatttaggaggcggaggttgtagtgagttgagattatgttatttgtattttagtttgggtgatagagtgagatttcgttttaaaaaaaaaatatataaatttttgtgtaaaatgaaaaaaaaattaaggtataaaaattttattgtgttttatatttttaaatataaattgttttttttaaaatatttttatttatttatttaaaaattttttaattttaattgtttaatttaagatagagtgaagatatttttgagtatttgaattaagtattgttttgattgaaacgaagtaagaattttatgagagtttttgtgggtttttcggttatgtttttttatagatagggaattttatttttgttggttattatatttgttatgtttaaatgtgtttatttaggatgagttacgaatttttttaggaatgtcgtagatgtatatgttttcgtagatttatattttttaatgttgttaatattagttagttggtaatttataatttgttttgtataatgtttgaagagaggtattttttagatacggttttttgttttaatgttggtttcgaagagtttgttttagagttaggatgaattggtaaagattttagtggtatttgattttaaagttatatttatgatatttgttaaggtggtggtattgaggatgattttcgggttaaatgtgtgtacgtaatagagcgtattagttagtatgagtttttttttagtattagtgttattaatttggatggtttttttgtttttggttttaataatattttttagtttgttggttttgtcgttgggtatgtttttatagaggggttagatttataatattaatgggtaaattgagatttgtagtagatataatggttgagtatatagttgtagttttttttatgtcggtttttatgaggtttatatttgtagaagttttgatggagatattattattgttaaaggtaattttttttttaataaataaggggtggtttgtttgtattggggttgtttatgtagtgaatttttaagaagattgagggttcgttagattttttggttatattgaggaatgattttattgtttgttttttaatttaagatttgggtttgatatgaaattcggtttattattagcgtttttgagattttttttaataatttcggtaaatttggttggtattatttcgttggttggcgtttttattatgttaagttttgtttagaagtaaataggatttttttttgttaggttttttgatttttagttttatagagttttatcgatatagttattttttttttttgttttaggttatcgtatttatagagattaagtatcgcgttttttttagtagtttgagtatttttatagggatttatttttacggaagagagttttaggttttgaatttgtttgtattttgttgtaatagtagttttgatgttttttttgtttttttgttagtttttttgttcgtcgattttggttgtttttttgtcgaggttaattagtattacgttggggaagttttgatgtagattataaaagtttcgagttttgtttgtttttagaggtggtttagatatgtttaaagttttttttagttttttagttattaatttattaagatttttttttgtatttgtgaattgtggtatattattttttttttttttggaatagatttttaaaataaggtttttcgttatgtttgtagcggagagatttcggttttcgaaatattttacggttagacgttagacgatgattcgttttatttaatgtttgtattttagt

SEQ ID NO: 27 - DNA, 8666 bp, Artificial Sequence
  chemically treated genomic DNA (Homo sapiens)
ttgtagggttttttttagtttaaagaaagtaattaggtgtttttattgtgttatgatttttatttttagttgggttttttagtttggttttaaagaataaaataaaaggtttttttgtttgagttttatttaatttattttttttatttataagaggtattttaaatttttacgatttttaaattttttaatcgattattttatttttattttgtaaataagttaatttttttatttatagaaggaagtgttttaatttttttttcgttttgatttttttttttttttaaatttatgtattttttgtgataaaatttataattatcgttgtattttgagttttatttttttattatttttgagggattttaagtttttaaaaatattttattttgtttgtgtatttaattttttttttatttttttttaatttttttttttttttatttggtatttgtttttttaggtatatgtgtgtttaggttttttttattttttatttgttttattttatggtatagggttttgaattattataattaagttatgaaagagtagttaacgtagtgtttttatttttttgttattttattattttagttttttttttggttttttgaggagttttttataggttggtttttaggaataagtttaaatgaattatttttagtttttttaaatttttatgtttttgtatatttttttatttttgtttagaatattttttttttttttttttatttttaaatttttatattattttttaagattgggattagtttttagtattcggaagtttttgtttattagagataaatgagaatgagtttggttatttttttatttttttgtattattttgtgttttattttgtttttttaagagtattatatgttttatttaatttttaaataattgtttgaggtaagtatagttattattttaattatgtaaatgagaaaatagaggtttagatatgttgagtaattttgataaaagttaaagaattaataagtggaatagttgaggtttgaattttggtagtttgattgtagagatattatgtttgatttatttttttttgtttttattttatgtttgtttttagtttttgagtttgttgaatgaatgaataggtggtagtttttttttgttataagattgattagaattaagataggtttaaattttacgtgtagaatttttaaaattgtaaaggtagtgtaaatttaaaaaaagaatggtatttttaggaaagaggaaaagtaagtgtgagaataataataataataattaataaattttagtaaatttagtaaatgtagtaaatttttatattaaaagtttttggatatatattattatattttatggttatatgaaatatattataattttattttgtatataggaaatttgagattggtataaggagtatagagatttaggattttatatttttatttttttaggattttgtattttaggtcgatatgtatgagtaaattgggagtataatgggttttttaatagaaaaattaggaaagtttttttattattattaattatttatataatatttttttaattttattattatttatattttaagttttagagtatatgtgtataatgtgtaggtttgttatatatgtatatatgtgttatgttggtgtgttgtatttattaatttattatttagtattaggtatattttttaatgttatttttttttttttttttttatataagatttataatggataatggattttaatttttagagtaaaatggttttatttaaggatgttataatttttttagagttttattgtaagatatgagatatatatatttaaaatttgtttttggtatttttaaagtagttaatttttatatttgtttataatgtatttaaatgttgtttttatatggttgtattttttattttttttattaatagttatatatattttttataagagttgaaagagtttttgatgtaggaatttatggtagagttttagagaaatttttgaatttattgaaagttttatttagaaatatatgtgtaagtgaatatattttttttaaaaaaaattattatttatttttttttttgagaagaaggtatttattttaatagatttttgaaggagtttattttttttatttttttatttttattaagaattattgtaggtcgggtacgatggtttatgtttgtaattttagtattttgggaggttaaggtgggtggattatttgaggttaggagttcgagataagtttagttaatatagtgaaatttcgtttttattaataatataaaaattagttgggtatggtagtatgtgtttgtaattttagttattcgggaggttgaggtaggagaattgttcgaattcgggaggcggaggttgtagtgaatcgagagagatcgtgcggtgttattttattttagtttgggtaatagagcgaaattttattttaaaaaaatatataaaataaataaataaaaagaaagaattattgtattagtgatggaaatgtgtttttttttttttattttggtaattatttttttttttttttattataaaatattttaaattaaattaaaataattttatttatcgatagtttgaattttttttattattgttatatagttaattgagaggtatttcgaggaaaatataaatggtatagtaatgtattgtagattttaataatatatttgatattttaaattgtttttattggttttattttaaaaattatatgttttaaaattaagtagatattaaaagtataagatatattgggtttataaggtttaagttaattagggattgaaatataatttttaaatagagttggattatttagtaggtagattaagtatgtgtttaaggtattagtaaagtttgagtaatttattttttaaaacgtagtatatgtttttgataagtttaaaaagtagtagttataggaaaaattagaatttttatttttttgcgtttgttatattttttagtgttgtttaatttttttttgtaagtgagggtggtggagggtgtttataatttttttagggagtaagttttttttggttttttttttttttttttttttttttttttttgagattaagtttcgtttttgttttttaggttggagtgtaatggcgcgatttcggtttattgtaattttcgtttttttttgggtttaagcgatttttttatattagttttcgagtagttgggattataggtatgcgttattaagtttcgttaattttgtattttttagtagagatagggtttcgttatgttggttaggtttgtttcgaatttttggttttaggtgattcgtttgtttcggttttttagaatgttgggattatagacgtgagttatcgtattcggattttttttttatgtaatagtgataattttatttaaagtatttttttttttttttgagtcggagttttattttgttatttaggttggagggtggtggcgcgatttcggtttattgtaatttttgtttttcgggtttaagcgatttttttgttttagttttttgagtagttggaattatatacgtgcgttattatggttagttaatttttgtatttttagtagagacggggtgttattattttggttaagttggtttcgaatttttgattttaggtgatttgttcgtttcggttttttaaagtgttgggattataggtgtgagttatcgcgttttgttttaaagtattttttttttatgttttaaaataagattgtaagttagtttttaaagcggataatttaagagttaataggtattagtttaggatgtgtggtattgtttttaaggtttatatgtattaatatattatttaaatttataataatttttataaagtagggggtatttatatttttttttttttttataattacgaaaaatgtaaggtatttttagtaggaaagagaaatgtgagaagtgtgaaggagataggatagtatttgaagttggtttttggattattgtgtaattttgtttttagaatattgagtattttttttggtttaggaattatgattttgagaatggagttcgtttttttaatgattttttttttatttttttatttgtttataggtagaattttttttcgttcgtattaaataaattttatttttttagagtttgtttttatattaggtaatgtatacgtttgagaaatttttgttttagatagtcgttttatacgtaggaggggaaggggaggggaaggagagagtagttcgattttttaaaaggaattttttgaattagggtttttgatttagtgaatttcgcgtttttgaaaattaagggttgagggggtagggggatattttttagtcgtataggtgatttcgattttcggtggggtttttataattaggaaagaatagttttgtttttttttatgattaaaagaagaagttatattttttttatgatattaaatatttcgatttaatttggtagttaggaaggttgtatcgcggaggaaggaaacggggcgggggcggatttttttttaatagagtgaacgtatttaaatacgtttttgttggtaggcgggggagcgcggttgggagtagggaggtcggagggcggtgtggggggtaggtggggaggagtttagttttttttttttgttaacgttggttttggcgagggttgttttcggttggtgttttcgggggagatttaatttggggcgattttaggggtgttatattcgttaagtgttcggagttaatagtatttttttcgagtattcgtttacggcgtttttttgtttggaaagatatcgcggtttttttagaggatttgagggatagggtcggagggggttttttcgttagtatcggaggaagaaagaggaggggttggttggttattagagggtggggcggatcgcgtgcgttcggcggttgcggagagggggagagtaggtagcgggcggcggggagtagtatggagtcggcggcggggagtagtatggagttttcggttgattggttggttacggtcgcggttcggggtcgggtagaggaggtgcgggcgttgttggaggcgggggcgttgtttaacgtatcgaatagttacggtcggaggtcgatttaggtgggtagagggtttgtagcgggagtaggggatggcgggcgattttggaggacgaagtttgtaggggaattggaattaggtagcgtttcgatttttcggaaaaaggggaggttttttggggagtttttagaaggggtttgtaattatagatttttttttggcgacgttttgggggtttgggaagttaaggaagaggaatgaggagttacgcgcgtatagatttttcgaatgttgagaagatttgaaggggggaatatatttgtattagatggaagtatgttttttattagatataaaatttacgaacgtttgggataaaaagggagttttaaagaaatgtaagatgtgttgggattatttagtttttaatttatagatatttggatggagtttattttttttattaggagggattattagtggaaatttgtggtgtatgttggaataaatatcgaatataaattttgatcgaaattatttagaagcggtcgggcgcggtgttttacgttttgtaatttttttattttgggagattaaggcggggggaattatttgaggtcgggagttcgagattagtttggttaataggtgaaatttcgtttttattaaaaatataaaaagtagtcgggggtggtggtaggcgtttgtaattttagttattcgggaggttgaggtaggagaatcgtttgaattcgggaggttgaggttgtagtgaatagcgagatggagttattttattttagtttgggtgatagagtgagattttgtcgaaagaaagaaagagagaaagagagagagaaaaattatttagaagtaattatatattgtgtttatttttaattgagtagggtaaataaatatatgtttgttgtaggaatttaggaaataatgagttatatttatgtgattattttagaggtaatatgtagttattattttgggaatatttgttaatatttttgtttttttattatttttagtttatttgatatagtttatttgtgataagagtttttaattttttatttttgaatagaggtgttttttttttttttatttttgttttgtgagggagttaggggaggatttaaaagtaattaatatatgggtaatttagtatttttaaaattttgttaatagtttgaattcgggagtttggttttgtagttttataatattttagaagagattttatttgtttaaaaataaaaaggaaaaagaaaagtggatagttttgataatttttaatggagaagggagaagaatatgtagaaaaggggaaatgatgttggtttagaattttaattatattggtgtttaatataggaatatttatttatataatattttaaagtattaaatttatattagtatattattaaatggatatattattaaatgggtttaagtattttatatattttaatttaattgatttattttttttttgttttggatttttattatgatttaaatatttatatatgggttattttttagattttttatattatgaaatataagaaaaatttttaaggttagttttatgattaagacgaaggattttattgaatatataaaataataaatatattgtaatattttgtttttttttttgtagttgtaatttggtttgtttatattttttttttgtttttttgaaaattgagttagttttatttttttaggataggatttaataattataatataatttagtataattttttgatttaggtaaattatgtaatttgtgtttagtatgaaatgtatttaaaaataagtaatttttttttaatattattatttttaaattaatataataaataatagttattttaaaataaattgtttatttttattatgtagtatttaaattttaaggttgttatgattgtagatagtattttaaaatttttttttggaaatggttttgtttttaagatgatttaggaattaaagaggtgattattttttgtttaatgaatttttaaattataaatttgggaagtgttttagttttttattgttgttgttataaattattataaatgtgttagttaaaataaatataaaattattattttatagttttagagattagaagttaaaaatgggtttataaggttttattttttttggaaattttaaggggtaatttgtttttttgttttttttagtttttagtgattattaaattttttggtttatggtttttgtattttttttgtggtttgtgtttttatttttgtattttttttttgattgtgattttttaataaaaatatttggggttatgttgggtttattttgaaaattttggataattttttttaagattattaattaaattatatttgtaaagttttttttgttatataagttaatgtattaaaagtttttgaggattaggatatagatattgggggtgggggggtattatttagtttattataggaaggaattttagggttaattaaattagtttttttattttatatttgaagaaattgaagttttggaattggagagtattatgttaaatgaaataagttaaatatagaaagataaatattatatgtttttatttatttgtgaaatataaaataattatatttttagtagtaaagagtagaatggtggttattagagttggggggtgggaggaatggggagatggtaattaagatataaagttttagttaagatgggaggaataagtttgattgttttttttgagatgtgttttatagtatgatgaatatagttaaatagtaaattttaaatgtttttatttgataaaaatgttaaatatttgagatgatggataggttatttagtttgatttaataattttttattgtgtttaaagattataattttatattgtattatataaatatatataattgtattattttaatatataattttaaaattaatataatgaaaaagaaattgaagtttaatatttttagaagttaagtgtaatttaaaagttttgtgagaatttgttttaataaataaataagttttttttttttaataattattatattttgcgtttggatatatagtagtgaataaaaaaaaaaaaaaaaaaaaaaatttttaggtttaatataattttaggaagaaattttagtagttgtattttaggggaaatataggaagttagtttggagtaaaagttagtttgtttttgtttttttgttattttgttcgtgttttatagtgttttttgtttgtgacgatagtttcgtagaagttcggaggatataatggaatttattgtgtattgaagaatggatagagaatttaagaaggaaattggaaattggaagtaaatgtaggggtaattagatatttggggtttgtgtgggggtttgtttggcggtgagggggttttatataagtttttttttcgttatgtcggtttttattttggttttgattattttgttttttttggtagg

SEQ ID NO: 28 - DNA, 8666 bp, Artificial Sequence
  chemically treated genomic DNA (Homo sapiens)
tttgttagagagaatagaatggttagagttagggtgggggtcggtatgacggaaaggaagtttgtgtagagtttttttatcgttaagtagatttttatataagttttaggtgtttaattatttttatatttgtttttagtttttaattttttttttgagttttttatttattttttagtatataatgaattttattatatttttcgaatttttgcggagttgtcgttataggtagagagtattgtgaggtacgggtaaaatagtaaaggggtagggatagattgatttttattttaggttaattttttgtattttttttgagatataattattgaaatttttttttgaaattatgttaggtttggagatttttttttttttttttttttttgtttattgttgtatatttaagcgtagaatgtggtaattgttaaaaagagaaaatttgtttgtttgttaaaataaatttttataaaatttttaagttatatttagtttttgggaatgttgaattttaattttttttttattatattagttttaaaattatatattgggatagtatagttgtatatatttatgtggtataatatgaagttatgatttttgaatataatggggaattattaagttaagttaagtaatttatttattattttaaatatttgatatttttgttaaatgagagtatttgggatttattatttagttatatttattatgttatgaaatatattttaaaaaaaataattaaatttattttttttattttaattgaggttttatattttgattattatttttttattttttttattttttagttttagtaattattattttattttttattgttaagaatgtaattgttttatattttatagataagtgagaatatgtgatatttgtttttttgtgtttggtttattttatttagtataatgttttttaattttaaaattttaatttttttaagtataaaataagaaggttagtttaattaattttaaaatttttttttgtggtaggttgaataatgtttttttatttttaatgtttatgttttaatttttaaaaatttttaatatattaatttatgtggtaaaagaggttttgtagatgtgatttaattaatggttttgagggagattatttagaatttttagggtgggtttaatataattttaagtgtttttattagagggttatagttagagagaagatataagaatggaagtataggttatagagaaaatatagagattatgagttaaggaatttgatggttattagaagttggaaaagataaggaaatagattgttttttagagtttttaaaaggaatgaaattttgtggatttatttttgatttttgatttttagaattgtaaaataataattttgtgtttgttttagttaatatatttgtgataatttgtaatagtagtagtaggaaattaaaatattttttaggtttatgatttgagagtttattaaataagagatggttatttttttggtttttaaattattttggaaataaagttatttttagagaggaattttaaaatattgtttgtagttatagtaattttaaaatttgagtgttgtatggtggaagtagataatttattttaggataattgttatttgttatattagtttgaggatggtggtgttaaagaggagttatttatttttaggtatattttatattaaatataaattgtataatttgtttaaattaaggaattatattaaattatattatggttattaaattttgttttgagaaagtgaaattgatttagtttttaaagagataaagagaaagtataagtaaattaaattgtagttataaaaagaaagataaaatgttgtagtatatttattgttttgtgtatttaatgaagtttttcgttttggttataaaattagttttaaaggttttttttatattttatagtatgaaaaatttaaaaagtaatttatatgtaaatatttaaattatgatagaaatttaaagtaaaaagaaaatgaattaattgaattaaaatgtgtaggatgtttaaatttatttgataatatatttatttgataatatattaatatgaatttagtattttaaaatgttatataaataaatgtttttatattaaatattaatgtagttaggattttaagttaatattatttttttttttttatatgttttttttttttttttattaaaaattgttaaaattatttattttttttttttttttttgtttttaaataaataaggttttttttaagatattgtaggattataaagttaaattttcgggtttaagttgttggtaaaattttagagatgttaagttatttatgtattaattatttttaaatttttttttaatttttttataaaataggagtagggagaggagaaatatttttgtttaaaaatgaggaattgaaaatttttattataaataaattatattaagtaagttaaagatagtaaaagagtaaaaatgttagtagatatttttaaaatggtaattatatattatttttggaatgattatatgaatgtggtttattattttttaagtttttatagtaaatatatatttatttgttttatttagttaaaaataaatataatatgtagttgtttttgaataatttttttttttttttttttttttttttttttttcgataaagttttattttgttatttaggttggagtgaagtggttttatttcgttgtttattataattttagtttttcgggtttaagcgatttttttgttttaatttttcgagtagttgggattataggcgtttgttattattttcggttattttttgtatttttagtagaggcgaggttttatttgttggttaggttggtttcgaattttcgattttaggtgatttttttcgttttgattttttaaagtgaagggattataaggcgtgaggtatcgcgttcggtcgtttttgaataatttcgattaaaatttatattcgatatttattttaatatatattatagatttttattgataattttttttagtaagaaagataagttttatttaggtatttgtgaattggaggttaagtagttttagtatattttatatttttttaagattttttttttattttaaacgttcgtaaattttgtatttgataaagagtatatttttatttaatataaatatgtttttttttttagatttttttagtattcgagagatttgtacgcgcgtggttttttattttttttttttggttttttaagtttttagggcgtcgttaggaggaggtttgtgattataaattttttttgaaaattttttaggaagtttttttttttttcggagaatcgaagcgttatttgattttaatttttttgtaaatttcgttttttagagtcgttcgttattttttgttttcgttgtagattttttatttatttggatcggttttcgatcgtaattattcggtgcgttgggtagcgttttcgtttttagtagcgttcgtattttttttattcgatttcgggtcgcggtcgtggttagttagttagtcgaaggttttatgttgtttttcgtcgtcggttttatgttgtttttcgtcgttcgttgtttgtttttttttttttcgtagtcgtcgagcgtacgcggttcgttttattttttggtgattagttagtttttttttttttttttttcggtgttggcggaagagtttttttcgattttgttttttaaattttttggagggatcgcggtatttttttaggtaaggggacgtcgtgagcgagtgttcggaggaggtgttattaatttcgagtatttagcgaatgtggtatttttgaagtcgttttaggttgggtttttttcgggggtattagtcggaagtagttttcgttagagttagcgttggtaaggaaggaggattgggtttttttttatttgttttttatatcgtttttcggtttttttgtttttagtcgcgttttttcgtttgttagtaaaggcgtgtttgagtgcgtttattttgttaaaaagaaattcgttttcgtttcgtttttttttttcgcgatataatttttttaattgttaaattgaatcggggtgtttggtgttatagggaaagtatggtttttttttttaattataagaaaaagtaaaattatttttttttagttgtgagagttttatcgagaatcgaaattatttgtacgattagaaagtgtttttttatttttttaatttttgatttttaggagcgcggggtttattaagttagaaattttagtttaaaggattttttttggagagtcggattgtttttttttttttttttttttttttttttgcgtgtaaaacggttgtttggggtaagggttttttagacgtgtatattgtttggtataagagtagattttgaaaagatgaggtttatttaatacggacgggggagaattttgtttgtaggtagataggaaaatggggagggagttattggaaggacggattttatttttaaagttataatttttagattagaaaaagtgtttagtgttttagaagtagagttgtatagtgatttaaagattagttttaaatattgttttgttttttttatattttttatattttttttttttattgaaaatattttgtatttttcgtaattataaagggggaagggaatatgagtgttttttgttttataggggttgttgtgagtttaaatgatgtattaatatatataagttttaagaatagtgttatatattttaagttaatatttgttagtttttgaattattcgttttgaggattggtttgtaattttgttttgaggtatagaaagaaaatgttttggagtaggacgcggtggtttatatttgtaattttagtattttgggaagtcgaggcgggtagattatttgaggttaggagttcgaggttagtttggttaaaatggtgatatttcgtttttattaaaaatataaaaattagttggttatggtggcgtacgtgtgtaattttagttatttaggaggttgaggtaggagaatcgtttgaattcgggaggtagaggttgtagtaagtcgagatcgcgttattattttttagtttgggtgatagaatgagatttcgatttaaaaaaaaaaaaaaatgttttggatagaattattattattatataaaaggaaagttcggatgcggtggtttacgtttataattttagtattttgggaggtcgagataggcggattatttgaggttaggagttcgagataagtttgattaatatggcgaaattttgtttttattaaaaaatataaaattagcggggtttggtggcgtatgtttgtaattttagttattcggaggttgatgtaggagaatcgtttgaatttaggagaaggcggaggttgtagtgagtcgagatcgcgttattgtattttagtttgggagataagagcgaaatttggttttaagaaaaaaagaaagaaagaaagaaagaaagattaagaagaatttattttttgaaaagattatgggtattttttattatttttatttataaagaaaagttaaatagtattaaagagtataataagcgtaaggaggtaaaagttttaattttttttgtgattattattttttaagtttattaaaaatatgtattacgttttaaaaaatggattgtttagattttgttgatgttttaagtatatgtttaatttgtttattggataatttagttttgtttaaaagttatattttaatttttggttgatttaaattttgtagatttagtatattttgtatttttagtgtttgtttgattttaaaatatgtagtttttaaaatgaagttaatgaaaataatttgggatgttaagtatgttattaaaatttataatgtattattgtattatttatatttttttcggggtattttttaattagttgtgtagtaatgatagggaaaatttaaattatcgataaataaaattattttagtttagtttaagatattttatgatggaggaggaagaaagtggttgttaggatgggagggagggaatatatttttattattaatataatggttttttttttttgtttgtttgttttgtgtgtttttttgagatggagtttcgttttgttgtttaggttggagtgaaatggtatcgtacgatttttttcggtttattgtaattttcgtttttcgggttcgagtaatttttttgttttagtttttcgagtagttgggattataggtatatgttgttatatttagttaatttttgtattattagtagagacggggttttattatgttggttaggtttgtttcgaatttttgattttaggtgatttatttattttagttttttaaagtgttgggattataggtatgagttatcgtgttcggtttatagtggtttttaatgggggtgggagagtgggaagagtaggtttttttaagagtttgttgaaataaatattttttttttaaaaaagaaagtaggtaatgattttttttaaaaaagatgtgtttatttgtatatgtatttttagataaaatttttagtgaatttagggatttttttgaaattttattatggatttttatattaagaatttttttagtttttgtgaaaaatatatatagttattggtgaagaagatgggagatgtaattatataaaaataatatttggatgtattataaataggtgtaaaagttgattgttttggaaatattaagaataagttttagatatgtatattttatattttgtagtagagttttggaaggattatggtatttttgggtggggttattttgttttagaaattgaagtttattatttattataaattttatgtaggggggaggggggagggatagtattaggagatatatttaatgttaaatgatgagttgatgggtgtagtatattaatatggtatatgtatatatatgtaataaatttgtatattgtgtatatgtattttaaaatttaaagtataaataataataaaattaaaaaaatattatgtaaataattaataatagtgggaaaatttttttagtttttttgttaaagagtttattatatttttagtttatttatatatatcgatttgaggtgtaaaattttagaagaatgaaaatataaagttttggatttttgtgttttttatgttagttttagattttttatgtgtaaaatgggattataatatattttatgtggttataaaatatgataatgtatgtttaaaagtttttaatgtaaaaatttattatatttattaaatttattaaagtttgttggttattgttattattatttttatatttatttttttttttttttgagaatgttattttttttttagatttgtattgtttttgtagttttgaaaattttatacgtgaaatttaaatttgttttaattttgattagttttataataaaaaaagattattatttgtttatttatttaataagtttagaaattaagggtagatatggggtgggggtagaggggagtaggttaaatatagtatttttatagttagattgttagggtttaaattttaattgttttatttattggttttttaatttttattaaagttatttaatatgtttgggtttttgtttttttatttgtatgattaggataataattgtatttgttttaaatagttgtttagggattaaatgaagtatgtaatgtttttagaagagtaaaataaagtatagaatgatataagaaaatgaaaaggtgattaaatttatttttatttgtttttagtaggtaaaggttttcggatgttgagagttgattttagttttgaagaatgatgtgagagtttaaagatggaaaagaaggagaaagatattttaggtagaggtaagaggatgtgtaaaggtatagaagtttaggaaaattgaaagtaatttatttagatttatttttgaaaattagtttgtgaaggattttttagagagttaaaagaaaaattaggataatgggatggtaaggaagtggggatattgcgttgattatttttttatagtttggttgtgatagtttaaggttttatgttatgaagtgaggtagatggaaggtggaggagatttgagtatatatatatttggaagggtaagtgttaagtgaagagaagggaaagttagaaaagaataaaagaaaagttaagtatataggtaagataggatatttttgaggatttgaggttttttaaaaataatgaagaaatagaatttaaagtatagcggtggttatagattttgttataagagatatatagatttgggagggagaaaaggttagaacggggaggaagttgaggtatttttttttatgaatgaggaggttagtttgtttgtagagtgaaaataagatggtcggttaggaagtttgagaatcgtaaaggtttggaatattttttatgagtagagaggatgggttgagtaagatttagatagagaagttttttgttttgttttttaaaattagattggagaatttagttgagggtggagattatgatatagtagggatatttgattattttttttaaattaaagaaagttttgtag

SEQ ID NO: 29 - DNA, 8033 bp, Artificial Sequence
  chemically treated genomic DNA (Homo sapiens)
gaggtgggaggattatttgagtttgggagttgtaggttgtagtgagttatgattatattattgtattttagtttgggtgatagtgtaagattttgttttaaataataaataaataaataaataatttaaaaagatattttagttagtaaatgaaggaatagtaaaattagaatattattattttgttatttttaagaaaataataatttatgaaataattatttatggttgttagaattatagaaagagataattatattatgtgttttttggtgaaagtacgtaattttatttattaaatatttttgtttaaatattaaatttgaattatatatagattttaggtttaaataataagttatgagaaatataaatgataaagaaaaatgttaagtgttattataaagaagtatttagtaaaatttaagttttagaaaattatagataaagttaatttttgtaatagataaattgaaagaaaaaaaaagaaggtaaaagggggaaattgtagattaagaggaaataagacgttaggtgtagtggtttatatttgtaatttagtattttggggggtcgaggtgaaagaattgtgtgagtttaggagttcgggattagtttgggttagatggtaagattttatttttttaaaaaagtaaaaatattagttagttatggtggttaatatttgtagttttatttattttggaggatgaggtaggagtattttttaagtttaggaattcgaggtagtagtgatttttgtttatagtattgtattttagtttggtcgataaggtgaatgaaatttgttttttataagaaaaaaaagagagagagagagatataagagattgtagtaattttaattaattttaatattttagttttattttaatttttatttaaatgaataaattattaataatagtttaaaaagaaatgaaaagtaaaatgtgtaaaaattaagatgttgttgttatgggttaaattttgttatttttaaatttttatattaaagttttaagtttaatattttataatttgatcgtatttggaaatagagtttttaaagaagtgattaagttaaaataaggttattggggtgggttttaatttaatttgattggtgtttttaaaagaggaggaaatttggatatatataagagatttaggggtacgtgtgtatagagggatgattatgtgaagaggtagtagtaggatggttatgtgtaagttaagaagagaagttttaggagaagttaaaattttgagaaaataaatatttgttgtttaagttatttagtttgtggtattttgttatggtagttttagtaaattaatacggatattaaaatgatgaataagtttattatttaattaattttgaaaaatatatgggaatatagaagtggatatattgtggattacggagtaataaatttaatttataaaatggagaaaattaaattttttggtgggaaggtgtgtttataaaaaatttgaaaaagttttaaaagtgattatgaatttttttttttttttatttataaatattattttagttttaattatatgtaaaagtgtgtataaatgagggtaaggttaggtcgttgttttttttggttagttaattagttttatttatattttttttttttttagttaatgaaagggatattttattgaggttttagggttatggggtttgggtaggaggttgtttttcgaggaaggaagagttttatttgatttttttggggtgtaggttgttggtgtggttatatttttttttgcggtaattgatagtataggggtgtaggagagtatagcgtttatggtagattattttgttttagttgtatttttaggtgagttggaagagtgaaggtttaataatgttatttcgtaggtgtagtattaggtgcggggtgggttgtttttggacgttgtagtttgagagagtgcggttattttttagttgtttgttggtaaatattagacgttgtttgttaggggggatattttttttgttttgaattttcgtattgatatttttaatggtgttattgggttcgattttaagggtgatggttttgttcgtgagggtttttataaagatttgtatttttgtgtttgtagttcggttgtttcgttgaagaaaaagaggatggtagatttgtttatatttttatattaaggttatatatagataattttattaattagaatataaaaatattattattagtgatttgagttatgtgtaatattggaatggatgttatttatttttttttattgatttttaaaattttatgttaatttattattaattttttttttttttttttttaattataaattttttattttattaaaagatatggttttgataattttaagttttagttgtttattatgtttttatttattttattttttaaatgtgtttaaagtattaataatagattgtgttttattttagagatagttgggttttaaggagaggtaaaatgttttataattttattttattgtttaagataaatgtgttattgtattatatgtgaaatgttatttttgaagtttggtaagggtgtgttgtgaggtgagttatttggaaaatatagtgtagattgaaaaataattataagttagtttattatttttttttagttaagtttattatgatagttgttaaaaaaaatattatgtagtataaagggtaaaaagattttgaagtcgtaaaagttatatttatttttaataatgattagttagtatataagttatttaaattttttgatttttttggtttgtttgtaaaattgaaatatggatatatgttatagaggagttttatgagtattaaatgaaataatagttgtaaagtatttcgtatagagtatataataagtttgattttttttttcgttttttaaatatagattatataatattttttatatagagaatattagataaaatttaattatatttgaaaattaggttgagtaggttggttttttaaagaaatttattgagtttttataatgttttttttatttgacgggagaaaaggggttttggaagattaagtgtgaagttttagaattttgtttggagttggttaggattatttaggtttgagtataagtaaagcgttgttcgtggtgttagtaagcgcgaatgttttcggtaacgttttttttatttaaagttgttttttatttagttaatttgtttcgcgaagtttatatatttgtttcgtgtaagatttttagttattttatttagttattggttttttttttattattattttttatgttttttttaaagaaaaatattattttttatttttttattaattttaaatagtttttatttttttgatatatttattatttaagaaaatggtttaagaattgggttagattattttgttttaatttttttgataagttttagagaaatttaaaggttaaaataagagtataagagtaaaaggtagagaaattaagaaattgaagattaggaaatgggggttggatgggaaagaaaaagaaattgttattaatgttattcggtttttttttttgtttaggtggattttagttttgttgaggttttgttagtagatttttagttttaattagtatttttatggtggtggtatttttattgtttttaaaagaaagagttttttttaattttatagggatttgggggatgaggagttagagttaaggtattttaaaaaaaatatgtgaagatttttattttgtaatatataagtaattgtttttttgttaagattttgttttttttagtatttcgaattaaaatgattttgtaaataaaaattgtttatttttaggagaggtttatttatgtagttttttattaaagtttttaggtaataaatttataatttgcggttttttttttatttaatgtagtattcgttgaaatgttttaaatattttaagtaataaatgttgatttaaatttatttaggaagattaggaaggggaaaaaaagtatttggtatttaaatttttagaagagaatttaatgataggtttagtttgtttaatgataagtttagtattatattttttttttatgatgttttattattattgtataaattttttttattatttatgataaataaaaataagatatttgataaagtgggtttaaataggtaagagtgtaaataaagatttattgtataaatatgatgaaattgggattttagatttttaaagtataatttttttttgttttatgtgtgttaggttgttatttttaatttcgaattagttttttttttttttaagggttgtatttataatgtaaaaatggaaagaattaaaaagtatacgtaaaatatgattttcgggatttttttttatttttatggttgattaatttaaatagaaagatatatttaagagaaaattgttaagtttgatataagttatgaaatttgtgaagtttaagtattgtttggggatgaatttaatttgtatgataggtgtagagttgtcgtttttagatattttaagaaatacggagttattttgaatgattttttttcggttataagggagttattaacgtttttatagtgaaattaattggttggttgaaggaatagaaattttttgtttcgtttattggggattaggagttgagggtagtggtgaatatttttaaaatattagttttggttttattggatatttagcgagtagtgtagttagtatttttggcggttttttggtttagtttttggcgtatgcgttttagtatttttgggtaggttttttcgttttcgtgacgcgtcggttcgggtttggtttttcggcgattatagcggatagggggcggagtttaagggggtggggagacgtcggttttttggtttagttgaaaacggaattttttgtcggttggttttttattttgttagagcgaggcggggtagtgaggatttcgcgacgcgttcgtattttgcggttagagcggttttgagttcggttgcgttcgcgttaggcgtttttttttagaagtaatttaggcgcgttcgttggtttttgagcgttaggaaaagttcggagttaacgatcggtcgttcggttattgtacggggttttaagtcgtagaaggacgacgggagggtaatgaagttgagtttaggttttttaggaaggagagagtgcgtcggagtagcgtgggaaagaagggaagagtgtcgttaagtttacggttaacggtggattattcgggtcgttgcgcgtttgggggttgcggaatgcgcgaggagaataagggtatgtttagtgggggcggtagcgatgagggtttggttagcgtcgcggcgcggggattagtggagaaggtgcgatagtttttggaagtcggcgcggattttaacggagttaatcgtttcgggaggcgcgcgatttaggtagttggggttttagggtttcgtcggtagggggcgcgcgaacgcggggcgcggtttcggcggatcggggttggaatttagatcgtcgatgtagatttgtataggagttttcgttggtcggaggtgtgtattttacgcgtaaaataggtttttatttagtaaaaattttaaagagagatattgaaaaatttattgtttaagttttttttagtggtttttgttttgttattttatgattagagatgtaaggaatagattgaattggggagaaaaggagaaaaggaaagtttatttagggaagaagattattttgtttgtttgtttttaacgataaagataagtaaagtataagttacgtattttagattggatttaaggaattttataaaattatagtatatggaaaaaattaatgtaaatttttaagttattatatgaaatttgttgtattgtttttttatagaggttaattgagaatgagacgggattttttaattatagtatttagttttttttatgttagtagtgttttatgagtgatgtataagagaaaaaatatatagttttataggttttttattttttaattattatatttagtgtttagattataaaaatatttttgtagtaattgttaggttttttttgaatggtaaaggatttttataaataatgtatttttatttttattgttaaaatatatttatttaatgtttaagtacgaattttgttttaattagtattgatattttttattttttttataatttaggataatttttttgtattttatcgttggttagtggttatatttagtatttattttattattattttttaaaattaagttaatattaagggattttgttaatagtatagattttaaagaagtgtttattttttttgaatttttagaataatggtataataaatgagggatttttaaaggagtaaaaatattgtaaagtgtattttaaaaatttaaaattttattaataattataaaaataagttatatatgtaatttattattttttgaaatattaatagtagttatttttttttttttttttatgtaaaatatttttatattattagtagatataatttattacggtttttaagagatgaaatgaatatttttaatattaatgaaataagttaataaaatatgagaagtatattgttttttaattaaatggtatattttaaagtgtataaatttataataaataattcgattttagatatttagttattaaaaattgttttataattgattttaaatatgatagtaaatgtttttataatgtttatgtatataaatggttgttataggattatttttgtaaaatattattttttttaagttatgtattattttgattgattgttaatatttaagttttatttatttatttatttattttattttttttgagatgaggttttattttgtcggataggttggagtgtagtggtataattttagtttattgtaattttttttaggatgtaagcgatttttttgttttagttttttgagttgttgggattataggtacgttttattatgtttagttaattttttattttttgtagtagagacgggattttattatgttggttaggttggtttcgaatttttgattttaggtgatttgtttgttatggttttttaaagtgttgggattataggtataagttattgggtttggtttaagttttttttatatagtaaaatatttattgtttaatatttttaaattttagttattataaaattttgtagtatataaatatagttagttttatattatattaaaaatattatagtttaaatttaaaatgatgaattgttaaggaaaaattatttattataattttataagattttgtatgatttaatttattttttttttttaatttttaattttggtttaaattattatattataagttagttatgagtttagatatatgataaataaaagtttttcgtacgggatttgttatgagaattaaataaattaaaaaaaaaagaaagaaaaaaatttagttgtttatttttttttttaaattattatttttaatttttaataaatagtagttgattatttaataaatatttgtagatttggattatggaggaggggttagtaaggtaaataatttaaaattttaaaagtcgaataaatttaattttgtttttaaattatttaataaaatagatttttatgttttaatggaaattaagatttgtttttttataatgatgattattattttattattaatttttttgtttttgtacgtttagagaataaaatggtatttaatttgtattgagtataatttgaaggtggggtgggaaagtggattgtattagtaaatgaagaaatattagatattagagatttgaatatttttgtattgggtgaaaattttgtaattaggtgtttttttaaatggttttatttgttttgtttcggtcggtattttttatatttgtttttattttggttttgattattttgttttttttggtagg

SEQ ID NO: 30 - DNA, 8033 bp, Artificial Sequence
  chemically treated genomic DNA (Homo sapiens)
tttgttagagagagtagagtggttagagttagggtgggggtaggtatgggagatgtcggtcggggtaaggtaggtggagttatttaaagaaatatttaattgtaaagtttttatttagtgtagaggtgtttaggtttttgatgtttggtgtttttttatttgttgatgtaatttatttttttattttatttttaggttatatttagtataaattaaatgttattttattttttaaacgtgtagagataagaaagttgatggtaaagtgatgattattattatggaaaaataaattttgatttttattggaatatgggaatttattttgttaaatgatttaggggtagagttaaatttattcggtttttaaagttttaaattatttgttttgttgattttttttttataatttaggtttataaatatttattaggtagttaattattgtttgttagaagttgggagtaatggtttaggggagaaaataaataattaagttttttttttttttttttttttaatttatttagtttttatagtaaatttcgtgcggaaggtttttgtttgttatgtgtttgagtttataattggtttgtagtgtgataatttgagttaaagttggagattagaagggaaaagtaaattaaattatgtaaaattttataaaattataataaatgatttttttttaatagtttattattttaaatttagattataatatttttaatgtaatataaaattaattatatttgtatattataggattttataatagttaagatttaaaaatgttaaatagtaaatattttgttatataaaaagagtttgggttaggtttagtggtttatgtttgtaattttagtattttgggaggttatagtaggtagattatttgaggttaggagttcgagattagtttggttaatatggtgaaatttcgtttttattataaaaaataaaaaattagttgggtatggtggggcgtgtttgtagttttagtaatttaggaggttgaggtaggagaatcgtttgtattttggaagaggttgtagtgagttgagattgtgttattgtattttagtttgttcgatagagtgaggttttattttaaaaaaaataaaataaataaataaataaatagagtttggatgttagtagttaattaggatgatgtataatttagaaaaaatgatgttttgtaggagtaattttgtagtagttatttgtgtatatgaatattatgaaaatatttgttgttatatttaaagttaattataagataatttttggtaattaaatgtttaaaatcgagttatttgttatgggtttatgtattttaaaatatattatttaattgaaaggtagtatattttttatgttttgttggtttgttttattaatattagaaatgtttattttattttttaaaaatcgtgataagttatatttattagtgatgtaaggatattttatatagaaaaaaaggggaaaatagttgttgttagtattttagaaaatggtgaattatatatataatttgtttttataattattaataaaattttaagtttttaagatgtattttataatatttttgtttttttaaaaattttttatttgttatattattattttaagaatttaaaagaaatgaatatttttttaaaatttatattattaataagattttttaatattagtttagttttagagggtgatagtgaggtgagtattgaatatgattattagttaacggtaaagtataaaagagttgttttagattgtaaaagaaataaaaaatattagtattaattaaagtaggattcgtatttaaatattgaataagtgtattttaataatgaagataaagatgtattatttatgaagattttttgttatttaaaaaggatttaatagttgttgtaggaatatttttgtaatttgggtattgagtatgataattaaagaatgagaaatttatagaattatatatttttttttttatgtattatttataagatattgttaatataaaaggaattaagtattgtggttgaggaatttcgttttatttttaattaatttttatgagaaaataatataatagattttatatagtagtttagaagtttatattgattttttttatgtattatgattttgtagaattttttaaatttaatttagaatgcgtaatttatattttatttatttttatcgttgaaagtagatagataagataatttttttttttaaataagttttttttttttttttttttttttaatttagtttattttttgtatttttgattatgagatggtagaataaaaattattaaaaaaagtttaaatagtgggttttttaatgtttttttttaggatttttgttgggtaaaagtttgttttacgcgtggaatgtatattttcggttaacggagatttttgtataaatttatatcggcgatttaggttttagtttcgattcgtcgaggtcgcgtttcgcgttcgcgcgttttttgtcggcgaggttttggggttttagttatttggatcgcgcgtttttcgaaacggttgatttcgttgggattcgcgtcggtttttaggagttgtcgtattttttttattagttttcgcgtcgcggcgttggttagatttttatcgttgtcgtttttattgggtatgtttttgtttttttcgcgtatttcgtagtttttagacgcgtagcggttcggataatttatcgttggtcgtaaatttaacgatatttttttttttttttttacgttgtttcggcgtatttttttttttttaggagatttgggtttagttttattattttttcgtcgtttttttgcggtttggggtttcgtgtagtggtcgagcggtcggtcgttagtttcgggttttttttggcgtttaagaattagcgggcgcgtttggattgtttttgggaaaaagcgtttagcgcggacgtagtcgagtttaaagtcgttttggtcgtagggtgcggacgcgtcgcggagtttttattgtttcgtttcgttttggtagagtggggagttagtcggtaaagaatttcgtttttagttgggttaaggggtcggcgtttttttatttttttaggtttcgttttttgttcgttgtgatcgtcgggaggttaggttcgggtcgacgcgttacgagggcggggaagtttgtttaaagatgttaggacgtatgcgttagagattgggttagggagtcgttaggaatgttggttgtattgttcgttggatgtttagtaaagttaaggttaatattttgggaatgtttattattgtttttagtttttaatttttagtaggcggagtagaggatttttgtttttttagttagttagttggttttattgtggagacgttggtggtttttttgtgatcgagagaaagttatttaaaataatttcgtgttttttaagatgtttgaaagcgatagttttgtatttgttatataagttaaatttatttttaggtagtatttgggttttataagttttataatttgtattaaatttagtaatttttttttggatgtgtttttttgtttgaattagttaattataaaaatagagaaaaatttcgagaattatgttttgcgtgtgttttttaattttttttatttttgtattatggatataatttttaaaagagaaaaaaattagttcgagattgagagtggtaatttggtatatataagataaaaaaaaattatattttaagaatttgagattttagttttattatatttgtatagtaaatttttgtttgtatttttatttatttaaatttattttgttaggtattttatttttatttattatgagtaataaaggaaatttatgtagtaataatgaaatattataagagaggggtgtggtgttgggtttgttattaaataggttgaatttgttattaaatttttttttgaagatttaaatgttaagtgtttttttttttttttttaatttttttaggtgagtttgaattaatatttattatttaaaatatttaaaatattttagcggatgttatattggataggaagagaatcgtaagttatggatttgttgtttaaaaattttggtgaggaattgtataagtggattttttttaaaagtgaatagtttttgtttatagaattattttggttcggagtgttgaggaagataaagttttaataggagggtaattgtttgtgtattgtaaaatgagagtttttatatgttttttttaggatattttagttttgattttttattttttaaatttttgtagaattaaaaaaagtttttttttttaaaggtagtggaagtgttattattatggaagtgttggttagggttgaaaatttattgatagagttttaatagagttgaaatttatttggatagggaagggaatcgggtagtattaataataattttttttttttttttatttaatttttattttttagtttttagttttttaatttttttattttttatttttatgtttttgttttgatttttgagtttttttgaaatttattagaaaagttaggataagatagtttgatttaatttttgagttatttttttaggtagtaaatatgttagaaaaatgaaagttgtttggagttgataaggaaatggaagataatgtttttttttgagggggatataaagaatggtgatagggaaagaattaatgattaagtaaaatgattgagaattttgtacgaggtagatgtgtgagtttcgcgaagtaagttgattgaatgaaaaataattttgggtagggaaaacgttgtcgggggtattcgcgtttattagtattacggatagcgttttgtttatatttaggtttgggtggttttaattagttttagatagaattttaaagttttatatttgattttttaaagttttttttttttcgttaaatagaaaggatattatggaagtttaatgaatttttttgaaaaattaatttgtttaatttggtttttaaatatgattggattttatttaatattttttgtataaagaatattatatagtttatatttagaagacgagaagagaaattaaatttattgtgtattttgtacgaagtgttttatagttgttgttttatttaatatttataaaatttttttgtggtatgtgtttatattttaattttatagataagttaaaaggattagggaatttgagtgatttgtatattagttaattattgttggaggtgggtataatttttgcgattttagagtttttttattttttatattatatagtgttttttttagtagttgttatggtaggtttaattggaaaaaagtaataaattggtttataattattttttaatttatattgtgttttttagatggtttattttatagtatatttttattagattttaaagatgatattttatatgtaatataatagtatatttgttttggataatagagtgagattatgaaatattttatttttttttgaaatttagttgtttttagggtgaaatataatttgttgttaatgttttaaatatatttaaaagatgaagtggatgggaatatagtgggtagttgaaatttggaattgttagagttatgttttttaataaggtggagaatttataattgagaagaaagaaagagaaagttaatggtaaattggtatagaattttggaggttagtagaagggaatgagtggtatttattttaatgttgtatataatttagattattagtaataatatttttatattttagttggtgaaattgtttgtatatgattttgatatagaagtatgaatagatttgttattttttttttttttagcgaggtagtcgagttgtagatatagagatgtagatttttgtgaagatttttacgggtaagattattatttttgaggtcgagtttagtgatattattgagaatgttagtgcgaaaatttaagataaggagggtattttttttgataagtagcgtttgatatttgttagtaaatagttggaggatggtcgtatttttttagattataacgtttagaaatagtttatttcgtatttggtgttgtatttgcgaggtggtattattgagtttttatttttttagtttatttagaaatataattgaaataagatgatttgttataagcgttatgtttttttgtatttttatgttgttaattgtcgtaagaagaagtgtggttatattaataatttgtattttaagaaggttaaataaggttttttttttttcggagggtagttttttgtttaggttttatggttttggagttttaataaagtgttttttttattgattggaaaaaaaaaaagtatgaatagaattggttgattggttaagagaaatagcgatttaattttgtttttatttatgtatatttttgtatatgattaggattaagatagtgtttataagtgagaagagaaggaaatttataattatttttggggtttttttaaattttttatgaatatatttttttattaagaggtttgattttttttattttatgagttgggtttattgtttcgtgatttatagtatatttatttttatatttttatgtattttttaagattaattaaatggtggatttgtttattattttagtattcgtattagtttgttagggttgttataatagaatattatagattgagtagtttaaataataaatatttatttttttagagttttaattttttttgaggtttttttttttgatttgtatatggttattttattgttgtttttttatatagttatttttttgtgtatacgtgtttttggattttttgtgtgtgtttaaattttttttttttttgaggatattagttagattggattagggtttattttaatggttttattttaatttagttatttttttaagggttttatttttaaatacggttaaattgtgaggtattgggtttaggattttaatataaaaatttagaggtgatagaatttaatttataataatagtattttaatttttatatattttattttttatttttttttaaattgttattaataatttatttatttgaataaggattaaaataaggttaggatattgaaattggttgaaattgttatagttttttgtatttttttttttttttttttttttttataagggataggttttatttattttgtcgattaggttggagtgtaatattgtgagtaagggttattgttgtttcgaatttttgggtttaagggatgtttttgttttattttttagagtagatgggattataggtgttggttattatgattggttaatatttttatttttttgaagagatgaagttttgttatttggtttaggttggtttcgaatttttgggtttatataatttttttatttcggttttttaaagtgttggattgtaagtgtgaattattgtatttggcgttttgtttttttttaatttatagttttttttttttgtttttttttttttttttttaatttatttattgtagaaattggttttatttgtagttttttaaagtttggattttgttgaatgtttttttataatgatatttaatatttttttttgttatttgtattttttataatttattatttaggtttagagtttgtatgtgatttaggtttgatatttgggtaaaagtatttaataagtgggattacgtatttttattaagagatatataatatggttgtttttttttgtgattttagtagttatggataattattttatagattattatttttttggggatggtaaaatggtgatattttaattttattatttttttatttattagttggaatgtttttttaaattatttatttatttatttattatttgagatagagttttgtattgttatttaggttggagtgtagtggtgtgattatagtttattgtaatttgtaatttttaggtttaagtgatttttttatttt

SEQ ID NO: 31 - DNA, 6095 bp, Artificial Sequence
  chemically treated genomic DNA (Homo sapiens)
gttaaaaatttatatttttaagtttgttattatttaagtttaggaattgttttatttgtatattattttaatttttaaaggtttgcgtaaaatttattttgtggttaatatggatttatttaaaaaatttagttgtatttttttttttgggatttttagggtgtagtagttatattaatttttttatttattataatttgaaagttttattaattttaaaggtttagttttataattatatttggttagtttgagattaatttttagaggttatttattttttatgaagattgttttttagttattggtttatttagattttattaataattatttcgtaagagttttttttattattgtttatttatatgtgtagaatttatattgtgaatatgaattaaggatgaatttttttaagagttaaggtttaattggaatgttattttttttttattgtgttagattattttttttttgggaagttgtttcgtgaaataattaaatattgtttttttaaaagagtttgtgatttgttgtatttgtaatttttgaattttatgatttagtttaagattttttagttttttattttatatttttgtttatatttggtttagatttggtttttttttgttcgagaggaataggatttattattattagttagaagttattagtttttaatattttagtaaagaattttagtttgttagagtgagtaatgttttgtttgtatttaagtttttttgaattagttattttaaataggatgttattgtttgtatttatttagaaattgttaagttgtttatgtgtttttttttattagtttatgtgatttttgaaatatttttatgcgttttgatgggagggaaaaaaaataatagttttttatatatttatgtaatgtttatttatggagtatagtgtatatgttagggattgagagttgagtatgtgttggtattttagaaggatatgtttttgtttttaggtagtttagaggttattgagttttattatgaggtaggtatattaggaaatggttttgatgtttttttttattgattatttataataaattatgggaaaggtttgattatttttgttttgtggttgggattatcgaaatttttagaggttaagttattttttgataagggggaaagttaatgtttagatttggattttttcggtttaaggttgttgattgaattttggattttttttaaatagtgtaatttcgtgttaatttaaattaatttaagttttttttttagttttttatattttatggtttggtttagaaagaaagatggtgtaatatataatagatattaagtatttaagagtttgggaagggtttgtgtgattagtggtgtgggtagggtgtttttagaatggaaagtggatgagaggggagtttaaagaggtgatttaggaatttttaaaggtggattttgatttagtaagttattaggtttgttatttgaaatgagttatttgtggtatgggggtaaatgattttagttttttattaaattatcgggaagtaagtaaataaaataattttcgtttttggggagaataattttaattatagtttttagaatttgtatgtttttttatagtttgtaaagtatttttatatttatattttttttggtggaattgtttattgtattaatggagaagggattaggatttgatatggtttagtttgttggtttttatatattttttaagaataattatttgttaaaatgtaattttatgtaatagtttggtatataaaattgatgtaagtggaatttttgtggttgggatggggtttggggagggagaggtatagtttattttttagtttttattttgattattaggtttgtttttgaggggtttttaaggaatttttaggttttatgaaatatagtaagatagatattgtttttagtgattttttacgttattttatttttttgttttaagaaaaggaagttgaaatttttggaggttgtatgaggtgaaaaaagttgttttttgttttgtatttttgtgtatggaatttattagggttggtttttttatatgagtagggattgaagttttatttgggagttagtttgtttttagttgttttaagaaataaagtgtttttttggttatagatagtagtagtaataatttttttttgcggattggtagtattttttaagtatttgttttttaggtggaagttacgggttattgtttttattttagacgggcggttttttgagttatggtatgttagtttttgagtggttgaggattagatttagataaggattttttagttttaaatattttttttgaaaatgtaagaggagtagtttttagttaaatagaatttttataattgaaaaatttatatcggattagatagtggtagtggttgtataatattgttaaagtattatacgttattgttataaatatttttaaatgggtgaaatggtaaattttatgttatgtatattttaatataataatgataataattttaattaagtacgttgtttttttattttttatagggttaagtttaaattttttggtatagtttatattttgtagtttttatatttgtaattttatgtttgttatttttttttagtttttttatttgatttatgtttagattagtttatattgttttttattttttggataagttatgtttttttatttttttatgtttaaatataattttgtttttagtaatgatagtaaatatttatttaaagtgtttattgtatgtatatgtagatataaatttacggtttaatatatgtagggtttttgagttatttaatttttattaattttatgaagtaatagaattgtaatagtaataatagatattattattaagtttattttatatttgagtaaattgagttaattgttttaggtaaggttatataattaagaagtagttataatagggtttggatttaggtgttttagtttttgaatttatgttgttcgttattatattgtattgtttgtggatgatttatttgtttttgtagttttatttgaagaatttttttttttttttttttgaggtttgttttaaatattattttttttgtgaagattgtttggtgttttttaggagagagtgtgatttttttttttaggaatggtagtattttaaatatatatattttgtagtatattttattttgtatggtaatggtttgtttgtgagttttatttcgtattagagggtgagggttttgaagatagcgttaggttttatttatttcgatattttataatatttattatatgtttgatgaatgaatgtatagggggatggttgggtgtattttttttaattttttaattttttgaaataaataataaaattttatttttttttagaagttttggtatggttttttttattttgttatagttattgataattatttttattttttgtgtaatttattaggtaagaagtttatgtagatttatttttagtagtttatatgataaataaatattgcgtttgatttttaaatattaaattatagtatattatagatagatatagagttattatttaaagtatgatattttaattttaaaaggttttttttgaagaatattataaattttttttttttttaagatttgttgggtaggaaagatgggagaaaatgaattaatgtttatatagaaaggaggataatgggggtaaaaataatagatgaacgtatgggtggatgagagaatggataaaatgataggtggatatgttgattttggatagatgggaaatgagtggatatattaataaatagatatgtgggtggatgggtggagaagaggatggtggatggttgtggttttatgaagagatgtgaaaaaggaagtgtggaatgatggatgagaagttgtatgggaagatgaatagaagaataggtggttgaataaattaaaaggtgtgtggttggatgaatgaatgagtgggatgatagatggatttaagtggttagtggatggataggaggatggatggatgtgagagttttagaaggatataaggaaagatgggtggatagatggatgggcggatggaaggatatttaggaggatgaatgagtatgtgtgtggagagaggtgtttatttatattggtttgaatatatgggttagttgagttaaatgttagttttatgataggttattagtagttttttttgagttgttttgttaagaagttaaaatttatttaagttatgtggatttgttattgaggggaaaaagaatgagttttttttttttttatttggaagatttattaattttttattttttattttttattgtgggtacggaggtattgcgttatttagggtaagatttcgttttttttttagttttttttttaggatatttaatattttgtgaaatttagagattttgttttagtcggatttagagaaatttagcgggaaaggagaggttaaaggttgaatttaatggtgtaaggttttacggttcggttattttttgttttgacgtcgcggggttagcgggagaagaaagttagtgcgtttttgggcgtaggggttagtggggttcggaggtataggtatttcgcgatattttaggtttttcgatttacgtttttggtagtttcgattatttatagttttagtagagtacggggcgggggtagaggggttcgttcgggagggttgttattttttaaaatttttgcgggttgtttagttatagttttttttgtttgggtgtgtttttcgttcgtttttttttttcgttttaggttattgtttttaatttcgaataaaaattgtagttaattttcgaggtagttttattgtttagcggattttagtttttgttaggttcggttcgttattttcgtttcgtttttcgtcggtttttgtttcgcgtttagggattttttagtttttttcgttcgcgtttttcgttcgtttcggatattatggataagttttggtggtacgtagtttggggattttgtttcgtgtcgttgagtttggcgtagatcggtgagtgttcgtcgtagtttgggtagtaagatgggtgcggggtgtttagcgcggattcggcggtagttttttcggttgagtcggttttgggggattggagttaagtgagttgtttgcgaagtgtattgggtttcggaaagtagggttgggatttgcgttaaatcgttggagaatgtgtttgtggaagtattatttggttgaaagaaaaagagaaagagaagaaagtttgttgggtaggttgtcggcgcgtagttttgggcgaggtcgttagagttgtagtatatggtagaaagtaatcgttttttcggatgcgtatagtcgttgtttggattaataggtttttgtgtttaagggttcgttaagttttatcgggttgtgtttaggtagggtagagttgggcggggtagagattggggttggaatagggcgagtggttgttattaaggtggttatagaagggattataattttaagtgtgagattagttggtaatgggttttttagaaaggggttttgggtttttttagttttttattgagttttgttttaaagtttatagttcgtagtgttattgttattttagcgttgtggaagtttgaattagttttgcggtgaggttttgggttttttatgagattttagtttgtgatagggagtatgaatatgagaggtaattattggattagttgtttggtttttattattttttgtttttgttaattagtgtggggaaattttaatagtaaggtggtttatattttttgtttggtagttttagagtagagagaagagttttgatattagggtaatattagggattttggagttagggttttaatattttatttaaatagggttagtgttttgtggtggttatggaggggaggggttgcgtgtaaggtatattttagtacggtttaattttaagtattttttttttttgtttatgtatgtatagataattatatggtcgatttgtttatcgttggttaaaattaat

SEQ ID NO: 32 - DNA, 6095 bp, Artificial Sequence
  chemically treated genomic DNA (Homo sapiens)
attaattttggttagcgataagtaaatcggttatgtaattatttgtatatatatagataaagaaagagaatgtttggagttgagtcgtgttagaatatattttatacgtagttttttttttttatagttattataaagtattgattttgtttggatgagatattggagttttagttttagggtttttgatgttgttttggtattaaggtttttttttttgttttgaggttgttaggtagggaatataagttattttattgttgagatttttttatattgattggtagaagtaggaggtggtgaggattaagtagttggtttagtggttgttttttatatttatgttttttattataggttggaattttatgggagatttaagattttatcgtagagttggtttaagtttttatagcgttaaggtggtagtgatattgcggattgtaagttttggaataaggtttagtggggagttgggagaatttaggatttttttttggaaaatttattgttagttagttttatatttggaattgtgattttttttgtgattattttgataatagttattcgttttgttttagttttagtttttgtttcgtttagttttgttttgtttagatatagttcggtggggtttggcgagtttttgggtataggagtttgttagtttagataacgattgtgcgtattcgggagaacggttattttttgttatgtgttgtagttttagcgatttcgtttaaaattgcgcgtcggtagtttgtttaataaattttttttttttttttttttttttttaattaaatggtgtttttatagatatattttttaacggtttagcgtaaattttagttttgtttttcggagtttaatgtatttcgtagatagtttatttgattttagttttttagggtcgatttagtcggaggggttgtcgtcgggttcgcgttgagtatttcgtatttattttgttgtttaggttgcggcgggtatttatcgatttgcgttaggtttagcggtacgaggtagagtttttaggttgcgtgttattaaaatttgtttatggtgttcggagcgaacggagggcgcgggcgaaaggagttggaggatttttgggcgcggggtaggggtcggcggaggacgggacgaggatggcggatcgaatttggtagaggttggggttcgttgggtaatgaggttgtttcggaagttggttgtagtttttattcgaggttgaaaatagtgatttaagacggagggagggagcgagcgaaggatatatttaagtaaggggggttgtgattaagtagttcgtagaggttttaagaagtagtagttttttcgggcgggtttttttgttttcgtttcgtgttttgttgaggttgtaaataatcggggttgttagggacgtgggtcggggaatttggagtgtcgcggggtgtttgtgttttcgagttttattggtttttgcgtttagagacgtattggtttttttttttcgttggtttcgcggcgttaggatagaggatgatcgaatcgtaaaattttgtattattgggtttagtttttggttttttttttttcgttaaatttttttgaattcggttggagtaagatttttgggttttataggatgttggatattttgggagaggagttggagagagggcgaggttttgttttgggtggcgtagtgttttcgtgtttatagtggggagtgaggggtggggagttggtgaattttttaagtggaaagagggagagtttattttttttttttttaataataagtttatatggtttgaatgaattttagttttttggtagaatagtttagggaaagttattgatggtttgttatagggttggtatttggtttagttaatttatgtgtttaagttagtgtgaatgggtatttttttttatatatatgtttatttatttttttaaatatttttttattcgtttatttatttatttatttatttttttttatgtttttttggggtttttatatttatttatttttttgtttatttattaattatttaggtttatttattattttatttatttatttatttaattatatattttttaatttatttaattatttatttttttatttatttttttatataattttttatttattattttatatttttttttttatatttttttataaaattataattatttattatttttttttttatttatttatttatatatttgtttattgatatatttatttattttttatttgtttaagattaatatatttatttattattttatttatttttttatttatttatacgtttatttattatttttgtttttattatttttttttttgtgtaaatattaatttatttttttttattttttttatttagtagattttaaagagaggaagagtttgtaatattttttaggggaagttttttgagattgaaatattatattttgaatgataattttatatttatttataatatattatggtttaatgtttggaaattaaacgtagtatttatttgttatgtgaattattaaaagtaaatttgtatggattttttgtttggtgagttatatagaaaatgaaagtgattattagtggttgtggtaagatgaaaggaattatgttaggatttttgagggaaggtaagattttgttatttattttaagaaattgaaaagttgagagaaatgtatttagttatttttttatgtatttatttattagatatgtaatgagtgttgtggggtatcgaggtaaataagatttggcgttatttttagagtttttattttttggtacggaataaaatttataagtaggttattattatgtaaggtgaaatatgttgtaaaatgtgtgtgtttggggtgttattatttttagagaagggagttatatttttttttggagaatattaggtagtttttataggggaagtgatatttgaggtaggttttaaaggaaaaggaggaggaattttttagatgaaattatagggataagtaagttatttataggtagtatagtgtagtgacgaatagtatggatttaggagttagaatatttagatttaaattttattatggttgttttttagttgtgtgattttgtttaaggtaattagtttaatttgtttaagtataaaatgggtttaataatagtatttattattattattataattttattattttatagaattggtgaggattaaatgatttaaaagttttgtatgtattaagtcgtagatttatgtttatatatgtatgtagtaagtattttaaataagtgtttgttattattattaaaagtaaaattgtgtttgagtatagaaaagtgaaagaatatggtttgtttagagaatagagagtaatgtgagttgatttgaatatagattagatgaaggggttgggggaagatagtagatatgaggttataggtatggggattataaggtgtaagttatgttagggagtttgaatttgattttgtaggaaataaggaggtaacgtatttagttaaaattattattattgttatgttaaaatatgtataatataaaatttattattttatttatttaaaagtgtttatagtagtgacgtgtagtattttaataatattgtgtaattattattattgtttagttcggtataaattttttagttgtggagattttgtttgattaaagattattttttttgtatttttaggaagagtgtttgggattgaaaaatttttgtttggatttagtttttagttatttagaagttggtatgttatgatttaaagagtcgttcgtttggaatgaagatagtgattcgtaatttttatttgaagagtaggtgtttggaaaatgttgttagttcgtaggaaaaagttgttattgttgttgtttgtgattaagaggatattttattttttgaaataattgggggtaaattggtttttagataaggttttagtttttatttatgtgaggaaattagttttggtaggttttatgtataagaatataggataaggagtagttttttttattttatgtaatttttagggattttagttttttttttttggagtaagaaagtgaagtgacgtggggagttattaggaataatgtttgttttattgtgttttatggaatttggaggttttttagagattttttagaagtagatttagtggttagagtaaaagttgaggagtaagttgtgtttttttttttttaggttttattttaattatagaagttttatttgtattagttttatatattagattattgtatgaaattatattttgatagatgattatttttaaaaaatatataaaaattaataaattaggttatattaagttttggttttttttttattagtgtagtaaataattttattaaggaaaatataggtgtgaaagtgttttgtaaattgtagaagggtatgtaaattttaggggttgtaattaggattattttttttagaagcggggattattttgtttgtttgtttttcgatagtttggtgagggattgaggttatttgtttttatattataaatgatttattttaaataatagatttggtgatttattgagttaaggtttatttttgggaatttttggattatttttttgagttttttttttatttattttttattttaaagatattttgtttatattattggttatataaattttttttaaatttttagatgtttgatatttgttgtgtgttgtattatttttttttttaagttaaattatgggatgtgggaaattggaaaggaaatttgaattgatttgagttgatacgagattatattatttgggaagaatttagaatttaattagtagttttggatcgagaaagtttaggtttgagtattggtttttttttttattagaggatgatttaatttttgggagtttcggtaattttagttataaaataagggtaattagattttttttatagtttattatgagtagttagtgaaagaagatattaagattattttttggtgtgtttgttttatggtgggatttaatgatttttaagttatttgagaatagggatatgtttttttggggtgttagtatatatttagtttttagtttttaatatatatattgtgttttataaataagtattatataaatgtatgagggattgttatttttttttttttttattaaagcgtataggggtgttttaggaattatatgaattggtgggaggaaatatatagataatttgatagtttttaaataaatgtaagtagtgatattttatttggggtgattggtttagggagatttgagtgtaaatagagtattatttattttggtagattagggttttttgttgaaatattggggattgatggtttttgattggtagtaataaattttgtttttttcgagtaaagaaaagttaaatttaaattaaatgtgagtaggagtgtgaaatggaaagttgggagattttgggttgaattatggaatttaaggattataaatgtagtaggttatagatttttttaaagggataatatttaattattttacgggatagttttttagaaaaggaatgatttggtatagtaaagaaaaaatgatattttagttaaattttaatttttaaaaaaatttatttttagtttatatttatagtgtgaattttatatatataaatgagtagtggtgaaaaaagtttttgcgaaataattattagtaaagtttaaataaattagtagttgggaagtaatttttatgaaaaataaataatttttaaggattagttttaagttaattaaatgtgattatagagttgagtttttaggattaataaggtttttaaattatggtaaataaagaaattggtgtggttgttgtattttggaagttttaaggggagagatgtaattggattttttagatagatttatgttagttataaaatgggttttacgtagatttttggaggttaaaatagtatgtagataggataatttttagatttggatgataataaatttagaaatgtgaatttttgat

SEQ ID NO: 33 - DNA, 7913 bp, Artificial Sequence
  chemically treated genomic DNA (Homo sapiens)
tgaatttttgggtttaagaaatttttttttggtttttaaaagtgttgggattataggtgtgagttattatgttttgtttgaaatttttaatataaaaaaaattgttagatgtggtggtttatatttgtaattttagtattttgggaggttgacgtgggtggattatatgaggttaggagtttgagattagttaagttaatacggtaaaattttatttttattaaaaatataaaaattagtttggtatggtggtatgtattcgtaattttagttttttcggaggttgaggtaggagaatcgtttgaattcgggaggtagattttgtagtgagttgagatcgtgtcgttgtattttagtttgggcgatagagtgagattgtgtttggaaaaaaaaaaaaagaaagaaagaaaagggaaaaaaaattagaaaaattttaattatttttattttattttttatttttgaaatggagttttatttttgtcgtttaggttgaagtataatgatacgattttagtttattgtaatttttgttttttaggtttaagtgagttttttgttttagttttttaagtagttgggagtataggtatgaggtattatattcggttaatttttgtatttttagtagtgatggggttttattatgttggttaggttggttttaagttttcgattttaggtgtttttatttgtttcgttttttaaagtgttgggattataggtatgagttattatattcggttagaaaaattttaattatatttgaaatttatttatattattataagaaatttatatatattaatgaaaaaaaaaagagatattgaatttttagaatttaattttaaattgtttataatttaagataataataatagttgtaaatgtattatttacgtgtttgtatagttttttatttgaaagttattattaaaagtataaagaagttgttgttgaaatttttaatttgtatagttgttttaatatgaaattataaagaaaaagttatgattatgaaattaggtttaagttttttttaattttaaaaatattttatttaaagttttatttaaattatttatttttaatattttgtattttattgtttttttttaataaaaaataatatattttcgttaagtgatttatagttatgtttttaatttattgtagttattttatttataaaattttatattttatgaatataaaaaattgagaaataatgttttatattatattaattagtttagagtataattgtggttatatcggttaatgggttaatagggttatttatttattgttaataattttttttttgtgagtaaaataatttggatttttaaattataaattataaatttattaatgttttaatttatgagatggagtaagtttttttaggtaaattgtaatcggttatagttttatttgtaaatgtattttgtttgttttaaatagtttttagagagttgtttcgtaatgtgttttaggattatttttagaataattttttatggttgtgtgtattgtggtttaagggattttttattggtaggtttaaaatttatttagttcgtttttagaagagtaggattgtttttgtaagtttgtataaaaaataaaaagttagattagaaaaatgtaaggagtttaggtaaggtggtttacgtttgtaattttagtattttgggaggttgaggcgggtagatcgtttgagtttagaaatttgagattagtttgggtaatatggtaaaatttcgtttttaacgttatttaaaatataaaaattagtcgggtgtggtggtatgcgtttgtagttttagttatttgggaggttgaggtgggaggattatttgagttagggaggtggaggttgtagtgagttgagatcgttttattgtagtttagttagggcgatagatttagaatttgttttaaatatattatatatatatatatatatatatatatatatatatatatatatatagggagtttatagattttttttttttttttagttgtttttttttttttggtttttttgttaaaaattttatatacgtttttaagtaaaattttttaatttattttaatagatgaatttgttttggattaagttagaagtaagagagaattttgttagattagttattttattagttttttaaaatgtagttatatttgggagatttttgtgtaggaagtaaggttaataatgtagtttttagaagattaggtgtggttttaatgagtttatataaggcgggtggggaggggagtggttttatggttttatttttaaaattcgtgtaaagattattttttgttgtttaaatacggtagtagagaaagagacgtttttgttttttacgttataattagaggtaataatttgtgttaatttggtttttagcgaaaaggttaaaagtgtattgataatttcggttttagttgagattgggataattcgtttgagttagtgttaaattttatttattcggcgcgtaagcgagcggggttttttttttttaatttcggtttaggttgtttttgtcgggttagtgttgtcgggttggtggaagttgttttttttttttttaagattagaaaggcggagggtttaggaaggggtttttttttaggtgtaagggattgtttggatatttggagggaatggtaaagttttgttttatgaggtgaatgaatataaattaaatcgttttcgtatttaaaataatttgacggatgatagtgtttatttagttaatcggttttcgacgttggatttgttatttgggtttgttgtttgcgagttaaggttttgtaaaaagtttttggtttgttattttaattaatttattttttttagtaatttttttaatatattttcgggttgtattgtaatttattttttatagtagaaatgtggagggttttagagaaggtataaggtaaattttttttttaaattttatttttggttggtcgcggtggtttacgtttgtaattttagttttttgggaggttgaggcggacgaattatttgatatcgggagtttgagattagtttgattaatatggagaaattttatttttattaaaaatataaaattagtcgggcgtggtggcgtatgtttgtaattttagttattcgggaggttgaggtaggagaatcgtttgaattagggaggcggaggttgtggtgagtttagatcgttttattgtattttagtttgggtaataagaacgaaatttagttttaaaaatttttttgttttattttattttttaaatttgagataaggtttcgttttgtcgtttaggttggagtgttatggcgtaattatagtttacggtagattcgaattgttgggtttaagggatttttttattttagttttcgaggagttaggatgatacgcgtgagttattatgtttggttaatttttagattttttgtagagacggggtagttatgttgtttaggttggtttttaatttttgattttaagtgattttttcgtttcggtttttaaagcgttgggattataggcgtgcgtaatcgcgcggaggtaatttagaaattgtagagggagtacggatttgggtattgggaagaatagggcgtggatttggagtgtgatcgcgtttgaatttgggttgtgtttgggatattttattttttgggtcgtaggtggggggggagagagagagagagagagagagagagagaggatgtcgattttatatggtttttagtttttcgcgttttagtcgaatgtttggtttttagtgggtgtttgatacgtgggaaatgtagggggagggggtggcggggtattgggaatgtttcgtagagtggatttcgggagagtggcgtttttttttagaattttttttcggttatatttggagtaaaagtttgatattttagaaggaaaattttagatgagtagttaggattgagggttagcggtaggcgggagcggggagatagtataagtacgttttttaatgaggcggtgtcgtaaaataattaattttaataaagattgtagagaagaaaattaggttttgttggcggagtgtataggtttttagtcgagcgtttaataattaggtttcgggtttattttgtcgtagttttttggaaatttttaagttggaatgtgtgcgtgcgtattacgggttattgttttttttgtgtgtgaatttgaagcgaaatttgggcgaggcggggtcgtgttattagtaatcggatttatagtcgcggttttaagaagtttcgaagttttttcggtttttcgtagtattgttgggagggtatacggcgtttttgtttttattttagagcgtggggcgcgcggaaaaaggtttggtgattgtttttttcgtcgtttttcgggagcgtgttttttcgtcggattttgggattttagagaagcgtcgagggcgcgagtatattaagatatacgattttttttggggatcgggaagggtataattattttttgtaatttcgttattaagacgttttgggttattaggttcgggggaaaattcgttttcgttttaggttttcgattcgggtcgtagtttacgtttcgcgtttttttttgcgcgtcgttttgtttttttttagtttcgtttttagtttcgttcgggcgtttagagggtaaatgaggggcggcggggtggcgggtgggggggagacgcggaattttttagcgcgggggttttggtttattttgtaatcgggtagtttttttttgtttacggagagaaaggggaaatggaaaagtcggggaggcggtggttggcgttcgttgcgtcgtttttgggtaggtttagacgtcgtgagttaggggtagagtagggcggtttgagcgtgcgggcgacgcgggttttattcgttcgtttcgttttggattgcgcgttacgttttggggttcggcgttttggtttttgtttttgtcgttgtcgtcgtcggattttagtggttcggcgtgttcggtttttataggtttgtagttagtatcgtatcgaattttcggggggtcgcggttggagcgttcggtcggcgtgggagcgttaaggtcgtaggtaatttagggttgggggttttcggcgtgtttttcgggtcgcgtttcgtttgggtgtttcggggatttttatgtagaaatggagggtgtttttagtagaggggaaaattttggcgtgggaagaggtgggggcgtgtttatagttgcgttcgcgggtcgtcggttgtattaggtatagttggaaagtattttgcgtaagggttttacggggtgtagattcgcgattttttttttttttttttttttttcgtattcgtagcgttagggtagtgttggtttgggtagtgcgcggggaagcggggattcgttgttattgcgtttttcgttgtcgacgtcgtttggacggtcgtattttttttgttcgagattcggtgagtgtagttcggaggttggaggattcgatttttttaaatgttgggtgttttgataatttataagttttttaggtttttttgatttagagaattaggaggaaaggagtgggagtgtgggttggcggagtttagagatttgtgaatggttggaattaaatttaagtttgtaattcggattttattttatgattaaagaggttatagtagaatacgaaggttgggtttttggtttaagaaagaatattaggagaaaaaaaaagttatttttacggaagttgttttcgagcgatagtgtatgattaggattttgaaatttttttagttttgggcggagaaggacgtttagggattgtttttatagttaataggggaaggttatcggttgtttgtaagagagaaacgttgcgatgtttgtttattttatttttgggaagataagattaaaggttgtttttgataaaaaatagggatagaaaggtttttgtagttgttttatatatttgtggtttgagtcgtttgtgttaaggagagtgtaatttatttttagttgacgtttttagttttttgcgacggattgaggtttgtgtgtaggacgtttggtatacggtttatgaggattttgtcgtgtaaagtaaatgggaacgttgaggtatgtagaggttttgaagtagagtgtcggtttttttttttatacgtttgaaacgtataattcggggttttttgagagtaaaaatatagttagaaatgtgttttgagggagaatgtattattttggtatatatatgtatatatgtatatataatttttaaattttttttgagagggggttttatttttgtcgtttaggttggagcgtaatggcgcgatttcggtttattgtaatttttatttttcgggtttaagcgatttttttgttttagtttttcgagtagttgggattataggcgttcgtcgttacgttcggttaatttttgtagagatagggttttattatgttggttaggttggttttgaatttttgattttaggtgatgtattttttttggttttttaaagtgttgagattataggtatgagttattgtgttcggtttaaaaaaatattttaaatgagaaataatataagtaatagttattttttgttaggtagaagtatatgttgttatgttggttatttttatttatatttgttaggaaatatttatattttgtttttgtatatggaggtagttaagagtattatgttaatgtttaggaagagaattttttcgtgattttattgttgatttttgaaataatttagtgtaattaattttgattgtatttgtatatttttttaattttaaaagttggtataattttttgtttggttaggaagtaggaattttatgaggatttttattgtaaattgtgttaagggaaaaattattttatattaaacgtttttattgttaaattagaatatttttataatttgaattttttttagatgggtatagattatgaataatttagaaattattagtatattgtgtgtttaattaaggttggaaagtgttgaggttttttgtaggcgtagttagtaggcgaattggttagtagggtttttggggaacgtagatttgcgtgataggggttttgtgttgttaaggaattattgtaggtattgagaaaagttttagcgttagatatttttttatttttcgggttttgttttttttttttttttttttttaggtaatttatagtttaggggtgtggttgtgtgtgtttaagtttttgggttttatatataaatgtttgagatttttttgtagggtttaaaaattaatattttgttttatagtttttttaggatttgttttttagaatttttagtttttataggaaaattttttaattaaaaaaataaaagaataaagaataaaaagaatattattattattataaaaaaaaaaaaaattttttaaaatttgtttttttagattagtagagtgaatttgaattgtgtggatttttttttttttttttttttgagttatgttagtattgagaattttttttttttttgttaaattatttgtttgataaataagtttaggagatttggatttttttaatttttgaggttttaaattaggttgttttttttttaatttttgtgtttttagtaaattcgataagtagaaattgtaattaaacggtttagtaaaatcgaagttaaatgtttttttattaatttaagaagttgtttttttaatttagtagattttaagaatttgaattataatttttttcgaagatgtataagattttaggaggggaagttgtttttttattttagattttacggtggtgataatagttatgaaagtattttataggtttttgttttttttttttttttttttatgttttgttttaga

SEQ ID NO: 34 - DNA, 7913 bp, Artificial Sequence
  chemically treated genomic DNA (Homo sapiens)
tttaaaataagatataaagagagagaaaaaaaaggtagaaatttatgaaatgtttttatggttgttattattatcgtgaaatttagagtgagggggtagtttttttttttgagattttgtatattttcgagggagattgtgatttaggtttttggagtttgttgagttaggagagtaattttttagattaatggaggaatatttgatttcggttttattgagtcgtttagttgtagtttttgtttgtcgaatttattggaaatatagaggttaaaaaaaaaatagtttaatttagggttttaggggttgaaaggatttaagttttttggatttatttattaaatagatgatttgatagaaaaaaaaaaagtttttagtattaatatgatttaagaaagaaagaggaaaaaagtttatatagtttaaatttattttgttgatttgggaagataaattttagaggattttttttttttttatagtagtagtggtattttttttattttttatttttttatttttttaattggggggtttttttgtgaggattggagattttaaaagataaattttaaaagagttgtaagataagatgttagtttttaaattttgtagaaaagttttaggtatttatatgtaaaatttaagagtttgaatatatataattatatttttaaattgtgagttgtttggaaaggggagagggagggaagtaggattcgggaggtggaggagtgtttgacgttgagattttttttagtgtttgtagtaattttttagtaatatagggtttttgttacgtaaatttacgttttttagaaattttgttgattagttcgtttgttaattgcgtttgtaaaaagttttagtattttttagttttaattaagtatataatatgttaatggtttttgagttatttatgatttgtgtttatttagagaaagtttagattgtgaaggtattttagtttggtaataaagacgtttagtataagatgattttttttttgatatagtttataataaaagtttttataaaatttttattttttaattaaatagaaaattatgttagtttttggaattggagagatgtgtaaatatagttaaaattagttatattgaattattttagaaattagtaataaaattacgaggaaattttttttttaaatattaatataatatttttggttgtttttatatatagaaataaaatgtgagtgttttttggtaagtgtgaatgaaaatggttagtataatagtatatgtttttgtttaataaagaatgattattatttgtgttattttttatttaaaatatttttttaggtcgggtatagtggtttatgtttgtaattttagtattttgggaggttaaggagggtgtattatttgaggttaggagtttaagattagtttggttaatatggtgaaattttgtttttataaaaattagtcgggcgtggcggcgggcgtttgtaattttagttattcgggaggttgaggtaagagaatcgtttgaattcgggaggtggaggttgtagtgagtcgagatcgcgttattgcgttttagtttgggcgataagagtgaaatttttttttaaaaaaaatttaaaaattatatatatatatatatatatgtgtgttaaaatagtatatttttttttagggtatatttttgattatgtttttgtttttaaaaagtttcggattatgcgttttaggcgtatggaaggaaggatcgatattttgttttaaaatttttatatgttttaacgtttttatttgttttatacgataaagtttttatgggtcgtatgttagacgttttgtatataaattttaattcgtcgtagagagttgggggcgttagttggaagtggattatattttttttggtataaacgatttaggttataggtatgtaaagtaattgtaagagtttttttgtttttgttttttattaagagtagtttttaattttgtttttttaaaagtgaaatagataagtatcgtaacgttttttttttataggtagtcggtggtttttttttgttaattatggagataatttttaggcgttttttttcgtttagagttagaaaaattttagagttttgattatgtattatcgttcgaaaataattttcgtgaaaataatttttttttttttttagtatttttttttagattaaaagtttagttttcgtgttttgttatgatttttttagttatgggatagagttcgggttataaatttgaatttagttttagttatttataagtttttgggtttcgttaatttatatttttatttttttttttttggttttttaagttaagggagtttaaaaggtttataaattattaaagtatttagtatttgggaggatcgggttttttagttttcgagttgtatttatcgggtttcgggtagggagagtgcggtcgtttaggcggcgtcggtagcgggaggcgtagtgatagcgggttttcgttttttcgcgtattgtttagattagtattgttttggcgttgcggatacgggaaggaggaggaagggggaggagtcgcgagtttgtatttcgtgagatttttgcgtaaggtgttttttagttgtgtttggtgtagtcggcgattcgcgagcgtagttgtgggtacgtttttatttttttttacgttagagtttttttttttgttgggggtattttttatttttgtatgggaattttcggggtatttaggcgggacgcgattcgaaagatacgtcggagatttttaattttggattatttgcggttttggcgtttttacgtcggtcgagcgttttagtcgcggtttttcgaaggttcggtgcgatgttggttgtaggtttgtgggagtcgagtacgtcgggttattgggattcggcggcggtagcggtagaagtaggaattagggcgtcggattttagagcgtggcgcgtagtttagagcggagcggacgagtgagattcgcgtcgttcgtacgtttagatcgttttgttttgtttttgatttacggcgtttgagtttgtttaggggcggcgtagcggacgttagttatcgttttttcgatttttttatttttttttttttttcgtaaatagaaagagattgttcggttgtagggtaagttagagttttcgcgttgggaaatttcgcgttttttttttattcgttatttcgtcgttttttatttgttttttgggcgttcgggcggagttggaggcgggattagggaggagtagagcggcgcgtagggaggagcgcgggacgtgagttgcggttcgaatcgagagtttgggacggggacgagttttttttcgggtttggtgatttaaggcgttttagtggcggagttgtaagaggtggttgtgtttttttcggtttttagggaaggtcgtatattttagtgtattcgcgttttcggcgtttttttggagttttagggttcggcgggagggtacgttttcggggggcggcggggagggtagttattagattttttttcgcgcgttttacgttttggggtggggatagaggcgtcgtgtgtttttttagtagtgttgcgggaagtcggggaagtttcggggttttttggaatcgcgattgtgggttcgattgttagtagtacggtttcgtttcgtttagatttcgttttaaatttatatataaagagggtagtgattcgtggtgcgtacgtatatattttaatttagagatttttaagaggttgcggtagggtgggttcggaatttggttgttgggcgttcggttgggagtttgtgtatttcgttagtagaatttggtttttttttttgtagtttttattaaaattggttattttgcggtatcgttttattaggaagcgtatttgtattattttttcgttttcgtttatcgttaatttttagttttagttgtttatttggggttttttttttagagtgttaagtttttattttaggtgtaatcggaagagagttttagagaaaagcgttattttttcgaaatttattttgcgggatatttttaatgtttcgttattttttttttttatattttttacgtattaagtatttattaggaattaggtattcggttagagcgcggagagttaggagttatgtaaggtcgatattttttttttttttttttttttttttttttttttttttttatttacggtttaggaggtggggtgttttaggtataatttagatttaaacgcggttatattttaagtttacgttttattttttttagtgtttaggttcgtgttttttttgtagtttttagattgttttcgcgcggttgcgtacgtttgtaattttagcgttttggaggtcgaggcgggaggattatttgaggttaggagttggagattagtttgggtaatatagttatttcgtttttataaaaaatttaaaaattagttaggtatggtggtttacgcgtgttattttagtttttcggaagttgaggtagggggattttttgagtttagtagttcgagtttgtcgtgagttatgattgcgttatggtattttagtttgggcgatagagcgaggttttgttttaaatttaaaaaataaaataaaataaaaaaatttttgagattgagtttcgtttttgttgtttaggttggggtgtaatggagcgatttgggtttattataattttcgtttttttggtttaagcgatttttttgttttagtttttcgagtagttgggattataggtatgcgttattacgttcggttaattttgtatttttagtagagatggggtttttttatgttggttaggttggttttaaattttcgatattaggtgattcgttcgttttagttttttaaagggttgggattataggcgtgagttatcgcggttaattaaaaataaaatttaaaaaaaaaatttgttttgtattttttttagagttttttatatttttgttatggaaaatgaattataatataattcgaggatgtattgagagaattgttggaggagataggttagttgaggtgataagttaggggttttttgtaggattttaattcgtagataataagtttaggtagtaaatttaacgtcgagggtcgattgattgaatgggtattgttattcgttaagttattttaaatacgagagcgatttaatttatatttatttattttatgaagtagggttttgttattttttttaaatatttaggtagttttttgtatttagaggagaatttttttttgaatttttcgtttttttgattttggagggagggaaggtagtttttattaattcggtagtattgattcggtagaagtagtttgggtcggggttggggaggagaagtttcgttcgtttgcgcgtcggatgggtggaatttggtattggtttaagcgggttattttagttttagttgaagtcgaagttattagtatatttttggttttttcgttggaaattaggttagtataggttgttatttttgattgtaacgtgagaaatagagacgtttttttttttattgtcgtgtttagataataaaggatgatttttatacgagttttaaaaatagaattatggaattatttttttttttattcgttttgtgtgagtttattaaaattatatttaattttttgggaattgtattattagttttattttttatatagaagttttttaaatatagttgtattttagggagttggtgaaatggttggtttagtagggtttttttttgtttttggtttaatttagagtaggtttatttgttggggtaaattagaaggttttatttgaaaacgtatgtagagtttttaataaggaggttaaaagggagagagtaattgaaaagaaagaaaaagtttgtggattttttgtatgtatgtatgtatgtatgtatgtatgtatgtatgtatgtatgatgtatttgagataggttttggatttgtcgttttggttggattgtagtggggcgattttagtttattgtaatttttatttttttggtttaagtgatttttttattttagttttttagatagttggaattataggcgtatgttattatattcggttaatttttgtattttgggtagcgttagagacggggttttgttatgttgtttaggttggttttaaatttttgagtttaagcgatttgttcgttttagttttttaaagtattgggattataggcgtgagttattttgtttagattttttgtatttttttggtttggttttttgttttttatgtaggtttataaaaataattttgtttttttaggggcgagttaagtgagttttaaatttattaatgagaagttttttgagttatagtgtatataattatagggggttattttggaagtgattttaaagtatattacgaaatagttttttagaagttgtttgaagtaagtaaaatgtatttgtaaataaggttgtaatcgattgtagtttatttgaagaagtttgttttattttataggttgggatattaatgggtttgtaatttgtagtttggaaatttaaattattttatttatagaaagaaaattattaataatgggtaggtaattttgttggtttattaatcgatgtaattataattgtgttttagattaattaatatgatatggggtattgttttttagttttttatatttataaaatatggaattttgtgaataaaataattgtaataaattgggagtatagttataggttatttggcgaaaatatgttgttttttgttaaaaaaaaataataaaatataaagtattgaaagtagataatttgaataaagttttaaatgagatatttttaaagttaagaggaatttgagtttgattttatgattataattttttttttatggttttatgttgaaatagttatatagattaagagttttaataataatttttttatatttttgataataatttttaggtgagaagttgtatagatacgtaggtaatatatttataattattattattgttttaaattgtgaataatttgaaattggattttaaaaatttagtatttttttttttttttattgatatgtgtaagttttttatgataatgtgagtggattttagatataattgaagtttttttggtcgggtgtggtggtttatgtttgtaattttaatattttgggaggcgaggtaggtgggaatatttgaggtcgggagtttgagattagtttgattaatatggtgaaattttattattattaaaaatataaaaattagtcgggtgtggtgttttatgtttgtatttttagttatttgggaggttgaggtaggagatttatttgaatttgggagatagaggttgtagtgagttgagatcgtgttattgtattttagtttgggcgataagagtgaaattttattttaaaaataaaaaataaaataaaaataattaaagtttttttggtttttttttttttttttttttttttttttttttttttttagatatagttttattttgtcgtttaggttggagtgtagcggtacgattttagtttattgtaagatttgtttttcgggtttaagcgatttttttgttttagttttcggaggagttgagattacgggtgtatgttattatgttaggttaatttttgtatttttagtagagatggggttttgtcgtgttggtttggttggttttaaatttttgattttatgtgatttatttacgttagttttttaaagtgttgagattataggtgtgagttattatatttggtaattttttttatattaagagttttaagtaggatatggtggtttatatttgtaattttagtatttttggaggttaggggaggattttttgagtttaggagttta

SEQ ID NO: 35 - DNA, 16750 bp, Artificial Sequence
  chemically treated genomic DNA (Homo sapiens)
tgttttttaaaatgatgtttagttgaattagttaatggagataaaaatatttatatataatttttttttaagtttattagttattttatagattagttataattttggttattttaatgagttaatttttttttagagatattataaattttttaaagatggaaaataattgttatttttttgaataatgtttattatttaaaataatgtatataaaagttgtttaataaatttttgttgaattgagagaaaatataaaaaattgaaagtagtttgtttgtaataagtatttgttaagttttatagatttttttttttttttggaattattgtaataaatatttgatttttgatttgtaggattaaaatgtgattttttatattttaataggagtaagtattagttttgtaattttttttgttaatagaataaaaatggaatgtatgtttgttgtttttatatgtcggttgatatttatgttgaatattttttttataatatagaggtttttttgttttttgttttgcgttttatttttgtttattatagagatattaatgatgttatgtgtttttttgtattattagtgtagtagtttttattatgttttttgtttcggttttattgtagtttaattaaataaatggaaacgggtagttattgaaaataaatagtaattgtaaaagttttgttttttaagaaattttttgtattgtatttcgttttgttttattgattttaagatttttatcgtttttttgtgtttagaaattagattttttagtttgttttgttttagttagataaatgttttataaaaatgatttatattttttagattgtggggagagaagaaaaagattttgagaaagtgattaaggagggagtaagagtgatataatttttgatttaatttagttggattgtgttttttatgtttttatttttttttttataaaaaagatagcgtttttgatgttttgttttaggtagttttttagggtgagtgtagatgtgttgagttatttggttgttttgaggatcggtttagagagtttttttttttattaatgaagttattttttttcggtagttcggttttttttattattttatgttggaatttggttttggtttgtatagttttgtcgtgatgtagatggttttttagttaagttttagagaaatttgtttaattatgaataggatatttatagtataggagaaaaaaaaatttattaaaataaatattttattgtaatattttgatttgggggttggagagtaaaaatttaatatttgatgtttgggaaaaatttaatgttttatggttttttaaggaaatttgtttgtgtttaatttattagagtaatttatatatttcgggttaaagtataatgagattgttattattattttgttttttgtaagattttttttttaagaataaaaagaaggtaataaagattttgtatttttgttttttttagaaagttaaagagaatttaaagtgttggatgaaatgtttgtttttaatttgtagtgttttatttaaaaaaaaaattatgatataattttagaggataggttttttttttttagggtttttgaaagttaaaagtatatttttaatttgtagtattattgtattatttagtgaggataatttgtttagttgtgtttaggattagttagattaaggagttgaaattaagttttttttgaatttgaatgggattggaattttgttatttttagagtagtaatagatgatgttatgtttaagaatattttatttgattaataaaaaaggagaagtttgaaatgtaattttaaagaattttagaaggaggtttagatgaagataataaaattttttggagatatatttgttatttatattttttttttttaagttattggtttgttgtttttgagtttagttaaatttttaaagataagattaaagtaaggaagtaaggtatatagtttttggtttatggttttttttagatataagtattgtgaatgaagattttgttttatttatatttgggattttggagtttttataaagaatatttttagtataaggatgtgatttaaagggggatttatagaataatattttaattattgtttgatttatatttgagtgtaatggataaataaatataattttagttataaaatttgaaaaatatatatttttttatttaaaaatttttgatagttttgttaggtattggagaattagaaataaatgtttttttatttttttttttttgatgaaggaaagttattaaaaatagttatatagaaataataatataattgtagattttattttaaatatagttggtatgttttttttttttttttttatttattttttattttagatagttagaggggaaagtttgttttagagatagaaagaagatatttatggggtataattttattttagttatttgatagtttgaagaagtatttaattttttgaataataatgttataagttaaagaagagaaaagataggtagtttaaagttttttaatattgtgtatattttaattttttaagttagttttgagaaagtgtttttgttttgtagaagtatttggttaagtgttgtgaagtttattggtattaaaagaaattaaaaattttggaggattagagaattaaatttggtaatataaatgaaaatattttagaatgtaaaaagtatttaatttattatttttaattatgttttattatatatagatggtattatttatagtgaatgttaattattaatatttttttaaaaatgggtattaatttgttattagttgtttgtttttgatttagtttttttttgttgaaaggttttatttaattgtattataaagggataaaagggtaaaagataataagttttttagattggtagatttgttatttataaaatggttttgggtaggttatttgaattttttgaaatttaattagatttatttaaatttaagaatgagaatataaatttatattttgaagtgttttatagaaaggtttattttaatgtttggagtatatattttaatgaatatttattttattttatttttttttatttttgaattaagtaattttgaatttaaagttgttatgattagtattgaaaagattattggattattaattgtgtgattttgggatagtaattttttgtattttagtttgtttatatgttatatatgaaggttgaagtttgattttgttttgtgattattattttaaatatttgatgaaattaaattttagtgtttggaatggtagtataataaatttattaagaataaataatttattgtaaaaatatattgatttttaaatgatgtaattgatagttatattattgtagagggttgataaataataaaagaaatgaaagatgtatatggtgagaattgaaattattttgataagttttttatttgtttattatttaaaattaatgattatgttgaatgtttataaattataaaatataaaagaaattttataaatgcgtatgtataggagtttaagttattaaaagttttaaagtataagtttaaattaaattaattaaagaagttgagaggaaaaattggtttttatttttaattattattgttttgaggttttatgtttaatataattttttaagtagaggttttagagagaagagttgtgaggatatttttatatttgtgtagaaggaaaagtttgttatttattttagtatttttagtgttatattgatgtgtattttggatttattttgtttttattgtataaatttatatttgattttaaagaaaaggaaaatttaaagttttttttttttaaggggatagaaattttttgtgttaattgtttgatttttttttttgtaaggttttattggaaattttttgtaatataatgtaggggatttttttatgtgttgatgttgtttatatagtggggtgggtttgattgaagaaaaaaaatcgtatatacgtatgaaagattatggttttattttcggaaagtatgaaaggtgattgatatttttaagaagtttttgttatttaggaaaattattaaatattttatttagagatatttggaaagattgaaggaaaggaagaacgaagaaagtagaatttagatttatgtggggagagatttgtggtagaggaaaagtattttttttgaattcgataagggatttgtttgggggaattttttgtttagttttttattattagggttttttgaagtcgggttttttattgggtagttttttgggagtgtagtggggaatttttatattttttttttaggttttcgaaggatttcgtttttttagtgttttttttaggttggtaggagttttgagtttgatatttttttttgatgggataggtaagttttgtgggcgcgtaaatacgttgtaattaagttttttgttgattttatagttttgtgtgttttcgagaagaagtgatcgtatttaattgtttattgttggtttgttttttaagagtttgggggttttttttttttaatttagaattagttgtacggggggcggggaaatgggggtggggaaggagtgggagggtagtggttttcgcgagtagagcgatgttattgagtgagtttttgaatggggagcgttgttgtttttaagtcgattggtattttttgttaggaagaaacgttaagaggtgggagtgtttggggagggaggtaggcggtttttatcgtaggcgcggggagttgttttttcgttttttcgtttgttttttaagtttggatttttaggagtggttgaagttgcggagcgtttttggagtttgtgaatgaattttttttttttttttttttttttttttcgttgagtttttttttcggttttgacggtatagtgatataatgatgatgggtgttataattcgtatttgaatttgtaggcgagttgtttcgagtttttttggggaagaattttaggcgtgcggacgtaatagtcgagaatattaggtgttgtggataggagttgggattaagattttcggttagtttcgtattttttcgtattttttagtatcgtttcgtatttttcgtattttttttcgggttattacgttttttatgtgattcgtttgggtaacgtcgaatttagtcgcgtagcgttgtagtgaattttttttttaaattgtaataagtcgttttttaaggtaattacgttttttttgttttttttttaaaaaataaaaataaaaaatttatagaaaaaaattcgcgagtttagaaaaaagaagtaattggtagaaggttttaattaaggtaaagagttgtaaggcgaagttaagaaaatgtaggtatttaaaaaatgtaggtaatttttataagggtttttggggagaggtatatagagggattttggtgttgaaaaagatttagataaaagaaatttagggtggggtggggggtaaaatgattaacggaattgggggaagggagggaataaattgtaaagaaattatagaaaagtggtgggtttttgagttggagagaagagagggatttttggtattttgatttttttgttgttgttgtttttaatacgttcgaggtaaaagtttgaatggggattattaagatttgttatagataagttttcgaagtcgttttggtgtaggttatttggttttttagtttttggtgtgtggttagtgtttggtgtttttggaaagttattttcgggtagtttttgatagtgcgattcggcgtttaagtagtttgggattttgcgcggatttgatttttttagatcgtaggtagtttgggaggaggttcggtcgggggaggtgtaggattttcgtcgtgtttttttgacgatttggggattgttacggttttttttcggcgtttttgggtttttttgttttgtacgcggtgcgaaggggttagtagggaaggagtagaggatggggggtggggttgttggagtttcgcggaggtttgggaggtttttgggcgggaaaagtttgttttgaatcggtagggatgtgtaataattttttttattttgaagagtgaaatagggtttgtcgtttttattttaataagtaaatcggtatttagagcgtattgtagataaaggtggttcggggattcgaattaggggtttttgggttagttttttcgtttagattataggagtttttcgtttttttatatattttttatttttttttagtttttcgttttagttgagtaattttattggtaggtttagcggtagcggcgcgcgcgtgtgtcgggagtttcgggggacgttttcggttggagcgttttatcgttttgtagaggcgtgggcgttgtagggcgatatttttggtgcgtgtagatttagggtattcgggttgttttggttcgcggtttgtgttattgggcgtggagcggtttgggtgttaggtagaggagagcggggtagaaaaatagtgttatagtttaaattatttgttttttaatttaattgcgtttcggtaagttttgtatgtttttgggagatgttgcgggaagggggagaaatttatacggcgtttggagagttgttttgtcgcgcgtatattcgcggtagagtttttttgggtcgcgttttttatttttgtgtttttttttgtttttattttttttgttttttttttttttttttagtttttgttttttttttttagtttttgcgtttttttttttatagttgataaatgaatggttagtgtgaaatttttgtttttttcgtgttttaaggtagtagggagggaggagcgagggaggcggtgcgttttttcggatttgtttttagtttagtttataagatttgtagaatttagatgtttaggaattgggagttttgcggcgggtgtgggcgttttttgatggagaagtttcgtataggcggagaaaaataagttttttagattaagcgagtattttttataattttgtgtttaaggatggaaggttttagtttttttttaagttatttattttgtattttataatttgcggcgtatatttaggagtttggaggattttgaaaaaaggttttggtttgtgtaaagtgtagagatgttttttcgcgagtcggttggaacgtacgcggcgttttgggtttagttcgtcgtttagtggacgaacgtatatggttagggtggagttaggtttcggaggtttagacgcgttattttgggcgtttttaagaaagataatatatatatcgtgtttttaaaatttatgattatttgaatttaacgttagggtttcgttttaggatattgtaaaagaagggtttttaatttaaaatttaaatttttttaattttagggcgggcgtcggacgggaaagtggagagaaggcgggtagtgggaggaaaaaagaaagggaaggaagggaagtggaaggaaagaggatcgtggaggggaggaaaaggagaaaggaacggagatggggtagatggtatttaaatagttaggaacggatcggaagggttcgtttcggggtttgggtttgaatttcgagattcgttttaggatattttttttttttttttagcggtaataaatgtgattgtagaggcgtgtcgggatggaagggtgggaaagaattagataagcggaggtggtttagtttcgtttaaaggggttgggtttggggttcgtttttattcgtttatttcgcgttaagggaggattcgtaacgggcgtttttcgtagcggttgggttagttagtcgttacgtgggttggcgtttcggtttttagtcgagacgggtgtgattttttgggtttagagattgtagtatagtcgtataggcggtcggcgtagtcgaggtttttatttatcgaggttaatgggggcggggcggggaaggtagggtttagtttaatcgagagagtcgagtggtttcgtttttaggattcggggtcggttgtttttggagttgattcgagttttatttagatagcgttgaatatttttattaaaaggttatttaagttttattttattttattttatttttgtttgttttttgggagtggtaggaggggtatcgtgtttttgttttgaggtaggggagaggttaaaatttattttaagtaaattttttgttagaaaaatgagattttatatcgtattttatttgttgattttttaaatatatttaggttattttaaagtttatttttagttaattaatagattaatttcgttttagattgttataaagagttcgtttggaatggtaaatattgttattcgataagattaatagaattttatgggggtaaatatggaagggttgcgagtgtaattgaggtttttgtgttttaatgaggaattttagcggggatttggcggggattggaagtttagtatttatttagggagtgattgagttggaaatttggagaagtttggtgtagacgagacggtgttttttagagttgtattttaagtttttttattttgttgtatattggaagaattggattttaaagattttttttattattttagattttgtagttaatagttacgtttttttttttttgtttgttgaaagttgtgatttaattgttttaagtattttttgataatttcgttaaatttattttgaaaatatttatataaagttttaaaataggatgttgtgagtgtaatataaaaataggaaggtattaatggaagtaataattagtgttttgagatagaagcggtttttagtttgtaatttggaaatgttaagagtagtatattagggagaaggtttttaagagtttgattttttgttttgagttttgagtaaagaaagaaatatgttagaattgtattgtttgttcgtagtaatattgtaaagggttttaatggattttaatgtgattgagtaattattttttttagtattaagtttatagtttttaatttttttgtgagaagattaggtaggaagcgggatgagatttaagataattatttaggatttatgttagaatttaaagttttgatttttttggtagataaaaatagagttggttttaaattgtattttttgtttttaaaaaaacgaggtttgaaaggaatttttttagatttatataggtttatagatgtaagttttttttttttttttgtgtttgtaaattggagggagatgtttttgatattttagaatatttgtatttatatatttgtaaattttgttaggaaaggatttaaatagttaaattaaaggtgattatgattaatgttaaagatattatttattgtttttttttttgttgtattattaggtttaaatattttggagttaatgattggttatttaattgagtaatagagtttttgagagcgtaaagattaattaattttgttttttaaagtttggtaattaagttttttttttttggtgagatttaaatatttttgttgacgttatttatggataaatatcggtaaatattgtatttaaaatgggatattgttttgtgatggagtagaattttttaagatatatggtttttttgaaagaaagaattaatgattgtagtaaggtatttttttattatttacgtagagaaattagttaggattgataaatatttattgttgggagttatttgttttggtttgagaaaatatgttgattgttatataggtttgtattttattagaaaatataaagtatgtattttttttgatttggaattagaaaagggggattagatatggatgttttggttaagttttattttaattagtgaatttttgttagtttttttttgtagtttagatttggtaaattatatatatataaagtttgtgtgtgtgtggggggtgcgtgtgtgtgtgtatgtatatagggtttttaaatattgttaagtttttattattgaatgtgttagaggtggttgtattttagaggttagtatagagaatttttgtttaatgtgttagttttgttttttgaaatatatttttgggtagatttattaattataaaaggatataaatgtatatattttttatatttgtatatattttattttatttttttaaggattttaagaggtgtttatgtttataaaatgagattatatattttataataaatatatttgataaattataatttttttattattaaattattgatttgatattatttgaggtatagtggaatgagtattagatttggaattagaaagtttgagttggatttattagttgagaaaattaagtaaagatattatttttggatttttagtgttataatttattaaatgaatatgtagttataaagattaaaagagtaagtattttgaaaaattatataaaaaagggatgataatatattatgttttgggatttatattgatttaattttataattttaataataattgtattatttaagttatgtagtttttattgaatttataaaataaattagagaggggtatattgttttaaaaattgtttagttttattaattagaagataggttatagaaattgattttaatgaagttggatatttagtggaaaggaagaattatttaataaatggttttaggataattgatgggtttatgtaaaataagaattagtttttatttgattttttattttaaaagaaatataagatgaattaaatatgaaatgtagggaataattttttataaaatgataaaagaaaattatgggattaaaaaaaataagttaggaatagagaaatttgttttaagtaaaatataaaatttagtgttattttaggaaatattgataggtttgattaagtaaaaattatataaaagtaaataatatatttggaaaatatttacgatatttgagagataaaaagttaataatttttgatattttatggatttttatgaataattttgaaaagtttatatttattaaaatatgagtaaaaattatgtataggtagtggtagaaagagatatagagttttaaaattatagaaaaaatcgtttagttttatttgtaattaaataaatagtaattaaaatattaatgatatgttatattatttttttattaattagaggagtaataaaaaaaaataatttttttttttttttttttttttgagatggagtttgttatttaggttggagtgtagtggtacgattttagtttattgtaattttcgttttttaggtttaagtaatttttttgtgttagtttttttagtagttgggattatgggtatttattattatgtttggttaattttcgtgtttttagtagagtggggttttattatgttggttatggtagttgattttgaatttttgattttaagtgatttatttattttagttttttaaagtgttgggattataggtatgagttattgtgtttggtaaaaataaaattaaaaagtttgatgtaagtttgtgttggttaggttgtggagaaattgggttttttatatattgttgtatgaaagtaaataggtttttttattttaaaaaataatttggtaattatttttttttgattttttattaaaagtttttaaaagatgtatatattttttgatttagtaattttatttttcgatattattatatggatggatattggtattaatattatttaagataaatggataaggatgttttttgtagtattgtttttaagagtaaatatttggaaatagtgtaaaggtttattatagggaattatttaaataaaagttgttgtatttatttaatggaaaattatgtagttgttaaaaataatatggaaaaattgtatttgttgatttggaatattttttaaaatatattgtattttaagtgaaaaaattgatagataaaattgagtatatattatatatttaattatgtaaaatgggtgtatatttatttttttaataaatatttattgagtgttttaggtattgtggatataggagtgaataaaatattaaagattgttttgttggaatttttattatggtaggtagagaaaggtaatttttaattatatatgtaaaatggtgatatgtgttaggatgaaaatagagtatgggaaagggaatagagtatagtatgttttaggtagagtaatgagaaaggagtttattaggtagagaatagaggagtgttaaggggcgataatgtgaaaaagtttagttaagtttaggtttaggaatttatatgatgttattatttgtatgaagtaaatttatgaaattttatatttaaattacgtgatttttttttgttgtataatgattttttttgtgagaaagaattagtgagtaatatgatatgtgatgtttattatatttattttgtagttgaagtattttagaaagttggttgtttagggtatttaattagtagaatggtggataaaattatcgtgtttttgtttttaagttattttttgttagttgagtttttttaaaattaagggagaatattaaatatttatttaatagaattttggttttttttcggaggttgtttatttttggtgtgttttttattttttttgtagatattttttatggataggagttttattgattttgttttttatgttttttaggtaattaaatagttttagtattttgtatttggattgtttaatgatttttttttttttttattgattttattggagtagaaggttaaatataggtatttatttttatattttttaggtttttttatgtagatagagttgttattattagtagacggtgtttataagagagatatggaaaagtggaagaatggaaatagggatttggagtggtgttaaaaataaagaaagaggtttttgaaagttttttatttaatatgattaaatatagaagataaaagatgtaatttaatgattaaggatagggatatagttttgagaaaattatagaagtggaatgaacgttttggattttaaagaagagggaatggaaatgtagttttgaggtagttaaagttaataaagttttttgatatatttattgtagaaataaatgattattttttaatttaaggtttgtaaatttaggtgattataggggcgaggtatggagtggaaatgggtaagagattaagtgggggtagtaatggttttgagtatatagatttaaggggagagattgttgtttggttaatgtttatgattagttagttgaaatatagatttagtgttgttagattttttgattttttgaaagaagttagagattttatatttagtgtaaatagtttaatttttaaattgagtaatttatttaaatatatttatgtaatttatttaaatgtatttagagtatgtttgattttttttttgtatttttatttagttttaggggtaattttaaggaaagtgatgcgtatatttgttgtatttatgtagatggaggattatttttttttttttaataaaagatatttttataaggattgagtgtggtataaagagttcgatttttagtatttaaattgagtaggaaatttaaatatagaagatttttttttgggttatatttttggtttttttaaatgagatttgattttttagatattgataaatattatattattgggttatggtaaatttttaagtggattgatttaaaagtgtttaaaagtattttaggtgttaaggaattgttggtacggagttttaaaggtgtttttgtataagaaatagaggcgttgattatgtatttgatttataaatattttttaaggatatattttgaatttggtaatgaagaaatattgtgggaattattaagttgaataaagtattagttttgttttttagaagtttattgttttatagaggagattagatatgtttatagataatttgaagtatatagtaataaattataggatgatttattttaagtataaagtgtatattgttattatagtggtaatttaggttataatttttaaatgtaagagttttaaatattattttttttatttttagtgatatgaaattatgttagaatatttgtagaaagtttgaattagtaattttaataataaatattgagtattgatatattgtatattattgagatttattttatatatattattttattaatttttatgattatttcggtaagtattaatttttataattaagtagtgatagaaaatgaggtttagagagatatagtattttatttaaagttatagaatataagtagagaatgtagaatttgtattttgggttatttgatagtggagtttagatttttaaaattaggtttataaagattttttggaaaaaaagaaaaataaaaaatagagaataaatttttttgaagaaaagtaggaaattattatttataagtataattaaagagagatttttaattttttttttttttttttttttgagacggagtttcgttttgtcgtttaggcgtaattttagtttattgtaatttttatttttcgggtttatgttataaagaaaggttttttatttggatttagttaatatttatggaatgtattttttttaatatttttttattataaaatataattttttattttggttgtgtaattgatatttttatttttttttaaaatattgtaatagtatagatatatggtatatattttttgtttgttgtgttgttttataagaaatttagaaatatagaaatattatggtattttttagttagtgtttaataaagtttattagtagattttagtgattataggataaataataaatttaattattagggttaatttaggattattaattatatgttttttattgtgaattattagttggtttatagatggaaaatataagatgtataatgtattagtttaaaaaatgttttttagagagtgtttagaattatagaatttaaaaattttgttttgaaaaggtttaatttttattttaaaatatataaagaaattaaatgtaaaaaaattaagagaaaaggttttaattaattaaatgttgtataattttaagttttatttatgtttaagattagttttgtaatttatgattaattttagtattagtttgtttttaatttaggtttgttaaataatatagaattttttttttaatgaagttttttagggttttagttgaaaaatatatattagttaggatgtttttaattgtaaggaataaaaagttacgattttattgggtttaaataataatgatatttataattttatataaaatgaagtttaaaggtatggtttattttaggtttaatttttaaggatttacgttttgtttttgttgatttttttttagttttatttttagaggtattttatttatttatggatgtaaaatttttataatagttttagtagaaagattttagtatgataatgtttagggaagaaaattgattatttttttttttgttttttttttaggatgaatttattttttttagggattttttattggaggaagagatttttttatattttattggttaaaattatattatatattgttttaaatttaattattggaaaagggaatggtatttttataattgatttaggatattaagattattttttgggttggggtttgatttaggattttttaaagtatgtgattgagggtaggtattagaatggaattagagttgtgttagaaaggagaaacgtatggttattatagaatagttttaaatgttatcgaggagggtataattgtaaaaattaaataattttttgttatttttttgaagttggtattttgatttttagatggttttttaatataggttttttttttttttattattatagttgttttgaaatttgagttggaagggaatattttgagatttagattgttaaatgttttttttaaagttatgtaataaattaaatggtaaagttagggtagttttttgatttagtatagggtatttttttttattttttatttttgagacgttagaattgttggtattgttttaaaatttatggtaagaattggttatttttgtaattaatatttttttataatatatttgttttgtttgtttagttagttagaaattatatggagtttgtgttttaaaaagtttgtcgaagtttttattttttgttttggtattatgtgtatgaattattaattggtttttttttattttatatttgatgaagatgttttttttttaatatttttttttattgttttttatttttttttgttttatttatgattagttgtttgtttttaaatagattttgtggttatttatttttttttgtgttagtttttatttattagttatttgaattgtggtttttgttgttttttatatagtttatttatttgtggttgttatatatatttatattgttatatgtttttaaattgtattttggaatgattttggtaatggttgtattggatgagatttaaattaataattaaagtattgagatagtttttgttattataagtttatttttgtttttatagtttaagaggagttattttttttatttttattatttaatgtttaatattatttttattatatataatgtataaaaagtatgtgatttatgatttattttaaatttgaatgtttgtgatttattttgtgtttttttttatttttagg

SEQ ID NO: 36 - DNA, 16750 bp, Artificial Sequence
  chemically treated genomic DNA (Homo sapiens)
tttagaaatgaagaaaaatataaagtaaattataagtatttaggtttaaagtgggttataaattatatgttttttgtgtattgtatgtaataagggtagtattaagtattaagtaataagagtagaagaagtagttttttttggattataaaaataggagtaaatttgtaatagtagaagttattttaatgttttaattattagtttgaattttatttaatgtagttattattaaaattattttagaatatagtttgggaatatataataatgtggatgtgtgtgataattataagtgagtaggttgtatgaagaataatagagattatagtttaagtaattagtggataggagttggtataaaaagaaatgggtgattataaagtttatttagaaatagatagttgattataaatagagtaagagaagatggggagtaatagagaaagatgttgaaagaaagatatttttattaagtgtaaggtgagaaggaattaattggtggtttatgtatataatattaaaatagagaataaggatttcggtaggttttttaaagtatagattttatgtagtttttagttggttaagtaaataaaataaatgtattataaggaggtgttaattataaaagtgattagtttttgttatgaattttaaagtagtattaatagttttaacgttttaagagtaaagaatgaaagaaaatattttgtattgagttaagaaattgttttggttttgttatttaatttattgtatgattttggaaaagatatttaataatttgggttttagaatgtttttttttagtttaaattttaaggtagttataatgatgaggaggagaagaatttgtgttggggaattatttagaaattaaagtgttaattttaaaagaatggtaaaagattatttggtttttatagttgtgtttttttcggtagtatttagaattattttataatagttatgcgttttttttttttaatataattttggttttattttagtgtttatttttagttatatattttggagaattttgggttaaattttagtttaagggatgattttgatattttaagttaattatagaggtattatttttttttttaatgattggatttggaatagtatataatatagttttggttagtgagatgtgaggggatttttttttttagtgaagggtttttgggaaagatagatttattttgagaagagaataaaggaagaggtggttagtttttttttttggatattattatgttggaatttttttgttggaattgttgtagggattttgtatttatgagtaagtgagatatttttggaaatgaagttgagaaagaattagtaaaggtaaggcgtaagtttttaaggattagatttagagtggattatgtttttgaattttattttatatgagattataaatgttattattgtttaaatttaataaaatcgtgattttttgttttttatagttgaaagtattttaattggtatatattttttagttgggattttgaaaaattttattggaaaagaaattttatattatttagtaaatttagattgaaaataagttaatgttgaaattagttataaattataaaattgattttgaatataaatagggtttggagttgtatagtatttaattaattaagatttttttttttaatttttttgtatttgatttttttatatattttgaaataagaattagatttttttaaaataaaatttttaaattttataattttagatattttttgaagagtattttttaagttaatatattatatattttatattttttatttatagattaattgataatttataatgaaaaatatatggttgataattttaaattaattttgataattaagtttgttatttattttataattattaggatttgttaatagattttgttaaatattaattgggaaatgttataatgtttttatgtttttggattttttataagatagtatagtaagtaggaagtatatattatatatttatgttattataatattttaaggaaaaataaaggtattaattgtatagttaaagtaaaagattgtattttatgataaaaaggtgttaaagaaaatgtattttatgagtattagttgaatttaaataagaaatttttttttatggtatgaattcgggaggtggaggttgtagtgagttgagattgcgtttgggcgatagagcgagatttcgttttaaaaaaaaaaaaaaaaaagaaattaaagatttttttttaattatatttataaataataattttttatttttttttaggaaaatttgttttttattttttatttttttttttttttaggaaatttttataagtttaattttaaaagtttgggttttattgttaaatagtttagaatgtaagttttgtattttttatttatattttgtgattttgggtaaaatattatatttttttaaattttattttttgttattatttagttgtgaaaattagtatttatcgaagtgattataggaattgataaaataatgtatataaaataaattttagtgatatataatatattagtatttaatatttattattaaaattattaatttagattttttgtagatgttttaatatagttttatattattaagagtaaaaagaatagtatttggggtttttatatttgaaaattataatttaggttattattatagtagtaatatatattttatgtttggaataaattattttataatttattgttatgtattttaaattatttgtaaatatgtttaattttttttgtagaatagtaggtttttggaaggtagagttagtattttatttaatttaataatttttataatatttttttattgttaggtttagggtatatttttgaggaatgtttgtagattaaatatatgattaacgtttttattttttatgtagaaatatttttgaaatttcgtgttaataattttttaatatttgaaatatttttgaatatttttgaattagtttatttgaagatttattatgatttaataatatgatgtttgttaatatttagagagttaaattttatttaaaaaaattaaaggtgtgatttaggaaaggattttttgtatttgagttttttatttaatttaaatattaaaaatcgaattttttgtgttatatttaatttttataaaagtgttttttgttggggagaggagaatggttttttatttatataggtataataagtatacgtattattttttttaagattatttttaagattaggtaagaatataaggaggagattagatatgttttaaatatatttgaataagttgtataaatatgtttgaataagttatttaatttaaaaattagattgtttatattaaatataagatttttaattttttttaaaaaattagaaggtttagtaatattaagtttatattttagttggttgattatgagtattaattaagtagtagtttttttttttaagtttgtgtgtttaaggttattattgtttttatttagttttttatttatttttattttatgtttcgtttttgtagttatttaagtttgtaaattttgaattaaaagatgattatttatttttatagtaaatatattagagggttttattgattttagttgttttagaattatatttttatttttttttttttggagtttaagacgtttattttatttttgtaatttttttaaggttatgtttttatttttggttattaagttatattttttgttttttatgtttgattatattaaatggaaagtttttagaagtttttttttttgtttttagtattattttaaatttttatttttatttttttatttttttatgttttttttataagtatcgtttattagtgataataattttgtttgtatggaaagatttgagagatatgagagtgaatgtttatatttagttttttattttagtgaagttaatgagaagggaagaaagttattgaataatttaggtatagggtattgagattgtttaattgtttgggagatataaaagataaggttaatggaatttttatttatgagaaatgtttgtagggaggataagggatatattagggatgggtagttttcgagagaaagttaagattttattaaatagatatttagtatttttttttgattttggggaagtttagttgataaggggtgatttaaggatagagatacggtggttttgtttattattttgttaattaggtattttagataattaattttttaggatattttagttataaagtggatgtaatgagtattatatattatattgtttattggtttttttttatagaaagaattattgtatagtagagagaaattacgtgatttaggtgtgaaattttatgaatttattttatataagtaatagtattatgtgaatttttgaatttggatttggttaagtttttttatattgtcgttttttagtatttttttgttttttgtttggtgaattttttttttattattttatttaagatatattgtattttatttttttttttatgttttatttttattttagtatatattattattttgtatatgtgattgggaattgtttttttttatttattatagtaaaagttttaatagagtagtttttgatgttttgtttatttttgtatttataatgtttagaatatttagtaaatatttgttaaaagaatgaatatatatttattttatataattagatgtataatatatatttagttttatttattaatttttttatttagaatataatatattttggagaatgttttaaattagtaaatataatttttttatgttatttttgatagttgtatagttttttattaggtggatatagtaatttttatttaaatggttttttatgatgagtttttatattgtttttagatatttgtttttagaagtaatgttgtaaagaatatttttgtttatttgttttgggtgatattggtattaatatttatttatataataatgtcgagaagtggaattgttgaattaaagagtatatatattttttaaaaatttttgataaagaattaaaaaaaagtgattgttaaattattttttgaagtagaggaatttatttatttttatataatagtatatgagagatttagtttttttataatttggttaatataaatttgtattaaattttttaattttatttttgttaggtatagtggtttatgtttgtaattttagtattttgggaggttgaggtgggtgaattatttgaggttaggagtttaagattaattgttatggttaatatggtgaaattttattttattaaaaatacgaaaattagttaagtatggtggtgggtgtttataattttagttattagggaggttgatataggagaattgtttgaatttggaaggcggaggttgtagtgagttgagatcgtgttattgtattttaatttgagtaatagattttattttaaaaaaaaaaaaaaagaaaaaaattatttttttttgttatttttttgattggtgaaaaaatggtgtagtatattattggtgttttaattattatttatttaattatagatgaggttgagcgattttttttataattttaaaattttatgtttttttttgttattatttgtatataatttttgtttatattttgatagatgtggattttttaaagttatttataaaagtttatggaatattaagagttattagttttttgttttttaaatgtcgtagatgttttttaaatatattatttgtttttgtgtaatttttatttagttagatttattagtattttttagaatggtattgggttttatgttttgtttagaataggtttttttatttttaatttattttttttaattttatgatttttttttattattttgtaaaaagttattttttatattttatatttgatttattttatattttttttaggatgagaaattaggtagagattgatttttattttgtatggatttattaattgttttgaaattatttattgaataattttttttttttattgaatgtttaattttattggagttaatttttgtaatttgttttttgattaatgaaattaaataatttttaaaataatatgtttttttttgatttattttatagatttagtagaaattatatggtttgggtaatgtagttattattaaaattatagaattagattaatatgaattttaagatataatatattattattttttttttgtatagttttttaaagtatttatttttttgatttttataattgtatatttatttaatagattatgatattaaaggtttaaaagtaatatttttgtttggtttttttagttagtgagtttaatttaaattttttgattttaagtttagtgtttattttattatattttaagtaatattaaattaataatttaataataaaaagattataatttattaaatatgtttattgtaaaatatgtaattttattttatagatataaatattttttaaaatttttagaagaatgaggtaggatgtatatagatgtggaaagtatatatatttgtatttttttatagttggtaaatttatttagaggtgtgttttaggaaatagaattgatatattaaataaagattttttgtattgatttttgaaatataattatttttaatatatttaatggtaagaatttagtagtgtttaaaaattttgtatatatatatatatatacgtattttttatatatatatagattttatatatatgtaatttattaagtttaggttataagaggaaattggtaaaaatttattaattgaaatggagtttggttaagatatttatatttaattttttttttttgattttaaattagggagagtatatgttttgtgttttttggtaaaatatagatttatgtaataattagtatatttttttagattagagtaagtaatttttaataatgagtgtttgttagttttaattggtttttttacgtgggtggtgaaaaaatattttattatagttattaatttttttttttaaaagaattatgtgttttgagaagttttgttttattatagggtaatattttattttaaatatagtgtttatcgatgtttgtttatgaatgacgttaataaaaatgtttaaattttattaggaaaggagggtttagttgttagattttgggagatagagttagttgatttttgcgtttttaaaggttttgttatttaattaagtgattaattattaattttaaagtatttaagtttaataatataataaaagagagaataatgggtagtatttttaatattaattatggttatttttggtttagttgtttaggtttttttttagtagaatttataagtgtatagatataggtattttggaatattaaaggtatttttttttagtttgtaaatatagggaaaaagaagaaatttatatttgtaaatttatgtaaatttagggggattttttttaaatttcgtttttttgaaagtaggaaatataatttaaaattaattttgtttttatttattaaaagaattaaaattttgaattttgatataaattttaaatgattgttttgaattttatttcgttttttatttaatttttttataagaagattaaggattgtggatttggtgttggaggaagtaattgtttaattatattggaatttattggaattttttataatattattgcgggtagataatataattttaatatatttttttttttatttagagtttagaataagaagttagatttttggagattttttttttgatgtattgtttttaatatttttaagttataaattgggaatcgtttttattttagaatattaattgttgtttttattggtatttttttatttttatattatatttataatattttattttaggattttatgtgaatatttttaggatgggtttggcgaaattgttaagaagtgtttaaaataattaggttatagtttttagtagataaaaagaaaaagacgtggttgttagttatagaatttgaggtgatggaaaagatttttaaaatttagtttttttaatatgtagtaaaatgggaggatttaaaatgtagttttaagaagtatcgtttcgtttgtattaagtttttttaggtttttagtttagttattttttaaataggtgttgagtttttagttttcgttaggttttcgttaaggttttttattgaggtataggaattttagttatattcgtagtttttttatgtttgtttttatgaaattttattagttttgtcgaatggtagtatttgttattttaggcgaattttttatgatagtttggaacgaaattaatttgttaattgattaagaatgggttttagagtgatttgaatgtatttaaaaagttaataaatggaatacggtataaagttttatttttttgataaaaagtttgtttggagtaaattttaattttttttttgttttaaaataaaagtacgatgttttttttattatttttaagaagtaagtaaaaataaaataaaataaaataaaatttaaatagttttttaataagagtgtttagcgttgtttggatggaattcgggttagttttagaagtagtcggtttcgaattttgggggcgaggttattcggttttttcggttaagttgggttttgtttttttcgtttcgtttttattggtttcggtgggtgggggtttcggttgcgtcggtcgtttgtgcggttgtattgtagtttttgagtttaggaagttatattcgtttcggttgggagtcgaagcgttaatttacgtggcggttggttaatttagtcgttgcggggagcgttcgttgcgggtttttttttggcgcgaggtgagcgagtgggggcgggttttagatttagtttttttgggcggggttggattattttcgtttgtttagtttttttttatttttttatttcggtacgtttttgtagttatatttgttgtcgttgggaaagggaaaagagtattttaaaacgagtttcgaaatttagatttaaatttcgaaacgaattttttcggttcgtttttggttgtttgaatgttatttgttttattttcgtttttttttttttttttttttttttacggttttttttttttttatttttttttttttttttttttttttttttttattgttcgttttttttttattttttcgttcgacgttcgttttgaagttgaggaagtttaagttttggattaggagttttttttttgtaatattttggggcggggttttagcgttgggtttaagtggttatgggttttgagagtacggtatgtgtattattttttttaaagacgtttagggtggcgcgtttagattttcgaaatttggttttattttggttatgtgcgttcgtttattaagcggcgaattggatttagggcgtcgcgtgcgttttagtcgattcgcgagaaggtatttttgtattttgtatagattaagatttttttttagggttttttaaatttttagatgtacgtcgtagattgtggagtgtaaaatgaatgatttaagggaaaattagggttttttatttttgaatataaggttgtgaaagatgttcgtttggtttggggggtttgttttttttcgtttgtgcgggatttttttattagggggcgtttatattcgtcgtaaaatttttaatttttagatatttaggttttgtaagttttgtgagttgaattgggggtagattcgaaggagcgtatcgtttttttcgtttttttttttttgttgttttggagtacgggaaaggtagggattttatattagttatttatttgttagttgtgggggaggggacgtagaagttagagagagagaatagaggttgggagaggggaagggaggtagagaagatggagatagagggagatataaagatgaggaacgcgatttagagagattttgtcgcgggtgtgcgcgcggtaggataattttttaggcgtcgtgtagattttttttttttttcgtagtattttttagggatatgtaggatttgtcgagacgtagttggattggagagtaaatagtttaggttatgatattatttttttatttcgtttttttttgtttaatatttagatcgttttacgtttagtgatatagatcgcgggttagaataattcggatgttttaggtttgtacgtattagggatgtcgttttatagcgtttacgtttttgtaggacggtggggcgttttagtcgaggacgtttttcggggttttcggtatacgcgcgcgtcgttgtcgttagatttgttagtaaagttgtttaattagagcggagaattaggagagggtggggaatatgtaaggaaacggaggatttttgtagtttgggcgagaggattgatttagaggtttttgattcgggttttcgagttatttttgtttgtagtgcgttttgggtgtcggtttgtttgttgagatgggagcgatagattttattttattttttagggtgagaaaaattgttgtatatttttgtcgatttagaataggtttttttcgtttaggggttttttagattttcgcggggttttaataattttattttttattttttgttttttttttgttggttttttcgtatcgcgtgtaggataaaagaatttaggggcgtcgggagagaatcgtgatagtttttaagtcgttaaagagatacggcggggattttgtatttttttcggtcggatttttttttagattgtttgcggtttgaaggggttaggttcgcgtaaggttttaggttgtttgggcgtcgggtcgtattgttaggagttgttcgggagtggttttttaggaatattaggtattgattatatattaggggttgggaaattaggtggtttgtattaaggcggtttcggggatttgtttgtggtaagttttggtagtttttatttaaatttttgtttcgagcgtgttaagaataataataataaaaaaattaaagtgttaaaggttttttttttttttttagtttaagaatttattatttttttatgatttttttataatttattttttttttttttttaatttcgttagttattttattttttattttattttgggttttttttgtttgaattttttttaatattaaggtttttttgtatgtttttttttaaaagtttttatgaaagttatttgtattttttaagtgtttatatttttttaatttcgttttatagttttttgttttaattaaagttttttattaattgttttttttttttaagttcgcgggtttttttttataagttttttgtttttgttttttaaggggggaataaaagaaacgtgattattttggaaggcggtttattgtagtttggggggaaaatttattgtagcgttgcgcgattgggttcggcgttgtttaggcgggttatataggaagcgtggtggttcggggaaggatgcggagggtgcgggacggtgttggaagatgcgggaggatgcggggttggtcgaagattttggttttagtttttgtttataatatttaatgttttcggttgttgcgttcgtacgtttggagtttttttttagaaaggttcggggtagttcgtttgtaagtttaaatgcgggttgtgatatttattattattatattattgtatcgttagagtcgaggaggagatttagcgagaagaaggaggagggagaggaggagggtttatttataggttttaaaagcgtttcgtagttttagttatttttaagagtttaggtttggaaagtaggcggaggggcggaaaggtagtttttcgcgtttgcggtagggatcgtttgtttttttttttaggtatttttattttttggcgtttttttttgataagaagtattaatcggtttggggatagtagcgttttttatttagggatttatttagtaatatcgttttgttcgcggaaattattgtttttttattttttttttatttttattttttcgtttttcgtgtagttagttttgggttaggggaaaggagtttttaggtttttagggggtaggttagtaatagataattgagtacgattattttttttcgggagtatataaaattgtaaaattagtaaagaatttggttatagcgtgtttacgcgtttatagagtttgtttgttttattaaagggaagtgttaggtttaaggtttttgttaatttgaaagagatattgagaaaacgagatttttcggggatttagagggaaagtgtaagaattttttattgtatttttagggaattgtttaatggggagttcggttttaaaagattttggtaataaaaggttggataggaaatttttttaggtaaattttttgtcggatttaaagagaatattttttttttgttataaatttttttttatataagtttagattttgtttttttcgtttttttttttttttagtttttttaagtatttttgagtagaatatttgataatttttttgagtaatagggattttttggaagtattaattattttttatgtttttcggaaataagattataattttttatgcgtatatgcgattttttttttttagttaggtttattttattgtgtaaatagtattaatatatggaagagttttttgtattgtgttataaaagatttttaataggattttatagagaaaagggttaaatagttgatataaaggatttttgtttttttagaaaagagggattttggattttttttttttttgaagttaagtatgagtttatataataggaataaaataaatttaaggtgtatattagtataatattagggatattagaatggatggtaaatttttttttttatataaatatgaaagtatttttataatttttttttttgaagtttttatttagaaaattatattaaatataggattttaaaatagtagtgattaaagatgaaagttaatttttttttttaatttttttgattagtttggtttaaatttatgttttaaaatttttagtaatttagatttttgtatatgcgtatttataagattttttttatattttgtaatttgtaggtatttagtatggttattgattttaagtgataaataggtagaagatttgttaggataattttagtttttattatgtgtattttttattttttttgttatttattagttttttgtagtaatataattgttagttatattatttggaaattaatgtgtttttgtagtgaattatttatttttagtaaatttattgtattattattttaaatattgaaatttgattttattagatgtttagaatgatagttatagagtagaattagattttaatttttatgtataatatgtaaataaattaaggtgtagaaagttattgttttaaagttatataattaatagtttagtggtttttttagtgttaattatagtaattttagatttaagattgtttgatttaggaatggagagaaataaaataaaatgaatgtttattgaaatatatattttagatattaagatagatttttttgtgaaatattttaagatgtggatttgtatttttatttttaaatttgagtaaatttagttgagttttaaagagtttaagtaatttgtttaaggttattttgtaagtgatagatttgttagtttgaaaagtttattattttttatttttttgtttttttatgatatagttaagtaaaattttttaataaaggagaattagattagaaataagtaattaatagtagattaatgtttatttttagggaaatgttaatagttaatatttattataaataatgttatttgtatataatggaatatgattgaaagtgatgggttagatattttttatattttgagatgtttttatttatgttgttaaatttgattttttaattttttaaaatttttagttttttttaatgttaatagattttataatatttgattaaatatttttataggataaaggtatttttttagggttgatttaaggaattagaatatgtataatgttgaaaagttttaaattgtttgtttttttttttttttgatttgtaatattattatttagaaaattaaatatttttttaggttattagataattaaaatgaaattatattttatggatattttttttttatttttagggtagatttttttttttagttgtttaaaatggagaatggataaaaaagaaaaaggaaaatatattagttatatttagaatagagtttatagttgtattattatttttatgtaattgtttttaatgatttttttttattaagagaaagaaaatgagagagtatttatttttgattttttaatgtttgataaaattattagaagtttttgaatgggaaaatatatattttttaggttttataattaaaattgtatttatttgtttattatatttaagtatgaattaaatagtaattaaaatattattttgtgagtttttttttaaattatatttttgtattggggatattttttgtgaaaattttaagattttaggtataaataaagtaagatttttatttataatgtttgtgtttaaaagaaattataagttagaagttatgtgttttgtttttttgttttgattttgtttttgggaatttggttgagtttaggggtagtaagttaatgatttggagaggaaaggtgtagatggtagatgtgtttttagggaattttattatttttatttaaatttttttttgaggttttttaggattatattttagatttttttttttttattgattaggtgaagtgtttttagatatggtattatttattgttgttttagggatgataagattttagttttatttaaatttagaaagagtttagttttaattttttgatttgattggttttaggtataattaagtaaattatttttattggatgatatagtaatgttatagattaaaaatgtatttttaatttttaaagattttggaaaaaggaagtttattttttaagattgtgttataattttttttttaaataaaatattgtaaattagggatagatattttatttagtattttgaattttttttggttttttaggaaaggtagaaatataaggtttttattgttttttttttatttttaaaaaagaaattttgtaaaaggtaaagtgatggtggtaattttattgtgttttaattcgaagtatataaattgttttgataaattaaatatagataaatttttttagaaagttataaaatattagattttttttagatattagatattgagtttttgttttttaatttttaaattaaaatgttatagtaaaatatttgttttaataaattttttttttttttgtgttgtaaatgttttgtttatggttgagtagatttttttagaatttaattgaaagattatttatattacgatagaattatgtaagttaaagttaagttttaatatggagtgatgggagaggtcgggttgtcgagaggagatgattttattagtgagaagagaggttttttgagtcggtttttaaggtagttaaatggtttagtatatttgtatttattttgggaggttgtttggagtagagtattaaaaacgttattttttttataaagaaaaagatgaaggtataaagaatatagtttaattaaattgaattaaagattgtattatttttattttttttttagttatttttttaaagttttttttttttttttttatagtttgaaaaatataggttatttttataaagtatttgtttgattgaagtaagataaattgaagagtttggtttttgaatataaggaagcggtagagattttagaattaatgaggtagggcggaatataatgtagaaggttttttaagaggtaaaatttttgtagttgttgtttatttttagtgattattcgtttttatttatttaattagattatagtgggatcgagataaggagtataatgaaagttgttgtattgatggtgtaaaaagatatatggtattattaatgtttttgtggtgagtaaaggtagaacgtaagatagaaaataaggaaatttttgtgttgtaagaaaagtgtttagtatgggtattaatcggtatgtagaagtagtaagtatatattttatttttattttattgataaaaagaattgtaggattaatgtttgtttttattaaaatatgagaaattatattttaattttataaattaaaggttaaatatttgttgtaataattttaaaaaaaagagaagatttgtaagatttagtaaatatttattataaatagattgtttttaattttttatatttttttttaatttaataaaagtttattgagtagtttttatgtgtattgttttagatagtaggtattatttaaaaaagtaataattattttttatttttaaggagtttataatgtttttagaaagaaattaatttattggagtagttaaagttataattgatttataaaatgattagtgaatttagaggaaaattatatataaatatttttgtttttattggttggtttagttagatattattttaaaaaata

SEQ ID NO: 37 - DNA, 6090 bp, Artificial Sequence
  chemically treated genomic DNA (Homo sapiens)
tagagatggaatgtttaaattaggataatttagggaggtgtgggagaggtgtagggggattataagggatggagtaggaatttaaggtagtaatagtagagttggtattaattttaggtttaaaaagataaaggagagagagtggttattaaaatttagaaagagaaaattcggtaaaagacgggatttggtgaggagtagtaatttgtgtttggttgtggattgtggtaattttgtagggaggagagtagaggaatgattattttggttttatttttttttttttttttttattttatgttaggtgttttattggttaaatttattagtaattagaggataaggaatgtattaaaataattttacggtttagagagtagattagatgtagagtgataaatggattatatttagtataatcgtaggtttatttgttgattcgttttttttattagattgagttatttgaggatagagaatgttttttttatatttgtatttttaatatttggtggatattagatatttaagaaatgtttatggacgggattagagaagatggtaaattgggtattagatggaggtttgtgttttttgagtttgtcgtatgttttttggcgaatttaaggtaaaatgagaaatagaatgagttttgtatttttgtttggtaaaagaaaatatgatttggtgagaagaaatgaatatttttagtatttagtgttgggaggaattggaattagttatgtgattgtttttattagaggtttttaattgcgtaacggatagaatttttaatggtgaaattataatgtagaaatatttttttttttttttttttttttttttttgagacggagttttgttttgttatttaggttggagtgtagtggtattatttcggtttattgtaagtttcgtttttcgggtttattttatttttttgttttagttttttaagtagttgggattataggtatttgttattatatttggttaattttttgtatttttagtagaaatggggttttatcgtgttagttaggatgtttttgattttttgatttcgtgatttgttcgtttcggttttttaaagtgggaaatatttttaaaaatattagtttttgataaaattaaagttatgttataaaaaagtaattaaaaggtggaaatgagataatatggtttattttgagttgagaatattttgttagaaaatgattgttttagattttaaatttgattttttatataaatttttagtgtaattttttttgtattatttttttttttattagttaaaagatggaaaggataaattgaggaatttacgttggaggagtatggatttattagatggtagaaatttgggtttttgaatgattattgtggagttgatttttgtttatgttttgtaaatttttgtgttgagagtaagtaatatatttttaatgtgttaaatttttgggatttgttgggttttatagtaatggttattttattttaatacgattgtaaaataatgttttaaaatttatagtcgggtttgtttaaaatattatcgttattattattataatttatagtttatattataattatttttatagaagttttttttaattggtattttataatttgtggttttttatattgttgttttttatgtgtgagatgtttttttgagttttttttgttagggatatgatagaaaataaaatatttaatattttggtgtattttataatgtataaagttttgttttatgtattatttttttagatttttttaataaatttaaggaatatgtaagggtttataattatttttattttataggtgatgaaattgagacgtttatatgtaaagtggaaataattatttatttatttatttatttattaaataaaaatttcgttaatttatttaaagattaattgagagaattattttatttgtttggaatttggtatgtgttaagagaaaagtttttttaatttttttttttaagaagataatttattgttatataataaattattttgaaataatgatttaaaatattaaaagttattgattttgtttatagaatttgaattggaagatataaataattgggagtgagggtggggttggatagttggtttttttgggtatttttcgttttttttgtggttttgttatatgtttttatatggtagttttagggtaattatgatagttgaaggttttagagtgggtggagggggagagggagggagggaaagagagagagagagagagagagagaaagagaagtaagtaggtagaagttttaatgttttatgatttaattttggaaataaattatattgtgttattgttattatttttttttagaagtaagtagatagggttggtgaatatttattgagaggggaattagattttattttttgattgggggagtgttaaagaatttgtgaatatgtttttaaatgattatattttttttttttaaaatgtttgtttaaattggtgtatataaaaagttcgggggttagtgatttatttaaggttattaagttgttaaatggttttattaatattagatttaattttgtgattttaaattttatgtttttttttattattttagataattttcggtgaatattattgtttattagggtagttaagatattttagttgttaaatagatttagtttttttaattgtttcggataatatattttttattttgtagaaaataaatattatttatatggtagttatttataaatattttttaagtttattttaaatatttgtgttttaaatttttttttttaatagatgtatttatttgtatttttttagatgaattattttttttttgttgttgttgttatttttgattgtattttttattttttaagatttttttgtattattaagtttattgtttaagttaatattattttttaatttggggatttttttttgatttttgtgtgttttttttgtgggttattaatgtaatgttatttaagattaggatttggttgggcgtagtggtttacgtttgtaattttagtattgtgggaggtcgagtcgggaggattatttgaggttaggagtttaagattagtttgattaatatggtgaaattacgtttttattaaaaatataaaattagtcgggtatagttatatgtttgtaattttagttattgggtagtttgaggtaggagaatcgtttgaattcgggaggcggaggcggagtttgtagtgagttaagattttataattgtattttagtttgggttataagagcgaaaattcgttttaaaaaaaaaaaaaagattaggatttgatataaggtttgaggggtatttttttgttttgttttgttttgtttttaagaggttaaaatttttatagttgaaaatttttgttgaattatagagatttgaattaatttagtttagaaagtttggggatttgaataacggtatggatcggaaatttttttatttgttagtttttattattttaggtagtaaaatagatttttttttaggagttttttatcgtttggggttttttagtagtgggatgtggggaattaattttttttcgtttttatttaaatattaggtgggagtaaggggtgggaagtagagaaagtggatagaggtttttagtggatatgggatttttgtgtagattagtatagtttttagaaattttatgtaagtaatataggtattgttatattttttagtggttattttttaaaaagtaaataggtgaggtcgggcgcggtcgttacgtttgtaattttagtattttgggaggtttaggcgggcggattacgaggttaagagatggagattattttggtcgatacggtgaaatttcgtttttattaaaaatataaaaattagttgggtatggtgacgcgcgattgtagttttagttattggggaggtcgaggtaggagaattatttgaattttggaggtggaggttgttacgttttattatattttagtttggcgatagagtgagatttcgttttaaaaaaaagaaagtaaataggtgaaattaattttaataatatattttgtttaatttaacgtatttaaaatattattatttgaaagtgtaatgaatataaaaatatttatgagatattttttatttttatatttatattgttttggattttaatgtgtattttatatttatagtataattaatttgggattagttatattttagtttaataatagttaatagtatatgggatagcgtaaataaattttgcgtttttgttgtttttttgggtttcggagattttaattttttttttagattgtaaatttttttgtttttaagtttcggttttaatattagttcggtagaggaatttagtttaatgaggtacgttttttttttgttattttttattttattaatttgtttcgtggtaaacgtaggattgattttttaaaattattttattaattagtttatatatttattatttatttgttttattagaatgtaggttttcggaaggtagggatttaaaaaaatttgttttgttttatgtgatttttttatattaagtatcgtgttcggtataagttgggattttagtatatatttcgggacggaagaatcgtgtttttttagaatttagttagagggtagtttagtaatgtgttataggtggggcgttcgcgtttcgggcggacgtattggtttttcggtcggcgtgggtgtggggcgagtgggtgtgtgcggggtgtgcgcggtagagcgcgttagcgagttcggagcgcggagttgggaggagtagcgagcgtcgcgtagaattcgtagcgtcggtttggtagggtagttcggaggtgggtgggtcgcgtcgttagttcgtttgtagggtttttattggtcgtttgtcggtcgtttttcgtttaaaaggcggtaaggagtcgagaggttgtttcggagtgtgaggaggatagtcggatcgagttaacgtcggggattttgtttttttcgcggaggggattcggtaattcgtagcggtagggtttggggtcggcgtttgggagggatttgcgttttttatttattttttagttgtgttttcgtcgcgtttcggttagttttcggcgttggcgtttatggtcggttttcgatagcgtttcggagggatcgggggagtttttaggcgttcgggtgagtagttaggcgcggtttttcggttttttcgattttcggcgttagtttttgtttttttagttagggcgcggtggggtttgttcgggtagtgtttcgagtaattgggaaggttaaggcggagggaaatttggtttcggggagaagtgcgatcgtagtcgggaggtttttttagtttcgcgggtcgggtgagaataggtggcgtcggttcgattaggcgttttgtgtcggggcgcgaggatttggagcgaattgttgcgtttcggtgggtcgttttttttttttttttgttttttcgggcggtcgtacgtcgggtcggtcgggtaacggagagggagtcgttaggaatgtggttttggggattgtttcgttcggggaaggggagagggtggttacggtgttaggagaggcgcgggagtcgagaggtggcgcgggggtgttatcgttgtcgtaggttggagagagattgtttttagtgaggcgcgtatcgtttgggcgagggttttattttttcgcggcgtttttggaggtgggaaagttgggtgggtatgtgtgtagagaaaggggaggcggggaggttagttattttcggagtcggttttgattttaatagatcgtttagcgtttggggacgtcgatttcggggtgtcgtggtgttcggttttacgcgcgcgcggggttgaggggtcgggggcgtttttggtcgtttagttttaataaagggtgtttttttttatttcgcgaggaggggtagtttcggagattcggtttttagcgagcggggttttagcgtcggggaggtttatttttttttggggttgttattttattattattattgttttttttttttttttaaaagg

SEQ ID NO: 38 - DNA, 6090 bp, Artificial Sequence
  chemically treated genomic DNA (Homo sapiens)
ttttttgaagaaaaaaaaaaggtaataataatagtaaaatggtaattttaaaaggaagtagattttttcggcgttaagatttcgttcgttgaagatcgggttttcggagttgttttttttcgcggggtggagaggagtattttttgttaaagttgggcggttagggacgttttcgattttttagtttcgcgcgcgcgtggggtcgggtattacggtatttcgaggtcggcgtttttaaacgttgggcggtttgttgggattagaatcggtttcggaagtgattggttttttcgttttttttttttttgtatatatgtttatttagtttttttatttttagggacgtcgcggaagaatgaagttttcgtttagacggtacgcgttttattgggagtaatttttttttagtttgcggtaacggtggtattttcgcgttatttttcggttttcgcgttttttttaatatcgtggttatttttttttttttttcgagcgaggtagtttttagagttatatttttggcgatttttttttcgttattcggtcgattcggcgtgcggtcgttcgggggagtaagggagggaagggagcggtttatcgaggcgtagtagttcgttttagattttcgcgtttcgatataaagcgtttggtcgggtcggcgttatttgtttttattcggttcgcggggttggggaagtttttcggttgcgatcgtattttttttcgaagttaagttttttttcgttttggtttttttagttgttcgaggtattgttcggataaattttatcgcgttttggttgggaaagtaaaagttggcgtcgggggtcggggggatcggggagtcgcgtttggttatttattcgggcgtttgggagttttttcggttttttcggagcgttgtcggaggtcgattataggcgttagcgtcggagattagtcggggcgcggcgggaatatagttagggagtgagtggggggcgtagattttttttaggcgtcggttttagattttgtcgttgcgagttgtcgagtttttttcgcggagggaataaagttttcggcgttggttcggttcggttgttttttttatatttcgaagtagtttttcggttttttgtcgttttttgggcggagggcggtcggtaggcggttaatggggattttgtaagcgggttggcggcgcggtttatttattttcgagttgttttgttaggtcggcgttgcgggttttgcgcggcgttcgttgttttttttagtttcgcgtttcgggttcgttggcgcgttttatcgcgtatatttcgtatatatttattcgttttatatttacgtcggtcggggagttagtgcgttcgttcggaacgcgggcgttttatttgtgatatattgttaagttgttttttgattgggttttagggaaatacggttttttcgtttcgagatgtgtattgggattttagtttgtgtcgggtacggtgtttggtatgggaaaattatatagaataaaatagatttttttaaatttttgtttttcggaaatttgtattttggtgggatagatagataataaatatgtaagttaattaataaggtaattttggaggattagttttacgtttattacgaaataggttaatggaatagagaatggtaggaagggagcgtattttattagattgggtttttttgtcggattggtgttggagtcgaggtttgaaggtaagaaggtttgtaatttgaagaaagggttgaggttttcgagatttaaagaagtaatagagacgtagagtttatttgcgttattttatatgttattggttattgttgagttgaaatgtagttagttttaaattaattgtgttgtaagtgtaaaatatatattagagtttaagatagtatggatatgagaatgaaaaatattttatgaatatttttatatttattatatttttaaatgatagtattttggatacgttgggttaaataaaatatattattaaaattaattttatttgtttatttttttttttttgagacggagttttattttgtcgttaggttggagtgtagtggagcgtggtaatttttatttttagggtttaagtgatttttttgtttcggtttttttagtagttaggattatagtcgcgcgttattatgtttagttaatttttgtatttttagtagagacggggttttatcgtgtcgattaggatggtttttattttttgatttcgtgattcgttcgtttgggttttttaaagtgttgggattataggcgtgacgatcgcgttcggttttatttgtttattttttaaaaggtggttattagaaaatataatagtatttatgttgtttgtatgagatttttgaggattgtgttggtttatataaagattttatatttattggagatttttatttattttttttattttttattttttgtttttatttaatgtttgggtggagacgaagaagggttgattttttatattttattgttggagaattttaaacggtgaaaagtttttaaagggaaatttattttattgtttagaatgatgaaaattgatagatgaagagattttcgatttatatcgttgtttaaatttttaggttttttaaattgagttggtttaaatttttgtggtttaatagaaatttttaattgtgaagattttggttttttgaaaataaggtaaaataaaataaaagaatattttttaggttttatgttaaattttagttttttttttttttttgagacgggttttcgtttttgtggtttagattggagtgtagttgtgaaattttggtttattgtaaatttcgttttcgtttttcgggtttaagcgatttttttgttttaggttatttagtagttgggattataggtatgtgattatgttcggttaattttgtatttttagtagagacgtggttttattatgttggttaggttggttttgaatttttgattttaggtgattttttcggttcggttttttatagtgttgggattataggcgtgagttattgcgtttagttaaattttagttttaaataatattgtattaatgatttataggaagggtatataggaattaaggggaagtttttaaattgggagatggtattagtttaagtagtgggtttgataatataaaagggttttgagaggtgagaaatatagttaaaaataataataataataaaaaaagagtgatttatttgggaaaatgtaaatgaatatatttgttgggagaaaaaatttaaaatatagatgtttgggataaatttggaaggtgtttatggatgattgttatatgggtaatatttattttttgtaaaataaaaaatatattgttcgaggtaattaaaaggattgaatttatttggtagttagaatgttttaattattttaatggataatgatgtttatcggagattatttggagtagtgaaaaagagtatgaaatttggagttataaaattagatttagtattggtggaattatttaatagtttaataattttggatgagttattaattttcgagttttttgtgtatattaatttagataagtattttagaaaggggaaatgtggttatttaaaaatatatttataaattttttgatatttttttaattaagaggtggagtttaattttttttttaataaatatttattaattttatttgtttgtttttaagaaaaggtagtggtagtggtatagtgtaatttatttttaaggttaggttataaggtattagagtttttgtttgtttgtttttttttttttttttttttttttttttttttttttttttttttttttttttttttatttattttaaagtttttagttgttatgattattttagggttgttatgtagagatatgtgataaaattatagaaagaacgagagatgtttagagaagttagttgtttagttttatttttatttttagttgtttatattttttagtttaagttttgtgagtaaaattaatgatttttaatgttttaagttattattttagagtggtttgttatgtagtaatagattatttttttaaaaagaaaaattaagaaaattttttttttaatatatattaggttttagatagatgaaataatttttttaattaatttttaaataaattagcggggtttttatttaataaataaataaataaataagtggttatttttattttatatgtaaacgttttagttttattatttgtgaaatgaagatgattatagatttttatatattttttgggtttgttgggagaatttaaagagataatgtatgaaataggattttgtatattataaaatatattagaatgttggatattttattttttattatgtttttagtaaaaaggatttagagaggtattttatatatagaaggtaataatataagaagttataaattatgagatgttagttgagaaggatttttataaaaataattatgatatggattatggattataataatgatggcgataatattttaaataaattcgattgtagattttagaatattattttatagtcgtattagggtaaaataattattgttataagatttaataaattttagaggtttaatatattaaaaatgtgttatttgtttttagtataaaggtttgtagggtataagtagagattagttttatagtagttatttagaaatttaggtttttgttatttaatgaatttatgtttttttagcgtaagttttttagtttattttttttattttttggttgatgagagaagagataatatagggaggattgtattgaaggtttatgtaggaggttagatttgaagtttgagataattattttttggtaagatgtttttagtttaaagtggattatattattttatttttattttttggttgtttttttgtaatatggttttggttttattaagggttaatatttttaagaatgttttttattttgggaggtcgaggcgggtagattacgaggttaggagattaagagtattttagttaatacggtgaaattttatttttattaaaaatataaaaaattagttaggtgtggtggtaggtgtttgtagttttagttatttgggaggttgaggtaggagaatggggtgaattcgggaggcggagtttgtagtgagtcgagatggtgttattgtattttagtttgggtgatagagtaagatttcgttttaaaaaaaaaaaaaaaaaaaaaaaaaagaatgtttttgtattgtggttttattattaaagattttgttcgttacgtagttgagagtttttgatagaggtagttatatgattgattttagttttttttagtattgagtgttaaaagtatttatttttttttattaaattatatttttttttattagataaaagtatagagtttattttgttttttattttgttttggattcgttagaaagtatgcggtaagtttagaaagtataaatttttatttaatgtttaatttattattttttttgatttcgtttataagtattttttgagtatttagtgtttattaaatgttagggatatagatataagagaaatattttttgtttttaggtaatttagtttgatgagggagacggattaataaatagatttgcgattgtgttaaatataatttatttgttattttatatttaatttattttttgagtcgtaagattattttaatgtattttttgttttttggttgttggtaggtttagttaatggggtatttgatatgagatgaaggagaaggaaggagagtgaagttaagatagttatttttttgtttttttttttgtaagattgttatagtttatagttaaatataggttgttgttttttattaggtttcgttttttatcgggttttttttttttgggttttggtaattatttttttttttttgtttttttgagtttagggttggtgttagttttgttattattattttgggtttttgttttattttttatggtttttttgtattttttttatatttttttgaattgttttaatttgagtattttatttttg

SEQ ID NO: 39 - DNA, 6240 bp, Artificial Sequence
  chemically treated genomic DNA (Homo sapiens)
tattttaggtattgggttttatattagtgatatatagtatttgttattaaggattttttttcgtataatggaagttagatagtacgtgattagttgaaatgaattatatggtaaagattgagtagttggataaggagtagaggaatttatttggtatgggtttaagttattaatgtatataagatggtaagggattttttttacgggtaaagtaaagtgttatttgattaagcgatttaggtggatatttggagtaagaagattattttaggtggagagaagaatttggattagaatatgagagtgatttcgttttttttaggtattttattgattattgcgttataatttgtttaagtagtttttggtgatgggtattgaagttattgtaattttttattagtatgagtagtattttagtgatacgtgatattttaatagttgtattttattttattttatagtttttttattaaaatattttattttattttattgttgggtgttagatgattttttaaattttttttattataaataattttgatatgtagttttatatattttttgttaatttttgtttgtttgggatatatttttagaagtagtgtttttatttatgagaatattgtatattttgaaaagatttttggttgggtgcggtggtttatgtttgtaattttagtttgagaggtcgaggcgggtagattatttgaggttagttattattacgggagcggaaggattcgcgtaatggtaggtattttatttcgtggtgaagatatgtaattaattttgtagttatgattttttgataagttgagatgttgtatgtgtaaggttagtttaatgttaaaaagtgtaaaatattgaaaaaatatgttgtagaaatagagtggttgggtcgggtatggtggtttatgtttgtaatttttttattttgggaggttgaggtgggtggattatttgaggttaggagttttagataagtttggttaatatggtgaaatttggtttttattgaaaatataaaaaattagttgggtgtggtggttggtgtttgtagttttagttattcgggaggttgaggtaggagaatcgtttgaatttaggaggtggaggttgtagtgagtagagattgtgttattgtattttagtttgggtgatagagcgaaatttggttttttaaaagaaaaaagaaaaaaaaaaaaaaagaaatagagtggttaaagatagtaatagtataaagtgtggatatggttgtttgggtttaggattttttgtttaattgatattgagaagataaaatgagaaggaaattttgttggtgatttagtggtatttaattagtgtgtaattattataaattggcgttgttttttgttttattagtttagtggttttaaattggaggtaattttgttgtttaggggatatttggtaatgtttgaagatattttttggttggtatattattggaatttattaggtaaaggttagggaggttgttaaatattttataatgtataggatagttttttataataaaaaattatttagttttaaatgttagtgtttagaaatgttttgttagatttagataaagtttttaaattaaaggtgtaattagataaagaaattattaattattttttaagaaatgatagttttaggttgggtatagtggttttcgtcggttattttaatattttgggaatttaaggtaggaggattatttgaggttaggagtttaaagttaggaatttaagacgagattggttaatatagagagatttagttttttaaaaaaaaaaaagaaggaggagaaatgatagggttatatggatatatttttttatatttttatttaatttttgatattgtgatatttcgtttatatttggtttattttaattttttttaaaattgtaatggtgggttttgtaataattaaatttatttagaatttgaataaaattatttagatttgatattaatgtaattggatatgtatagtaatttgtttatatatattaaaaattaataaaattgttttatgatttatgttattattattttattttattgttgtaaatattaaagttttaaggttatagagtaagtgatttgtaaaaatggtattagataaataaaaattttgatgttgtgttttgtagttagattataaggtattttttttttttgtttatgtgtttttgtagtttaaattgagggtaaagttaaattttattatttttttaaaggaggtgattatttaaatttgttttttttttttttaggtagtatatattattatttgtttttgtgatttattttttttagaaagttgagaaggaattttataatgatattattggttttgtaattggtgtttttattgtaatgttattacggaattagtgttgtgataaatgatttgtttataagggaaattatttttataagaagtagaaaattagatacgtttttgttttgtaataataataaaaatcgcggtgaaaaaatattttttagtttatttttatttgtattagtagggaagttttagaagatggttttttttttaaagttttttaattacgattattatttataagttttatgttaaaatgtaaattttttttaaattttattgaaggttattatatttttaagtttaattatgatttgggttttttaagaaaattaggcgttttaaattttatttttttgttgatttgaagtagtgtgagttcgtttttttaaggcggttagttttgtggtgacgttaagagagagttaatttgttttttgttttgtttggaaggaatgtttttgttgtaataagttttaaaagtggaagttttaagataatatggaatagggagtaatagaaatttgtgaggtatggtagttagatttatttttaagattcgattatagtgttgaataaaggggaaagaatgttgttaaatttgtttttttttgtggtgtttttttttgttagttttatttttttattttaatttttaagtgagttttttagaattcgtttttaatttaatttattgttttatgtattagattttaaaaaagtgagagaattaagttttagtgtaaattaaattggattatttgtaatagaatgatttagattgtttatatgttttttaagagtaaagttaagtatttttttttttttgttatataaatagtgatagagtttagaagttttttagtattaagttaaaaaatatttgggagaaattggggtttagttgttgttggtatttaagttgttttttaaaagtagttattttggtgaaagatgatgttatttggaatatttggtgttttcgagtttattttgaggtgttagtttttaagagttattgaattatcgtttaattatgagattaaatttaggtttaaagataatgagggagtgggaataagaattatttttttttttttttaatattttagaaattttttagaaagtttaatttaatagaaaaaaaaattacgtttttttttttattttttattattatgtgtttgttttaatgttaattaagcgtgggtaataaaattagtttggttagttttattttttaatttttatatataagtgaaagttgttttgtgttaatagggtaaagtgtttagaattattttatttgttgggttaattttttgtaagtttttttttgggaagaggaagggggaataaaagtttttgatttttaattttttaaattgtaaagttagaattatgaattagatcgtattatagtaattattgttttatttttatatgttaaagttttttaggagtgagtaagaggatagtaaagacgggtgatgttgtatttttatttaattattattatttgtatagtataatgttatgttcgtagttattttggaaaattggtatttaaagaggtgttttaattttttattaaaagtgtttcgtttttttttttttttttttttattaggtaaatgttattgttttaattttattacgagatatgtgttggaaatgtttgtaaaatgtaaagagaaaaagaaaaaaatagttgtattttgtttaaataattgagcgtagtgtggtttatgaggttattaaaggagatgtgtgttttttttgtaaatttttatttaataaggttaatttgtggttgttgttgttttatttttttcggttttttgtagaggaattttgtttttttaggtttatttaagtttttttagttaaaaatattttgtttttgagaatataaaattgcgtgtatgtgtgaaatagatagagggagatacgcgtatatatagtcggcggaagatggggttataatacggtagaggatgggtgtcggagttcggttgatttttttacgtgttttcggtatttgcgaggttggtggggtattaggttttttttttttcggggcgggcgcgagttcggaagaggttgggcggtcgtgggtttagattagggggttcggaggtttttttttggaatacgtgtggttggcgagttggtggtgcgggggtagtttttggttttttcgtattcgtagtgtttgcgcgtttttagttcgttcgtggttattagacggcggcgggcgggtttcggagtttttagttagttttgttgggcggtttagggagcgcgtttagttcggttggagcgagttttagtgtaatattgtttaagttcgggcggggtttttgttttttggtagaggaggttttttggtagcgggaagcgttttttttttttttcgtcgtcgtttcgagtttgcgttttggtgttaggcgtttagttcggcgtttttttgtgttcgttcggcgtttatttattcgtagttcggttttcgtcgtcgtcgtttttttgttgtttttttttttttttttagttcgtcgcggttatggcggatagcgttagcgagagcgatacggacggggcggggggtaatagtagtagttcggtcgttatgtagtcgttttgttcgtcgatttcgggcggcggcggtggcggcgggggaggcggcggcggtgggaagtcggggggtattgttatttcgtcgtttcgtttggaggagtttattaatcgtttggtttcgttgtagtaagagaataaggtgttgaagatagagttggagatttataaattgaagtgtaaggtattgtaggaggagaatcgcgatttgcgtaaagttagcgttattatcgtgagtgtttttcggggacgcgtcgtagcgtcgattttcgttcgtttcgggaggggttgtattcgaatttagttattttttaagttttttttagattttcggggattttttgagagtatattttttgcggggatttgttggttttcgggaggagagggaggtattttttcggggttacgcgggtttgtttttttcgggggtttgaggatttttgcgcggtgcgggggaaggttattgtggtaattatttatggttttttttagtttttggagaggaggttttttcggggttgggttggaggttggcggcgtggttggggggcggggtaggattttttttagttttagtatgtttgaggggtgcgtttagaatttggggaattttagttttggaagagggaggaagttgggattttttattgggttttggttcggagtgtgggggttcgtagttggattgggtattaagttggtatttggattgcgttagttggatcgttcggggagggggcgggagagagtggtcgggaattcgggaagtggagttttttggtcgggatcgagagggaagggcgggtacggcgttaatgtttttatttttgttggaagttttttgttttgggttgggagggtggacggtttatagcgaggagagtgtagtatttacgtttggatagggttggggtcgaaattaggggaagggtagtgattgtgattttttggttgagttagaggtacgtgtgtttgttttattcgtggagtggttagaagtattttgtttttgagtttagatattggagaataggttatttgttttgtttttatttgttttttggaggttgtttagaaacgggtaagtttgggtttgtaggttttttttttggtgtggtaggcgtttagaaaggtttttatagtagtgatgaggcgaaacgtaattagaaaaagtatattgtgtatttttatttattatttttgttagtttattatattattaatatgta

SEQ ID NO: 40 - DNA, 6240 bp, Artificial Sequence
  chemically treated genomic DNA (Homo sapiens)
tgtatgttaatgatgtggtgagttggtagggatgataggtgagagtatatagtgtattttttttagttacgtttcgttttattattgttataggggtttttttaaacgtttgttatattaggagagagatttatagatttaagtttattcgtttttgggtagtttttaggggataggtagaaatagaatagatggtttgttttttagtatttagatttagaagtaagatatttttaattattttacgaatgaagtaaatatacgtatttttggtttagttagggagttatagttattattttttttttggtttcggttttagttttgtttaggcgtggatgttgtatttttttcgttgtaaatcgtttatttttttaatttaaagtaaagagtttttaatagaggtgggagtattagcgtcgtattcgtttttttttttcgatttcggttagaaaattttatttttcggattttcggttattttttttcgtttttttttcgggcgatttagttagcgtagtttagatgttagtttagtgtttagtttagttgcgaatttttatatttcgagttaggatttagtaagagattttagtttttttttttttttaggattggggttttttagattttggacgtattttttaaatatgttagggttgaaaaaagttttatttcgttttttagttacgtcgttagtttttagtttagtttcggaggggttttttttttagaggttaaaagggattatgaatggttgttatagtagttttttttcgtatcgcgtaagggtttttagattttcgaggaggatagattcgcgtggtttcgaagggatattttttttttttttcggaagttagtaggttttcgtagggagtgtgtttttagagggttttcgggaatttggggaagatttggggggtggttggattcgggtgtagtttttttcggggcgggcggaggtcggcgttgcggcgcgttttcggggggtatttacgatggtaacgttggttttgcgtaggtcgcggttttttttttgtagtgttttgtattttagtttgtaggtttttagttttatttttagtattttgtttttttgttgtagcgaggttaggcggttggtgagtttttttaggcggaacggcgagatgataatgtttttcgattttttatcgtcgtcgtttttttcgtcgttatcgtcgtcgttcgaggtcgacgagtaggacgattgtatggcggtcgagttgttgttgttgtttttcgtttcgttcgtgtcgttttcgttggcgttgttcgttatggtcgcggcgggttggggaaaggaggaggagtagtagggaggcggcggcgacgaaggtcgggttgcgaatgagtgggcgtcgggcgagtataggggagcgtcgagttgagcgtttggtattagggcgtagattcggagcggcggcgagagaaagagagggcgtttttcgttgttaagggattttttttgttagagaatagagatttcgttcgggtttgggtagtattgtattggggttcgttttagtcgggttgggcgcgttttttaggtcgtttagtaaagttggttgaaagtttcgggattcgttcgtcgtcgtttggtgattacgggcgggttgggaacgcgtaggtattgcgggtgcgggaaagttaaggattgttttcgtattattagttcgttagttatacgtgttttaagggagggttttcgagttttttgatttaagtttacggtcgtttagtttttttcgggttcgcgttcgtttcgagaaaaaggaaatttgatgttttattagtttcgtaggtgtcggggatacgtggaaaggttagtcgggtttcggtatttattttttatcgtgttgtggttttatttttcgtcgattgtgtgtgcgcgtgtttttttttatttgttttatatatatacgtagttttatatttttaaaagtaaggtgtttttgattaggaaggtttggataaatttaagagaataaagtttttttataagaggtcgaggaggatgaaataatagtagttataggttaattttgttaagtaagaatttgtaggagagatatatattttttttaataattttataaattatattgcgtttaattgtttaaataaggtgtaattgtttttttttttttttttttgtattttgtaaatatttttagtatatgtttcgtagtaggattaagatagtaatatttatttaatgaagaaaaaaaaaaaggaaggcgaaatatttttagtagaagattgaaatatttttttaagtgttaattttttaaagtaattgcggatataatattatgttatataaatagtaatgattgagtgggagtgtaatattattcgtttttgttatttttttgtttatttttagaaaattttagtatgtaaaaataaaatagtaattattgtaatgcggtttaatttatggttttagttttgtagtttaagaaattaaaaattaaaaatttttattttttttttttttttttaaagaaaggtttgtaggaaattggtttagtaggtgagatgattttaaatattttgttttgttgatataaaatagtttttatttatgtataaaaattggaaagtgaaattgattagattagttttattatttacgtttagttaatattagaataaatatatggtaatagaaaatagaaaaaaaagcgtaatttttttttttgttgggttgaattttttgaaagatttttaaagtgttaggaagaaagaagaatgatttttatttttatttttttattatttttaaatttaaatttgattttatgattaaacggtgatttaatggtttttggaaattggtattttagaataaattcgaaaatattaagtgttttaaatgatattattttttattaagatggttgtttttaggaaatagtttaaatgttaatagtaattaaattttagttttttttaggtattttttagtttagtgttggagggtttttgaattttgttattgtttgtatagtaggagggaggaaatgtttggttttgtttttgagaaatatataggtaatttaaattattttgttataagtgatttagtttaatttgtattgaaatttagtttttttatttttttgggatttagtatatgagataatgagttaaattggaaacggattttggaaagtttatttgagggttgaaatggaagagtaaagttagtagggagaagtattatagggggaaatagatttaataatatttttttttttttatttagtattgtgatcgaattttaagagtaggtttggttgttatattttataagtttttattgttttttattttatattattttaaagtttttatttttagagtttattgtaataggaatattttttttaggtagagtagggggtaaattaatttttttttagcgttattataaaattaatcgttttggaaaggcggatttatattgttttaagttagtagaggggtggagtttgaagcgtttggtttttttaaagggtttaagttatggttaagtttaagaatgtagtggtttttagtggaatttggaggaaatttgtattttgatatgggatttgtaggtagtaatcgtggttagaagattttagggagaaagttattttttaaagtttttttgttaatatagatgggaataaattggagaatatttttttatcgcggtttttattgttattgtaaagtagaagcgtgtttaattttttattttttgtaaaagtgattttttttataaatagattatttattataatattggtttcgtaatagtattataatggaaatattagttataaaattaataatattattataaaatttttttttagttttttaggggaaatgaattataagaataaatggtagtatgtgttgtttggaggaagaagggatagatttaggtaattattttttttggagaaataatgaaatttagttttgtttttaatttaagttgtaaaaatatatgaataaaggaaaagaatattttgtagtttaattgtaaggtataatattaagatttttatttgtttagtgttatttttgtaaattatttattttatggttttggaattttagtgtttataataataaaataaaataataatggtataaattatagagtaattttgttaatttttaatatatataaataaattgttgtatatatttagttatattaatgttagatttgagtaattttatttaaattttaaatggatttagttgttgtaggatttattattatagttttgaaaaaaattagggtgagttaagtatgagcgggatgttatagtgttagaagttggatagaaatatagaagaatgtgtttatgtagttttattatttttttttttttttttttttttttaagaggttaggtttttttatgttgattagtttcgttttgaatttttggttttgaatttttggttttaagtgatttttttgttttggatttttaaagtgttgggatgatcggcgagagttattgtgtttagtttagggttattattttttgaaaagtagttgatagtttttttatttaattatatttttaatttagaagttttgtttaggtttagtaaggtatttttgaatattgatatttgagattgggtaattttttgttgtagggagttgttttgtgtattgtaggatgtttagtagtttttttagtttttatttagtagattttagtagtatgttagttaaaaaatgtttttagatattgttaaatattttttgggtagtaaaattatttttagtttggaattattgaattagtaaaataaaaggtagcgttaatttgtagtggttatatattgattagatattattgagttattaatagaattttttttttattttatttttttagtgttaattagataagagattttgggtttaaataattatatttatattttatattattgttgtttttagttattttatttttttttttttttttttttttttttttttggaagattaaatttcgttttattatttaggttggagtgtaatggtataatttttgtttattgtaatttttattttttgggtttaagcgatttttttgttttagtttttcgagtagttgggattataggtattagttattatatttagttagttttttgtatttttagtagagattaggttttattatgttggttaggtttgtttgaaatttttgattttaggtgatttatttattttagttttttaaagtagggggattataggtatgagttattatgttcggtttagttattttatttttataatatgtttttttaatattttatattttttaatattaaattagttttgtatatgtaatattttaatttgttaagagattatgattataagattaattatatatttttattacggggtgaagtatttgttattacgcggattttttcgttttcgtggtgataattgattttaagtgatttgttcgtttcggttttttaaattgggattataggtatgagttatcgtatttagttaaaaatttttttaaaatatgtaatatttttataaataagaatattgtttttaagaatgtattttaagtaaatagagattggtaaaaagtgtgtaaaattatatattagagttatttataatggagaaaatttggaaaattatttaatatttaataatggggtaaaataaagtattttaataaaagaattatagaatggaatgaaatgtaattattaaaatattacgtattattgaagtattgtttatattaataaaagattataataattttaatgtttattattagggattgtttaaatagattatggcgtaatagttaatggaatatttaaaaagaacgaggttatttttatgttttgatttagatttttttttttatttgaagtggtttttttattttagatatttatttgggtcgtttggttaaatgatattttattttattcgtgaagggggttttttgttattttatatatattaataatttgaatttatattagatgaatttttttattttttgtttagttgtttagtttttattatgtggtttattttaattgattacgtgttgtttgatttttattatacgaaaaaaggtttttgatggtagatgttatgtgttattgatgtgaaatttaatatttgaaata

SEQ ID NO: 41 - DNA, 2865 bp, Artificial Sequence
  chemically treated genomic DNA (Homo sapiens)
atgatagttattaagggattggtgggagggggaaataggaagttgttgtttaatgtgtataaatttatagttatataatatgagtgagttttagaaatttgttgaataatttagtgattatagttaataataagattttgtgaatttaaaaatttaaagagagtagattttatgtgaagcgttgttattataaaaataaaataatgggatataaggaaaatttggaggtaatggatatgtttattatttggtttgtagtaatgataacgtgagtgtatgtatatatttgtttaaatttattaaattgtgaatattaattatatgtagttttttggatattagttgtattttaataaagttgagggggaaagtgatattattgtaaataaataatttggttttatgacgggtggagaaattattttagagagtgtattagggaagatttttttaaggagaagatttgagaaggaagtgaggattttaataaagtgagagattaatataggtagataattaggatagattattttagtttgggagaggtgggaatgggggaagaagtttagtaagaagaagtttttgagaaaaggtttagtatggtatgttttaggatttgtaaagaggttggtataggtggatatgagtgggggtagggtaagaaaggaagttggagagtttattagaatggattatttagggttttgtaggtaatggtaatgagttagaaatgtatttggtgtttattttttaaattatatttggaaatatatatgaattttatttagttattgggagatattggaaagttttaagtaggggaatgatttgaattgatttagatttgtatttggttttgttggttagggtgtggagaattgattatagatatagtaagagtgtagggagatattttagaatattttttgttttttttggttatgtagatttggatatttttcggataaggtacgaatattttattttagtagtttattgtttgttttttttttatttattttgtttaatttaaatttaagattttgttatttttttgttgtattaatttaagttgttttttgttaatggagagtaatttatatatttatagttgatttatatttattggagtttatttaagggaggatattattttttatattgttttatgtttaatttttgtttttgaagaaagaataagtaaaaattaaaaggtagaaatgaaatttattggtagatagtttggtgttatattttgggtttggtagttaaagatcgatttttgatttaatcggttatgttatttatagattttagatattgtatggaaaagtattgtgaaaatttttgttttgttttgttttgatttgattattagtgtatgtagtttttagttatgtatttgttgtttgtttaattaattataatttttttacgtagatttttttagagttgtgagtttttaaaagggataggaattgtttatttagagagtttagtttttgagataggagttttgtcgatgtttttggtcgaataaattttttttttttttaattcggtattcgaggaattttgtttgtagtttgttttgttatattttttggttttttgattgggaagtgaggtgattggtggatggtcgaggtagttttttaggtgatttaagtttgttttgtggaatatttcggtgggggattttggttagttcgagtaacgtggattttgagagtatttttaggtaggtatttgtttcggtgggacgttttgttagagtagtgtgtggtaggttttcgtggaggattaatatagtggttgaatattgggaaggaattggtatttggagtttggatatttgaaatttggtaagattagtttttggaatttgtttattttatttgagtagaagcgtggtttgtttatttacggtgtgtttttattggtattttggttttggttttggttttgatttggtttgaattgtttgataggattggttttgggaatttgtttattttatttgagtggaagtatggtttgattatcgatggtgtgtttgtatcggtattttggtttttgtttttgatttgatttggattgtttgatattttggttttgtttttgatttggtttgaatttttggatattttgattttggttttgatttttgtttggtgtaaattgtaaaagtgtgtgtgtgttttttttatcggttttttgttttgtggtgtgtatgtggtgtgagcgtggtgttttgttttaaagaagtatgggttaggtataaataagtttattttattaggaattatgttgaaaaattttaaaaagggatttaagggagattatgatattaggaaaatttagaattttatgtaaaatagattggttagtattagaggtaggttggttattagaaggaagtttggaaaggttttttgttttaaaggtatggtataaggtaatttgtaaagttagggtatttagattagttttcgtatatagatgtttggttattgttggttttagatttttttatagtggttgagagaattgtagtataagtggttggtagaggtagagagagagagagagagaggtagagaggagagagagagatagagaagagaaagatagagatatataagtagttaagaaaaaaagtgtattttatttttttaaaagttaaggtaaatttgaaatttataattgataattgaaggtattttttataattttgtaatattttaatattattttgttgttagtgtaaataagggcgtattttaaaagtattgaggtttttttattaaaaatttttaatttagtagttcgtggatggtttaaatgtatttaatttgtagtagt

SEQ ID NO: 42 - DNA, 2865 bp, Artificial Sequence
  chemically treated genomic DNA (Homo sapiens)
gttgttatagattgaatgtatttgggttatttacgggttattgggttaaggatttttgataggaaggttttagtgtttttgggatacgtttttgtttatattgataataaagtagtattggagtgttataggattatggagaatatttttaattattaattataggttttaaatttattttggtttttaaaggaatagggtatatttttttttttaattatttgtatatttttgttttttttttttttgttttttttttttttttttgtttttttttttttttttttttgtttttgttagttatttatgttgtaatttttttaattattgtgaagggatttaaaattagtagtaattaagtatttatgtacgggaattggtttgggtgttttggttttataggttattttgtgttatatttttgaaataagggatttttttaggtttttttttgatggttaatttatttttaatgttggttagtttattttatataaagttttaagtttttttggtgttatagttttttttaaatttttttttgaaattttttaatatagtttttagtagggtgggtttatttgtgtttgatttatgtttttttgaggtaaaatattacgtttatattatatgtatattataaaataaagaatcggtaaaaagggtatatatatatttttatagtttatattaaataaaaattaaaattaaaattagagtatttagaaatttaagttaagttaaagataaaattaaagtattaagtaatttaagttaaattaaaaatagaaattaaagtgtcggtataggtatattatcggtgattaggttatgtttttatttaaatggagtaggtaagtttttaagattagttttgttaagtaatttaaattaagttaaaattaaaattaaaattaaagtgttaataaaggtatatcgtgggtgagtaagttacgtttttatttaaatggagtgggtaagttttaaagattagttttattaagttttagatgtttagattttaagtattagtttttttttagtgtttagttattgtgttgattttttacgggggtttgttatatattgttttggtaaggcgttttatcggggtaaatgtttatttgggagtgtttttaggatttacgttgttcgggttggttagagttttttatcggaatgttttatagggtaggtttaagttatttaaggagttgtttcgattatttattaattattttattttttagttagggaattaggaaatgtagtaggataagttgtagataaaatttttcggatatcgaattaaagaaagaagaggtttattcggttagaagtatcggtaagatttttgttttaagagttgagttttttgagtgagtaatttttattttttttaagggtttatagttttaagggggtttgcgtgaaagggttgtgattgattgagtaagtagtaggtatataattgggggttgtatgtattggtaattagattagaatagaataggataggaatttttatagtgtttttttatataatgtttggaatttatagataatataatcggttaggttaggggtcgatttttaattattagatttagggtgtggtattagattgtttgttagtggattttatttttgttttttagtttttatttattttttttttagaggtagaaattgggtataagataatatgaggggtggtatttttttttaaatggattttaataaatgtaagttagttgtgggtgtatggattgttttttattagtagggagtagtttaggttgatgtagtagaaaggtggtagagttttaggtttgagttaggtaagatagatgaggaaaaggtagatagtgaattgttaagatggaatgttcgtgttttattcgagaaatgtttaagtttgtataattaggagagatagaggatgttttgagatgtttttttgtatttttgttatgtttatagttaattttttatattttagttagtaagattaaatgtaagtttaagttaatttaagttatttttttgtttaagattttttaatgttttttagtagttgaataaagtttatatatatttttaaatataatttggaagataaatattaaatatatttttaatttattgttattgtttataaggttttaaatgatttattttggtaagttttttaatttttttttttattttgtttttatttatgtttatttatattagtttttttgtagattttgaaatatgttatgttgaatttttttttagggatttttttttgttgaatttttttttttatttttattttttttagattgaaatgatttattttagttgtttgtttgtattgattttttattttattagggtttttattttttttttaagttttttttttggagaagttttttttagtatattttttaaaatagtttttttattcgttatgaggttaaattatttgtttatagtaatattatttttttttttagttttattgaggtatagttagtatttaaaaagttgtatgtaattaatgtttatagtttggtgggtttggataagtgtatatatatatttacgttattattattataagttaggtaataaatatatttattatttttaaattttttttgtgttttattgttttgtttttatggtaataacgttttatatgagatttattttttttaagtttttaagtttataaaattttattgttaattatagttattgggttgtttagtagatttttggaatttatttatgttgtataattgtaaatttatatatattgaataataattttttattttttttttttattaattttttggtaattattat

SEQ ID NO: 43 - DNA, 6274 bp, Artificial Sequence
  chemically treated genomic DNA (Homo sapiens)
ggattatttgagtttgggaagttgaggttgtagtgagttaaggttacgttattgtattttggattgggtaatagagttagattttgttttaaaaaaaagaaaaattttatggttttgtttatattatttatttgattttatatgttgtttattttttttattaaaatttttagtttattaattatagtttttttataattaatatttcgatgtgataatgttttagtttaattattgtggttataatagaatgttataaattgggtgatttataaataaaagaagttgatttaggttgatttagaggttggggagtttaagagtttggtgttagtatttgatgagtgtttttttgttttattataatatgggagagggtattacgtgtgaagagagtttatttttataatatagttatttttataagaattaatttatcgttatgagagttatgtgaatttatttatgaggatagcgggttaagtttttaatatatggatttttcggggatatatttaaattatagtagttagttgtaacgttcgtgttatgttttattttggttttgatgtttgtgtagtttttttaaattgcgtttttgttttttagtgtgttttgtaatgtggaaatgatatattgggtaagaggagttgtagtaaagaggtttttagtgacgtagtgataagttgtggggagagggagtgttgtatagttttgtcgtatgttatagttttttagtgagtttgtgtttttggattgtgaattttatgtttgttttttagtttttttagttttttagatggtatagaattgttggaggggggtggagttgtatattttttttgttttgggtaggttattttttgataaaatattaggttaggtttttggtgaaataattttttttgagggtagattttttattaataatagaatgttttaatttattttaaaatggttttttttttttttttattgttagaagtataatgagattttttttttaatattcgtggtaaggatttagtagagttttaggaggtaatatttttaagtgttttatattattttgtattatgattgggttttgttggagtttttaatttgtagaattgtttatattgagtttttcgtaattttttaattatagggtaaatttttttagtcggtattgggtttttggaggtttttgtttgttggtttttttttttggaggttgtgtttttgtgtttgtttgtttttttaatttggggggtagtggtttgtttaatgattttaattttttgaaagagttaagaagaggtgttaatttttcggtttgtttagttttttatttgttgttagaatggagcgttaatagtgttttttatagtgatatgtaatttttaattttagagatgatgaagtatattaatgataaaggagaaatgttttagtagttttttgttagtatattattttttgaaaaagttgttttttttatattttgtaagagatgggttttaatttagagtttaaggtaaatgattttttttaaggagaaggaataaatagttttagaaattatgaaagtttgtttttaggagtgtttttgaattttagtaggggttatatttattttgtagaaataggtgaggtatgtttttggtataaaattttaatggtatagaaggataaattgaaaaataagtttttttttaaatttttgatttcgagttatttagtttttttttttagaggtaaagttgttattagatttttgtatttttttaatatatatttttagaagagttgttaagtgaatatatgtttaagtgaaaatttattttagaagtgtatttttttaaggaattttagggttggaaggaatttgtgttagtttttaatttataatttttattagtatttattgtttttgtataaaaattttttttaaaaaagttttttttattttgatatagtttattttatttttatttagttttaataatttataaaatatatttttgaaagtttaaaatttgttattatgttttttttttttaattaatttttattttgatttttaagttagagaaaataggtggttaaatgttttttgtttaagatggaatttagaatatttgaagattttagatttttattttgttaaataacgtgttttttttttttttttatagagtatttggttttaggaaatttagagttatattttttatagataagattaaatttttatttaatatatttagaaattttttttaagaggataattatttattagaggaaaaaagttttttatgtatagttggtaaagggatggaattatttgtgttattaaaattgatagacgtttatgagatttattaagggaaatattagagttttagtatatatttgttaatatagtatatatgaaggttttatttataatttttttggttaagtagaaattttggtattatttattttaataaatttttaagatattatgaaatagaattttaggttttgatattattatttgttttaggttttgaagcgttgttggataagaggggtaaaatacggttttgttttggatttaaagttggttttttatattagtaagtatattttggtattttggttatttttttcggttatagtattatattgttataaaaggtagatataagtattaattagtttataggttattagataagtttagtttgattaatgtttaatatagtaattgggttattattgttatttttgtggtggtggtatatatatttagtttttgttcgggttatggtttaggattattttttatagaggttgtgagttagagttttaattgtgtagggttttaattatgttaggttatttattttttttaagaggattttattagtgtttgttcggttatatagttttttatttattaagtaatatagttattagtatattttaggtattagttaaggattataaaattaacgtgaatgttagtttttgtattaaaagtttaaaggagaaatttaaattttatatagatgttttatgaagatgtttagtaaatttatttttttttgttttttggaatttattttagtattgtgttatgtgtgtgtttagtaattttttataaaaagttttgttttttgtgatgttattagattatattgaagaatatataagtcgtattatgaaggttgttgttttatatagttttaacgtagtgagaattgatgtttttatatgttgtttttttgggtatttaaagaaatttttgtatagttttataaattagttgtagtttaaattgatttgtgttgtgatttgtatatataggttatatttttttgatagaaaatatagtttaaaattaaatttgtagtttttgttaagtgaatgtataggattttattgtatttaggttttttattgtaagatttatttttgtttttattttatgttttattgttgtgttttttatttgtttttttttagttttgttttttgtgtttttacggattgtttttagtttaggtgtgtaggaagtatatatatgtttgtagagtttttatggtttttgtatttagggtatgattttaacgtatagtggttgtattgatttgttaaaataaaggaatagattattttttttaatttatagggaagttttaggttgtgcgggtagtgagtagatttgtgtttgtttgcgtttgttttggtgaaaaattttatcgtttaggttgtagggtgcgagatttaggtataaatattttgttggatgaggaggaaagatgtaaggttgtttttttttagagatagtaaagggtaggtttgtagttttatttattttaggattgtgatttttgatagagtcgagagattagggttgttgaattaggtttgaaggttttagtgaatttcgtgaagagaggaggggtttggttgtaatatggatttagaggatatttttattgtaggagaaggaatagtggggatggggtggatttgttaaaggaatatagtttaagtttttgtagtttaaaaaagtttagttttttttggttaaagttttcgcgagtttttttggtattttttttgcgggagttataggggtagtgggatatttagtttttttaaaagtatttttacggttgtttgtgttaagtttttattttaagagttttatttttgcgaagtaatgtgttttatatattggttttaaagtatttatggttggttgtaataaatattaaggaggtttgtttttgtattcggagttgggtgtttttattttagatgatttcgagggtgtttgataagatttgaaggattttcggattttagagtattatttcggacgtttggtatttttgtcgcgcgggtacggcgatttttttagttgttaggttagtttttgattttcgagagggtttcgtagtgttgtaggggaggtggggattcgaataaaggagtagttttttcgtcggtgttattattcgacgttggttttaaggttcggttagtttgtttaaagttggtataagtttgttttgtaaaataaaagaagggaaagggggaaggggattttggtatagatttggttcgatttggatataggttgggtttgtaagttcgcggggatcgggtttagaggggtagtgttgggaacgtttttttcggaaattaattttttagggtattcgttttttttttatgcgtcgttttattttcgtcggagattaggtttcgcgggggttatcgttgtttatcgttttcggcggtcgttggttttgggttttcgttgttggtttttttttttttttttcgtatttttttttttttttgtttttttcgatttttttttcgtcgtttggtttttttttttttcgttttgttttttcgcgtttcggttcgcgcgagttagacgttcgggtagttttcggcgtagcgcggtcgtagtagttttcgtttttcgtacggtgtgagcgttcgacgcggtcgaggcggtcggagtttcgagttagtttcggcggtcgtcgtcgtttagatcggacgataggttatttcgtcggcgttcgttcgagttttcgtttcgtcgttaacgttataattatcgcgtacggttttttgatttcgtttagtattgatcgggagagtcggagcgagtttttcggggagtagcgatgcgatttttcgggacggtcggggtagcgtttttggcgttgttggttgcgttttgttcggcgagtcgggttttggaggaaaagaaaggtaagggcgtgtttcgtcggttttcgcgtcgttttcggatcgcgtttcggatttcgtagttcgtttaatcgcgtatcggcgtatcggttcggcgttcgcgttttcgttcgtttttttttgtttttttgagattagttgcgtcgtcgatcgggatcgcgggaggaacgggacgtttcgtttttcggtcgggagagtttggggcgggcggaggaggagacgcgtgggatatcgggttgtaggttaggcggggaacggtcgtcgggattttcggcgtttcgaatcgtttttaattttttttttttatttttttcgtttagttgcgtaggatcggcgttagtgggcgaaagtcgggtgttggtgggcgtttggggtcggggtttcgtacgtgcgtttcgcgttgtttttttagggcgcgacggggttttggcgcgtattcgaggggcgggcgttgtttattcgtcgagattgtattgtttagggaagttgaggaaggaatttaaaaatatagttttttttcggatttcgcgggataggcggttttttgagaggattttttcgttttcgtttttcgcgtaggttttaaattgaagtcggcgttcgttagtttggtttcggtttttttttaggttttcgcgattttcgttttttagtgtggagtcgtagtttcgatttgggagttgggagaattcgtttattattatttgcggttttcggggaggggtggtgttggcggcggttagttttttcgttggtaaaaggtaggtggggttcgattcgttttttgggcgtagatttcggtcgttcgtttcgttcggtgcgttttcgttttgtttatttaagagtgttttttatttttcggggattttagtttttttttgggcgttcgcgtcgaaagttttaggttttttttcgatggtcgtttcgcggagacgttcgggtttgttttatttgtagtttttcggtcgcgtttgggtttcgcggtggagcgggacgcggttgt

SEQ ID NO: 44 - DNA, 6274 bp, Artificial Sequence
  chemically treated genomic DNA (Homo sapiens)
atagtcgcgtttcgttttatcgcgaagtttaggcgcgatcgaagggttgtaggtggagtagattcggacgttttcgcgaggcggttatcgaaggagagtttggggttttcggcgcgggcgtttaggagggagttggggttttcgggaggtggggggtatttttggataggtaagacgagggcgtatcgggcgaggcgagcggtcggggtttgcgtttaaggggcgggtcggattttatttgttttttgttaacgaggaaattaatcgtcgttagtattattttttttcgggagtcgtaggtggtggtagacgagtttttttagtttttaggtcgaggttgcgattttatattggggaacgaggatcgcggggatttggagaggggtcggggttaggttggcgggcgtcggttttagtttgagatttgcgcggagggcggaggcggggaggtttttttagaaagtcgtttgtttcgcggggttcgaggggaggttgtatttttgggttttttttttagtttttttaaatagtgtagtttcggcgggtgggtagcgttcgtttttcgggtgcgcgttaggatttcgtcgcgttttgggaagatagcgcggggcgtacgtgcgggatttcggttttaggcgtttattagtattcggttttcgtttattgacgtcgattttgcgtagttgggcggggaaagtgagggaagaaagttgggagcggttcggggcgtcggaggtttcggcggtcgtttttcgtttggtttgtagttcggtgttttacgcgttttttttttcgttcgttttagattttttcggtcgaagaacgaaacgtttcgtttttttcgcggtttcggtcggcggcgtagttgattttaaggaaataggaaaggacgggcgggggcgcgggcgtcgagtcggtgcgtcggtgcgcggttgggcgggttgcggggttcggggcgcgattcgggggcggcgcgggagtcggcgagatacgtttttatttttttttttttttagagttcgattcgtcgggtagagcgtagttagtagcgttaggagcgttgtttcggtcgtttcggagggtcgtatcgttgtttttcgaagagttcgtttcggttttttcgattaatattggacggagttagggggtcgtgcgcggtggttgtggcgttggcggcgaggcggggattcgggcggacgtcgacgaggtggtttgtcgttcggtttgggcggcggcggtcgtcggggttagttcgggatttcggtcgtttcggtcgcgtcgggcgtttatatcgtgcggggggcggaggttgttgcggtcgcgttgcgtcgggggttgttcggacgtttagttcgcgcgggtcgaggcgcggggaggtagggcgggaggaggagggattaggcggcggaggagggatcgggaggagtagaggaggaggagaatgcgaggaggagggaggagaattagtagcggggatttaaggttagcggtcgtcggaggcggtggatagcggtggttttcgcgggatttagttttcggcgggagtggggcggcgtatgggaggggagcgggtgttttgaggagttaattttcgagaggggcgtttttagtattgtttttttggattcggttttcgcggatttgtaggtttagtttatgtttaggtcgagttaaatttgtgttagggtttttttttttttttttttttttttgttttataaagtaaatttgtattagttttagatagattggtcgagttttagagttagcgtcggataatggtatcgacggggaaattgtttttttattcgggtttttattttttttgtagtattacgggattttttcggggattagaggttggtttggtagttgaggaggtcgtcgtgttcgcgcggtaggggtgttaggcgttcgaggtggtgttttaaagttcgagggttttttagattttgttaagtattttcgaaattatttgaaatgagggtatttaatttcgggtgtagagataggtttttttaatgtttattgtaattagttatgggtattttgaagttaatgtgtgaagtatattatttcgtaaaagtgaagtttttggaataaaggtttgatataaatagtcgtggaggtgtttttagagaggttaagtgttttattgtttttgtagttttcgtaggagaaatgttagggaaattcgcggaagttttggttaaaagaaattgagtttttttgggttgtaggaatttgagttatatttttttggtaagtttattttatttttattgtttttttttttgtagtaaaaatgttttttaggtttatgttatagttagattttttttttttttacgagatttattaggatttttaggtttggtttaataattttgatttttcggttttgttaaaaattataattttgaagtaagtgaagttatagatttgttttttgttgtttttgaaggggagtaattttatattttttttttttatttagtaaaatgtttgtgtttgggtttcgtattttgtagtttgaacggtggggttttttattagggtaagcgtagatagatataggtttgtttattgttcgtataatttggaatttttttgtgaattaggagaagtaatttgtttttttgttttaataaattagtatagttattgtgcgttgaagttatgttttgaatgtagaggttatgaaggttttgtaggtatgtgtgtgttttttgtatatttgggttgagagtagttcgtagaaatatagaaaataaaattagagaaaggtaaatgggaagtataatagtggaatataaaatgaagataggagtgagttttataataaaagatttgaatataataaagttttgtgtatttatttaataagggttgtaaatttggttttaaattatattttttgttaagggaatgtgatttgtgtgtataagttataatataaattaatttaagttataattgatttgtaagattgtataggaatttttttgagtgtttaaaaagatagtatgtaagaatattagtttttattacgttaggattatatgagataatagtttttatagtacggtttgtatattttttaatgtgatttgatagtattataagaaatagagttttttgtaaagaattattagatatatatatagtataatattgggatggattttagggaatagagaagaatgggtttgttgaatatttttatgggatatttatgtaaagtttgagttttttttttgagtttttgatataaaagttgatatttacgttgattttgtagtttttggttagtatttggagtgtgttgataattgtgttatttggtaagtaaaaaattgtatggtcgagtaggtattaatgaagtttttttaagagagataagtagtttggtatagttagggttttgtatagttagggttttagtttatagtttttgtggagggtggttttagattatggttcggatagaggttgggtgtgtgtgttattattataggaatgataatagtggtttagttgttgtgttaagtattggttagattaagtttatttgataatttgtgagttggttaatatttgtatttgttttttatagtaatgtgatgttgtggtcgggagaagtgattaggatattaaggtatatttgttagtatgagaggttaattttgaatttaaggtagagtcgtgttttattttttttgtttagtaacgttttaaaatttgagataaatggtgatgttaggatttaaaattttattttataatgttttggaaatttgttagggtgagtaatattaaaatttttgtttggttaaaaaaattatagataaagtttttatgtatgttatattagtaagtatgtattaagattttagtattttttttaataaattttataagcgtttgttaattttaataatatagatggttttatttttttgttagttgtatatgagaaattttttttttttgatgagtggttatttttttagaagaagtttttgagtatgttgaataagagtttagttttgtttataaggaatgtggttttgaattttttaaaattaaatgttttgtgaaaggggaggagaaatacgttatttggtagggtgaagatttgaggtttttaaatattttaagttttattttaggtaaaaggtatttgattatttgttttttttggtttagaggttaaagtaaagattgattaggaaaaaaaaatatagtggtagattttagatttttaaaaatatgttttataagttattggagttaagtaaaagtagaataagttatgttagagtggaaagggtttttttgagaaagatttttgtgtaagaataataagtattaatggaggttgtgaattaaggattgatataggttttttttaattttaaagttttttaagaaaatgtatttttaaaataggtttttatttaaatatgtgtttatttgatagtttttttaaggatatatgttaaggagatataagaatttggtaatagttttgtttttagggaggagaattaggtagttcggggttaggggtttagagggagatttgttttttaatttgtttttttgtattattgggattttgtattaggagtatgttttatttatttttgtaaggtaagtgtggtttttgttgaggtttagggatatttttgggggtaggtttttatggtttttgagattgtttattttttttttttgaaggaagttatttgttttgagttttgagttgagatttattttttgtagaatgtggaagaagtagtttttttaaggggtaatgtgttgatagaaaattgttgaagtattttttttttgttattagtatgttttattatttttagagttgagggttatatgttattataggaggtattattggcgttttattttagtaataagtagaaagttgagtaaatcgaaaaattaatatttttttttagtttttttagagaattgaggttattgggtaaattattgttttttaaattggagagataggtaaatatagaagtataatttttagaggaagaaattagtagatagaaatttttaaggatttagtgtcggttgggaaagtttgttttgtaattgagaaattgcgggaggtttagtgtgggtagttttgtaaattaagaattttagtagagtttagttatggtgtagggtagtatgagatatttgagagtgttattttttggagttttgttaggtttttattacgaatattagggggaaaattttattatgtttttggtagtggaaggagaagaggaattattttgaaataggttggaatattttattattaatagaaggtttgtttttaggagaaattattttattagaggtttaatttggtgttttattagagggtgatttatttagagtaagggaaatatataattttatttttttttaatagttttgtattatttaaggggttggggaagttgagaagtaagtatgaagtttatagtttagggatataggtttattggaagattgtgatatgcggtaggattgtgtaatattttttttttttatagtttgttattacgttattagaagtttttttattatagttttttttatttagtatattatttttatattgtaaggtatattaaaaggtaaagacgtagtttgaagagattgtataagtattagaattagaatgagatatgatacgaacgttataattaattgttgtggtttgaatgtgttttcgaaaagtttatatattggaaatttaattcgttgtttttatgaatgaatttatatggtttttatggcggtgggttaatttttgtgggagtggttatgttataagagtaagttttttttatacgtgatgtttttttttatgttatgatgaagtaagaagatatttattagatgttagtattaagtttttggattttttagtttttaaattagtttaaattagttttttttgtttataaattatttagtttgtggtattttgttataattatagtaattggattaagatattattatatcggagtattaattataaaaaaattatgattaataggttaggagttttaatggaaaaaataggtaatatgtaagattagatggataatgtaagtagagttatggaattttttttttttttgagatagggtttggttttgttgtttaatttagagtgtagtggcgtgattttggtttattgtaattttaattttttaggtttaggtgattt

SEQ ID NO: 45 - DNA, 6277 bp, Artificial Sequence
  chemically treated genomic DNA (Homo sapiens)
atttgttttagtttagagaaggtgagtgatttagttaaggttttatagttagaataagttaggtatgggattggatttttaaatttttgattttaaatgtatatattttattagagtgggttgttttattattaggttttggttgtttatttttagttttattttttagttttttagtattgaagtagttttcgaaggtagtgatggtaaatttttttgagtttttattagaaatttagtaatttataagtttcgaatattatttatttcgtttggtttattgtaaattttagtttggtttattgtaaaattaatttttttttttcgttttgtttttttatttatttgtaatttttttttttatttttgatagtattttattttgttatacgttgtaggatgttgaagtgtagaagtgggagtgtgttagttttaagtagaggttttaagaagtattacgtttttatttatttttatttgagttttaattttttttgagaattacgtttgaagtggtgtttgtttttttagtttggttttagaaatgagaagtcgatatgtatttagtttgtagattggagttaagtttagttaagtttagttaatttagatttatttgttgttataagttattaagttttggagttgtttgttacgtgatattattttagtagaagttgattaaaatatttttttttttggaattaggttttgatgaatattattattttttgagatttagtttttttttattttttatattgtttttttttgattttgtttgtgtattttttagaatattattattttttattttttaaatatatagattttgcgtattatttttggtggaattttagttgttttttttaaagttgagagagttttatttgttttttggttagttaaaatatatgattttgggttttgttatttgttataaagggtttttaaagaatttttatttgaaatttttttagttttaatttttcgttgttttaaaataaaagtatagaaagcggagtgtggattatgtaatagtagatattatattttttggttgtttttttttttttttttttttttttttgagatagggtttcgttttgttgtttaggttggaatgtagtggtgtgattacggtttattgtagtttagattttttgagttttggtgatttttttattttagttttttgagtagttggggtagttggggttatagatatgtattattatgtttggttgatttttgtatttttttgtagagagatggagtttcgttatgttgtttaggcgggttttgaatttttgggtttaagtgattcgtttgttgcggttttttaaaatgttgggattataggtatgagttattttttttggttttggttgttttttgatagtgggaaggaaagtatggaaaataaatagtagtttttttttagaatgtaaagaatagaagttgtcgatatttgaaaataaaagttatgttttgtgttttgaggaagattagagttagttttgaattatttatgtatgtgaggagttgagagtagtcgtgtggataatttaaaatattagagaaatttattaggattttatatgggttgggaaattttaaagttgtttaaaagtgtgttagaagtgttttagatgaggtatttttttaaaataataaaattggttgataaaaatatgtttttttatatgttaggattttataaagatttattgtgtaaaaataaaagtataaaaattattgaattaaaatgtttggttttgaatatattttttttaaaaaatagattttatatattttatatgtttgtgtatgtattttttatttttttaagaaatagggttgaataggtgcgttggtttatatatgtaattttagtattttgggaggtcgaggtgggtagattacgaggttaggggttcgagattagtttgattaatatggtgaaatttcgtttttattaaaaatataaaaattagttaggtatggtggtgcgtgtttgtaattcgagttatttaggaggttgaggtaggagaattgtttgaattcgggaggtggaggttgtagtgagtagagatcgtattattgtgttttagtttgggtgatagagtgagattttgttttaaaaaaaaaaaaaaaaaaaaaagagaaaaagaaatagggttttattttgttgtttaggttggagtgtgaatttttgggtttaagcgatttttttgttttggttttttgagtagttggtattataggtgagagtagtattattatatttggtttttagattattttttattattttttttaagtgatttatttttttaaatttttttgagatataattttattttgttatttaggttggagtgtagtggtttgattttggtttattgtaaattttatattttaggtttaagtaattttcgtgttttagttttttgagtagttggaattataggtatttgttattatatttggttaagttttgtattattagtagagatgggggtttattatgttgattaggttggtttcgaatttttgattttaggtgatttatttatttcggttttttaaagtgttgggattataggcgtgagttattatgtttaattttaaagtgattttagatttatagtaaaattgagaaggaggtatagcggttttttatatattttttgttttgatacgtgtatagtttttttaattattaatattttttattagagtggtatttttgttgtaattgaatttatattgatatattattattatttaaagtttatggtttatattagagtttatttttggtgttgtatattttgtgggttttaataaatgtgtttattattatagtattatatcgagtagtagtttttttgttttttgtgttttttttgtttatttttttttttttgttaatttttgataattattgattttttgtattatttttatagtgttttttataaaatgttatatagtttggaattatatagaatatagtttttttagatcggttttttttaggtatatattttttaaagtaaagtaatatgagtttttaattgtgtggattttttttttttttttgaggataataagtttatatttttttagtttaatagttggattatatagggatattataggtgttttattgagtgatagaagaagatgattggggattaaaataataatattttaattggaaaattagttgtgggaaattaggggttgataagtagtttttttttttatattttttttttttgttttatttttttatcgtgtttttattttatattttacgggttttttatttttttttagaggtttggagggtatttttttattttttttagtggattatttataggagttttgaagtaaatgttcgaaggaaatttttattatttgtgtgttttgataggtatttggagttgggatgtggtattaattagtaaaatatatttcgtgttttttagtagtttatagttgatggtagtgagaaatttgtaaataaaataattttttaggagagattgtaaaattagaaataaacgtagtggaggaatttttagaatgtggtttttttgaaaggatttatattcggtttttagagaatttgatttaattggtttgggttgagtatattgttggagagtgttaaaatattttttaggtgattttgatattagtcggggttcggaattattttcgatttattgaatttgggattttaggagaggtttagttattagtggtttaataagttttttgggttaagtttgaaaattaggggtttgggttgttaagtggcggtatgggaatggaaggttttggaaggtgagtagtgaggttggggcgtaggtttgggaagggagaggttttttaatagttattttttttaattttgttttagtttagggtaatgggtaggtttttttattagagtttggtttgagtttttagaggtaggatttttttgagggatgtggaggtgtgaagattagttttgagattatagaggttttttttaagttttagtttttgattttgcgggtattatttttatgatttttagtgttgtggttttttattttttttttataggttcgttttttaattgagggttggtttttttatttttttgagacggagtttcgttggttgtttaggttggagtgtaatggggcgattttagtttattgtaatttttgttttttaggtttaagcgattttttcgttttagtttgttaagtagttgggattatagggatttattattatatttggttgtttttgttgttgttgttttggtatttttagtatagacggggattcgtcgtgttggttaggttggtttcgaatttttgattttaggtgatttattcgttttggttttttaaagtgtttagattataggcgtgagttagtacgttcggtcgagggttggtttttaaaatatcgaaaatttagataggaacggtgtttatttttaattttagacggaaattgtgttcgtatttataagaaaagtagttttttgtttagagtaattaaattttgaattttattttcgatttttttttgttttttaatttttttattttagcggatgggaaatagcgagtttagtcgtttttttatttcgggatttttttttcgggttaattgcgtagggtacgatttcgtcgtggtgtttcgcgcgttcgatttttaggggttgaggtgaggagggattttcggtgtttcgggaagcgcggcggtttttgcgggttgcgggcggattttttttttcgtggggaggggttgcggtcgcgcggagtcgtcgcgggtcggaggttttttttcggggtggtcgcgtaggaagcggggcgggtgggggcggtgcggggcgcgtacggggtcggggcggcgggggaggcgcgggtttgggcggttagtttcggcgtatagtcgcggtcggggcgcgcggcgcggggcggaaaagtttgtttatatagattgtatatcgtttggggaataatgtagtaaaggaagtgagtcggttcggtttgattgttttaattttttgtttttatatatattagaggggaaaaaaaaagaggagcgagagaaagaaaaaaagggggaaaaattaggattttattataagagttatagatcgtttgtagacgtttgttagtatggaaagtcgggggttttcgttcgggtttttttagaaatttttttcgaagaagatttttttatatttgggtaggtaatagggtttttgtttgttgttcggatatttaaaaagtttgtttgggggtgttttttttttttttttttttttttgggcgcggtgggggtggggcggggggcgtcgcggggtgggttgcgggtcggggtgggggtggcggtgcgttcgcgcgggagggtcggtcgcggggagggggcgtcgcggatgtttttgcgttcgcgtcgttgttatcgtcgtcgttcgagttcgcgtcgggttcggggttgcggggattttgcgttcgcggtttttttttttggggttgcgttgcgattttagaggaaggggcgtcgggcgtgtaattttgggagttcgtttagggtttcgttgtaggtagcgcggggagcgggggacggcgagatttcgggtttttgggaagaatcgtggtaggagtaggttgagtgtttggaggttggattatcgtcgattttttagttgggatcgtagttaggtttttttcgagtgggtaaagtgtattggtgttcggatttagggaggaagatagggatggagagggcggtggaggatatgggtcgcgaaggtgtggggttgggggttgcgtttattttcgtttggtaggtgattttcgtttaggttatcgttttaggcgtacgttttatcggatatttaaaagtcggtggtttttattgggtatggttttggagaaggattaggtaagaaatgattttggggttttttttattttttatttttgtttattttcgaatttaacgttggtttgtgacgttattgtaatttttggggaggcgggattaagattttggagtagttaaaaagtaaaaataaaaggttttggttttgttattttttttgaatcgaattattttagggataagttgtagttaggcggcgggtggaggtggaagtaagaaatgttattttagaaattgtaaaaggggttttttagaaagaaaaaaaaacgagtgtcgggagagtttttggtttgtttggaaa

SEQ ID NO: 46 - DNA, 6277 bp, Artificial Sequence
  chemically treated genomic DNA (Homo sapiens)
tttttagataagttagaaattttttcgatattcgtttttttttttttttaaaaagttttttttgtagtttttgaaataatattttttgtttttatttttattcgtcgtttaattgtagtttgtttttaggatgattcggtttagaaaagataataaaattaagattttttatttttgttttttaattattttaaaattttaatttcgtttttttaaaagttatagtagcgttataggttaacgttgagttcgaaggtaaatagggatggggagtggaaggggttttaagattattttttgtttggtttttttttaaaattatgtttaatagagattatcggtttttaaatgttcgatggggcgtgcgtttggggcggtgatttgggcgggggttatttgttaagcgagagtggacgtagtttttagttttatattttcgcgatttatgttttttatcgttttttttatttttgtttttttttttggattcgagtattagtgtattttgtttattcgaggggagtttgattgcggttttagttggaaggtcggcggtggtttagtttttaggtatttagtttgtttttgttacggttttttttagggattcgaagtttcgtcgtttttcgtttttcgcgttgtttgtagcggggttttgggcgagtttttagggttgtacgttcggcgtttttttttttggggtcgtagcgtagttttagggaggggagtcgcgggcgtagggttttcgtagtttcgggttcggcgcgagttcgggcgacggcggtggtagcgacgcgggcgtaggagtattcgcggcgtttttttttcgcggtcggttttttcgcgcggacgtatcgttatttttatttcggttcgtagtttatttcgcggcgtttttcgttttatttttatcgcgtttaagaaaagaaagaaaaaaagaaaatatttttaaataaattttttaagtgttcgagtaataggtagaagttttgttatttatttagatgtgggggagtttttttcggggggaatttttaggaggattcgggcgaaagttttcgattttttatgttgataggcgtttgtagacggtttgtggtttttgtaatgagattttgatttttttttttttttttttttttttcgttttttttttttttttttttttggtgtgtgtgagagtaggaagttggagtagttaggtcgagtcggtttattttttttattgtattattttttaggcggtgtgtagtttgtgtaaataggttttttcgtttcgcgtcgcgcgtttcggtcgcggttgtgcgtcggggttggtcgtttaggttcgcgtttttttcgtcgtttcggtttcgtgcgcgtttcgtatcgtttttattcgtttcgttttttgcgcggttatttcggggaggagttttcgattcgcggcgatttcgcgcggtcgtagtttttttttacggggaggggggttcgttcgtaattcgtagaagtcgtcgcgtttttcgggatatcggggatttttttttattttaatttttgggggtcgagcgcgcggggtattacgacggggtcgtgttttgcgtagttggttcgggaggggggtttcgaggtggggaggcggttggattcgttgttttttattcgttgggatggaagagttggggggtagaggggaatcgagagtggggtttagggtttggttgttttgggtaaaggattgttttttttgtgggtgcgggtatagttttcgtttggggttggagatggatatcgtttttgtttgggttttcggtgttttaaaagttagttttcggtcgggcgtgttggtttacgtttgtaatttgagtattttgggaggttaaggcggatggattatttaaggttaggagttcgagattagtttggttaatacggcgaattttcgtttgtattaaaaatattaaaataataataataaaaatagttaggtgtggtggtgggtttttataattttagttatttggtaggttgaggcgagagaatcgtttgaatttgggaggtagaggttgtagtgagttgagatcgttttattgtattttaatttgggtaattagcgaaatttcgttttaaaaaaataaaaaagttagtttttagttggggggcgagtttgtggggaaaggataaggagttataatattggaagttatggaaataatgttcgtagggttagagattgaggtttgaagggagtttttgtggttttagaattggtttttatatttttatattttttaaggaggttttgtttttgagggtttaggttaggttttgatgggagagtttgtttattgttttaggttgagataaggttgggggggatggttgttgaagagtttttttttttttaggtttgcgttttaattttattgtttattttttagaattttttatttttatgtcgttatttagtagtttagatttttggtttttaaatttgatttaaggggtttgttaaattattagtggttgggttttttttggagttttagatttagtaggtcgggggtggtttcgggtttcggttaatgttagaattatttggggagtgttttgatattttttaataatatatttaatttaggttaattaagttagattttttgggggtcgggtgtgagtttttttaaaaggattatattttaagagtttttttattacgtttgtttttagttttgtagttttttttgaaagattattttgtttataaattttttattgttattaattgtgagttgttaaagggtacggggtatgttttattgattagtattatattttagttttaagtgtttattagagtatataggtgataggaatttttttcgggtatttgttttagggtttttgtgggtagtttattggaaagggtgggagaatgttttttagatttttgagaaggagtgggaaattcgtggggtgtagggtgggggtacggtaggagagtggggtagaaggagaagatatggaaaagagggttgtttattaatttttgattttttatagttaattttttaattagggtattattgttttaatttttagttatttttttttgttatttagtagaatatttatggtgtttttatatgatttagttgttggattgagagaatgtaaatttattatttttagggaaaaaaaaaaaatttatatagttaagaatttatgttgttttgttttaggagatatatgtttgaaagaaatcggtttgaaaaggttatgttttgtatgattttaaattatatgatattttgtaaaaggtattatggagatagtataaaagattagtggttgttaggggttagtagggagggaggggtggataggaggagtatagagggtaaggaaattattattcggtatgatattataatggtggatatatttgttaagatttatagaatatataatattaagaatgaattttaatgtaaattatggattttgggtgatagtgatgtgttaatgtagatttaattataataaaggtattattttggtgggggatgttgatgattggggaagttgtatacgtgttagggtaggaggtatatgggaaatcgttgtgttttttttttagttttgttgtgagtttaaaattattttagggttgggtatagtggtttacgtttgtaattttaatattttgggaggtcgaggtggatggattatttgaggttagaagttcgagattagtttggttaatatggtgaatttttatttttattaataatataaaatttagttaggtatggtggtagatgtttgtaattttagttatttaggaggttgaggtacgagaattgtttgaatttgggatgtggagtttgtagtgagttaagattaagttattgtattttagtttgggtgatagagtgaaattgtgttttaaaaaaatttaaaaaaataaattatttaaaaaaaatagtgaaaaatagtttaggggttaggtgtggtgatattatttttatttataatattagttatttaggaggttaaggtaggaggatcgtttgagtttaagagtttatattttagtttgggtaataaagtgagattttgttttttttttttttttttttttttttttttttttgagatagaattttattttgttatttaggttggagtataatggtgcgatttttgtttattgtaatttttatttttcgggtttaagtaatttttttgttttagttttttgagtagttcggattatagatacgtattattatgtttggttaatttttgtatttttagtagagacggggttttattatgttggttaggttggtttcgaatttttgatttcgtgatttgtttatttcggttttttaaagtgttgggattatatgtgtgagttagcgtatttgtttaattttgttttttaaaaaaataaaaaatatatatataaatatatgaagtatatgaagtttgttttttaaaaaaagtatatttaaagttaaatattttaatttagtgatttttatgtttttatttttgtataataaatttttgtagaattttaatatgtaagggagtatgtttttgttaattagttttattgttttgaagaaatattttatttaaaatatttttgatatatttttgggtagttttagggttttttagtttatatgaaattttgataagtttttttggtattttggattgtttatacgattatttttagttttttatatgtatgggtgatttagagttgattttggttttttttaaagtatagggtatagtttttatttttaggtgtcggtagtttttgttttttgtattttaagagaaagttgttatttgttttttatgtttttttttttattattaaaaagtagttaaggttaggggaggtggtttatgtttataattttagtattttgggaggtcgtagtaggcgaattatttgaatttaggagtttaagattcgtttgggtaatatggcgaaattttatttttttataaaaaaatataaaaattagttaggtatggtggtgtatgtttgtgattttaattattttagttatttaggaagttgaggtgggaggattattagagtttaggaggtttaggttgtagtgagtcgtggttatattattgtattttagtttgggtaatagagcgagattttgttttaagaaaaaaaaaaaaaaaaaaaaaaagtagttaaaagatgtggtatttgttattgtatgatttatatttcgttttttatgtttttgttttaaaatagcgaggagttaggattgagaagattttaagtaagagttttttaggagttttttatagtaagtgatagagtttagggttatatattttggttggttaagaaataagtgagatttttttagttttaaaaagaatagttgagattttattagagatgatacgtaaaatttgtgtgtttgaggaatgagagatagtgatgttttggaaggtatataggtagggttagggagaggtagtatgaagaatggaagagggttaagttttaaaaaataataatatttattaaagtttggttttaaaagaaggggtgttttagttagtttttgttgggataatattacgtaataaataattttaaaatttagtagtttatggtaataagtgagtttaggttggttgggtttggttgggtttggttttagtttgtaggttgaatgtatgtcggttttttatttttaggattaggttaaaggaatagatattattttagacgtggtttttaaggagagttggagtttaagtgggggtgagtggaaacgtgatgttttttaaaatttttgtttaggattgatatatttttatttttatattttaatattttataacgtataatagaatgggatgttattaaaagtaaagaaaaaaattatagatggatgagaaaatagagcgggagaagaaaattagttttataataaattaaattaaaatttatagtaaattaagcggaataaataatgttcgaagtttatgaattgttgaatttttgatagaagtttaaaagggtttgttattattattttcgaagattgttttaatattggggggttaggaggtagggttgggaatgaatagttaaagtttgatggtaagatagtttattttggtggaatgtgtatatttggaattaggaatttgggaatttagttttatatttgatttgttttaattatgggattttgattaaattatttattttttttgggttggaataagt

SEQ ID NO: 47 - DNA, 9021 bp, Artificial Sequence
  chemically treated genomic DNA (Homo sapiens)
ttattgttatacgtggtgttttttttttataaaaagaaagaacgttaaaaataaatataataaatttagaatgatgttattaaattttagttataaatatattttaattaaagatttgttttttttttttgttaaaaagaaattagtaagtattggagattgattagtattaaattgggttttttttttggtgaatttagtaggattggaatgggaatttttttattatgtggtttaatgttgtttaatgttttattaatgtattgtttaaaattatgttttataatattttaattttattttttgggaaagaatgggttaaaattttttttttttttaattattattttttagaaagttttagttatatgtttatatgtatttgtgttattttagttggataatatatgaagttattattattttggagttaatggttttggtgaagttggtatttgggtatttttgttgatgttaaagtaatagggtatttagcgtggtatatgagttttttttttttttagggttagaaatgtatttattaaaaaaaaaaaaaaaagggaatgtattattttggaggtagtagtatatggtggtagttaagaatgacgtaggtttaaataaaggggaatttgttttttttgaaagaattagaagaatttttaagttggtttattgggtttttttaattggtgatgtatagaattatagttaggattttttagattgagttttgtagttatatagtttttggtttattgttagtgtgttttgggttttaaggagtggattttgtatgagtttatgagttttgatttatttcgtggggggataatggggatgagaatgagtatggttggagaggagagttggtagtgaaaaggtggagggtttgtgtagttagtgtatgtttattagaggagggggaatagttggtattagaaaaaggttttttaaaatgattttattttgttttggggatggtggtttacgtttgtaattttagtatttcgggagattaaggtaggtagattatatgaggttaagggtttgagattagtttggtaaatatagtgaaattttgtttttattaaaaatgtaaaaattagttaggcgtagtagtacgtgtttgtagttttagttattggggaggttgaggtaggagaatcgtttgaattcgggaggtagaggttgtagtgagtcgagattgtgttattgtattttagtttgggtaacggagtaagattttgttttaaaaataaataaacgaaaattttattttagaaatattagtgaatgtttaaattttgagtgaaagttttttgagagaggatttttatattattttaaaatatttttttatatatgttatattatggatggatttttgaaatattgtgttaaatgaaagaagatagatataaaaggttatattattgtatgattttaacgatatgaaatatttaaaatagataaatttatagaaatagaaagtatattatttgttgttgggggttgggggaagggagaatagggaataattgtttagtgagtatataatttattttgggggtgatgaaacgttttagaattggatagtggtgatggatatataatattgggaatgtaatgtgttttatttatattaatagtaaatgttatgtgtattttattaaatattatttttataatttttttttttttgagatggaatttttttttgttatttaggttggagtgtagtggcgcgtttttggtttagtgtaatttttgttttttgggtttaagtgatttttttgttttagttttttgagtatttggaattataggtgtttattattacgttcggttaatttttgtgtttttagtagagatagggttttattacgttggttaggttggtttcgaattttagattttaggtgatttatttatttcggttttttaaagtgtcgggattataagtatgaggtattatgtttagttttataaagtattttttaatgataaaggggaaatgtatagtgaaagaatttggtagaatataatttagtgattaaagttagtattattaatgatgggataaattggtatattgtattttttggtgggatttattgaggatatatggtttatatgttatttttgtttaaaaaatataatttggatcgaattattaggaaatatcgaatataaatttgagggatattttataaaataagtggttaatatttttaaataatattaatgttatgaaaaataaagatagatttgaggaagtattttagattaaaggggattaaagagatttgaaacgaaaatgtagtgtattagtttggattggattttggggtaggaaaaagaaagttatgtagaatattattgggttaattggggaaatttgattatggattgtagatatgatagttatattgtattacgttaaatttttttattgtgattattatagtgtggttatgtaagaaaatgtgtaattaggtgcggtggtttacgtttgtaattttagtattttgggaggtcgaggtaggcggattatttgaggttaggagttcgagattagtttggttaatatagtgaaattttgtttgtattaaaaatataaaaattagttgggcgtggtgatacgtgtttgtagttttagttatttaggaggttgaggtaggagaattatttgaatttgggaggtagaggatgtagtgggttgagatcgtattattgtattttagtttgggtaatagagtgagattttgttttaaaaaaaaaaaaaaaaaaaagaaaaagaaaaaaaaagaaaagaaaagaaaagaaagaaaatgtttttggttttttagaaatatatattaaagtatttagttgtatggtttaggtaatttatttttaagtggtttagaaaaagagagatagtgtatgtgtgtgtgtgtgtgtgtgaaattgtgggtgtgggagtatttatttattttaaaattggggttattattttattttagtgaatagaaggtttgattcgtattgtattttaaaatatgtaagttataaattaatttttttttaaaaaaatgtagtaattatttcgttataaattattggaataaaagaagaatgaattaagtgttgatattaggaggttgtattttttaattagattatttgatgtgatatttttttttgatatttgagttttgttgattaagatgatggttataaaatatttaaagattttattaattttttttagtgtgatttttaattgtttgatagttaaagtatttttttgaatgttttttttttatttattgggaatttttttagtttagataagtttttatgtatttatgtttttagtggttttttatttgattttttatgatatttttattaattttggataattgtagttttgttgtaagatttttaattttattttgtaattgtttttttttgtatgttatttaaattgttttgttaaagtaaagtattattttgaaattttagtggtttaatatttagaggtttattaattttttaattataatatttgtttaaggtgtgaggttttaatttattatggttgtattatttttagttatttttttagggagagggagtatggagaatttatatttgtttttttttgtattagttcggaaatggttatgttatgtagttttggtttattggtttgaattagttataagtatttgttgttttttttattagtttggaaatggttatgttatgaagttttggtttattagtaatgagttttttatttagttgtaagggagtttaggaaatatagtttttttgtgtgattagagaggggaaaatgaaatggtagttgtttgttatttgttgtatttttttggggtttagtgttgtttaaatgggaatatatattaagaagaatggtgtttgagtgggtatttattttattttattttattttatttttatttttatttttttgagatgtggttttgttgtgttatttaggttagtgtgtagtgatgagattatggtttattgtagtttttattttttgggtttaagtaatttttttgttttagtttattaagtaggtgggattataggtatttgttataatattaggttagttttttaaatgttttgtagagatggagttttgttttgttgtttaagttggttttaaatttttgggtttaattaatatttttttgttttggttttttaaaatggtgagattataggcgtgagttattatgtttagttggggattaattttataaatggttagatcgttaggaaatatttttgtattgtgattatttttgttttgttatgaagtaggggttttgattaggaatcgttagaaaatgagtttttgagtatggggaattaggaatagtattttagtatatatagagttatttttttttgtttaagagacgtgatgttttttttaattagggattttaatgggtttttattttttttttttataaggaatatttgtcgtttggatgtaatagtagatagttttttttatgttagatttttgtttagtaaagtttttaggcgagtaaagatggggagtattgtttttgtttttttaagattttatgaaatgttgttttttttttttaatagatagagttttgttttgttgtttaggttggagtgtagtggcgtaattatggtttattgcgtttttaattttttagttttaagtaatttttttgttttagttttttaagtagttgggattgtaggtatgacgattacgtttagttaatttttttttattgtttttatagatagtgttttattatgttgtttgggttggttttaattttttgggtttaagtgatttttttatttttttttaaagttttaggattataggtatgagttattacgtttagttaaaaggtgtttattttttattgtaattttgttttgttattgatagattttgaattttttttttttattttttttagtatatttcgttttgggttttaaacgtgatttttcgtttcgattcgttttgttttgtgaaaatgttggtgttttttgtttttattatcgttttttatattatttttgtagttttgttgtttattgttatcgtcgataatgtaagtttttttttttgttatttacgtagaaatttgggttttgtagttaatagaagtgggttgtattggtttgtttttatgttgttgataaaggtatattagagattaggtaatttataaggaaaatgaggtttaatggatttataattttatatgtttgggaggtttttgtagaaggtaaaggaggagtaaagttatattttatatggtggtaggtaagagagcgtgtgtaggggaattgttttttataaaatcgttagatttcgtgagatttatttattattataagaatagtatgggataaatttgtttttatgatttagttattttttatcgggttttttttacgatatgtgggaattatgggaatataatacgagatttgggtggggatatagtcgaattatattataggttgagaattttgttaaagtttttaatgttgaatttgttaaggtttaattacgattcggggttgttttttttgcgaaggtatatatattttttgatttaagggttgaggatttttggtttaaatgtgaaggtttaggtcgttttatgtttaggttttggtggtaggttttggtaggtagggacgtttgtttttttatttgtgatttttttatagagtttggttttaggaagttttttgaggatgttgtgtgattttagtttttttttagattagagtttttaattttgttattattgttattttgggttggataattttttgttgtaggggtttttttgtgtattgtaggaagtttagtaacgtgtttggttttatttgttagatgtagtagtttttttatttttggttatgataatttaaaatatttttagatattgttaaatgttttatggagaataaaattattttttgttgaggatcgttgttttagattttttaggtgatttattttaggtgatttttgtttttaatttttgatatttttttattaattagggttttttgttgttagtttattcggttatgttttttttagtagagtttatgtatggaattttttagattttatttatgtttttatgaaaaatttaatgtttttttttagtatttagtttgtagttatatggtaggaatgtattggataaataattttttggtatagattaatatttttttaaatagggagtgatattagggaagttttttaatagtttatatattgttttaaagatttggtttttattttgtttattttagattgtagagataattaaagggtagaaatattgtttagaaagttaaaaagtatattatacgagtggttattaattttgtttatatatacggttttcgttgatggattattatgataatagtaatataaattataatgtttgttatttagcgattattgtggtttttttatgtatgttattttatgtgatttttattttagttgtattaggtagggtatcgatatttttttgtatcgggttataggtgaaggaattgcgttttagggttattcgggtatttggtagagtttatagtgtagtaagtagtagagttaggatttgagttattttagaggtttttggttttagagtttgttaggggagatgagtataataatcgtatttgggttttggagttttttgttgagttgttgtgagtggtttgggtagggattatattgttgttatggattatagtagtggtttttaacgtttttggtattaggaatcggttttatggaagataatttttttatagattggggagggggtattgtagggggatggttttagaatgatttaagtgtattatatttattgtgtattttattattattatattttaatatataatgaaataattatataattcgttataatgtggaattagtgggagttttgagtttgttgttttggattagacggttttatttgggggtgatgggagatagtgatagattattaggtattagagttttataaggagcgtgtagtttagatttttggtatgtatagtttataaggttgatatttttataagaatttaatgtttttggtgatttgataggaggtagagtttaggtagtaatgtgagtgatggggagtagttgtaaatatagatgaagttgtttttattggttgtttattttttgttgcgtggtttggtttttaataggttatagataggtattagtttatggtttatgggttggggagttttagattatagtatttggatttattattttaggagtttattgtgaaataaatgggatcgaatgtttttttagaattttttttttttatttttttttatttagttttttgggattttgaaaaggttttagatttagtgaaaaggatagatagatattaggggtaggaaaattattagttttagtgaatcgtatttagtatttttagggtatattattatggtatatattaagaagatgtagatggattttttgtttatcggtgagtttgagggtatttattatgtatttggaattgtgtttggtaattggaaagtagaaggaaggttattttgggtagtgggggaagggtagtagttattaaagtatatagggaaatgaatgtttttggttgaagataggagaattttgtttggttattttatttattgtaatgtttgtttgtttgtttgtgatagggtttttttttgttatttaggttggagtgtagtgttgcgattatggtttattgtagtttttattgtttaggtttaagcgatttttttattttagatttttgagtagttgggattatagttatatattattatgtttgattaattttttgtatttttttgtagagatgggttgtttcggttggttttaaatttttgggtttaagtaatttttttatttcggttttttaaagtgttgaaattataggtatgagttattgtgtttatttttgattgttattatttttagtaatttagttttatttttttttttatattttttgagggtttggattattttttattttttgggagaaagtagtagggtattatttggagtcggttagaaatgtagaattttggttaggcgtggtggtttacgtttgtaattttagtattttgggaggttaaggtaggtggattatttgaggttagaagtttgagattagtttgattaatatggcgaaattttgtttttattaaaaatataaaaatgagttaggtgtgttggtgtatgtttttaaattttagttattcgtgagattgaggtaggagaattgtttgaatttagtatgggagggttgtagtgagttaagattatgtatcgtattttagtttgggtaataagagtgaaattttgttttaaaaaaaataaaaaaaggaaaaaaaaaaagaaatgtagaatttcggttgagcgtagtggtttatgtttgtaattttagtattgtgggaggttgaggtgggcggattatttgaggttaggagtttaagattagtttgataatatagtaaatattgattttataaaaaatataaaaagtaggcgtggtgatgtgtatttgtagttttagatatttaggaggttgaggtgggaggattgttcgagtttaagagatggaggttgtagtgagttaagattgtgttattgttttttagtttggatgatagagtaagattttgttttaaaaaaataaataaatagaaaagaaagaaatgtagaattttagtttttattttagattttttgagttagtttgtattagaataagttttttaggtaatttttatatgtgttgtagtttgagaattttggaagtttattatgtttcgtgtttaattagtagttagtgtttgtattatgaacggacggtttttttttttatttttattttgtgttatagg

SEQ ID NO: 48 - DNA, 9021 bp, Artificial Sequence
  chemically treated genomic DNA (Homo sapiens)
tttgtaatataaaatggaaatagagagaaaggtcgttcgtttatgatgtaaatattgattgttaattaggtacgaggtatggtgggtttttaggatttttaaattgtaatatatgtgagaattgtttgaggagtttattttaatgtagattgatttaggaggtttggggtggggattgggattttgtattttttttttttttatttatttatttttttgagatagggttttgttttgttatttaggttggagggtagtggtatagttttggtttattgtagtttttattttttgggttcgagtaatttttttattttagttttttgagtatttgggattataggtgtatattattacgtttattttttgtattttttgtagagttagtgtttattatgttgttaggttagttttgaatttttgattttaggtgattcgtttattttagttttttatagtgttgggattataagtatgagttattgcgtttagtcgggattttatattttttttttttttttttttttttgttttttttgagatagagttttatttttgttgtttaggttggagtgcgatgtatgattttggtttattgtaatttttttatattgggtttaagtaatttttttgttttagttttacgagtagttgggatttagaggtatgtattagtatatttggtttatttttgtatttttagtagagatagggtttcgttatgttggttagattagttttaaatttttgattttaggtgatttatttgttttggttttttaaagtgttgggattataggcgtgagttattacgtttggttaggattttgtatttttaatcggttttaggtgatgttttgttatttttttttaaaggataagaggtggtttaggtttttagagagtatgggagaaaagatgaggttgagttgttggaagtaatagtagttaggggtgggtatagtggtttatgtttataattttagtattttgggaggtcgaggtgggaggattgtttgagtttaggagtttgagattagtcggggtaatttatttttataaaaaaatataaaaaattagttaggtatggtggtgtgtgattgtagttttagttatttaggagtttgaggtgggaggatcgtttgagtttgggtagtagaggttgtagtgagttatgatcgtaatattatattttagtttgggtgatagagagagattttgttataaataaataaataaatattgtaatggatgggatgattagataagatttttttgtttttagttaaaagtatttatttttttgtgtgttttggtggttgttgttttttttttattgtttaagatggttttttttttattttttagttgttaagtataattttaaatatataatgaatatttttagatttatcgatggataaaaagtttatttgtatttttttagtatgtgttatgataatatattttgggggtgttggatacgatttattaaggttgatggtttttttgtttttaatgtttgtttattttttttattaagtttgggatttttttaggattttaaaggattagatgggaagaaatagaaaaaggagattttaaaagaatattcggttttatttattttatagtgagtttttggaatggtgggtttaaatattataatttaggattttttaatttatgggttatggattggtatttgtttgtagtttgttaggaattaggttacgtagtaggaggtgagtagttagtgaaggtagttttatttgtatttatagttgttttttattatttatattattgtttgagttttgttttttgttaggttattaggggtattagatttttataggagtgttaattttgtgaattgtgtatgttagggatttaggttgtacgttttttatgagattttaatgtttgatgatttgttattgttttttattatttttagatgggatcgtttagtttagaataataagtttagggtttttattgattttatattatgacgagttatataattattttattatatattaaaatgtaataataataaagtgtataataaatgtaatgtatttgaattattttgaaattatttttttgtaatgttttttttttagtttgtagaaaaattgttttttatgaaatcggtttttggtgttaaaaacgttggggattattgttataatttatagtagtaatgtggtttttgtttaggttatttatagtagtttagtaagaagttttagaatttaaatgcgattattgtgtttattttttttgataggttttaggattaggagtttttggaatggtttaaattttggttttgttgtttattgtattgtaaattttgttaagtgttcgaatggttttgaggcgtagtttttttatttgtaattcggtgtaaggagatgtcggtgttttatttggtatagttggggtggggattatatgagatgatatgtataaaagggttatagtgatcgttaagtgataggtattatagtttatgttattattgttatgatgatttattaacgggagtcgtatatgtaggtagagttggtggttattcgtatggtgtattttttggttttttgagtaatgtttttgttttttaattatttttgtagtttaaaatgagtaggatggaagttaggtttttggaatagtgtataggttgttaagaagtttttttgatgttattttttgtttggagggatattaatttatgttaagaggttatttatttaatatatttttgttatatggttgtaagttggatattaaagggaaatattaaattttttataggggtataggtagagtttggaaagttttatgtatgagttttgttggggaggatatggtcgggtgggttagtaataagggattttggttgataaggaggtgttaggggttgggggtagaggttatttgggatgggttatttggaagatttagggtagcggtttttaatagagggtgattttgttttttatgggatatttaataatgtttgaagatattttggattgttataattaggggtgggggagttattgtatttagtagataaggttagatacgttgttgaattttttataatgtatagggaggtttttataataaaggattatttagtttaaaatgataatagtggtaaggttgagaattttgatttagaggaaagttgaagttatataatatttttaaagggttttttagagttaggttttatgaaagaattatagatgggaggataaacgtttttgtttgttaggatttgttattaaaatttgaatatgggacggtttgaatttttatatttaggttaagagtttttagtttttgggttagaagatgtgtgtgttttcgtagggaggataatttcgaatcgtggttgaattttggtaggtttaatattgagaattttggtagggtttttaatttgtgatatggttcggttgtgtttttatttaaatttcgtattgtatttttataatttttatatgtcgtgggagggattcggtgggaggtaattgaattatgggagtaagtttattttatattgtttttgtggtagtgaataagttttacgagatttgacggttttataaagggtagtttttttgtatacgtttttttgtttgttattatgtaagatgtggttttgttttttttttgttttttgtagaggttttttagatatgtggaattgtgagtttattagattttattttttttataaattatttagtttttggtatgtttttattagtagtatgagaatagattaatataatttatttttattgattgtaggatttaggtttttgcgtgagtggtaggaaaggaaatttatattgtcgacggtggtaatgaatagtaaggttgtagaggtgatgtggaaggcgatgatgaaagtaagaagtattaatatttttatagggtagggcgagtcgaggcgaggggttacgtttaaagtttagagcgggatgtgttgaagagggtaagaaagagaaatttaaaatttgttaatgataaaataaaattataataaaaaataaatattttttagttgggcgtggtggtttatgtttataattttggaattttgggagaaggtgggaagattatttgagtttaggagattgagattagtttaggtaatatagtaagatattgtttataaaaataataaaagaaaattagttgggcgtggtcgttatatttgtagttttagttatttaggaggttgaggtaggaagattgtttgagattgggaggttgaggacgtagtgagttataattgcgttattgtattttagtttgggtaataaagtaaggttttgtttgttaaaaagaaaaggtaatattttatggggttttagaaaagtaaaaatagtgttttttatttttattcgtttggagattttattggataaaagtttggtatgagaggggttgtttgttgttgtatttagacgataaatattttttgtggaggaggagggtgaggatttattagaatttttaattgagaaaagtattacgttttttgggtaggaaggagtggttttgtgtgtgttaagatgttgtttttgattttttatgtttagaagtttattttttgacgatttttgattagagtttttattttataataaagtaaaagtgattataatatagaaatattttttaacgatttgattatttataaaattaatttttagttgggtatggtggtttacgtttgtaattttattattttgggaggttaaggtaagaggatgttaattaagtttaggagtttgagattagtttgggtaatagagtaaaattttatttttataaaatatttggaaaattagtttagtgttatggtaggtgtttgtggttttatttatttggtaaattaagatagaaggattgtttgagtttaggaggtggaggttgtaataaattatgattttattattgtatattagtttgggtgatatagtaagattatattttaaagaaataaaaataaaaataaaataaaataaaataaaataaatatttatttagatattattttttttaatatatatttttatttgaataatattggattttaaaaaaatataataagtggtagatagttgttattttatttttttttttttgattatataggaagattatattttttggatttttttgtagttagatggggaatttattattaataggttagaattttatgatatggttatttttaggttgatgaagagggtagtaggtatttgtgattaatttaaattaatgggttagaattgtatgatatggttattttcgggttgatgtagaagagagtaggtatgagttttttatgttttttttttttaaggaggtagttggggatggtgtagttatagtaggttgaagttttatattttggatagatattatgattggggaattaataaatttttggatgttaaattattgagattttagggtaatgttttattttggtaggatagtttgagtgatatataagaggaagtaattgtaaagtgaaattggaagttttataatagaattatagttgtttaaagttgataaaaatgttatgggagattagatgaaaagttattgagggtatgaatatatgaggatttgtttgagttggagaagtttttaataaatgaggaaaaagtatttaaaagaatgttttaattattaaataattaaaagttatattgggaaaaattgataaaatttttgagtattttataattattattttggttaataaaatttaaatgttaagggaagatgttatattaaatgatttggttggaagatgtagttttttaatattaatatttggtttattttttttttattttaataatttgtgacgagatagttattatatttttttggaaaaaaattaatttgtagtttgtatgttttgaagtatagtgcgaattagattttttgtttattgggatgaaatggtaattttagttttaaaatggataaatgtttttatatttataattttatatatatatatatatatatatattgtttttttttttttgaattatttgagagtaagttgtttaaattatataattaagtgttttagtgtgtatttttgaaaaattaaggatattttttttttttttttttttttttttttttttttttttttttttttttttttttttttttgagatagagttttattttgttgtttaggttggagtatagtggtgcgattttagtttattgtattttttgttttttaggtttaagtgatttttttgttttagttttttgagtagttgggattataggtacgtgttattacgtttagttaatttttgtatttttagtatagatagggttttattatgttggttaggttggtttcgaatttttgattttaggtgattcgtttgtttcggttttttaaagtgttgggattataggcgtgagttatcgtatttggttgtatatttttttatataattatattatgatgattataatggagaaatttaacgtgatataatataattattatatttatagtttatagttaaatttttttaattaatttaataatgttttatatggtttttttttttttgttttaggatttaatttaagttgatatattgtattttcgttttaggtttttttagttttttttaatttggaatatttttttaggtttgtttttgttttttataatattgatattatttaagaatattgattatttattttgtagaatgttttttaaatttgtgttcgatgttttttgatgattcgatttagattatattttttaagtaggaatggtatatgagttatgtgtttttaatggattttattaggaggtgtagtatgttagtttgttttattattggtgatgttaattttgattattgggttgtgttttgttagatttttttattgtatattttttttttgttattaaaaaatattttgtaaggttgggtatggtgttttatgtttgtaatttcggtattttgggaggtcgaggtgggtggattatttgaggtttggagttcgagattagtttggttaacgtagtgaaattttgtttttattaaaaatataaaaattagtcgggcgtggtggtgggtatttgtaattttaggtatttaggaggttgaggtaggagaattatttgaatttagaaggtagaggttgtattgagttaagaacgcgttattgtattttagtttgggtgatagagagagattttattttaaaaaaaaaaaaattgtagaagtgatatttgataaaatatatataatatttattattagtgtaaatgagatatattatatttttaatattgtatatttattattattatttagttttagaacgttttattatttttaaagtaaattgtgtatttattaagtagttattttttattttttttttttttaatttttagtaataaataatatattttttgtttttatggatttgtttattttagatattttatatcgttggaattatataatagtgtggttttttgtgtttgtttttttttatttagtatagtgttttaaaggtttatttatgatgtggtatgtgtgggaaggtattttgagataatgtaaagatttttttttaagaaatttttatttagagtttaagtatttattgatatttttgaaataggattttcgtttgtttgtttttgagatagagttttgtttcgttgtttaggttggagtgtagtggtataatttcggtttattgtaatttttgtttttcgggtttaagcgatttttttgttttagtttttttagtagttgggattataggtacgtgttattacgtttggttaatttttgtatttttagtagagatagagttttattgtgtttgttaggttggttttaaatttttgattttatgtgatttgtttgttttggtttttcgaagtgttgggattatagacgtgagttattatttttagagtaaaataggattattttaaaaggtttttttttggtattaattatttttttttttttagtggatatgtattgattgtataaattttttatttttttattgttagtttttttttttaattatgtttatttttatttttattatttttttacggaatggattaaggtttatgggtttatatagggtttattttttgagatttaggatatattaataatgagttaggagttgtatggttgtagaatttagtttgagaggttttggttgtgattttgtgtattattaattagaaggatttaatgaattagtttggagatttttttaatttttttaaaaaagataaatttttttttgtttaggtttgcgttatttttagttgttattatatgttgttgtttttaaaatgatgtatttttttttttttttttttttaatagatgtatttttgattttggggggaaaaagggtttatgtattacgttgaatgttttgttattttaatattagtaggaatgtttaaatgttaattttattagggttattaattttagggtgataatagttttatatgttgtttagttgggatgatataaatgtatatggatatgtaattaaaattttttagaaaataataattaaaaagaaaaaaggttttaatttatttttttttaaaggatggaattaaaatgttataaggtatgattttggatagtgtattgatagggtattaagtaatattgaattatatggtgaaaaagtttttattttaattttattgagtttattaaggaaaagatttagtttggtgttagttagtttttaatatttgttaatttttttttgataaaaagagaaaatagatttttggttaaaatgtatttgtagttagaatttaatagtattattttgagtttattgtatttatttttaacgttttttttttttataaggaagaaatattacgtatagtagtga

SEQ ID NO: 49 - DNA, 6446 bp, Artificial Sequence
  chemically treated genomic DNA (Homo sapiens)
gggtttttgtagggatggatatataagattttttagatagtaggcgggttagggtttagagagggtggataatgaattgcgagggattgggaattgaaagggggtgattttagaattacgttggttttatttttttaagaggggttggagggggattttttttaggttttttttatatttttttagtttttttattttttatattttgggttttgcgtttaggtttcgattttggcgcgggtttggtaggggataggttttttgggtttttaggatatttgaggttaggttgtttggtcgtaggagagggggaaatttcggtttgttgtagtgggggttgggtagggtcgggggagttttgggttttatttgtcgacgggtttgatttgtttttggtgttttaagtttagtgttgtggtttggttattggggagataagggattaatgaggattgaggatagcggttagggagggattgaggtcgcgggagaaattatgggaggaggggcggagaaggatgcgaggcgtagatttgtagggtttttacggattgagaattgatgggtaaggttaggcgcggtggtttacgtttgtaattttagtattttgggaggtcgaggcgggcgtattatttgaggttacgagttcgagattaatttggttaatatggtgaaatttcgtttttattaaaagtataaaaaattagtcggatatggcggttcgtgtttgtaattttagttatttaggaggttggggtaggagaatcgtttgaattcgggaggcggaggttgtagtgagtcgagatttcgttattgtattttagtttgggcgatagagcgagatttcgttttaaaaaataaataaataaataaataaaattgatgggcggcgaggttttgaaaggggcggagtcgggagggtttgtggagcggtgttgcggagttttgagaggtgtacggttgtgaggtttgagaggggcgtgtcgtagggagttgtgatgggcggggttgagatttgtgaggagagtgagtgggaagaatttcgaggggcggggtttcggggtcggcgaggggaggggtacggatattagtataggacggggtttcgtagatagcgagcggaggggttttttcgtaaggggcgggtttcgagggtcgcgtttggaaggttttacgaggggttcggtggaagggcggtgaagggcgggttaatcgggaggcgtttaggttttgaaggtttgcgggaggtcgaaatggttttggggaggtcgaggttgaggttttattagtatcgcgggtttggaagcggcgggagttgaaagagtttgcggtgatttgtatggaagttttcgaagttaggtcgaggttttataagacggagttcgagaggtgtcggttttaagttgattgtgattacgttaaattaaggatttataggaaggaaggcggtgtcgaagtcgggagttgcgcggagaaggagcgtttaatatagttttagcggtttattacgtaagcgcgattaacggtttttcgggaagtagttaaaaacgtttggtcgtttattacgttcgcgcgttggagggcggaagtgggtgagatttcgggtattttatatcgtttttcggtttttggttacgttttttttggttatatttattcgttttgtaaggtacgtttttttcgcggcggcggttgttgtttacgtgggttttttcgggcgggcgggtagtgggcgtttttttttgtaggttgggtgtgttcgaagtttgcggttttttgtgggaggaagcggtttgcgtacgtttagtttagtttataatttcggaggtttaggatggggagatttcgtcgttatttttagattttttgatttttttttttttatatagttatagtgcggggatttttttaatatttttagggtatttaagtttggcgtcgattttatttagggaatttgattttgagttttagattcgtgttttttattttttcggtttaagtttttatttttttagtttttggttttttttagtttttttaagaaagtggagttttttttttttgttttttaagaggaacgtatgtttttttagtttttaattttttttttagtgatttagattttgtaatttttttagggatttgagtgcggattttagtttttgttttttaggtatttaagtttgagattatttatttttttttagggatttttattttggatttttaattttagttttgagatttaatggatttaagaatttgttttttttttaatttttagagattttgaattagggttttttagtattgattttatttagagttttaatgtttgatatgattagtattattttaagaattgttttataatgtatttattattatttttattttttagatgaagagattgaggtatagagaagttattagtaatttgttaaaaattatatagttattgagtaaaatagtttggattttgagtttaattagtgtggttttagagtttgtgttatattggtattttagtttttaggttttggggtatttagttaagtattgaattgtttattttttatttttttagggagttcgaattattaatagttattttaaatttagttttggtttattagatatttagatattttattatttagtttttttttttggatttaggatttgaatttttttgtttttaatttattagagttttgggtatttggtttttttttaagagattcgtgtatatagtagttattatttcgattttaatttaatatttttaaaattaataataatagttaatagtaaatttttggggttaggtatagtgttttacgtttgtaattttattattttgggaggttaaggtaggtagattattggaggttaggagttcgaggttagtttggttaatatggagaaattttcgtttttattaaaaatataaaaattggttgggcgtggtggcgggtatttgtaattttagttatttaggaggttgaggtaggagaatcgtttgaatcgggaggtggaggttgtagtgagttgagattatgttattgtattttagtttggatgatagagtaagattttattttaaaaaaaaaataaaaatttttggtattatattttgttaaaatttaatggttttttattgtatttagaatgaaatttaagttttttttttagtttttaagggtattttttgatttttttttttattattttttttgtttttttgtgttttagttatattggtttttttgtttgttttttaaataatttgagtttgtttttaaaagttttaagagtttttgtatttttttttttttcgacgtttttttattattttttaattttagcgtttaaatgatttttgtttttagtttaaatgttattttttttaagaggttttttttgatttttttgttttaagtagttttttttgtattttgttattatttttattattttgtttgatttattattgtatttattttttttttttttttttatttttttttttttttaagatggagttttgttttgttatttaggatggagtgtagtagcgtgattttagtttattgtaattttcgtttttcgggtttaagtaatttttttgttttagttttttgagtagttgggttataggcgtttattattatgtttggttaatttttgtatttttagtagagatagggttttattatgttggttaggttggttttgaattttcgattttaggtgattttttagttttggttttttaaagtgttgagattataggtatgagttattacgtttagtttattgtatttattttttaagttatttatttttatttgagatttatttttattattgatgtttttttttgtttgtttttttttattagaatataagttttataatattagtagggtttatgtttgtttttattattaatttttagattagagtatatgtttaataaatgtttgatgaaggaaggaataggttaggtgtgtgagtgtgttagtattattttatttatttagtataagtattagaattattattattagtattagtattttgttagtattattatatttttaatatagattaagatattggagtttaggtgggtgaaataattggtttaaggttattgaattaggaaatgatggcgttgggatttttagttttcgtttttttttcgtttttagagttttataaggtttttttttttgtttgtttgttttttgttttgttttgtttttttttttgcgatagaattttattttgttttttaggttggaaggtagtggtgtaaatttaatttattgtagtttttatttttcgcgtttaagcgatttttatggtttagttttttaagtagttgggattatagtcgttcgttattacgttcggttaatttttgtatttttgatagagacgggtttttattatgttggttaggttggtttcgaatttttgattttagatgatttgttcgtttcggttttttaaagtgttgggattataggcgtgagttataacgttttgtcgagttttataaattttattttttattttttgattttttattacggggttaattttattagtttaattttaagtttatgttatagaaatttggtttttttttttagatttttatttagttttaagttttattagggaaagtagatattcggttttagggtaagattttaaaatttaagggttttgagaatcgggtttttttatttttgacgtttgttttttttaagaattttattttaagagttttttattttaattttgggagggagttttagatgatgtttgtttggagggattgggtgggggtttaaagaaagaggaatcggagtgtttgggtttttttattggtagtcgattttagttgggtgcggtgagggtgggtttataaaagggttagtatatattgagaggaggagagaaagagaaacgggagtaagagagaaggaggtttagatagtgagggtaggagggagagaagagacgtagaaggagagcgagcgagagagaaagggttttggattggaggggagagtaagggagggaggaaggcggtgagagaggcgggggtttcgggagggtgaaaggagggaggagaagggcggggtacggaggttcgagcgagggataagatttcgattttagttttgatttttttcgcggttttcggtaagtttttagttcgttatttagggttgggattttttaatttatttgggaatgtagtagtttgggaaggatatttttaggttgggagagacgtttttgatttttggaaatttttttaatttaataagtgattttttagtatttgaggtggggatatgggaaggggtggggttcggtaaagttttggggttttagtagagttttttattggaaaattttttgtagttttttttttagcggtgtttattgttttttggggtttttgagattagggtattgtatgagaatattttaaatttgggagatttttaggttttttgtttttgggtattaaagagttttgggaggttaatttttttttgggttttttttttttttagcgcgaattttatttattttttttagaagatgtttaatagttattagtttggtagtagggtggggtgaggatttcgtggatatagttaggggttggggtttttttggtgtttagagatgggggggggtggggatgagttattagatgatttattaggttttttttttttttttaatttaggagaggagtggtgtgagttaagaatgtttgttgttgggggtagttttttaattttgatgtcggggtgtagggtggggttttaatttgaatttttattatttggtttgtatgtaatttagagttagggttttggggagagaggagttatattgttagttttttttatttaaggaatttaagagtttatttttggttttttttatttttttagttaatggggattttaggaatttaggttttagcggttttttttttgagagatttaggagtttgtatttatgttttttttttattaggagatattttatttgtttttatgttaaatttttttttttttttgagacggagtttttttttgttatttaggttggagtgtaatggtatgattttggtttattgtaatttttgttttttggattttagtgatttttttgttttagtttttcgagtagttgggattataggtgtgtattattatatttagttaattttgtatttttagtagagatggggttttattatgttggttaggttggtttcgattttttgattttaggtgattttttcgtttcggttttttaaagtgttggggttataggcgtgagtgtgtttggtttgtgttaattttttgagatttcgttttttgttttttttttttagg

SEQ ID NO: 50 - DNA, 6446 bp, Artificial Sequence
  chemically treated genomic DNA (Homo sapiens)
tttggggagggggagtaggggacggagttttaagaggttggtataggttaggtatatttacgtttataattttagtattttgggaggtcgaggcgggaggattatttgaggttaggagatcgagattagtttggttaatatggtgaaattttatttttattaaaaatataaaattagttgggtgtggtggtgtatatttgtaattttagttattcgggaggttgaggtaggagaattattggaatttaggaggtaaaggttgtaatgagttaagattatgttattgtattttagtttgggtgatagagaaagatttcgttttaaaaaaaaaaaaaaatttggtataaaggtaggtgagatgttttttgatggaggaagggtatgggtgtagatttttgggttttttagggaggagatcgttggggtttggatttttgagatttttattggttggaggggtggagagggttaaagatggatttttgggttttttgaatgaggaggattagtaatgtggtttttttttttttagaattttgattttgggttatatataggttagatagtgaaaatttaagttgagattttattttgtatttcgatattaggattgaggagttgtttttagtaataggtatttttgatttatattattttttttttgggttgaggggaggagggggatttggtgagttatttggtgatttatttttatttttttttatttttaagtattagggaaattttagtttttggttatgtttacgaggtttttattttattttgttgttagattggtgattgttggatattttttggaggaaatggataggattcgcgttggggggaagagaggtttaagaaggagttagttttttaggattttttggtgtttaggaataggggatttagaggttttttagatttggggtgtttttatgtaatgttttgattttagggattttagaggatagtggatatcgttgagggaaaaattgtaggaagttttttagtggagggttttgttgggattttaaaattttgtcgggttttatttttttttatatttttattttaagtgttaagagattatttattaaattaaaaggatttttaagagttagggacgttttttttagtttgggggtgttttttttaaattgttatatttttaagtaaattaagaagttttagttttgaataacggattggaaatttatcgagagtcgcgaaaaaagttagagttggagtcggagttttgtttttcgttcgggttttcgtgtttcgttttttttttttttttttttattttttcgaggttttcgttttttttatcgttttttttttttttttgtttttttttttaatttagaattttttttttttcgttcgttttttttttgcgtttttttttttttttttgtttttattgtttgggttttttttttttttgttttcgttttttttttttttttttttttaatatatattgatttttttataaatttatttttatcgtatttagttgaggtcggttgttagtgggagggtttaggtatttcggtttttttttttttgggtttttatttaatttttttagatagatattatttggggtttttttttagggttgagatgagaaatttttggaatggggtttttggggggggtaagcgttaggggtgggagggttcgatttttaggatttttgagttttgaggttttgttttggggtcggatgtttgttttttttgatggagtttggagttggataggagtttgggaaaagaggttagatttttgtggtatggatttgagattgggttggtgaagttggtttcgtggtggggggttagaggatgggagatgaaatttgtgaaattcggtagggcgttgtggtttacgtttgtaattttagtattttgggaggtcgagacgggtagattatttgaggttaggagttcgagattagtttggttaatatggtggaaattcgtttttattaaaaatataaaaattagtcgggcgtggtggcgggcgattgtaattttagttatttgggaggttgagttatgagaatcgtttgaacgcgagaggtggaggttgtagtgagttgagtttgtattattgttttttaatttgggggataaagtgagattttgtcgtaaaaaaaaaaataaaataaaataaaaaataaataaataaaaaaaaaaattttgtgaaattttggaagcggggaggaagcggaagttaagaattttagcgttattattttttggtttagtgattttgagttaattattttatttatttgggttttagtattttagtttatgttgagagtataataatgttgataaaatattaatattgataataataattttgatatttatgttgaatgaataaggtaatattggtatatttatatatttaatttgtttttttttttattaaatatttattgaatatgtattttgatttgggagttaataatgaaaatagatatgagttttgttggtattatggagtttgtattttagtagaggaagatagataagagaaaatattaatgatgaagataaattttagataaggataagtgatttgaaaaataaatataataggttggacgtggtggtttatgtttgtaattttagtattttgggaggttaaggttggaggattatttgaggtcgagagtttaagattagtttggttaatatggtgaaattttgtttttattaaaaatataaaaattagttaggtatggtagtgggcgtttgtaatttagttatttaggaggttgagataggagaattgtttgaattcgggaggcggaggttgtagtaagttgaaattacgttattgtattttattttgggtgatagagtaagattttattttaaagaaaaaaaaaaataaaagaagaaaagaaaaataaatataataataaattaaatagagtgatggagataatgatagagtgtagggaagattatttgaaataggaaaattagggaaggttttttggaggaggtaatatttgagttgaagataggagttatttgaacgttggggttggggagtggtgggggggcgtcggggggagaggaagtgtaaaagtttttaaagtttttgagaataagtttaggttgtttagggagtagatagaagggttagtgtggttggagtatagggagatagagggagtggtgagaagggaaattaaagggtgtttttgaagattaggggaggggtttggattttattttaagtgtagtggaaagttattaggttttaatagagtgtagtattaaagatttttattttttttttgagatggagttttgttttgttatttaggttggagtgtagtggtatgattttagtttattgtaatttttatttttcggtttaagcgatttttttgttttagttttttgagtagttgggattataggtgttcgttattacgtttagttaatttttgtatttttagtagagacgggggtttttttatgttggttaggttggtttcgaatttttgatttttagtgatttgtttgttttggttttttaaaatgatgggattataggcgtaagatattgtgtttggttttaaaggtttattgttaattattattattaattttggggatattaaattagggtcggggtgatgattattatgtatacgagttttttgggaggggattaggtgtttagaattttgataaattgagagtaggggaatttaaattttggatttagggaagggaattggatgatgggatgtttgggtatttgatgggttagagttgggtttgggatagttgttggtgattcgggttttttgagggggtgagggatggatagtttagtgtttggttgggtattttaagatttggaagttggaatattagtatagtatagattttagagttatattggttggatttaaaatttaagttgttttatttaatggttgtgtaatttttggtaagttattaataatttttttatgttttagtttttttatttgaaaaatagagataatagtaaatatattatagggtagtttttagggtagtgttagttatattaggtattggggttttgagtggagttagtattgggggattttgatttaggatttttaggagttggggaaggggtaaatttttgggtttattgggttttaaggttaaagttgggaatttaaaatgagggtttttgggggagaataagtagttttaaatttaagtgtttgagagatagaaattggggttcgtatttagatttttaaggaagttgtaaagtttgggttattgaaggaaaaattaggggttggggagatatacgttttttttggggagtaggaaaagagggttttatttttttgagaggattagggggagttaggggttaggaagatggaaatttgagtcggggaggtgaaaaatacgagtttaggatttagaattaagttttttgagtgggatcggcgttaggtttgggtattttggggatattaggggggttttcgtattatggttatgtagaaggggaagaattaaaggatttgagggtggcggcgggatttttttattttgggttttcgagattatgagttgagttgagcgtacgtaggtcgtttttttttataggaaatcgtaggtttcgggtatatttagtttgtagggagaggcgtttattgttcgttcgttcggggaggtttacgtgggtagtagtcgtcgtcgcggagggggcgtgttttatagagcgagtgggtgtaattagagggggcgtggttagaaatcggggggcggtatggagtgttcgaggttttatttattttcgttttttagcgcgcggacgtggtaggcggttaagcgtttttggttgtttttcgggaagtcgttggtcgcgtttgcgtagtgaatcgttgaggttgtgttgagcgtttttttttcgcgtaattttcggtttcgatatcgtttttttttttatgaatttttaatttaacgtggttatagttagtttaagatcggtatttttcgggtttcgttttgtaggatttcggtttggtttcgagggtttttatataggttatcgtaggtttttttaattttcgtcgtttttaggttcgcggtattagtgagattttagtttcgatttttttaggattatttcgatttttcgtaggtttttaaggtttgagcgtttttcgattagttcgttttttatcgtttttttatcgggtttttcgtaaggttttttaaacgcgattttcgaagttcgttttttacggggaagttttttcgttcgttgtttgcgaagtttcgttttgtattggtgttcgtgttttttttttcgtcggtttcgaagtttcgtttttcgaagttttttttatttattttttttataggttttagtttcgtttattatagttttttacggtacgttttttttaggttttatagtcgtgtattttttagggtttcgtagtatcgttttataggttttttcggtttcgttttttttaggatttcgtcgtttattagttttgtttgtttgtttgtttgttttttgagacggagtttcgttttgtcgtttaggttggagtgtagtggcgggatttcggtttattgtaattttcgtttttcgggtttaagcgatttttttgttttagttttttgagtagttgggattataggtacgagtcgttatgttcggttaattttttgtatttttagtagagacggggttttattatgttggttaggttggtttcgaattcgtgattttaagtgatgcgttcgtttcggttttttaaaatgttgggattgtaggcgtgagttatcgcgtttggttttgtttattagtttttagttcgtgggaattttgtaggtttacgtttcgtattttttttcgtttttttttttatagtttttttcgcggttttagtttttttttggtcgttgtttttagtttttattggttttttatttttttagtaattagattataatattgaatttggagtattaagaataggttaggttcgtcggtaggtagggtttaggattttttcgattttgtttaatttttattatagtaggtcggggttttttttttttttgcgattaaatagtttggttttagatattttgagagtttaggaggtttgttttttgttaaattcgcgttagaatcggagtttagacgtaagatttagagtgtgagaggtgggagggttggagaggtgtgggagaggtttgagagaggtttttttttaattttttttggaggaatgaggttagcgtggttttagggttatttttttttaatttttagtttttcgtagtttattgtttattttttttgggttttggttcgtttgttgtttgaagggttttatatgtttatttttataggagttt

SEQ ID NO: 51 - DNA, 8649 bp, Artificial Sequence
  chemically treated genomic DNA (Homo sapiens)
atttatttttttattgataatttttgggtgttttttatagagggggatttggtagggttatgggataatagtggagggaaggttagtagataaataagtgaataaaggtttttggtttttttaggtagaggattttgcggtttttcgtagtgtttgtgtttttgattatttgagattggggagtggtgatgatttttaatgagtatgttgtttttaagtatttgtttaataaagtatattttgtatcgtttttaatttatttaattttgagtggatatagtatatgttttagagagtatagggttgggggtaaggttatagattaataggattttaaggtagaagaattttttttagtgtagaataaaatgaaaagttttttatgtttatttttttttatatagatacggtaattattcgattttttaattttttttttatttttttcgtttttttattttataaagtcgttattgttattttggttcgtttttaatgagttgttgggtatattttttagacggggtggtggtcgggtagaggcgttttttattttttagacggggcggttggtcgggcggggggttgatttttttatttttttttcggacggggcggttggtcgggcggggggttgattttttaattttttttttcgacggggcggttggtcgggcggggggttgattttattatttttttttcggacggggcggttgatcgggcgaggggttgatttttttatttttttttcggatggggtggttgtcgggcggagattttttttattttttagatggggtggttgtcgggcggagaggttttttattttttagacggggtagttgtcggacggaggggttttttattttttagacggggtggttgttaggtagagggtttttttattttttagacggggcggtcgagtagagacgttttttattttttagacggggtcgttgtcgggtagaggcgttttttatattttagatggggcggcggggtagaggcgttttttatattttagataatgggcggtcgggtagagacgttttttattttttagatgtgatggcggtcgggaagaggcgttttttattttttagatgggatggcggtagggcggagacgttttttattttttagattgggtagttaggtagaggggttttttatattttagacgatgggcggttaggtagagatattttttattttttagacggggtggcggtcgggtagaggttgtaattttagtattttgggaggttaaggtaggcggttgggaggtgtaggttgtagtgagtcgagattacgttattgtattttagtttgggtattattgagtattgagtgaacgagatttcgtttgtaatttcggtatttcgggaggtcgaggttggcggattattcgcggttaggggttggagatcggttcggttaatatagcgaaatttcgtttttattaaaattagttaggcgtggcggcgcgtgtttgtaatcgtaggtattcggtaggttgaggtaggagaattaggtagggaggttgtagtgagtcgagatggtagtagtatagtttagtttcggtttcgtatgagagggagatcgtggaaagagagggagatcgtggggagagggagagggggagggggaggggggagggggagggattaattaatagttttataagtagatataatagtgtataaataaggaaattaaggaagattttttttttttagaattcggattttgaatattaggttgagttggagttgagtgagtaataaaatgaaaggttttttaatgtgggggagggtaggtaggagtggagatttttaagtagtattagtattgttgtttgatgggagtgtgaatttgaatatatgaagttttagttttagtagaatagtaagaaattttaagtaaggttaggtatggtttatatttgaaattttaataatttgggtaaattgaggtggaaggattgtagaggttaggagtttaagattagtttgggtaatatagttagatttttatttttattttcgtatttttatattatataaaaataataaagaaattttaggtaaggttagatggtaaggttaggtgtggtggtttatgtttgtaattttagtattttgggaggtcgaggtgggtggattgtttaaggttaggagtttaagattagtttggttaatatagtgaaatttcgtttttattaaaaatataaaaattagttaggtgttgtggtaggtatttgtaattttaattatttaggaggttgaggtaggagaatagtttgaatttaagaggtagaggttgtagtgagttaagatcgagttattgtattttagtttgggtattaaaagcgaaatttaggagaatgttttgaatttaggaggtagaggttgtagtgagttgagattacgttattgtattttagtttgggtgatagagcgagattttattttaaaaataaataaataaataaataaagtagttagatattttggtgtttatttgtagatttagttattagggaggttgaagtgggagaattatttgagtttgggaagttgaggttgttgtgagttatgattgtattattgtattttagtttgggtgatagagggagattttgttttaaaaaaaggaaaaaaagttaggtgtggtggtttatatttgtaattttagtattttgggaggttgaggtgggtggattatttgaggttaggaattagagattagtttggttattatagtgaaattttatttttattaaaaatataaaaaattagtcgggtttggtggcgtacgtttgtagttttagttatttggaagtttgaggtaggagaattatttgaatttagtagtgagttgagattaggttattgtattttagtttgggtgatagaaatagaataagatttcgtgttaaaaaaaaaaaagtaatagattagaaggttatgaggttaaataaaataatgttttgtttttgttttgagatggcgttttattttgtcgtttaagttggagtgtagtgatgtaatttttttttattgtaatttttatttttcgggtttaagcgatttttttgttttagttttttaagtagttgggattataggtgtttattattatgtttagttaatttttgtatttttagtagagacggtgttttattatgttgattaggttggtttcgaatttttgattttaagtgatttgttcgtttcggttttttaaagtgttgggattataggtatgagttatcgcgtttagtcgaatgttttgttttttaagatggaagatattttagtattttggtaggttgaagtaggtggattattttagtttgggtaataagagcgaaattttgttttaaaaaaaaaaaaaaagaaaagaaaaaaaaagagagaaagaaattttaggtaaaagtttgagttttattttttaattatttgattattttaattattgttattaggtggatgattttggagaggttatatatttttagttttgtaaaatggggagttatattgtttaaattatataatttttatgttaagtgatatattttttaaggtattaagtttgaggatatattttgtaaatgaaatgatatatggaaatgtttgtatatgttaatggttttgttgttgttattattattatgattattatatatatggtttggagaaagttaatttttttaaagcggagattttttagtagagaataggttttttaggttgtatattaatagggagtatgtttaaggaatgttagtcggtagtttttgttaggtgtgaggggtgaaatttttttttattaaggtttaattgttttcgaagtttttaggtttgaagttttggagaaaataattaggtttttcgggcgagatttcgaatattagtttaagggatttgaaatgtaaggtcgtttgggattttattgttacggatgggtattaggcggcgtcggtcggattcgtttcgggattagtagggttttgggtagtaattcgtagggagttcgatcgtttttggttaggttcgggtagttggtgggggaggttttagaggtttacgttattcgtggacgtagtttttagtgtttttttcgcgttttattttattgttttatttttttttttgcgagagtttggatttggaaggtatttgggagggtgtaagcgttttggtgtgtgtttatttgggtttttagaagagcggcgggaattgcggtcgttcggacggtgcggttagattttagtgtggaaggggaggtagttgtttttttaggcggtcgtggggggtagtagaggggacggcgataggtgcgggagtttttttcggggtagaagtggaaaggcgggtttcggggtttgtttttaggttggaaattattttcgttttttatttaaattttcgggagaggttcggtcggcgtcgggtttggaggaggaagcggttagagatagtgtaattttacgcggtttttgtggttcgggtttttgggttgggtggatgaattatggggtttcgagtttgggagaaattgaggtggtttggacgtgaggtaaaaaatatttttttttttaaaaatatatagagagaaatatttatattttgagagaaaatttattaagtgaattaatcggttaggggagttgagtgatttggttaatgggcgaggttaatttttagggggtagggttttggagagttttttatttttttatttattatttttttttggatttgggggttttcggaatttcgatttttttttggtttattttttgtagaaaaattagggtgagttttattttcgatttgtttcgttaagttgcgggatcgcggggcgtggtacgttcggggtaggcggttcgaggtttcgtaatttttattttagtttcgcgcgggagggggcgcggtcgtgatttatttttttttttttgcgttttttttttttttttttttttttttttatatatatatattttttttttgttattttttttcggatttcggtttcggtttcgattgtaatttgtaattttcgttgtcgtcgtcgtagtagttattaattcgttagcggtttaggtggtttttgtttcgatgttttagtttaggggttttcgggtcggatttggttgggttttttttattttttgcggagttatgagggcgaacgacgttttgtaggtgttgggtttgttttttagtttggttcggggtttcgaggtgggtaatttttaggtaggtaagtggcgcgagagtatcggcgggttcggtatttgggagtcggaatttagtgcgcgtagtttcggagggtatgggtacggttttaggcggcgcggggttgtgggtgttgttttcggtttgttaggattatttgggagaggggcggttaggttcgggttatcggcgtggttcggtcgagggcggtatttcgggatttttacgttatttttttttagagcgtcgtcgattttttaattggtttttttagaagaggttgaggtcgaaatagtagtttatatttttgaggggttttgtagggaggggagtagggaattttattttgtaaataggaggtgtttggaggtgggggttttggcgggaagggtttcggtttgttcgttaattttttgttttttattcgcgtcgattttagttatttttagtttcgttgttttgtcgatagggcggagttatagaaggttggagggggttgttgttttttggtgttggaaaaataggagcggtattttttttttcgtgagtgagtttgttttggggaggtttgagattaattagagggttaagtttaggtgatattaggtaggaggtttaatagaggttggcgttttttttttttagtatagtagagtttaagtaatatttttttgttaagatttaggttaatataatttatatttattgagtatttattatatataaggttttgggttaggagttgtaagggtaaggatgtttagtttttggttttttttttttttaatttgaggattaagagggtatttttgttattttttaagttttttgttttggggagttttttttgggtttagtttgtgtttttcgtttttattttgtttattgtttgatattgtttttaggattttagatagagtttcggattgtttttttttagttttttttcgatttttatgttatttgagtttatttttttggggtgtttttgggatcgtggatatttgaggattgaagttttgtggatttttttttttttttttagattttagtttggggtttggtatagttagggttttttttttagtgtgggagtggaagaaattatttgtgttttttttatagttgttgggtttaaatttagattttgggatttttagatgtgaatatttttagttggtggaggggggtggtttggggattggcgtgggagggagtagtggagtgattgtataattgttttatttagatttttgtaatttttatttagaaatttaggagtattagagtttggttattttttttggggaggtaggaggtaggtatggttgggtttttttattttttatttgggttttgtagtttttgggtattcggttttgttttagtttttttatagtttttttgttttggttgtgatgggggtgggggatgttggaggggaggtttttggttgaggaggggttggagattttggttttattttatttttagtgttttttattaaaggagggtttgtgatattgtttttttttatgttttcggtttttgggtatagtagggatttttatgattttttttttttgttttgttttttaagttgtttagtttttttttagaggtgttgtttgtgttttttttttgtttaggttttttgttttttgtttgtgtaatatggattttatttttagggtagtagggaattgggttatttttaatattgtagttttttaagtatagatataaagtttgtataaatatttatgggtacgtgggatagatggggttatttgaaatattttttgtaaggaaatttaattatagatttttgagttagtaggattaatgtgtacgtgttcgtgtgtatattgtgtgtgtatgtgtgtgtttatattattatttttttgtgtagaaagtttggttttttttttatttggggagaagtgttggtattataatttgggaaagggggtattttgttaggaaggggattggggtggggttgttttagaaatgattaatttttttagttttttttattttaatttaaggattttggagtttttagtttttttggaattagttttttttgttgggattagttaatttttatggggagtgataaggagttttttaaggttaagaagttagattaggggtgtatgttataggagggattggggttttattagtttttttttttttatttttattgttgttttttattgagttattatcgttttagggaagggtggttggaataggtggtatttattttttattttttattttatatatggtttttttttgaattagaggaaagagattggggtagggttttagagtttaggattttttatagttcgttgtttattatatttgtaaagaagagtgaatttttaaggttgatatgttatgtatttttagtttaggtttttttttagtgtgggtgaggattgttatggtgaaaggtttttttatgaattttttttaataatgaaattgtgtggaggtttaatatggggtatttgttattatttttttttaggtttttttgtatttgttgaaaaatattttagggttggaaagtgatgttgaggttgttagagtgtgttgggatgggggagagagtgagaaggaaattttgagtttaggaaggcggggaggtaattagttttttattttttagttttaaagataaagtttttattgatttttttttattttagtattgttagagtttttttttttattgaggttatttgtttgagtttaaggtttgagggtggaggggagtgttgttgaggacggggtgtttagggatagggtggggtagttttttttttggatagaatcgttttattgtgggttggattgtggttttaggtattgtttttattttttgtttttattttatttttagtagatataataggggttgtgtattagttttaaagagatatttattttaggatttagagagaggtaggatgagggtagagaagtgagtgttttagttggagggggagaggagggtaattaaagttgcggtttttttttaattttttttttttagggagagaaataaattttttgtttttttttttagttaattttttagtatttaaaagaagtatagaggggttttaggttgaaaaaggaaatttttttatttttttatttatggaatggtaaggggattttgagaagagagaaagtttttaggttattatagtttttgtttatcgtttgtgggagggttggaggtaaatgttatttgattttgtttaatgtaattggaagagggtaattaagggggtgatttttggggatggtagatgggttgagaatttgtgtttagtttttagttatttttttttttgttttgaatagt

SEQ ID NO: 52 - DNA, 8649 bp, Artificial Sequence
  chemically treated genomic DNA (Homo sapiens)
attgtttaaagtagagggaagagtggttgagggttggatataaatttttagtttatttgttatttttaaagattatttttttggttgtttttttttagttatattagataggattagatggtatttgtttttaatttttttataagcgataggtagaagttgtagtggtttgagagttttttttttttttagaatttttttattattttatgaatgggaaggtgaaaagatttttttttttaatttgggatttttttgtgttttttttgggtattaaggggttaattgagaaggaagatagggaatttgtttttttttttagaaaagagaagttaggaaaaggtcgtaattttgattatttttttttttttttttaattagggtatttatttttttatttttattttgtttttttttaggttttggaataaatatttttttgggattagtatatagtttttattgtgtttattgagggtgggatgggggtagagggtgggggtagtgtttggggttatagtttagtttataatgaggcgattttatttaggaggggggttgttttattttgtttttagatatttcgtttttagtagtatttttttttatttttaagttttgggtttagataagtgattttagtagaggggggagttttggtagtgttggggtgagggggggttaatgggagttttgtttttaaagttgaaagataaggagttagttgttttttcgtttttttaaatttagggttttttttttatttttttttttattttaatatattttagtaattttagtattattttttagttttagagtattttttagtaaatatagaggaatttggagagagatagtagtagatgttttatattgagtttttatataattttattgttagaagaggtttatgaaaaagttttttattatggtaatttttatttatattaggggagagtttagattagaggtatatggtatgttagttttgggagtttatttttttttgtaaatgtggtggataacgggttatgggaagttttggattttgaagttttattttagttttttttttttggtttagggaaagattatgtgtggggtggggagtagggggtagatattatttgttttagttatttttttttgaggcggtggtagtttagtgggaggtaatagtgggaatggagggagggagattggtgaggttttaattttttttataatatatatttttagtttgattttttgattttggagggttttttattattttttatgaaggttggttagttttagtaaagagagttagttttagaggagttgggaattttagggtttttgggttgaaatgaaagagattaggaaggttagttatttttggaatagttttattttaattttttttttggtaggatatttttttttttaagttatagtgttaatatttttttttagataagggaggagttaagttttttgtatagggaagtagtagtgtgggtatatatatatatatataatgtatatacgaatacgtatatattggttttgttggtttaggaatttatagttgggtttttttgtaggaagtattttaggtggttttatttattttacgtgtttataagtgtttgtgtagattttgtgtttgtgtttggaaggttatagtgttagaggtagtttagttttttgttattttgagggtaaagtttatattatataaatagggggtaaagggtttgggtaggaagggagtataaataatatttttggggaggagttaggtagtttggggagtagggtaggggaagggaattataaaaatttttgttgtatttaggaatcgggagtatagggaggggtagtgttataggtttttttttggtagagagtattaggggtgggatagagttagaatttttagtttttttttaattagaggttttttttttaatattttttatttttattatagttaggataaaggggttatagaaggattgagatagggtcggatgtttagaggttgtaggatttagataaagggtaaagagatttaattatgtttgttttttgtttttttagggagggtggttagattttggtatttttgggtttttgggtgaagattgtaggagtttggatgggatagttatatagttattttattgtttttttttacgttagtttttagattatttttttttattagttgggagtgtttatatttaaaaattttaggatttaaatttaggtttagtaattgtgagggaagtataggtggttttttttatttttatattggggaaggggttttggttgtgttaaattttaagttgagatttgaggggaggggaggagatttatagaattttagtttttaggtgtttacggttttagagatattttaaaggggtgggtttagatagtatgggagtcgggggaggattggagaagagtaattcggggttttgtttagggttttagagatagtgttagataataagtaaaatgggggcgggaggtataagttgagtttaggaaggattttttaaggtaggaggtttagaaagtagtagaggtgtttttttgatttttaggttggggagagaaaagattagaggttggatatttttgtttttatagtttttggtttagggttttgtgtatagtagatgtttaataaatatgagttgtgttgatttgggttttgataaagagatgttgtttaagttttgttatattgaggaaagggggcgttagtttttgttgggttttttgtttgatgttatttgaatttggttttttggttaattttagatttttttagggtaggtttatttacggaagaggaggtgtcgtttttgtttttttaatattagagaataataattttttttaattttttgtagtttcgttttgtcggtaaaataacgaaattaggggtagttgaaatcggcgcgggtggggggtagggggttggcgagtaaatcgagatttttttcgttaaggtttttatttttaagtattttttgtttatagaatgaagttttttgtttttttttttgtagggttttttagaagtgtgaattattgtttcggttttagttttttttggggagattaattagagggtcggcgacgttttggagaagggtggcgtgagggtttcggaatgtcgttttcggtcggattacgtcgataattcgagtttgatcgttttttttttaggtggttttggtaaatcgggggtagtatttataatttcgcgtcgtttgagatcgtgtttatatttttcgaggttgcgcgtattgggtttcggtttttaggtgtcgagttcgtcggtgttttcgcgttatttatttgtttgagagttgtttatttcggagtttcgggttaggttgaaaagtaagtttagtatttgtagagcgtcgttcgtttttatgatttcgtagagggtgaagggagtttagttaagttcggttcgggggtttttaggttaggatatcgaggtaagagttatttgaatcgttggcgaattggtggttgttgcggcgacggtagcggaggttgtaaattgtaatcggagtcggagtcggagttcggggagggatggtaggggaggggtgtgtgtgtgtgagagagagagagagagggagggaggaacgtagagggaagggggtgagttacggtcgcgttttttttcgcgcgaggttggagtagggattgcggagtttcggatcgtttgtttcgagcgtgttacgtttcgcggtttcgtaatttggcggagtagatcgaggatggggtttattttaatttttttgtaggagataggttaaggggaggtcgagatttcgaaagtttttagatttagggaagggtaatgaatgagggagtggaaagttttttaaagttttgttttttgaaagttggtttcgtttattaattaaattatttaatttttttagtcggttggtttatttggtggatttttttttagaatgtgaatatttttttttgtgtgtttttgagggggagggtgttttttgttttacgtttaggttattttagttttttttagattcgaaattttataatttatttatttagtttaggaattcgagttatagagatcgcgtgaaattgtattgtttttggtcgtttttttttttagattcggcgtcggtcgggtttttttcggggatttggatggggggcgggggtggtttttagtttgggaatagatttcggagttcgtttttttatttttatttcgggaggggttttcgtatttgtcgtcgttttttttgttgttttttacggtcgtttgggagaatagttgtttttttttttatattggagtttggtcgtatcgttcgggcggtcgtagttttcgtcgtttttttggggatttagatgggtatatattaaggcgtttatatttttttaggtgttttttaagtttaggttttcgtaggaaaggggatggggtagtgaagtgggacgcggagaggatattagagattgcgtttacgaatggcgtggatttttggaattttttttattagttgttcggatttggttagaggcggtcgggttttttgcgggttgttgtttaaagttttgttagtttcgggacggattcgatcggcgtcgtttggtgtttattcgtggtagtggagttttagacggttttgtattttaaattttttaaattggtattcgggatttcgttcggagagtttagttgttttttttagaattttaagtttgaagatttcgaaaatagttgagttttgataaagaaaaattttattttttatatttagtaaagattatcggttaatattttttaaatatgttttttattgatatgtaatttagagggtttgttttttattggagaattttcgttttggggaggttggttttttttagattatgtgtatagtagttataataataatagtaataataaaattattaatatatataaatatttttatatattattttatttataaagtatgtttttaaatttagtgttttagagaatgtgttatttaatataaaaattatatgatttaggtaatataattttttattttatagaattagaagtgtgtgatttttttaaggttatttatttggtgatagtggttgaggtgattaggtgattgggaggtggggtttagatttttatttagggttttttttttttttttttttttttttttttttttttttttttgagatagagtttcgtttttgttgtttaagttggaatgatttatttgttttagtttgttaaagtgttgggatattttttattttaaaaaataaaatattcggttgggcgcggtggtttatgtttgtaattttagtattttgggaggtcgaggcgggtagattatttgaggttaggagttcgagattagtttagttaatatagtgaaatatcgtttttattaaaaatataaaaattagttgggtatgatggtgggtatttgtaattttagttatttaggagattgaggtaggagaatcgtttgaattcgggaggtggaggttgtagtgagaaaaaattgtattattgtattttagtttgggcgatagagtgagacgttattttaaaataaaaataaaatattgttttgtttgattttatggttttttggtttgttgtttttttttttttgatacggaattttgttttgtttttgttatttaggttggagtgtagtggtttgattttagtttattattgagtttaagtgatttttttgttttaggtttttaagtagttggggttataggcgtgcgttattaagttcggttaattttttgtatttttagtagagatggggttttattgtgatggttagattagtttttaatttttgattttaggtgatttatttattttagttttttaaagtgttgggattataggtgtgagttattatatttggtttttttttttttttttgagataggatttttttttgttatttaggttggagtgtagtggtgtaattatggtttatagtagttttaattttttaggtttaggtgatttttttattttagtttttttagtaattgagtttataggtgggtattaaaatgtttggttattttgtttatttgtttgtttgtttttgagatggagtttcgttttgttatttaggttggagtgtaatggcgtgattttagtttattgtaatttttgttttttgggtttaaggtatttttttgagtttcgtttttggtgtttaggttggagtgtaatggttcgattttggtttattgtaatttttgttttttgggtttaagttatttttttgttttagttttttgagtagttgagattataggtgtttgttataatatttagttaatttttgtatttttagtagagacggggttttattgtgttgattaagttggttttgaatttttgattttgggtaatttatttatttcggttttttaaagtgttgggattataggtatgagttattatatttggttttattatttggttttatttaggatttttttattatttttgtatgatatggagatgcgggggtgggggtgggggtttggttatgttgtttaagttggttttgaatttttggtttttgtaatttttttattttagtttatttaaattgttaggattttagatgtgaattatgtttggttttatttaggattttttattgttttattgagattggagttttatgtgtttagatttatatttttattagataatagtgttgatattatttaagggtttttatttttatttatttttttttatattaaagggttttttattttattatttatttagttttagtttaatttggtatttagggttcgagttttgaaggagaaaaattttttttggtttttttgtttatatattgttgtatttatttataagattgttgattggttttttttttttttttttttttttttttttttttttttttttacggtttttttttttttttacggttttttttttatgcggagtcgaagttggattgtattgttgttatttcggtttattgtaatttttttgtttgatttttttgttttagtttgtcgagtgtttgcgattgtaggtacgcgtcgttacgtttgattggttttggtggagacggggtttcgttgtgttggtcgggtcggtttttagtttttaatcgcgagtgattcgttagtttcggtttttcgaggtgtcgggattgtagacggagtttcgtttatttagtgtttaatggtgtttaggttggagtgtagtggcgtgatttcggtttattataatttatattttttagtcgtttgttttggttttttaaagtgttgagattgtagtttttgttcggtcgttatttcgtttgggaagtgaggagtgtttttgtttggtcgtttatcgtttgggatgtgaggagtttttttgtttggttgtttagtttggaaagtgaggagcgttttcgttttgtcgttattttatttaggaagtgaggagcgttttttttcggtcgttattatatttaggaagtgaggagcgtttttgttcggtcgtttattgtttgagatgtggggagcgtttttgtttcgtcgttttatttgggatatgaggagcgtttttgttcggtagcgatttcgtttgggaggtgaagagcgtttttgttcggtcgtttcgtttgagaagtgaggagattttttgtttggtaattatttcgtttgagaagtgaggagttttttcgttcggtagttgtttcgtttgagaagtgaggagttttttcgttcggtagttattttatttgggaagtgaggagagttttcgttcggtagttattttattcgggagggagatgggggggttagtttttcgttcgattagtcgtttcgttcgggagggaggtggtggggttagtttttcgttcggttagtcgtttcgtcggggagggaggttggggggttagtttttcgttcggttagtcgtttcgttcgggagggaggtgggggggttagtttttcgttcggttagtcgtttcgtttgggaggtgaggggcgtttttgttcggttattatttcgtttgggaggtgtatttaatagtttattgagaacgggttaggatgataatggcggttttgtggaatagaaaggcgggaaaggtggggaaaagattgagaaatcggatggttgtcgtgtttgtgtagaaagaagtagatatgggagattttttattttgttttgtattaagaaaaatttttttgttttgggattttgttgatttgtgattttatttttaattttgtgttttttgaaatatgtgttgtgtttatttagggttaaatggattaagggcggtgtaagatgtgttttgttaaatagatgtttgaaggtagtatgtttattaagagttattattattttttaattttaagtaattagggatataaatattgcggaaggtcgtagggttttttgtttaggaaaattagagatttttgtttatttgtttatttgttgattttttttttattattgttttatgattttgttaaatttttttttgtgagaaatatttaagaattattaataaaaaaataaat

SEQ ID NO: 53 - DNA, 5880 bp, Artificial Sequence
  chemically treated genomic DNA (Homo sapiens)
attagtaatatatatgagtgtttttattttaggatttaattttaagtatattagaaatttttttttaaattgatgagttaaaatattttttaaggtagggcgcggtggtttatgtttgtaattttagtattttgggaggttaaggtgggcggattataaggttaggatttgagattagtttgattaatatggtgaaattttatttttattaaaaatataaaaattagttgggtatggtggcgggtatttgtatttttagttatttgggaggttgaggtaggagaattatttgaatttaggaggtagaggttgtagtgagtcgagatcgcgttattgtattttagtttgggtgatagagtaagattttgttttaaaataaataaataaataaataaataaataaataaataaataataaaaataaaaaaattttttattttttaagtgtatagtataatgtattgatttggggtgtagttaaaagtttttttttttatatttataagttgtttgtaatttttttatttgagggagtttatagatagttattagttgaaaatggtagtattgagagtgagagagtatatagttatatagtattagtttttttgatatttttattttttttttaggttttattttttttttaaatttttgttattttttatatatagtgtttttgaagttattgattattttttatttttttgtgaggattttatgtttttttttggaattatttttatttgtttatttttttggttaattttgttgtttaattttatattttttttttatttatttgatgtaattgtgtaaattagatttttaataatttgttttatatattgttttaatataataaattttaaaagttattgttttatttaatattttatttaattttgagtaaattttatttgattttaattatagtaattatttaaaataagtagcgttattttagtttgttgtttttttgtaattgtttttagaaatttattttttttaataacgtgtaatttttttataatgttatagtaagttaattgtagagaagttattaatgaatattattttattttattaaataatagtaagggaaatataaaaatttaaatagttttatatgtaatttaaaaattttttaaatttaaaaatggatttttttttggaggggggtagtttttttttaagaatttttattttaaaatttaaatgggattttaaaatataagtaaataaatgttaaagttttttggtttttgttttgttattttatgtttgaaattttgttaaaatgaaatttttcgtttaaaagggttggtatttattaaattgatgttttaaagatatttttaaaaagtagtggaaattttgtttagttttttatgtttttgttttgtagatagaatagttgtttttgtagatattttttaagattttatattttttgaaaaataaatttttagtttttttattgtttttagtaagtgggtttattggttttttttagtgttaagtagagaagataaataattgttaaattagaagttagtgtttgagtattaaggtatagaaaggatagaagagatagtgttttagtaagtattaatgtagagaaaggatagaagagaaagtgggagaaagaaaagagggtggtttaatcgtttatagttaagagggatatatttattttaaaattttaggttgttttaataaaatcgagttgtagcgagattagttgtttatttatacgagaatattatttttagttattatgaagattaaagagttaaaagatatgagttcgtttaaagaatttaaaagggaaaatatgaagttatcgtaatacgtagtaaaatttgaggtttaatagcgtagcgtttgagagtgttagtttattaaagggagggagaaggggcgtagagtttatgggggtttgggaaggagtgataagtttttggaaatggaaattaaagttattagttagcgaaaattattaatatttttaaaaatatataatattaataatatataaaagttttaaaaaattaataagatattgtgggatataaaaaaaggtagaaatgaaaattatagaatgttaagtgaaaaaattgaaatttatttatagtcgaatagtttgtatttttaaaagtaatgatttgaagtagtaagtaaaagtttttagtttttaagattttttttttatttttaatttttttttttttttagtgtaaaagttgtttaagtagtgtacgtcggaattatttttacgtgagtttttttttaatttcggttttaattttttttttttttgttattatttttagattttaatttttttttttttatttagtatttgttttagggataggataaagaggaggtagcgagttgaaaaaagttttgtggtttgggatatttgggtttttgttgtgttattttttttatttttttacgtttttaattacgtgattaagaagggtcggaattttgtgaatggagacgaaaggtggttgttggggcgggcgggatttcgtttttttttttaaagcggttaattttttagcggagcgttgaggggttagtaataaataataatgggttggggatttacggttcgttattggttgcgggaagaatttcgtcgggatttaattcgaagtttcgttttttcgcggttattttggatattcgttaggttcgggttgtagagaaggtttttggaaattgttgtttagattataggcgttgggttattttaggagtgtagggtggtggaggatttttgttattgattttttgtttggttgtatttttagatagtatttatgagttttattgtttagtttcggggtttaggcgttttttggaatttttttttggtcggggttaaaatgtagttttcgtttaaaatgtttataggtgcgcgcgttgtgaatttcgatttagtagttttcgggaatgcgcggggtttgtttttgttgtttatagttattggttgtttttttagtaataagtgttgattgtttgtttgtttgttttttttttaagtagattttttttttgtttaggttcggggttgagtgttgtgcgtttttatattttattttaatgtgtttttataacgttttatttaaggaaggaaatttttaaatagaaattgagaattgtagtacgttttttaacgggcggaatagttgtcggaaacgttttttggttattagttttggttataaatgaattttaatagtattgagtttttggttttattttcgcggtttttcgttcgttgttggatattggttttttaaagtgacgttttattgttttgagttttataggaggattagggtaagtggttttagagatgtagtttttattgtttaacgttttagttattgtttttgaaattcgagttattttatcgttcgtttttaattttgggttttggttgtttaaaagttggagaggaagtgaaagcgttaagtatagtaagtgatatttttcgttttcgtgtatatataataaaagtttaggaaacgtgcgggttttaggatatacgagtaattttaagtattttttttttttttttatagttatagtggattggaagtatttttttttagtgtatacgtagggattattttgatttatatttttttatttagtttgttttgttgtttttttattataatttttgttaattagtaattttgtattttttaggtgttttttttatagattttttatgtttttgttttacgaacgataggatttaattttagttgaggatgattgtttaaaaaatgtttcgataaattataatggtgatggtgggttttgaaaaacgggaaaataaattgggttaaaagttgagtgggaatgaggatagagagcgaggtgagtttttagttagggtaagagtagagaggttggagattttgaggggagggtagttgaataaggcggtacgggttttgtggatcgcggttttaagggtatattagaatcgtataatagtattttaaggaaattagtttaatagtggatttaatattttaataatgggaattggcgattcgaaatatacggttttagtatttttaggcgttttaataataagtagcgggttatagaggaaatcgagttttttcgtggcgtttttaggttgaggatttagcgtttatcggtcgagtattttttagggtagaggggcgagggagattcgcgggaaggggtagtaagtcgtttgattgatagttcgaaatttgattttgtgaaagagacgcggagttaatgggaggtagcgatttattagtttggattggaggtttttggaggagaagtagaggaaaaattatcgaattgagttttgttagaggcgttttcggtttttaagggggaagtgttgggttataattaatgtttttattaaatttggagggaagtttttgtagtttttcgtttagcgtggtttttaggtgggtttttttaataattttttatgtttttttagataattgtatggttgtgggtcgtaaaaattattttgatgaaagaggtgttttcgtttttttagtttcgttaggtgtaaagtaagtttcgttgatcgttattgttagttttgtatacgtttgcgaattagagttgttcggggtatatcgatcgcgtagggaaatatcgagagtgtaaataaatatatcgttttttgttcggatttttgttattatcgaaaatatgtaaattgtgaattttgttggttttttttggatttaggtgaaggaggcggtgtagggagggttatttttgtgaatgggattgtcggagggtaattagttatgtaaatttaagagttttatttatgatttttttttaagtttaaaagttattttgtttttttttaggttgatagaagtttagattttgaggaaatttttagttaaatgtttaaaatataaaatattgagttgagatttgcgaagagtagtagtatggatggattttatgattagtaagtgttttatatggttattaatgtgagtgattagtttgaaagttgttgtttataaatttgatttcgtcgggggtggggagagggagaaaatgagaagggagggggtacgggggttgggattgtagatatttatttgttttgttgttattgtagggcgattttgtttttagaagtttagtttttaaaatgagtttattttttagtgatttggataaggtatagttttgtttttaagatttttttttttgattaaagtgtttaatatgagtggaagaggagatggagggtagtagtagttgttgtatttaaagtttttggttgggtttgtttgttatattgaaaagaatgaagttgagataaatgttgatattttttgtttatatggggtgtttttgtttttttttttttttttattttttttttttttttttttttatttttttattttttttgttttttttttttgtgggggtggggtggggaggaggggttgtttaagagagaataaaatttattgttttaatttagtattgaattagtttaaaaataattttaagtgtaaatgttttaggttgttttgatgttgagatattatgaatatatgattgataaatagtaatgtgttaagatcggtattgggaagtaattttttttgtttgtttaatataagtttttattgttaaataagtgagaaaatgaatattagagttgatattatggatttttatttttttatttagagaagatttattagatttatgtatgtatgtttgtgtgtgtgtgtgtgcgcgcgcgtgtgcgtgtgtgtgatttgaggtttatatttttttaaaggattttatttttttttttgtaga

SEQ ID NO: 54 - DNA, 5880 bp, Artificial Sequence
  chemically treated genomic DNA (Homo sapiens)
tttataaagggaaagataaaattttttaaaagaatgtaaattttagattatatatacgtatacgcgcgcgtatatatatatatatagatatgtatatataagtttaatggattttttttgaatagaaaaatagaagtttatagtattaattttaatatttatttttttatttatttgatagtgaaagtttatgttaagtaggtagggagagttgttttttagtgtcgattttagtatattattatttattaattatatatttatggtattttagtattaaaataatttgaagtatttatatttaaagttgtttttaggttggtttaatgttagattaaaatagtgggttttatttttttttggatagttttttttttttattttatttttataaaaaaaaaaagtaaaaagagtagagaaatgaaaaaaaaaaaaaagagaaaatgagaaaaaaaaaagaaataaaaatattttatataaataaaaagtgttagtatttgttttaattttattttttttaatgtggtagataaatttagttaaaaattttgagtgtagtagttgttgttgttttttatttttttttttatttatgttgggtattttaattagaaaaaggggttttaaaaataaaattatgttttatttaaattattgaaaggtaagtttattttgaagattgggtttttagaagtagagtcgttttatagtggtaataaagtagataagtatttgtaattttaattttcgtgttttttttttttttattttttttttttttttattttcgacggagttaagtttataaatagtaatttttaaattgattatttatattggtgattatgtaaggtatttgttggttataaaatttatttatgttgttgtttttcgtaaattttagtttagtattttatattttgagtatttagttggagatttttttaggatttggatttttattaatttagaggggaataagatggtttttaggtttaaaaaaaaattatgaatgaagtttttgaatttgtatagttaattatttttcgatagttttatttataaaaataattttttttatatcgttttttttatttggatttaaagagagttaatagagtttataatttatatattttcggtagtagtaaaaattcgaataagaggcgatgtatttatttatattttcgatgtttttttgcgcggtcggtgtatttcgggtagttttgattcgtaaacgtgtgtaaaattagtaatggcgattaacgagatttgttttgtatttaacgggattaaagagacggagatattttttttattaggatagtttttgcgatttataattatgtaattatttggagagatataaaaagttgttggaaagatttatttgaaggttacgttaggcgaaaggttgtaaaaatttttttttaaatttaataaaaatattaattatagtttagtattttttttttggaagtcgaaagcgtttttgatagagtttaattcggtggttttttttttattttttttttaggggtttttaatttaaattgatggatcgttgttttttattggtttcgcgttttttttataagattagatttcgggttgttaattaggcggtttgttgttttttttcgcgggtttttttcgtttttttgttttagggggtgttcggtcggtaggcgttgggtttttagtttggaagcgttacggagagattcgattttttttgtaattcgttgtttattgttaaggcgtttggggatattgaaatcgtgtgtttcgagtcgttagtttttattattggggtgttaggtttattattgggttggtttttttaaagtattgttgtgcggttttggtatatttttagagtcgcgatttataaagttcgtatcgttttatttagttgttttttttttaggatttttaatttttttatttttgttttgattaggagtttatttcgttttttatttttatttttatttagtttttggtttaatttattttttcgttttttaaaatttattattattattatggtttatcgaaatattttttaaatagttatttttaattaaaattagattttatcgttcgtgggatagaaatataaagaatttataaggaaggtatttaggagatgtagaattgttgattagtagaggttgtgatgggaggataatagagtaagttaggtgaaaaagtataagttaaaatggtttttacgtgtgtattgggaaaaggtatttttagtttattgtggttgtggggaggaggagggagtgtttggggttgttcgtatattttagaattcgtacgttttttgagtttttgttatgtatatacggaggcggagggtgttatttattgtatttgacgtttttattttttttttagtttttaaatagttagagtttagggttgggggcgagcggtgagatggttcgggttttaaggataataattaggacgttaagtagtgagggttgtatttttgaagttatttgttttgatttttttatgggatttagaatagtaaagcgttattttaaggagttagtgtttaatagcggacgggaggtcgcggggataggattagggatttaatgttgttgaaatttatttgtgattagaattagtgattaaaagacgttttcggtagttgtttcgttcgttaggaaacgtgttgtagtttttaatttttatttgaaagtttttttttttaaatagaacgttatggagatatattaaaatggagtgtaagagcgtatagtatttaatttcggatttgggtaggagaaagatttatttaaaaaagaagtaaataaataaataattaatatttattattgggaaaataattaataattatggatagtaaagatagatttcgcgtattttcggaaattattaaatcggagtttataacgcgcgtatttataagtattttgagcgggaattgtattttaatttcggttaaggagagattttaggaagcgtttgggtttcgaggttgaatagtgaagtttatgggtattatttgagggtgtaattaagtagggggttaataataagggttttttattattttgtatttttggaataatttagcgtttgtaatttgagtaatagtttttaaagattttttttgtagttcgagtttgacgggtatttagggtaatcgcgagggggcggagtttcgggttaggtttcggcgaggtttttttcgtagttaataacgagtcgtaaatttttagtttattgttgtttattgttgattttttagcgtttcgttaggagattggtcgttttagggaagggggcggagtttcgttcgttttaatagttatttttcgtttttatttataaaatttcggttttttttggttacgtggttgggggcgtggaggggtagaggaaatgatataataaaggtttaagtattttaaattataaaattttttttagttcgttgttttttttttgttttgtttttgaaatagatattagatgaggaaaaagaggttggggtttgggagtaataataagagagaaaaaaattaagatcgaaattaaaggaaggtttacgtggggataatttcggcgtgtattgtttagatagtttttgtattagaggaaagaaagaattgagagtggggagaaagttttaaggattgggaatttttgtttgttgttttaagttattgtttttaaaggtgtaaattgttcgattgtagatggattttagtttttttatttaatattttgtaatttttatttttatttttttttgtattttatagtgttttgttagttttttaaagtttttatgtattattagtattatatatttttaggaatattgatggttttcgttggttgatagttttagtttttatttttaaagatttattatttttttttaggtttttataagttttgcgttttttttttttttttttagtggattggtatttttaggcgttgcgttgttaagttttagattttattacgtattgcggtggttttatatttttttttttgagttttttaaacgaatttatattttttaattttttgatttttatagtaattgaaaatgatgttttcgtgtgaataagtagttagtttcgttatagttcggttttgttgaaatagtttaaaattttgagataaatgtgttttttttgattgtgaacgattgaattattttttttttttttttttatttttttttttgttttttttttgtattgatatttattgaaatattattttttttgttttttttatgttttgatatttagatattagtttttagtttggtagttgtttattttttttgtttggtattgggaaaaattaatagatttatttgttgaagatagtggaagggttgaaaatttgttttttagaaaatgtaagattttggaaaatatttgtaaaggtagttgttttgtttataagataggaatataaaaagttggataaagtttttattattttttgagaatgtttttaaaatattagtttagtaaatgttagtttttttgaacggaaaattttattttggtaggattttaggtatagaatggtagagtagaggttaagaggttttgatatttatttgtttgtattttgaaattttatttggattttgaaataagagtttttgagagaaagttatttttttttaaaaaaaagtttatttttgagtttggaaagtttttaggttgtatgtaaaattatttaaatttttatattttttttgttgttatttaataaagtaaaataatatttattagtgatttttttatagttaatttattatggtattatgaagaaattgtacgttgttaaagaaagtgaatttttaaaagtagttatagaaaggtaataagttaaaatggcgttgtttgttttaaatggttgttataattaaaattaaatgaagtttgtttaaaattgagtagagtattaagtaaaatagtaatttttaaaatttgttgtattaaaatagtatgtaaggtaaattgttaaagatttagtttgtatagttatattaaatagataagaaaaagatataaaattaaatagtaaaattggttaagaaaatgaataagtgaaaataattttaaaggagaatatagagtttttataggagggtgaaagataattagtggttttaggaatattgtatgtgaggagtagtagaaatttgagaggagggtggagtttgggaagaaggtaagggtattaaggaaattgatattatgtagttgtatatttttttatttttaatattgttatttttagttggtgattatttgtaaatttttttaagtagaggaattgtaaataatttataaatgtggaaaaaaaaatttttaattgtattttaaattagtatattatattgtatatttaaaaaataaagaatttttttatttttattatttatttatttatttatttatttatttatttatttattttgagatagagttttgttttgttatttaggttgaagtgtagtggcgcgatttcggtttattgtaatttttattttttgggtttaagtgatttttttgttttagttttttaagtagttgggagtataggtgttcgttattatgtttagttgatttttgtatttttagtagagatggggttttattatattggttaggttggttttaaattttgattttgtgattcgtttattttggttttttaaagtgttaggattataggtatgagttatcgcgttttgttttaaagaatgttttaatttattaatttggaaggaagtttttaatatatttagagttggattttaggataagggtatttatgtatattgttggt

SEQ ID NO: 55 - DNA, 7667 bp, Artificial Sequence
  chemically treated genomic DNA (Homo sapiens)
atataaatgttggtttttttatatttagatttatataattttttattttttgagatagagcgtttttttgttgtttaggttggagtgtagtggcgtaatttcggtttattgtaatttttatttttcgggtttaagcgatttttttgttttagtttttaagtagttgagattataggtgtttattattatattcggttaatgtttgtatttttagtagagacggggttttatcgtgttggttaggttggttttgaatttttgattttacgtgatttgtttattttgatattttaaagtgtttggattataggcgtgagttatcgcgatagttttacgtgatattttatatattattataggggtaggatatttagggaggttaggatatagtttagttagttaagaaaagtaatgaatcgtttataaaatatagattggaatttattttaatagaaattttggtgtttttgtgagttagtttgagagtattgtggaatatttttaggtttttttttaaagttaaggtggtagtaggtagtttttgttgtttatgttttatgtgtttagttagttttttaggatagtttatgaaaataagttttttgttatttttgaggttagttagtagtcgtttatgatatttggtgtattttttgatttaggagttatagttatagatatagattgcggagacgttgtcgtaagtaaagttaggaaaaataataaattatttagagagaaagtttgttttaaagcgattgttaggttcggtatgggtaaggtttattataattttatatggttttgtataatatggttttaaagttagtaagatatggtatattagtaaattattattgatttgattagttttgaatttaaggaaaatgataaaaaagataaagattattagtagtgtttaaaataaatatatagatgttattaattaattttattttatgatttattttttagagagaataatataaaataattttttaaagtttggatttattttttaaattagttgttttttggatattgagaaataaggttaagagaagagataaatttttaatttaaaaattttgagttacgataataataaaaaatttgtttatgagttaagaaaggaagaaaatagtgggaattagttggttgtttgtagggtttattaaattttttaggcgaatagtttggtaggaatgatttatttggagttttggagtgagatggttttagttaatttatttattttattttgattatagattgatttagtaatgaatatattatttaaattaggataattagggttaaagaggtttagtttaggtagtttagtttaaattgttgggatttgagatattttttttttggtgtttataaataagggaatacgtagttttaggagttgttagtttatattttgggatataaaagaagagttttttaaaagattgaagagaaggagttgagaaatagataaattggaattttggttatattatttgtgtatgagataaagttttttttggggttaaatttattttaggattgtttagttatataagttaataaatattattttttgattaagttatattaggttatatgttgtttaaaattaaaagaatattaataaatgggagtagttatagtgaggattatgaaaaagttttgaagtaatggtattaaagttttaaattaaaataatttatgttaatttaggtttaaagttttttatatgtgatgattttggtgataatattattaagtaagttaaaataaatttttattttagaggttggttaatggatataaaaatataattagggttgggtatagtggtttacgtttgtatttttagtattttgggaggttgaggtaggtgggttatataaggttaggagttcgagattagtttggttaatatggtaaaacgttgtttttattaaaaatataaaaattagttaggtatggtggtatatgtttgtaattttagttatttgggaggttgaggtacgagaattatttggatttgggaggtagaggttgtagcgagttgagattgtattattgtattttagtttgggtaatagtgagattgttttaaaaaaataataataaaataaataatatatgtattgttagaattagatagaaggaataagttttattatttatagtaaggtgattagttaataataatattgtatattttaaaatagttagacgaaataattttttttttttgaggtaatggatattttaattattttgatttaattattatatattatatgtatgtattaaaatattatatatataggtagggtatggtggtttacgtttgtaattttagtattttgggaggttaagacgggtagattatttgaggttaggaggttaagattagtttggttaatagggtgaaattttgtttttattaaaaatataaaaattagttgggcgtggtggtacgtgtttgtagttttagttatttgggaggttgaggtaggagaattgtttgaatttgggaggggagtttgtagtgagttgagattgtgttattgtattttagtttgggcgatagagcgagattttaataaaaataaaaataaaaaaaattaaaaaaattatatatattttattaatatgtataaattattatgtattaataaaaaattttattttagaatttttaattttgttgggagaaaataagataaaaatatgataagttaaatgattttaaaataatataaatattttaagatagaagatatgaggtagaaagtaattatttattaaaggaaatgtagagaaaatattgttattaagataaaggagagagagagagagattaatataaattgggtagttagtgaaagttatatagaagatatagtggttgaattaggtaaggaggaatgtagatttagtaagaggattgggtaggttttatggagaaaggtaaaaaggaaaagaaataggtaattagatgtgttgaagagatagttagtttagttagaatggaggatttaggtagagaagttttgagagataaagttgggaaaatatagaatagttaaattgtggagagattataattgtttaattaaagggtttaggttttttattaggggtttattattttttagtatatgttttgtggattattggcgttagaattaattgtggtgtttgataaaaatgtagttttttggttttaatttggatttattaaatatggatttatgtagtggggtttggaaatttttatttttttttttttttttttaatttaggttggattgtagtggtacggttatagtttattgtagttttgatttttttaggtttaggtgatttttttattttagttttttgagtagttgggattatagataagcgttattatgttcggttagttttttgtttttgtttttttgtattttttgtagagataggattttgttatgttgtttaggttggtttcgaatttttgtggtttaagtaattttttcgttttagttttttaaagtgttgagattataggtgtgagttattatgttttgtttttataatttttaaataatttttttatttgatgtttatgtatataaatatttttgaattattgttgtatgtattagggaattgtttaatcggttttatttttttttaaagaaagggtggtatgattaaagatagtgatgtatataagatataagaaggatttagggttatcgaaaaggtattgtagagtttaggtatgatttgataaggatttaaaatagtattgttgatagtaaaaatagggaaaaagaaattgatttaataatatgaaggaaggattaatatgatttaaagtttgattaggattgagaggatttaaattaaaatgatgtgttgtatattaagtttttgatattagaatgttgttattatgaatagaaataagaagattgttataggtagttttttttaaagaaaaaataaagttttttttattttattaatttaattaatttttaagagatggagttttgttatgttatttaggttggatttgaatttttgggttttattagtgatttttttattttaatttatttagtagttgggattatagatatgtgttgttatatttagttttttttttttttttttttttttttttttgagatagagttttattttgtttttttggttggagtgtagtggtatgattttagtttatgtagttaagattttatgatttttgtagtttttacgtttcgggtttaagttatttttttgttttagttttttaagtaggtgggattataggtgtatgttattttgtttggttaatttttatatttttagtagagataggttttttttatgttggttaggttggttttgaatttttggttttaagtgatttgtttgcgttaatttttttaacgtgttgggattataggtgtgagttatcgtgtttagtttatatttagtttttaaagtttgttttagttatgttaaatttgaggtgatgataggatgtttgatagttgtgtgtgtgtgtgtgtgtgtgtgtgtgtgtgtgtgtatatatatattatattatacgaaagtattttttgttttatataatttaagtttattagatatttttttaaataattgttgtagttttataattgttatattatttgattagtattttatggattttaaatttatatttttaaattagtttgtagattttaaataagttttttagagaagatttgaaatggaagatattattttaaaattttttttgaatgatattaaagtatgtagtaggtttatagaatgagtatattgttaaaaggtattaagtggaaaattttttttgttttggaggcggggattggttttataaagttttttgttatgttagtggttaattagagaagttggagttttttcgttgttttttttttttttttttttgtgatatgtgttttagttgtagtggaaaggaaatgtgttatttgtggtttggttttaaaagtggaaaattagttgtatatatttttttttattgtagatttattttaaggtttatattttttaagtttattttgttttaaaaagaagataagaaaagaagtggtttattaaaattacgttataattagattttgattaagtattttgtaaggtaggttatatatatacggttttttttatgtttttttatttttaacgtttgatagattagtgttcgaggaaatgttattaaagtgtgtaagaattttattaataaattagaattgtgattgaaaatgtatattttttttttttgttttgttatataaattttaagttagaaatgaaaaaatttgttatcgttatggagttttaaattaggattacgaaggatttaagtttggtttttttaagtaaattggaaatgttttgttattttttaaaagttaaaaaataaattttttattattaatgtttggatattataaattttattgaaaataaattttattgaaaatgattagatataagaaaatttttgataatataatttggtttttaaggtataaattggagtaaaaatagtttttaatttttaggtatttgtaagggtaagagaaagttttattttgttatatagtttgtttatttgggtattgtagtatatttggttgaagataattaatagtaggtttattatttgtttcgtggtaagtattgttaaaatgtgtattaatattatgatgtatattatattgttaatgaattaatgtgaatagaataatttattttaaattattttagtatttaatatagaagtttagtttagtataaaaagatggaaattatttgttaatttaattttaagtatttttttttgtggaagaattatgaaatatttaaagatttatgttattaaatttaaaaattaaagttgaatattattatataaaagttagtgatttgggtttttaattgtttattaaaggttataatttaaaaagtaattttaattttggaatatttaatagttttttttttttattattaatatgaaatatagtttttagttagtattgtttattatatgttatttttgtttgtataatttaacgtattatattttttatttttaatttttgtattttaatagtatataaatgttagttaatgatatataataattattttttataaaattttgatgtttaaaagtttgattagtagtggtatttatgttgtttaggagttggtttggaaataaagatttttaggttttatttatattagttaggtaagaatttgttttttttttttttttttaaataaaaggatttttaagtatatttgagaagaatttttatagtatacgtagggtttttaattaggtaattttatttagtaaattttaggagaataatatagttttgtttttagtttatttaaataaatgttaataataaaatattttttttaaaagtagtttaagataaattggtatattattataagatattttaataatgattataaattttttttgttgggttagtagtatatggaattgttaaattttaagatatgttatttttatttaaattaattatttggtagatttaaaaaatgtataatataatttgttttttttttgtattagtttttagtaagtttagggttaaagtggaaatttaatatttttaattatttgttgagatgtttataatttgttattttattttaaattattaagattttgatgttttatttttattttattatatatttttttttataattatgttaaaattagaaaaaatgttaggtataaatgatgttttaaaagaaaatttagtaatttttgttgaatttttaagtttatttagaggaaatttgttgtttttttttttttttttagatttttaggttgagaaaattggtatgtttttgtttttagaaagatatagttagtttagggaaatataaatgaaaagagataattattatagtaaaattgcgtttataaatatatttataaatgtatttttaagtattagttttattttaagttttaagatgaatatttaagaaaaaaaaagaatattttgaatttttatttgaagtttagttttttttggttgttattaaattttttttttttttattaaaaaaatttgtatttattttatatatgaagtaagaagtttaaggttatattttttttgtaaagattggtgataggttagagggtgggtagtttttgtaagaatgatttttaatttttttttttttttaaagaaggaattagaaaagtaaaagtagaattaattgatttaaagtagaagtttagtacgttttaaaggaagaaaattatataaagttatgatagtttatttaaaatgattaatatttatttgtaatgttaatttttagtatttaaaagtgttaatagaaattaaaatgtttttttatatatagttgaatagaaaagaaatttagttgagaaggaatttagggtagcgaatattaggtataagtttgtagtttatttgtaatattttaatattattttttaattataattattaaaattaggatttattatttttttataaattaataaattatattgttattttaataga

SEQ ID NO: 56 - DNA, 7667 bp, Artificial Sequence
  chemically treated genomic DNA (Homo sapiens)
tttgttgggatagtaatataatttgttagtttgtgaaagaataatggattttagttttggtaattgtagttaaaagatagtgttgagatgttataagtaaattataagtttatgtttaatattcgttattttgaatttttttttaattaaattttttttttatttagttatgtatgaagaagtattttaatttttattaatatttttagatgttagaagttagtattataaataaatattaattattttaagtggattattatggttttatatagttttttttttttgaagcgtgttagatttttgttttgagttagttagttttgtttttatttttttgattttttttttaaaaaaaaaaaaaaattaaggattatttttatagaaattatttattttttaatttgttattaatttttatagaagaaatgtggttttgagttttttgttttatgtatgaaataaatgtaaatttttttggtggaaagaggggaagtttggtagtaattaaaagaaattgaattttaaatagaaatttaaggtgtttttttttttttttgggtgtttattttgaagtttagaataaagttggtatttagaaatatatttgtaagtgtatttgtgaacgtaattttattgtggtggttgtttttttttatttatatttttttggattgattgtgtttttttgaaggtaaaggtatattagtttttttaatttaaaaatttgaagaaaaaaaaaaaaatagtaaattttttttgagtagatttaaaagtttaataaaagttgttgggtttttttttaaagtattatttatatttagtattttttttgattttgatataattgtaaaaaaaaatgtgtaataaaatagaaatagagtattaggattttgatgatttgggatgaagtggtaggttataagtattttaatagataattgaaaatgttgaatttttattttggttttgagtttgttggaaattagtataaaaaggagataagttatattatatattttttaaatttattaaatgattgatttaaatagaaatggtatattttagaatttaatagttttatgtattgttaatttagtaggaaagatttataattattattaaggtattttataataatatattagtttgttttgagttatttttgaaaggagtattttattgttagtatttatttgaatgaattaaaagtaaaattatattgtttttttgagatttattaaatgaaattgtttggttaagaattttacgtatgttatagaaattttttttaaatgtatttaggagtttttttatttaaaaaaaaaaaaaaaaggtagatttttatttagttagtataggtagggtttgaaagtttttgtttttaaattaatttttaagtaatatggatgttattgttagttaggtttttgaatattaaggttttataagaaatggttgttatatgttattggttgatatttgtatattattaaaatatagaaattgaaaataagaaatgtgatacgttgagttatgtaaataaaagtagtatgtaataaataatgttaattggagattatattttatattaatagtagggaggaaaaattattaaatattttaggattaagattattttttagattatgatttttagtagataattaaaggtttaagttattggtttttgtataatagtgtttagttttaatttttaagtttagtgatataaatttttggatattttatgatttttttataaaaagaaatatttgaaattggattagtaagtaatttttatttttttatattagattggatttttgtattagatgttagaatgatttaaagtagattattttgtttatattagtttattaatagtgtagtatatattatagtattggtatatattttaatagtgtttattacggaatagataataggtttgttgttgattgtttttagttagatgtattgtagtgtttaaataaataaattgtatgataaaatgagatttttttttgtttttataaatgtttgagaattgaggattgtttttattttagtttatgttttggaggttaggttgtgttattaaaagtttttttatatttgattatttttagtagaatttatttttagtagaatttgtaatgtttaagtattagtaatgagaaatttattttttaatttttgaaaaataataaaatatttttagtttatttgaggaaattaaatttagatttttcgtaattttaatttaaaattttatggcgatggtaaatttttttatttttaatttaaaatttatgtaataggatagaaaaaaaaagtatatatttttagttataattttagtttgttagtgagatttttatatattttgatagtattttttcgaatattaatttgttagacgttagaagtgaaaaggtataagaaaagtcgtatatatatgatttattttataaaatgtttggttaaaatttgattataacgtgattttgataaattatttttttttttgttttttttttaaagtagaatagatttggagaatatgagttttaaagtaaatttgtagtaaaaaaggatatgtgtagttagttttttatttttaaaattaaattatagatgatatattttttttttattgtaattaaagtatatgttataggagggaaaaaaaaaaaaataacgaaaaagttttaatttttttagttggttattggtatgataggaggttttgtagaattaattttcgtttttagagtagggagggttttttatttaatgttttttgatagtatgtttattttataggtttgttatatgttttagtgttatttaaaagaggttttgaaatggtattttttattttaaattttttttaaaagatttatttgaaatttatagattgatttgaaaatgtgagtttggagtttatgggatattgattagataatgtaataattgtggaattgtagtaattatttgagaaaatatttagtaaatttagattatatgggatagaaaatgttttcgtgtggtgtagtgtgtgtatatatatatatatatatatatatatatatatatatataattgttaaatattttgttattattttaagtttaatatgattgaaatagattttaagaattaggtatgggttgaatacggtggtttatatttgtaattttagtacgttgggagggttgacgtaggtagattatttgaggttaggagtttaagattagtttggttaatatagagaaaatttgtttttattaaaaatataaaaattaattaggtagggtagtatgtatttgtagttttatttatttgggaggttgagataggagaatagtttgaattcgggacgtggaggttgtagagattatgagattttggttgtatgagttaagattatgttattgtattttagttaggaagatagagtaagattttgttttaaaaaaaaaaaaaaaaaaaaaaaaaaagaattggatatggtagtatatatttgtaattttagttattaggtaggttgaggtaggaggattattggtggagtttaggagtttaaatttagtttgggtaatatagtaagattttattttttaaaaattaattaaattaatgaaataaaaagaattttattttttttttaaaggaggttgtttgtgatagtttttttgtttttgtttatgatagtaatattttaatattagaggtttagtatataatatattattttaatttaagtttttttagttttgattagattttgaattatgttggttttttttttatattgttggattagtttttttttttttgtttttattgttaatagtattattttagatttttattaggttatatttagattttatagtgttttttcggtagttttgaattttttttatattttgtatatattattgtttttggttatattattttttttttaagggaaaataaaatcggttgaatagttttttaatatatataataatgatttagaaatgtttgtgtatataaatattagatgagaagattgtttaaaaattataaaagtaggatatggtggtttatatttgtaattttagtattttgggaggttgaggcgggaggattatttgagttatagaaattcgagattagtttgggtagtatggtaaaattttgtttttataaaaaatataaaaaaataaaaataaaaaattagtcgggtatggtggcgtttatttgtagttttagttatttaggaggttgaggtgggaggattatttgagtttggggaggttaaggttatagtgagttgtgatcgtgttattgtagtttagtttgagttaagggaaaaaaaaaaaagataaaaatttttaggttttattatatagatttatatttagtaggtttaggttgggattaggaaattgtatttttattaagtattatagttgattttgacgttagtagtttatagaatatatgttgagaaatggtgagtttttagtagaaaatttaagttttttggttgggtagttatggtttttttataatttgattattttgtatttttttagttttattttttaaaatttttttatttgaattttttattttggttagattagttgtttttttaatatatttagttatttgtttttttttttttttgtttttttttataaggtttgtttagtttttttgttgagtttgtatttttttttatttgatttagttattgtattttttatgtagtttttattgattgtttagtttgtgttaattttttttttttttttttttgttttaataatagtattttttttgtattttttttgataagtgattattttttattttatattttttattttgaaatatttgtgttgttttaaaattatttgatttgttatatttttattttatttttttttaataagattaaaaattttgaggtgaagttttttattgatatatgataatttgtatatattaatggagtatgtgtgatttttttggttttttttgtttttgtttttgttggaatttcgttttatcgtttaggttggagtgtagtggtataattttagtttattgtaaattttttttttaggtttaagtaatttttttgttttagttttttaagtagttggggttataggtacgtgttattacgtttagttaatttttgtatttttagtagagatagggttttattttgttggttaggttagttttgattttttgattttaggtgatttgttcgttttggttttttaaagtgttgggattgtaggcgtgagttattatgttttgtttgtatgtgtgatattttgatatatgtatataatgtgtaatgattaaattagggtgattaggatatttattgttttaaagaaaagaaattgtttcgtttagttgttttgaaatatataatgttattattaattagttattttattatgaatagtagaatttgttttttttatttaattttaataatatatatattatttattttattattatttttttaagatagttttattgttgtttaggttgaagtgtagtggtataattttagttcgttgtagtttttgttttttaggtttaagtgattttcgtgttttagttttttaagtagttgggattatagatatgtattattatgtttggttgatttttgtatttttagtagagatagcgttttgttatgttggttaggttggtttcgaatttttggttttatgtaatttatttgttttagttttttagagtgttgggaatataggcgtgagttattgtgtttagttttgattatatttttatatttattaattaatttttgaggtaaagatttattttaatttatttagtagtattattattagaattattatatatggaaaattttgggtttaagttaatatagattgttttgatttgaaattttggtattattattttagggtttttttatggtttttattgtggttgtttttatttattagtatttttttggttttaagtaatatatgatttaatatggtttaattaaaaaatggtatttattggtttatataattgagtagttttgggataaatttgattttaggagaggttttattttatatataaatgatatggttagggttttagtttgtttattttttagttttttttttttagttttttgggaggttttttttttatattttaaaatatgagttagtaatttttagggttacgtatttttttgtttataaatattaggaaagaaatattttaaattttaataatttaagttaaattatttgaattgggtttttttggttttggttgttttggtttgaataatgtgtttattgttgaattagtttgtgattaaggtgggataaatggattggttaaaattattttattttagagttttagatgggttatttttattagattattcgtttgaggagtttggtgggttttgtaggtaattaattaatttttattgtttttttttttttttgatttatgggtaaattttttattgttgtcgtggtttaaaatttttgaattggagatttgtttttttttttagttttattttttagtgtttaaaaaataattgatttaaaaaatgaatttagattttgaagaattgttttatattattttttttagaaaatgaattataaaataaaattgattagtggtatttgtatatttattttaaatattgttaataatttttgttttttttgttattttttttaggtttaaaattggttaaattaatggtgatttgttgatatattatgttttattgattttaaagttatattatgtaaagttatatgaaattgtagtggattttatttatatcgggtttagtaatcgttttaaaatagattttttttttaagtggtttgttgttttttttggttttgtttacgataacgttttcgtagtttatatttataattgtaatttttgggttagggagtatattaagtattatgagcggttgttgattggttttaaaggtagtaaaaggtttgtttttatagattgttttgggaaattggttgagtatatagagtatgaataatagaaattatttgttgttattttggttttagaagaggatttgaaggtattttataatgtttttaagttagtttataaagatattaaagtttttattaaagtaagttttagtttgtgttttgtaaacgatttattgttttttttgattaattagattatattttggtttttttaggtgttttatttttatagtggtgtataaaatgttacgtaaggttgtcgcggtggtttacgtttgtaatttaagtattttgggatgttaaggtgggtagattacgtgaggttaggagtttaagattagtttggttaatacggtgaaatttcgtttttattaaaaatataaatattagtcgggtatggtggtgggtatttgtaattttagttatttggaggttgaggtaggagaatcgtttgaattcgggaggtggaggttgtagtgagtcgagattgcgttattgtattttagtttgggtaatagagggacgttttgttttaaaaaataaaaggttatgtaaatttagatgtaggaagattaatatttgtgt

SEQ ID NO: 57 - DNA, 7348 bp, Artificial Sequence
  chemically treated genomic DNA (Homo sapiens)
gtagataggagagtttgaaatgaaaggtaaatgaatttgaaaggatggttttttttggttttttattttagaaagtaagtttttttttattgtttttttgtatttataaatataggttagttataatagagtagtattttgtcgttgttttttttatttattttaattatttttttttatttttaattttattttgtttattttaattatttatattgtttttttgttaattatataattattgtttttttttttatttgtttattaatttttttttttttttgtattttttttagttaattgattttttttttttttgtttgttgttttttagagtttttgtttttttttttttgtgttatttgtatttttttgtattgttttttatattattttaaattttttttttatttttttgtttaatattgttttttatttatagaaataatgttggtattttaggtatatattatttatatattttaaaatgtgtatgttaaataattttttatattggtagtaacgttggttttattatcgttgggaaaaaagttagttttttttattattatattttttatttattttttttttaaattttttttttttttttttggattatattgaattgttattatagaattttaatatagtttttagtattttgatgtggtagattttaggaggataaaaagttaattgaagagtggtagaaagtgttaggataggtaaaaaatggaatttggttttaatattgttataatcgttaattgataagtgaaaattttatatatggagggttttattagtttattattgatagtagaggataggagtttattaaaattgattttataaattaatttgggtttaaaattatgtttttgtttgggttttgtttttttttaatgttttttttagttaattgaaaagaggaatcgtatggtttttttattttaagtaaagttataaaagaggaaatatttttggttaaagataatttatggtttatattttttgatgttttgtatagtattaaaatagatttttaaaatgaaattttgaagagaataatattttttaaagaagttttttcgtttttttttgtaatttataagaataatgggtaggaattgtatggatgatgattatttagagattatttaaatttttatatttatgttaaaagtgtttaaatttttttttttaaattttttgtaaaatggataaaaagtagaatttattaatttagattttattgtttttgtttattttttggtagaagtattagtaaaaagtaaaaattaaaatggaaaggaattaagaagtttaatataggttaaatgtttattgtgtttttaatatataaggtattaattataaagaaattaaaatataaaaatatgaggtaataaagggtagtagaaagaatgtatgttttggaattaggtggttttgggtataaatttttaatttgttatttcgagtggtataatattaggtaaattgtttaatttatttgatattgtttttttatttgtaaataagggatttttttattttttttataaagttatttgaaggttttgtgaaataaagtatgtaaaattgggatagtataatatataatatgttttagataagtattttttttttttttttttgttttttttaaggttttttataattttgtttaaggaagtaggtataggaaaatgtgaaaagtaaatataattatttaagagaatagaagtgtgagtgagatatatatatgaattatgtaaggaattataaaaataataaatgagagttagggggaatttagtaaatgattgatttgtttgggttgtagttagttatagagaatttgggttaagaaggggaatttaaattgaggtttgaaagatgaggatagatttagatatgtagttagaaaggggaagaggttaggtttggaagaaaaataaaaaaaaagaatatttttgagaagggtaaaaaatagtatagaagtgtttgtttagtagggaaaaatcgtgtgtttagaaagtatgtaaggtgggaaagggatgtatttggttggataagaagttttagttatgatacgtgaatttggattggttaatttaagttagaaggaagaaaatttaatttagaagttttattttaataggttaggcgtggtggtttatgtttgtaattttagtattttgggaggttgaggcggatagattatttgaggttaggagttcgagatcggtttggataatatggtgaaattttgtttttattaaaaatataaaaattagttaggtgtggtagtgtatgtttattgtagttttagttattcgggaggatgaggtataagaatcgtttgaatttaggatgtagaggttgtagcgagataagattatgttattgtattttagtttgggtgatagaacgattttgtttttaaaaaaaaaaagaaaaaggaagttttattttaatagaaattaaatttttaagtaaggtagtagtaatttgattatgtatatttttaagattaatttagtagtgtgtaggagagtttaaaggagaattgttttaaaatttaggtttgaattattcgtatagggaaaaaaattatatatttttttttttattaaaatagggttatttattattattgtgtattaagtggtagaggagtaagtaatgatatgttgtttagatatgttgaaaaggtaatttgtaaaatttttattgtattttttaatagaatattaaatttttttaaatataggtttatgagttagaagaattatagtttttaattatgtatattaatatttaatattttaagattttttattttttaatgttaagagataattaaatagttgttattgtgtttgatgatgtgtaaaataagtatattatattaaaagttgtaaattgttttagtagaattttttattttagaggaaaggtaattgagaataggaaaggttaagtaattagtttttatggttagataggtagttagatgggagaagtagaattgaaatttaattttttaagttttagtatttattatattttagaaaaagttttatttgttaaatttttatatgtgttttatttttttgtgtttatattgttgttttttttggttggaaatttaattagtttttatagatttttaaaatttagtttaagttttattttattgaagtttttttaggttaggttaatttttttgtatattttttgtatatttttatgagaaagtttattaaattattgtaattgggttaggcgtggtggtttatatttgtaattttagtattttgggaggttaaggtaggtagattatttgaggttagttttcgagtagtttggttaatacggtgaaatttcgtttgtgttaaaaatataaaaataggttaggcgtggtgatgtgtatttgtaattttagttatttggaggttgagagaggagaattagttgaatttgggaagcggaatttgtagtgagtttagattgtgttattatattttagtttgggtgatagagtaagattgttttgaaaaaaaaaaaattattgtaattattttttagtttttttttttttttttttttatttagagatgggattttattatgtggtttatgttgtttttgaatttttggttttaaacgatttttttattttggttttttaaagtgttgggattataggaatgagttattacgtttggtttttattgtttgtttttattattagaatttgaaatatttaaaggtagtgattattttttttttttttttttaattttttaaatttagaatagagttttatataaatgtggtatttattaatagatgaatgaaagtagtagtaggattatttgattaattggattgaatttattttattagatttagagattattttaggattttaagtttaagattttgagttgaatgaaattttttaaaaatatgtaatattaatataaggttattacgttatagagatattaaggatgttttaaagattattaatagattttgtgtttaagaaatttagtggtattattaatagatatagagaagttgggagaagagttagttgttagttgtgagggtaaagatgaattttattttaaatatgttgaatttgttgatagtgggagatatttatatttatatttatgtttatttatttatatatataaaatatggaaaaatttattaagaagttatataaatagaattaggataaagaagatgtaggttggaggtataggtttaggaattgtggtataaagttgagaattaaaattttatagaattaggaataaagaaaagtaggtaagggtgaggatagaatattaattaattatatttaggaggtagaagaaaaagagttagtgagagtaatatgaaaggaagattgattataaaaagttatttgaatattagtgaaggaatagtagtgtttaatgtggttaaggaggggaggggagagaagaaataaagaataattagattaggtaatagatgattattggtgttttttaaggtaggagaattaatatatttttagtagaaaatggtgaaaaaaggtagagaatatatggatttagtatatagagtttatgcgttttgagaagtatgattaagtgaagtattgaaatataatgaagttagaggggtagtagagttaagtatagaatttgtattaataaaagaagagagattattgtttatgaggtttaaatgttgtatgatgggttagagtatatttaagagttgttatattaaatttatagtgtattaagtttaaattaggaataataattattaattaattattattaattaggaataatgtttatttattttatgttaggaattataatgaaaagttaaatttttaattagatattaatgacgtttaattgttttttttttttattataaattcgttatagataacgaggaaatattttgaaatggattttaaatattttattttaattttgttttgtggatatttgaataatatattttttttaaagatagagataattataatagagaagtagttatagtttattttatttatattattaatgttataggtattggttaatttttaaaatataatagggaattttttgggttaattaatataatttagcgatattttttttggataattaatattatttgttaaagttattgttggataattaatattagttgtttatattttttttgaaaaattagaagtatatatttttgttggataattatttgtttataatattaaataattaatattaatagttaatatttttttttagtaagtcgtgtttatttttgttagataattattatttgttcgtatttttattatataattattaaagttatttgtttatatttttatttaataattattatttgtttagattttttttagaaaataaataattgtttataatttatttatataattaatattaattgttaaaaatttatttaggagtatattaggatttattttagatattattagtaataaataaattttataaaaaaataattataatttaatagttgttatattaattggtgtatttttgatttttatgttggtagttataattattattgtattttggaaatgtttaaggaaattagttttaaatgattaaaattgggtaggtagatttttatttgttgatggagaaatttttgatatttgtatggataatattagagaaaatgaaatatttataaaacgtatattaattattttatttatattttggaaattaagtaaaagtatatttttagtagatgatttagaaattaagttgtttgaattaagtgaaaatattgaagattttaataattttaaaatagagaaaataaaagattaagtaaatggtatattagaagatagtgttgatggtttaatagttggaattgttgttttttttttagatgatgtagatttgtttttattatttttttttttggatttggaaggataggaaagtaattaatttgattaaatttataatgataattgtatttttttttttaaatgattttattagtttttttttatttttggattgttttaattaagattgtggagattataaatttgagataatataattatttttatcgtttgatttatttaatttgtttttgttattagtagattttatgaaaaattaagaagattttaattttgagatttagtgttaggagttttttattttttttaattttgattaagattttaatgaatttttgttatttttatttgtagaattgttataaatattataatttgttttttagttgattttttatttttaaatgatttttttttttttatatgttaatatatataaaatggtaattgatagttaattttgatttttatttaggaattatttgaaatttgtttagagtttatgtgtatagatgaaatttttttttaaaaaaagttatttaatagtaatttatttattaattatagtatttatttttaaagtatagtatattttatatatgtaaatggtatgttttaataatttaagaattttgaaataatttatatatatttattatttagtatagtttttttttttttgaaaagttgtgtataaaattatggtgaataaatttttatgtttttattttaaagattagggtggagaggaataagagattaagtatatgttttaagttttaaattaatattttaagtattaaataaatattttaagtttgtgggaatgggagattaaaatgtatgtttgagaatagagaaattttttttttggttttattgtaaagagtaaaataaatatgttaaaatattaattgaagggttgggttaggaatatttattttgaaaaaaatatgaggatgtattataaaatgtaaatatttttttattatgttgggggggtataaattttaaaattggtatttttataagttttttttttataaatatttaaataaaattaagttttataaagtaaaaaaaaggaaaagaagattatggttttattttaaatacgggtgattttgggtgattttttttttaggaaaagagattattaaaatatagatgatttttaattttttattaaatttatattttttgatgttatttatttttaaattattttttttatatagaattttatttttatttattatttgataattggtaagtttgagttattagagtaggaatgggtttaatttttgttaaagttaagagtggttattagtttatatttttggggatgttagtttttgtttg

SEQ ID NO: 58 - DNA, 7348 bp, Artificial Sequence
  chemically treated genomic DNA (Homo sapiens)
tagataaaggttggtatttttaaaagtataggttgatgattatttttgattttgataaagattgggtttatttttattttaataatttagatttattaattgttagataatggataaagatgaaattttgtgtaagaaaggtgatttaagagtggatagtattagaaagtataagtttagtaaaaagttgagaattatttgtgttttgatagtttttttttttgaaaaaaaaattatttaaagttattcgtatttagaatgaagttatagtttttttttttttttttttgttttataaaatttgattttgtttgggtgtttataaagaagaaatttgtaaagatgttagttttaaaatttgtgtttttttaatatggtaggaaaatatttatattttatgatgtatttttatattttttttagggtaaatgtttttaatttaattttttagttgatgttttaatatgtttgttttattttttgtaatgaaattaagaagaaaatttttttatttttaaatatgtattttaattttttatttttataaatttggaatatttatttaatatttgaggtattaatttaaaatttgaagtatatatttagttttttatttttttttattttggtttttgaaatggaaatataaaagtttatttattataattttatatatagttttttaggggaaaaaaaattgtattgggtaataagtatatgtagattgttttagagtttttaaattattgaaatatattatttatatatgtaaaatgtattatattttaaagataggtattataattagtaaatagattattgttaaataattttttttaaaaaaaagttttatttatgtatataggttttgagtagattttagatagtttttgaataaaaattaaaattgattattagttgttattttatatatgttaatatataaagaaaaaagagttatttgaggatggaagattagttaaaaagtaagttgtaatatttataatagttttgtaggtggaggtggtagggatttattaagattttgattagagttgggaggaatagagaatttttgatattggattttaaggttggaatttttttggttttttataaaatttattggtggtaggggtaagttaagtgagttaagcggtggaaatgattgtattattttagatttatgatttttatagttttgattgagatagtttagagatggagggagattagtagaattatttggaagaggagatataattgttattgtgggtttgattagattggttatttttttgtttttttaaatttagaaggggaggtggtggaggtagatttgtattatttgaagaagaaatagtagttttaattgttgaattattagtattattttttgatgtattatttatttgattttttattttttttgttttggggttgttggagtttttaatgtttttatttgatttaaataatttaatttttaagttatttgttaaaagtgtgtttttgtttggtttttagggtgtaagtgaaatgattgatgtacgttttgtggatattttattttttttgatgttatttatataaatgttaggggtttttttattagtaaatggagatttatttgtttaattttgattatttaaaattggtttttttaagtatttttaaagtataatgatgattatagttattaatatagaagttagaagtatattaattagtatggtagttattgaattataattgtttttttgtggggtttgtttgttattggtagtatttaagataaattttggtgtatttttaggtgaatttttgatagttgatgttggttgtgtggatggattatgaatagttatttgttttttagaagggatttggatagatgatgattgttgagtaaaagtatagataaatgattttggtggttgtgtggtagaagtacgggtagatggtagttgtttggtagaggtgaatacggtttgttgggaggaggtgttggttattggtgttggttgtttggtgttgtaggtaagtggttgtttagtagaagtatgtgtttttggttttttagaagaggtatagatagttggtgttggttgtttagtagtgattttggtaggtgatattgattgtttagaaaaagtgtcgttgaattgtgttggttgatttaaaggattttttgttgtgttttgagaattagttaatatttgtgatattgatgatgtgaataaggtaggttgtgattgtttttttgttgtaattgtttttgtttttgaaaaaaatgtattgtttaggtgtttataaaataaaattaagatgaaatatttgggatttattttagaatattttttcgttatttatagcgggtttataatgaaagagaaagatagttaggcgttattggtgtttagttaaaaatttgattttttattatgatttttggtataaagtaggtagatattatttttaattagtagtagttgattagtagttattatttttaatttagatttgatatattgtaggtttggtgtaataatttttggatatattttaatttattatatagtatttggattttataagtagtgatttttttttttttattaatataagttttgtatttggttttgttgtttttttagttttattatattttagtattttatttagttatattttttaaaacgtataggttttatatgttggatttatgtgttttttatttttttttattattttttattagaaatatattgatttttttgttttgaagaatattagtgattatttgttatttaatttaattgttttttattttttttttttttttttttttttgattatattagatattattgtttttttattaatatttaagtagttttttgtaattagttttttttttatgttatttttattagtttttttttttttgttttttaaatatggttaattgatattttgtttttatttttatttatttttttttgtttttgattttgtaagattttagtttttagttttatgttataatttttaaatttgtatttttagtttatattttttttgttttaattttatttgtgtgattttttggtggatttttttatattttatatatatagatagatagatatagatatagatataaatattttttattattagtaaatttaatatatttaaaatggagtttatttttatttttataattgataattgattttttttttaatttttttgtatttgttaatggtattattaagttttttaggtatagagtttattagtaatttttgaagtatttttagtgtttttgtagcgtggtagttttatgttaatattgtatatttttaaagaattttatttaatttagagttttaggtttaaaattttagagtgatttttgaatttggtggagtaaatttaatttagttggttaagtagttttgttgttgtttttatttatttattggtaaatgttatatttgtgtggagttttgttttaggtttaggagattaaaaaaaaaaaaaaaagatagttattgtttttaagtgttttagattttagtgatagaagtaaatagtaaaggttaggcgtagtggtttatttttgtaattttagtattttgggaagttaagatgggaggatcgtttgaggttaggagtttaagaatagtatggattatatagtaagattttatttttaaataaaaagaagaaagaaaaaaagttaaaaaataattataataatttttttttttttaagatagttttattttgttatttaggttggagtgtagtggtataatttgggtttattgtaaatttcgttttttaggtttaattgattttttttttttagtttttaagtagttgggattataggtatatattattacgtttggtttatttttgtatttttagtatagacggggttttatcgtgttggttaggttgttcgagaattgattttaggtgatttgtttgttttggttttttaaagtgttgggattataggtgtgagttattacgtttggtttaattataataatttgataagtttttttataaaagtatgtaggagatgtatagagaagttaatttagtttggaaaggttttagtgaagtaaagtttgaattgaattttaaaagtttataaaaattaattaagtttttagttagggagagtaataatgtgggtataggaaaataaggtatatatgaaagtttggtagatagggttttttttgggatgtggtagatgttaaaatttggagagttaagttttagttttattttttttatttaattatttgtttaattatgagaattagttgtttaattttttttgtttttaattgttttttttttaaagtgaagagttttattgagataatttgtaatttttggtataatatatttgttttgtatattattaaatataatggtaattatttggttattttttaatattagggaatagaaaattttagggtgttagatattggtatatatgattagaaattatagtttttttgatttataagtttatatttagagagatttgatgttttgttggaaggtgtaataaaggttttataaattatttttttagtatatttaaatagtatattattgtttatttttttattatttggtatatagtgatgataaatggttttgttttagtagaagaaaagatatgtgatttttttttttatacgaataatttaagtttgaattttaaaatagtttttttttgaatttttttgtatattgttgaattaattttaaaagtgtgtatgattaggttattattgttttgtttgagggtttaatttttgttaagataaaattttttttttttttttttttttggagatagagtcgttttgttatttaggttggagtgtagtggtatgattttgtttcgttgtaatttttatattttgggtttaagcgatttttgtgttttattttttcgagtagttgggattatagtaggtatatattattatatttggttaatttttgtatttttagtagagatagggttttattatgttgtttagatcggtttcgaatttttgattttaagtgatttgttcgttttagttttttaaaatgttgggattataggtatgagttattacgtttggtttgttaagataaaatttttaaattgagtttttttttttttggtttgagttaattagtttagatttacgtattatgattgaaattttttatttagttaaatgtattttttttttattttgtatattttttaaatatacgatttttttttgttaaatagatatttttatgttgttttttattttttttaagggtgttttttttttttattttttttttagatttagtttttttttttttttggttgtatatttgaatttgtttttattttttagattttagtttaaatttttttttttaatttaagttttttgtgattgattatagtttaaatagattagttatttattgaattttttttagtttttatttattgtttttatggttttttatataatttatgtatgtattttatttatatttttatttttttaagtaattgtgtttattttttatatttttttatatttatttttttgaataagattataaagaattttgaagaaggtagaaaggagaaagaaaaatatttatttagagtatattatgtgttgtattattttagttttgtatattttattttatagaatttttaaatgattttataaggaaggtaaagggattttttatttatagataaagagatagtgttaaatgagttaagtagtttgtttgatgttatattattcgaagtgatagattgggagtttgtatttagggttatttgattttaaagtatatattttttttgttattttttattgttttatgtttttatattttgatttttttgtagttaatgttttatatattaggagtatagtaaatatttaatttgtattgggttttttgatttttttttattttagtttttgttttttattagtatttttattagaaaataagtagaggtagtgaaatttgagttaataaattttgttttttatttattttgtaaaagatttaaaagggaaaatttgaatatttttggtatagatatagggatttgaataatttttggatggttattatttatgtagtttttatttattatttttatagattataaaaaaaggcggggggatttttttagaaaatgttattttttttagaattttattttaaaaatttgttttaatgttatgtaaagtattagaaaatataagttatgaattgtttttagttaaaaatgtttttttttttgtgattttgtttaaaataaggaaattatacggtttttttttttagttagttgaaaaaggtattagagaaggatagggtttaaataggaatataattttaaatttaggttagtttgtaagattaattttgataggtttttattttttattgttagtagtaagttggtggaattttttatgtatgagatttttatttgttagttaacggttatggtaatattaaaattaaattttattttttgtttattttaatattttttattattttttagttagttttttatttttttaggatttgttatattagagtattagaaattgtattagaattttatgatggtaatttagtgtagtttagagaaggagaagaaagatttaaaagaggaataaatagggaatatggtagtggaaaaaattgattttttttttagcggtaatgaggttagcgttattattagtgtggaaggttatttagtatatatattttaaaatatgtaagtggtgtgtatttgaagtattaatattgtttttgtaggtaaagaataatattgggtaggggaataaaaaggagatttagaataatataaaaggtaatgtaaagaaatataaataatataaaagagaaaaaataaaaattttaggaagtagtaaatagaaaagaggaaggttaattgattagagaagatatagaaaagaagaaaagttaataaataggtgaaaaaaaaagtagtggttatataattagtaagaaggtagtgtagatgattgaagtaggtaaaatgaagttgggggtggggggagatgattgaagtagatgaaagaagtaacggtaaaatgttgttttgttgtggttggtttgtgtttgtgagtgtagggagatagtaaagaggagtttgttttttaaaatggaggattagaaggaattatttttttaaatttatttattttttattttaggtttttttgtttgt

SEQ ID NO: 59 - DNA, 6063 bp, Artificial Sequence
  chemically treated genomic DNA (Homo sapiens)
tatatatatatatatattttatagaagttagatgttattttgtttatttatttaatttagaataaaaattaaagttttaaaaaggtttatagggttttttatgtaatttgattttgttttttttgattttatattttagtatttgttttgtttattttattttaattatattattggtttttttgttttttgaatatgtttagtgtatttttgttttaaagtttttgtatttgttgttttttttgtttagaatgtttttttttagatatggtttgtttgtttatcgttatttttttttttttttttttttgagatcgagttttatttttgttgtttagttggagtgtattggtacgattttagtttattgtaattttcgttttttaagtttaagttatttttttattttagttttttaagtagttgggattataggtatgtattattatatttagttaatttttgtattttttgtagagattaggttttgttaatttgtttaggttggttttgaatattatgagtttaagcgatttatttgttttggttttttaaagtgttgggattgtaggcgtgagttattgtgtttagtttttattatttattttgtgaggttttttttgattgttttgtttaaaattataataattattaggtatagtggtttatgtttgtaattttagtattttgggaggttgaggtagttggattatttgagtttaggagttttagattagtttgggtaatatggtgaaattttgtttttattaaataaataaataataataataataaaaatttaaaaaataaaaaaatttaaataaatgaaaaataaaagttagttgggtatggtagtatgtgtttgtagttttagatatttgggggttgagatgggaggattgtttgaatttaggaggttgaggttgtagtgagttttgattttattttattttgggtaatatagttagattttgttttaataaaataaaataaatttgtaataatttttttttatatttttttttttttttatttatattattttatattatatatattatatatgtatttattaatgtgtttaatttattttttcgattaagttaaattaagattatttttttattttattttttttttttaagatgatttaaatttttagaaggtattattttttttttttatgtatattttgtttatagatatatttttaatgtatattttgtggaaaaatatatataatttgaagtttgttgatttaattatatttaggtgtataattcggtggtattaagtatatttatagtattgataattattattattatttagttgtaaaatttttttattgttttattagaaattgtttattaagtattaattttttattttttgtttttttagattttagtaattattattttattttttttttttatgaatttgattattttagatattttatataagtggaagaatataatatttgtttttttacgatggatttattttatttattataatgtttttaaggtttatttatgttatagtatgtagtagaattttatttttttgtatgtttgaataatatatttaattgtattatattttttttttttttttttttgagattgagtttagttttgttatttaggtaggagtgtagtggtgcgattttggtttattgtaattttcgtttttagggtttaagcgatttttttgttttagttttttgagtagttgggattataggtgtttgttattacgtttggttaatttttttgtatttttagtagagatagggttttattgtgttggttaggttggtttcgaatttttgattttagtgtgttattttttttttatttatttattttttgatagatatttggattgttttttttttttggttattgtaaatagtgttgttatgaatattggtgaagaagtatttatttgagtttttgttttaaatttttttagtttggagtggaattattgaattatatggtaattttatttttaatttgaggaattgttaaattgttttttatagtggttgtattagtttatatttttattagtaatgtataagggtttatatttttttatattttattaatatttgtaattttttgttttttttataatagcgttttagtaagtgtgaagtggtgtattatttggttttgatttgtttgtttttaattattaataacgcggtgtatttttttacgtgtttattgtatattttttttggagaaatgtttaagttttttgttattttttattttttttaaatttgagatagggttttattttgttgtttaggttagaatgtaatggtgtatttatagtttttatgtaataggaatttagtagtagtttgttgattggttttgatttttggttttttatgagatttagtttgatgtgagttggtattgaagtaatttgaaggtttgattggggttgaaagatttgtttttgaggtggtttattggtatggttgttaagttggttttgaatgttgatgggaggttttagttttttttttttatagagttgtttatatatggtggttggttttttttaaagtatgtaatttaagaaaataaggtaaaaagtgtaataatttagttttaaaggttataattggttattttttttttttttttttgagatagagtttcgttttgtcgtttaggttggagtttagtggcgtgatttcggtttattgtaagttttattttttaggtgtaagtaattattttgttttattttttttagtagttggaattataggggtatattattatgttcggttgatttttgtgtttttagtagagatggggttttattatattggttaggttggtttggaatttttgattttaggtgatttatttgttttggttttttaaagttttgggattataggtatgagttattatatttagttataattggttatttttgttatattttattggttatatagataagttttattcgatgtaggagggattatatatggatatataaatgaatattaggtaaagaggattattgggggttaaaagtaaggattatttagggttaaattagaatggttattatttgtatatatttttagtgtttagaataatgtttggtataatatgttaaaaaaaagtttgataagtatatgagtttttttttttttttttttttttttttttttttttttttttttttgaaggttatgggggtggttatagtattaaagaaagattagaatagtaaaggtttaggaaaggtaggattattggaatcggggattttaatatttttaggatattttttattttatttagtttttttgagtatagttaggatttttttagagttttatttttagagttttataatgagagggtatagggtttttatttttttagttttggtttgaaaaattttagggtaggatttttttaggtataattttttgaattaattagtatgattagggagttaaggtaatgtgattggttttgtttgagttaggtatttatatttgttaatggaaaaagatggaagggggtattgataataaaaatagtataatttagttatgttaggtatttttttttttttatgtttttattattatattttggtataatagaatatataatgttattgtttatttatttgtttatatgtttgttttttatattagattatatatttttatattagaatgtgaatataggtattatatttttgtagttttaaatgatataggttttgtagttaagagagatttatggttgtatttttgttttttttttttattaataatgtgattttggattaggtatagtttttttgttttttaaatgggttaaataatagttgtgttatgtggaagtatataatattatttttgatatgttgtaggagttgaaaatgttagttattgtttttttttttaggaaagtagttgatatagttgaataattttaatatatttgtgaataaatgaaggagtaaataaatttagtatttttggcgattggtttggggatttatttgtaaatggggataataataggattatgataaagattaagtgagatgatagatgaaaagcgtttttatagtgtttagttatggtaagtgttttaaaagtataagttattagtaatttgggggtgtttatttatagttttagttatttaggaggttgaggtaggagggttattggagtttaggagtttaaggttagtttgagaaatatagcgagattttgtttttaaaaaatgaaataaaatgggagttattatgagagaggtaattttttaaaattaatatattagattttttagaaaagaattggagaagtggttttttttttatttaggtattttttataagttatattatttgtttttgtattgtatagtaaatttttaatagtttttgagtaataaattgtaatatttattaatagaatataatatagtttgtagaattttaaaattttaggtaaagaatgagaaaaaaaaaaaaaaagataaagaggaaagttttattaaattaataattttgtttagtgttagaaaatatttaattatagaagtttttagttaatgttttagcgtcggtatttaaatataataataattgtaacgttattttgagataagttatagaaggaaggaaggagggatagaagaaggaagatggaagagggaaggaaggaaggaagggagggaggaaggggagaaaagaaggaaagaaggaatgaaaaattaaaattaattagtatatttaagataaaaaggttttggttttagtatttttaattttttatatttttagttttttattatttaataagtgtataaggtggaattgaaagggtgttaaatgggtggattttagtggtaatgtttttgttaatattgtttatgagttagttataaatttaatttaaatttttagtttttttgttttttttgtttattatggttattaataaaatgattgttgtttttagaaattttagtgggaaataggtaaatgtgtaaaacgatgtttgattttatattaaaatttataaaaatgtaattgttgtaatagaaagtaatttgttattgagttaggatttgtatatttcgtttaatttttaaaatataggaatagtttgttaatatttttttagttttattttaagattgttattttattgtattgtagttattcgagtgatgaataaaatttatgaagtgttaggtttaattttatatttgtaagaaaggtattttagtaattggttttttgtaatttaatatttgtcgtaatttttttttagttgtaattggttgttgtttacgtttttttgaatatatatatttatagaggagatttagtatgtttgtatgggttttatattttttatatggagaagaagaaaatgattggttattatagtatttgtttataaattttatttggtgatagtgttgatggttgtatggttttttaatgattttagaagtgttgtttttcgtcgtgtttgggaatatagtttataataaaagttatataaatttttttgtaaagtattatgtttttaaaatagtttttttattttattttttttttttttttggtggaggtgggagaaattgttaattaatattagttaatgtttgtatttggttttaattagataattttatacgaaattaaaatatattttacgtcgtatttatgattgggatttttatttttatttgtttgatgaagagattgaagtttatagaggttaaaagttagattattagtaggtgttaaaattaggatttttttaatttagttttttttatttgtttttttgtttttgtatattggtgttttgtggttttggaaaatagtaattataatagttattatttttgaatatttgttatatatatggtatatattattttatttaattgttattttagtgtttaagtagatattattatttttagtttatgaatgagaagattggagtttgaagagtttaaa

SEQ ID NO: 60 - DNA, 6063 bp, Artificial Sequence
  chemically treated genomic DNA (Homo sapiens)
tttgagttttttaagttttaatttttttatttataaattggagataataatatttatttaagtattgaagtgatagttaagtggaataatatatgttatgtgtataataaatatttaaaaataatagttattgtaattgttattttttaaagttataaaatattaatgtgtaaaaataaaaagataaataaaaaagattgaattagaagaattttgattttgatatttgttaatagtttggtttttaatttttgtaagttttagtttttttattaagtaaataaaaataagagttttaattatagatgcgacgtgagatgtgttttgatttcgtgtgaaattgtttaattaaagttaggtataaatattagttaatgttaattagtagttttttttatttttattaaaaaaaaaaaaaggatgaggtgaggaaattattttaggaatatgatattttatagaaaaatttatgtagtttttattatgaattgtgtttttaaatacgacgggaggtaatatttttgaaattattgagaggttatgtaattattaatattgttattaaatagagtttgtgaataaatgttatggtaattagttattttttttttttttatatgagaaatgtgaagtttatatagatatgttaggttttttttgtgaatgtgtatatttaaagaaacgtaaatagtagttaattatagttaggagagaattgcggtaagtgttgaattataaaaagttaattattaaaatattttttttgtaggtatggaattaaatttaatattttataaattttgtttattattcgaatggttgtagtataatgagataatagttttaaaataaaattgaagaaatgttaataagttgtttttgtgttttgaagattaagcgaaatatataaattttaatttaataataaattattttttgttatagtaattatatttttataagttttaatataaaattaaatatcgttttatatatttatttgttttttattagggtttttaaaggtagtagttattttgttggtaattatgataagtagagaagatagagagattggggatttgaattgaatttatagttgatttataggtagtgttaataaagatattgttattgggatttatttatttaatatttttttagttttattttatatatttgttaggtagtagggagttgggaatgtggaggattaggaatgttgaaattaaagtttttttgttttaggtatgttaattgattttggttttttattttttttttttttttttttttttttttttttttttttttttttttttttttttttttttatttttttttttttgtttttttttttttttttttatgatttattttagaatgacgttataattgttattgtgtttgagtgtcgacgttgaggtattggttagaaatttttataattaggtgttttttgatattagataaaattattaatttggtagaatttttttttttgttttttttttttttttttttattttttatttgaggttttggaattttgtaggttatgttgtgttttattaatggatattgtagtttgttatttagaggttattgagagtttattatgtagtatagaagtaagtgatatagtttgtgagaggtatttaaatagagagaaagttatttttttaatttttttttaggagatttgatatattggttttaaaggattattttttttatgatggtttttattttgttttattttttaaagatagggtttcgttatgttttttaggttggttttgaatttttaggttttagtgatttttttgttttagttttttgaatggttgggattgtaggtgaatatttttaagttgttgatggtttatgtttttaaagtatttattatagttgggtattgtggaagcgttttttatttattattttatttaatttttattataattttattgttatttttatttataagtgaatttttaagttagtcgttaagaatgttgaatttatttatttttttatttatttataaatatattaaaattatttaattatgttagttatttttttaagaggaaggatagtaattaatatttttagtttttatagtatgttagaaataatgttatgtgtttttatatgatataattattatttggtttatttaaaagatagggaagttatgtttggtttaaagttatattgttagtagaaggaaaaagtaaaaatgtaattatgagttttttttgattataaaatttatattatttggagttataaaaatgtggtatttgtgtttatattttagtgtaagaatgtgtagtttagtatagaagataaatatatgaataagtaaatgaataataatattatatgttttgttgtattaagatataatggtgggaatatagagaaaggggagtatttagtatggttgagttgtattatttttattgttaatatttttttttatttttttttattaataggtatagatgtttgatttaaataaagttagttatattattttaattttttgattatattgattgatttaaggggttatgtttgggagaattttgttttggggttttttaaattagagttggaaaagtaaaagttttgtgtttttttattataaagttttaaggatgaaattttaaggagattttggttatatttagagaagttaaatgagatggagaatattttgaggatattaaaattttcggttttagtaattttgttttttttaagtttttgttgttttaatttttttttaatgttgtgattatttttataatttttaaaggaaggagagaaggaggaagggaaaaaggaaagaaggaaggatttatgtatttattaaatttttttttaatatattgtattaggtattgttttaggtattggaaatatgtataggtggtagttattttgatttgattttgagtgatttttgtttttgatttttagtgattttttttgtttggtatttatttatgtatttatgtgtaattttttttatatcgaataaggtttgtttgtgtgattaataaaatatggtaaaagtgattaattatggttgggtgtagtggtttatgtttgtaattttaggattttgggaggttaaggtaggtggattatttgaggttaggagttttagattagtttgattaatatggtgaaattttatttttattaaaaatataaaaattagtcgggtatagtggtgtgtttttgtagttttagttattagggaggatgagataggataattgtttgtatttgggaggtggagtttgtagtgaatcgaggttacgttattgaattttagtttgggcgatagagcgagattttgttttaagaaaaaaaaaaaaaagtgattaattataatttttgagattaggttattgtattttttgttttgtttttttaaattgtatgttttaggggaagttagttattatgtgtgaatagttttgtgaaggaaaagaattaaggttttttattaatatttaggattaatttgatagttatgttaatgagttattttaaaagtaaattttttagttttagttaagtttttagattattttagtattagtttatattagattgaattttatgaaaaattaaaagttagaattagttagtaagttgttgttaaatttttattatatagaaattgtgaatgtattattgtattttagtttaggtaatagagtgagattttgttttaaatttaaaaagggtagggggtagtaaagaatttgaatatttttttaaagaagatatgtaatgagtacgtgaaaagatgtatcgcgttattagtgattagggataagtaaattaaaattaaatgatatattattttatatttattagaacgttgttatgaaaaaagtagaaaattataaatgttggtgagatgtggagaaatgtaaatttttgtgtattgttggtgggaatgtaaattgatatagttattgtggaaaatagtttggtagttttttaagttaaaaatagaattattatatgatttagtaattttattttaagttgaaagaatttaaaataggagtttaaatagatatttttttattaatatttatagtagtattatttataatagttaaaagggggaaataatttaaatgtttattaaaaaataaatggataaagaaaaagtgatatattgaggttaggagttcgagattagtttggttaatatagtgaaattttgtttttattaaaaatataaaaaaattagttaggcgtggtggtaggtatttgtaattttagttatttaagaggttgaggtaggagaatcgtttaaattttggaggcggagattgtagtaagttaagatcgtattattgtatttttgtttgggtgataaagttagatttagttttaaaagaaaaaaaaaagaaaatgtgatataattaaatatattatttaggtatatagaggaatgaagttttgttatatgttataatatgaatgagttttgaaaatattatggtaagtgaaataaatttatcgtgaaaggataaatattatatttttttatttatatgaggtatttagagtagttaaatttataaagagagaaagtaaaatggtgattattaaggtttgggggaatagggaatgaggagttagtgtttaatggatagtttttggtggggtaataaaagagttttgtaattaagtagtgatggtggttattaatattgtaaatatatttaatgttatcgaattatatatttaaatatggttaaattagtaaattttaggttatgtatatttttttataaaatatatattaaaaatatatttatgaataaaatatatatgaaaaaagaaaatgatattttttgggaatttagattattttggaaaagaaaaataaaatagaaaaataattttgatttgatttagtcgaaaaaataagttgaatatattaataaatatatatataatatatatgatatgagatggtatgagtgaaggagaaagggagtatgaagaaaggttattataaatttattttattttattgagataggatttgattgtgttgtttaaggtggaatgagattagagtttattgtagttttaattttttggatttaagtaatttttttattttagtttttaagtatttgagattataggtatatgttattatgtttagttaatttttattttttatttgtttgggtttttttattttttgggtttttgttgttgttgttgtttgtttgtttggtagagatagggttttattatgttgtttaggttggtttagaatttttgagtttaagtgatttaattgttttagttttttaaagtgttgagattataagtatgagttattgtatttggtggttattataattttaaataggatagttagggaagattttataaagtaggtggtgggggttgggtatagtggtttacgtttgtaattttagtattttgggaggttaaggtaggtggatcgtttgagtttatgatgtttaagattagtttgggtaagttggtaaaatttagtttttataaaaaatataaaaattagttgggtgtggtggtgtatgtttgtaattttaattatttgggaggttgagatgggaggatggtttgagtttgggaggcggaggttatagtgagttgagatcgtgttaatgtattttagttgggtaataagagtgaaattcggttttaaaaaagaaaaaaaaaaaaggtgacggtgggtaagtaagttatatttaggaaagagtattttaaatagagagaatagtaagtataaaggttttgaggtagaaatgtattgggtatatttaaggaataaggagattagtggtgtggttagaatggagtaagtaagataaatattaggatatgaaattagagaaaatagaattagattatatagaaggttttataggtttttttaggattttggtttttattttaaattggatggataagtaaagtgatatttgatttttatggggtgtgtgtgtgtgtgtg

SEQ ID NO: 61 - DNA, 8923 bp, Artificial Sequence
  chemically treated genomic DNA (Homo sapiens)
tggttttttaaagtgttgggattataggtatgagttatcgcgtttggtttaatttttttatttttagtatagatggggttttattatgttggttaggttggttttgaattttagattttaagtgatttgttcgtttggttttttaaagtgttggggttataggcgtgagttattgcgttcggttaggtttttaatttttttaatttttaatttttgtttagggtggtttggttattttgggttttttgtggttttatataaattttagggttattgtttttatttttgcgaagaatggtattgatattatagggagtttacgtagttttttatattgtaattggtatttttattaggttataagattttaggttttagtttagagtatgttttagaggaagatttagagaagtttttggaatgtgtgtgtacggttttttggtattgtttgggtttttatttttttgtgttattttttttttaggtatttatttatagaatttatatatttttacgggttttgggtttaggtaaaggatataggttaggtcggtaaggaggtcgtaaaggagttgtaggaagggtggtttagagttgagtagtggggttagggtaagtagtagttacggcgatagttacggtggtagtgttttacggggtcgtttagggcggtgtttttttttagttagtatggttaggtggataggtatgtatttatagttgtcggttgtattggatagtttaaggtttgttagtagtattgttagtagtttagaagttagggcgagtagggttgaggtatgtaggaattttagcgtgtttaggtggtatttttgttgttagtttatagtgggtaggagtagtaggtttaggagtaggtttggtagggtcgtgtggtttagggtatgggttagtagtcggtgtattgggagagagaaggggtttatgtgttaggttagtggttttaatatttaaggttgttttaggtgtgttaggttgaaggttacgttatattagggttatttgttgagtttattttttttttttaggagttagtttttttatagttagtatttaattattggtggaagggattaaggatttttaaatattgtggttacgtttttgtggtattaaatagaatatattggacgtgttatttagtttttttattgataattcgttatagagtatttattatgttttagatattatgaaggtattttgtttttgtatttattaaattatatttggttgagagtatgaaatggtttgttttaattttggagttattttatttttttaagttgtgtgattttggttaaattatttaatttttttgagtattattgggggtttttaaatataaattggaggagttattattgggaaataggtgtttagttgaggttattttttaaaattttaatattttttttttttattttgatgtttagttgaaagttttagttgtttttttgttttgttttgttttgttttttgagatggagttttattttgttatttaggttggagtgtagtggcgcgattttggtttattgtaagtttcgttttttaggttcgcgttatttttttgttttagtttttcgagtagttgggattataggtattcgttattacgtttagttaatttttttgtatttttagtagagacggggttttatcgtgttagttaggatggttttaattttttgatttcgtgattcgttcgtttcggttttttaaagtgttgggattataggagtgagttattgcgttcggttaatttttgtatttttagtagagatagggtttaattatgttggttaggttggtttcgaatttttgattttaagtgatttatttgttttagttttttaaagtgttgggattataggcgttagttatttggttttagtttttattttaaggaaaagttgttagaaagggaaattatgagaaaagtatttttatttataggttttagtttattttagggagttttttgtttttttttttggttgtggatgtgttgggtatgtttttgtttaaggttatgttttttcgggatattgggttttatttttgtttgatttttggaggttttgtgttgtttttgttaagtgggtttaggttttatagtaagttttttgttttttttaaggtttacgtggttggtttttattttgttaggggtttagtaatagtttcggggttaggattaggtcggggtcggtttttattagttatagggtgtttattagtagtattaggattgaggaggttagaggtagtgttggggatagttggttatgggggtttttggtatgtatcgtttggttgaggacggttaagggtggttttggggttgtgtgttggggataaaagaaaataataataagttattattggagtttttattttattaatatttttttaagtattttattaatagttttattttatagaggtggaaataggttggagacgtaggtttagtagtttggttttagtggagtttagattttaatttatgcgtttataagttattttattattttatttatttttgtttaaggattggtaggggataggtatagagatttttgagttttgataggttttgaatttttaaaaagaggggtttaggtttttattttttagggcgaatttagggttatttttagtttttttttgttttttttttttttttagattattattttttttttttttttttttttttgtttttagttttaatgttttagatggttttagttgtttttgattttggggtggggttagataatgggtaagtcgatagggtaaggggtagggtagatgggtagaagttttatattttgagttatatttagagatttgcgattgagatattttttttgagggtgaatttatttattgtaagtttttttttgtttttttattggtatagtttttttggttttggtttttttttttataggaagggtatagtatgcgttttatttttttttgttttgtgttttgaggtaagtttttaattttatttttttatagatgagttttattttatagatgagtttttttttttttatttgtaaaatggaaatttataaatttttttttttagagtatgatgaaataaaaaggaataggttaaggtaggttttggtttataattttttttttataaattatagtaattcgtattaattatggtaggcgtttgtagttattaattggtttatcgagaaggttttaatatggaggtggttgttttagtttagttggttttagttttggtttttaaatatggtttttttttgtttattaaagtaaggttttttttttcgtgttgtttttttgtatttagtttgttttttagggtttgtaggtttttatttttggttaggtttttcggttttaggatttttattgagttgatttagggtaggaagtaggattttagagagataagaaggttgtttaatttgtttttttgttaagcgttttttttatatttattagttttttgtaggaaaaatgtggaaagtttttttgtttgtattgtttttttttttattttgttagtaggtaaatttttattttatttttggaagtttagtttaaatattttttttttttttttggttttttaatattatggattttatttttaggagtatagtttggttagtttgtttttttaggtaggtggtttgagtttatggtttttttgatttaattttatattttttagggtatttatagtatatagttagtgttttatatatgtttattgaaaaaaggatattagtttggtttttggttttgtcgagggatttgaaggtgaattttgtttttcgcggattcgggtatttatttagggggttggggttagaggtttaggaaggtgggtagggttagttttgtttggaggtagggtttggggttaaggtatttatcgtaaatttttttttgtatcgatattttataattattttttagttttgggtattttagtaagggtgaagggtttattcgtggatattcggaattgggatttgagttttttggattttattttttttaatttatgaaacggggtagtgtattattaggttttgtttattttattgggaagtcgggagggtagaatggaaagataaggacggagattttttcggtggcggatagagtagggggttttaggatttgtttggttcgaatttagttggtgattttgtagagatatttaatttttttgggttttagtttttttttttgtagaaataaggatatcggatgagggatgattaaagggtttgttttatttcgatcgttatcggggatagggtttcggggttaggtacggcgttcgaggttttttatttagtcgatcggttttggggattttttttcgttggttcgggttacgcgtttcgggtatttattgtagagcgcgttcggtaatttcgaaaggtcggtcggggatttcggttgggagttaggattttagttttcgggcgcgattcgagaattttgaatttatttcgcgtatattcggtcgcgtgatttttgtcgatcggttggcgcgttatttatttttcgcggttcgcggattagttagtagttgttttagttcgggtttttttttttagttttttcgtcgattttcgtttttttgtagggtcgattttttagcgatcgtttttagagttagcggacggaattattttaaatagtttagtttcgtgttgagagttttttcggttttacgttgagattcgtttattttcgttttggttttttagatgttattttggttcgagtgttacgtcgggcgttttttagagaggattgggataagagttgcggacgcgaagaacgagtaagcggtggtttattttttttgattttattttcgtggtttggttcgatggtcgcgttcggggttgcgagatttgcgtttgcgtagtgcggcgtttagagggaaagcgagagggagacggacgttgagagaacgaggaggaaggagagaaaatggcgtttacgggtgagtatggtggaattgcggtcgcgtcggcggtagtcggaacgtttaaattgggggtcgttcgtttttgggtttggttgggaagattgagtggagttgtcgagagggggttgaggtattcgtcgcggttcgacgagttcggggattcgtatttttttttttttttttaatcgggcgggtcggttttggaatttttcggcgttcgtggcgcgcggggggtttgttgcggcgggggcgcgcggggttcgttttggtttttattgtgtggcggttttcgcgttttgagtttcgggtttttcgttacgtgggcggggtttgcggttttcgaggttttgcgtgaaggggaggatttggttaggttttaagtcggttattatgaaatcgtcggggggttcgtaggttgttgtttttgtgaggttttttttttcgtttttagggttttttgagaaattaggggaaaaagtaaataaagatatcgtggatttgtgggtcgaggggtgtcggtttatgagcgggagtttcgttatttttaagatttagtcggttggggcgtttggcgttgtcgagttgttttttttgtggtttttagttttaagtcgaatttttgttcgtttgggttttagatagaatgtgttttttttttttagggtttttagtttgtcgtttttttgggtttttttatttttatcgttattaatttacgttttttttttttttaaaattaattaagtggttttttagggttttttttttgtaaacgtcgagggatattcgttgtataataaggttagtttgggtcgagagacgagaaacgttattagaaagatatttttggtttttttgatttaggaggaataaaaggtcgagtttttatttgaattatgttttagtagtggtttcgtacgtttattcgtttgcgttaggtcggtaggtttgttgatttcgtaggtcgatagaggagaggggaaaaaaggttagtagaagtaattttaaaggtatttgtaagtaagtttcggttgggaattttaaaatgggagtagagtggtttttgatggaaggagcgtttaagagtgtcgtttagttattatttgtagttcgtaatttgtgggtatattaattcgcgaaaattggtagggtggagtatttttgtttcgggggtatttttaggttatttggttttaggttttagagatagtgggagaagatgagaaggaagataggaaaagttttgggtattttagagtttttggagtttagaatttagtaatttaaggatagtttaagaattttttttatttgtggttaataaataggtaagtgttggttgttcgtgtcgggatattaaagagtggatattaaagagtgtcggtagaagagaggattgaaatattatagttaatttttcggtgggaagtggttttttaggtgttttatttatttttttttgttttgtaaaagtttgaaaaggtaaaacgtgtgcgttgatatttttgcgtggttggacgtgtttttttttagttaattttgtttaaattttgtttattagtaattattatgtgttgtattgtattagaattatagttgtggtttttgttgatataaagtaaatatattaggtttggttgggggggtttttagagagttatataagtaatttggtttttagtttttttttttgtaaaatatagaagttaggttagattttttaagtttttgagtttttttgattttttagtataagtattttataaatttgttttatgttgattttagtttaggtattgtgaagtttaatttaggtagtgtgaagtagtttttatagtgattgttttaaagtgttaaatcgttgttttgggttaataatagaagtttttttttttcgtatgttattttatgtagaaaagtacgtaaagtatatatatttagtgtaataaagaattggaatgtagattcgtagtaatttagaatttttagcgtttaattatagtgaagtgatttttagtgaagttagtggtttatttttgggggttaaaaacgaatacggttgttgaataatttgattagtttgtaattgtattaggttggtgtaaaagtaattacgtttgtattaatttaatagtttgtttgagggtttgtgatgtttgtgtgttttaggaagataaatgtaagtttatgaaataaatttgttattttttatagtttattagttagtatagggtcgaattttgtggttttttattgataagaggttattggttgttttatattagttttgttagtttgatgttttatataattgtttttgcgtaaaagtcgttttgtaaacgttgaatttatatgatagtgatttataattattttttaagtaaagattttaataaaacgtgggttaaaatatttgatgttaaatgatttattgttgtgtttattttgtagatgttatatggaaaaaatgatttgtatttagttttaatgttagagagagtatgatttgtagtgttattgaaaatgtttttaagattgttatgaatagattattttttttattataggttagtttttgggtagttgatttgttttttttggtgatttagggttttgagttaagagtgtgtataaaggaaagaaagtagtttagtaaagtatagagaggtaggtagataagttaacgtgaagagatggatttagtaaagtttttttaggtcgtcgagggattgtgaggttggttttggattttatgaagtggatgttatgaagagttgttaattgttggttttggatgagggattattttttgattggaaaataaaggatttttttttttcgttttaatggtagtattgtttttagatagaataagatatgtgtttttgtggagaagaaagaattgggtagaatttttaaaaataattattttaattgtttttaaaaaaaaattaaatttatttaattttaatgtagtagcgttttgaaaattatttttcgtttgtttttattatttgtagatattttagtggattagtttttggtttttttggatgtatgttataaattttataggaaaaggaaaattatagggaggtttatttagataagggatgaaaatttatgttttttttttaagttgaaattattttgagttgtatgaaagataatggtgttattaaattttttttagaaagattaaatgtttttttttttttgttagtttttagggttttgttttagttttgttttattagggtttataatatatttagtttttaagttgttgtataaatatagttttgatatagtaaattttttaaaatattggagtgtggtgattgtttttttgtttgttatttcgttttattgtcgttgagttagggaatgatggtttgtttaatttgttaaagtgaggggagtgaaaattaatttttgaggagaggtaggttttaacgtaattaatttagtgttaaattttgtattattgttgtatgttttcgttttatatgagggtagaaatttttgattttgttagtagattttgttgttagtttgtgatattgatgattattttgtattttaaatgatagttgggattgggatgggttttgtggttatgggaatataaaaagtatatttgttaaattagttgattttgattttattagttagttttatagttaaatgttgagtttaattggtttagatttttttttttgttagatgttgagaggtaagggggatttatttggatttgtgttggtaggtttttttatagtttaaagaattttttttgttacgtgaattttttttttttttttttttttttttttgtttttgttaattttatattattttttttttttgtttttttttaga

SEQ ID NO: 62 - DNA, 8923 bp, Artificial Sequence
  chemically treated genomic DNA (Homo sapiens)
tttagaggaaaataaggaggaaaaatagtgtaaagttagtagaaataaggagaagagaaaaaagggggaaagaatttacgtggtaggaagaattttttaaattgtagggagatttgttaatataggtttaaatgagttttttttattttttaatatttaatagaaaaaaaagtttaaattagttaaatttaatatttgattgtgggattagttaatgaggttaagattagttgatttggtaggtatattttttatgtttttatgattataaaatttattttaattttaattgttatttaaaatataggatgattattaatattatagattgataataagatttattaataggattagaagtttttatttttatataaaacggaggtatgtaataataatataaagtttaatattagattggttacgttagaatttatttttttttaaaaattagtttttattttttttattttagtaagttagataaattattattttttagtttaacgatagtgaaacggaatggtagataagaaggtagttattatattttagtgttttaaagggtttgttgtgttagaattatatttgtgtagtaatttaaaagttagatatattataaattttggtgaagtagagttaaggtagaattttgaagattggtaaagaagaaaaagtatttagtttttttgggaaaaatttggtaatattattgttttttatataatttaaaatgattttaatttaaaaaaaagatatgaatttttattttttatttaagtaaatttttttataatttttttttttttatgaaatttataatatgtatttaaagggattaaaaattggtttattgaggtgtttataagtagtaaaaataaacggaaaatagtttttagagcgttattgtattaaagttagataaatttagtttttttttaaaggtagttaaagtaattatttttgaaaattttgtttaatttttttttttttataagaatatatattttgttttgtttgaagatagtattgttattaggacggaaaaaaggggttttttattttttaattagaaagtagttttttatttaaaattaataattgatagttttttatggtatttattttatggaatttaaagttagttttataatttttcggcggtttgagagagttttgttgaatttatttttttacgttggtttatttgtttatttttttgtattttattggattatttttttttttttgtatatatttttaatttaaaattttgaattattaagaggaataaattaattgtttaaaggttaatttataatgaaaaaaataatttgtttatgataattttaaaggtatttttaatagtattataagttatattttttttgatattaaaattaaatgtagattattttttttatgtggtatttataaaataaatatagtaatgaattatttaatattaaatattttaatttacgttttgttgaggtttttgtttgagaagtgattgtaaattattgttatgtaagtttaacgtttgtaagacgatttttacgtaagagtagttatgtaaaatattaaattggtaaagttgatatggaataattaatgattttttattagtgagaaattataggattcggttttatattaattggtgggttatagaaggtagtaaatttgttttatgaatttatatttatttttttagagtatataaatattataggtttttaagtaagttattaggttgatgtaaacgtaattatttttgtattaatttaatataattataaattggttagattatttagtaatcgtgttcgtttttaatttttaaaagtgagttattgattttattaaaaattattttattgtgattgagcgttgggggttttagattgttgcgagtttgtattttaattttttgttgtattggatatatatgttttacgtatttttttatatgagataatatacgaggagagaaaatttttattattaatttaaggtaacggtttaatattttagagtagttattatggaagttgttttatattatttgagttgagttttatagtatttgagttgaagttagtataggataaatttgtggaatgtttatgttggaaggttagaagggtttaaaagtttaagaggtttagtttaatttttgtattttataggaaaggaaattaaggattagattatttatgtgattttttgaaggtttttttagttaggtttaatgtgtttattttgtgttaatagaaattataattgtaattttaatatagtatagtatatggtagttattggtgaataaggtttgaataaagttgattgaaaaaaggtacgtttagttacgtaaaaatgttaacgtatacgttttgtttttttaggtttttgtagagtagaagagggtggatagggtatttaggaaattattttttatcgggaggttagttgtggtattttagtttttttttttatcggtattttttggtatttattttttggtatttcggtacgaatagttaatatttatttgtttattgattatagatggggagaatttttaaattgtttttaagttgttggattttggattttaaaaattttggagtgtttagaattttttttgtttttttttttatttttttttattgtttttaaggtttggaattaggtggtttgagaatattttcggggtaaaaatgttttattttgttaattttcgcgggttagtgtatttatagattgcgaattgtaggtgatggttaggcgatatttttaaacgttttttttattaaggattattttatttttattttggagtttttaatcggggtttgtttgtaagtgtttttaagattgtttttattggttttttttttttttttttttgtcgatttacgaaattaataggtttgtcggtttaacgtaggcgaataaacgtgcgaggttattgttgaaatataatttaaatgaaggttcggttttttgttttttttaggttagagagattagaaatatttttttggtagcgtttttcgtttttcgatttaggttggttttattatataacggatgtttttcggcgtttgtagaaaaagggttttgggaagttatttaattggttttgggggaggggaggacgtggattaataacgataaaaatggagaagtttaagaaagcggtaaattgggggttttggaggagggaagtatattttgtttaaagtttaggcgagtagaagttcggtttggggttggaagttatagagggggtagttcggtagcgttagacgttttagtcgattgggttttaaggatgacggggttttcgtttataggtcggtatttttcggtttataaatttacggtatttttatttgtttttttttttggttttttaggaaattttgaaaacggggagggaggttttatagggatagtagtttgcgggtttttcggcggttttatagtgatcggtttgaggtttggttaaatttttttttttacgtagggtttcgaaggtcgtaggtttcgtttacgtggcgggaggttcggagtttagggcgcgaggatcgttatataatggaggttaaggcgggtttcgcgcgttttcgtcgtagtaagtttttcgcgcgttacgggcgtcggaagattttagaatcggttcgttcggttgggggaggggagaggaatgcggattttcgagttcgtcgggtcgcggcgggtgttttaattttttttcggtaattttatttagtttttttagttaagtttagagacgaacgatttttagtttgggcgtttcggttatcgtcggcgcgatcgtagttttattatatttattcgtggacgttattttttttttttttttttcgtttttttaacgttcgtttttttttcgttttttttttaggcgtcgtattgcgtaggcgtaaatttcgtaatttcgggcgcgattatcgggttaggttacgggggtggggttaggagggatgaattatcgtttattcgtttttcgcgttcgtaatttttgttttagttttttttaaagagcgttcgacgtgatattcgggttaaaatagtatttaaggggttagagcgggggtgagcgggttttagcgtgaaatcggagaggtttttagtacgagattaggttgtttggaatggtttcgttcgttggttttagggacggtcgttgaagagtcggttttgtagggagacggagatcggcgggagggttgggggaagggattcggattagaataattgttgattaattcgcgggtcgcggggaatgggtggcgcgttagtcggtcggtaggggttacgcggtcgggtgtgcgcggaatggatttagggttttcgggtcgcgttcgggagttagagttttgatttttagtcggggttttcgatcggtttttcggggttgtcgggcgcgttttgtagtgagtattcgggacgcgtggttcgggttagcggggaagggtttttaaggtcggtcggttgggtgggaggtttcgaacgtcgtgtttggtttcgagattttattttcggtaacggtcgaggtggagtaggttttttaattattttttattcgatatttttgtttttatagaaggggaaattgaggtttaaggaaattgagtatttttgtaaagttattagttgagttcgaattagatagattttgggattttttattttattcgttatcggaagaattttcgtttttgtttttttattttgttttttcggttttttagtaaggtaggtagggtttggtggtgtattgtttcgttttatagattgaagaaagtgaggtttagggggtttaagttttagtttcgagtgtttacgggtaagttttttatttttgttaaggtgtttagagttggggaatggttgtgaggtgtcgatgtaggaggaggtttacggtgggtgttttggttttaaattttgtttttaggtaaggttgattttgtttatttttttggatttttagttttagttttttaggtggatgttcgggttcgcgaagggtagggtttatttttaaatttttcggtaggattaggagttaagttagtgttttttttttagtgaatatatataaagtattggttgtgtgttgtgaatattttggggaatgtggggttggattagaggagttatgagtttagattatttgtttagggagatagattggttaagttgtgtttttaaggataagatttatgatgttagggggttagaggaggggaagggatatttgagttgggtttttaagggtgaaataggagtttgtttgttggtaaaatggagggaaggataatgtaggtagaggagttttttatattttttttgtaggaaattggtagatgtggagaaggcgtttggtaggggagtaaattaggtagtttttttgtttttttgggattttgttttttgttttgaattagtttagtgggagttttgggatcgagaggtttgattaggggtgaagatttataggttttggaggataggttggatgtaagagaatagtacgggggagaaggttttgttttggtgggtagggaaaggttatgtttgagggttaaagttgggattagttaggttggagtagttatttttatattgaggttttttcgatgggttagttggtggttatagacgtttgttatgattagtgcggattgttatggtttatggaggaagagttgtgggttagggtttgttttagtttatttttttttattttattatattttgaggaaaagaatttatgaatttttattttatagatgagaaaggagaggtttatttgtaaaatgaggtttatttgtaaaaagatgaggttggaaatttgttttaggatatagagtagaaagaggtggagcgtatattgtattttttttgtggaaaggggagttagggttagaggggttgtgttagtaaggaagtaggaggaggtttatagtggatgggtttatttttaaaggggatgttttagtcgtaggtttttgagtatggtttaagatgtgggatttttgtttatttgttttattttttattttgtcggtttgtttattgtttggttttattttagggttaagggtaattgaaattatttggagtattaaggttgggaataggggaggggaggaaggagggaggtagtagtttgagggaagggggaggatagaagagggttagagatggttttgaattcgttttggggggtgagggtttgaatttttttttttgggagtttagggtttattaggatttagaagtttttatgtttgttttttgttagtttttaaatagaggtgagtggaatggtaagatggtttatgagcgtatgggttagggtttgagttttattaaggttaagttgttgggtttgcgtttttagtttgtttttatttttgtaaaatagggttgttgataaggtgtttgagagggtattggtgagataaaagttttagtaataatttgttattgtttttttttatttttagtatatagttttaggattatttttgatcgtttttaattaagcgatgtatgttaggggtttttatggttaattgtttttagtattgtttttggtttttttagttttgatgttgttgatgagtattttgtggttggtgggggtcggtttcggtttggttttggtttcggagttgttgttggatttttggtagggtgagggttagttacgtggattttggaggaagtaggagatttgttgtagggtttgggtttatttggtaggagtagtataaggtttttaggggttaaatagggatggggtttagtgtttcgggaaagtatggttttagataggagtatgtttagtatatttatagttaagaagggaggtagaggattttttagggtgggttggaatttatgggtaggagtgttttttttatggtttttttttttagtagtttttttttgaaataagaattaaggttaggtggttgacgtttgtaattttagtattttgggaagttgaggtaggtggattatttgaggttaggagttcgagattagtttggttaatatggttaaattttgtttttattaaaaatataaaaattggtcgggcgtagtggtttatttttgtaattttagtattttgggaggtcgaggcgggcggattacgaggttaggagattgagattattttggttaatacggtgaaatttcgtttttattaaaaatataaaaagattagttgggcgtagtggcgggtgtttgtagttttagttattcgagaggttgaggtaggagaatggcgcgaatttgggaggcggagtttgtagtgagttaagatcgcgttattgtattttagtttgggtgatagagtgagattttattttaaaaaataaaataaaataaaataaaaaaatagttaagatttttaattaagtattaggatgggaggaggaggtgttggggttttgaggagtgattttagttgagtatttgttttttaataataatttttttaatttgtatttgaggatttttaatgatgtttagagaggttaagtgatttgattagggttatatagtttgagggaatggggtagttttaggattgaagtaggttattttatgtttttagttaggtatgatttagtaaatatagaagtagagtatttttatggtgtttgggatatagtgagtgttttgtagcgggttgttagtgaaaagattgagtggtacgtttagtgtattttgtttaatattatagaggcgtagttatagtgtttggaagtttttggttttttttattaatgattaagtgttggttgtgggaagattggtttttggggaggggaggtgggtttagtaggtggttttggtgtagcgtaatttttaatttggtatatttgggatagttttggatgttggggttattaatttggtatataagtttttttttttttttagtgtatcggttgttgatttatgttttgggttatacggttttgttaggtttgtttttgagtttgttgtttttgtttattgtgggttggtagtaggagtgttatttgggtacgttgagatttttgtatgttttagttttgttcgttttggtttttgggttgttggtagtgttgttggtaggttttgggttgtttagtgtagtcggtagttgtggatatatgtttgtttatttggttatgttggttggggagggatatcgttttagacggtttcgtggggtattgttatcgtggttgtcgtcgtggttgttgtttgttttgattttattgtttagttttgagttattttttttgtagtttttttgcggtttttttgtcggtttggtttgtattttttgtttgagtttagggttcgtggggatgtgtgggttttgtgggtgggtgtttgggaaggaagtggtataaaggggtgaaggtttaagtaatattaaggagtcgtgtatatatattttaggagtttttttgagtttttttttgggatatgttttgggttgggatttggggttttatggtttggtggaggtgttaattataatgtaaagggttacgtgggttttttgtaatattaatgttatttttcgtagaaatagaaataataattttaaaatttatatggaattataaaaggtttagaatagttaaattattttgagtaaaaattaaaaattaaaaaaattaaaagtttgatcgggcgtagtggtttacgtttgtaattttagtattttgggaggttaggcgggtagattatttgaggtttggagtttaagattagtttggttaatatggtgaaattttatttgtattaaaaataaaaaaattaggttaggcgcgatggtttatgtttgtaattttaatattttgggaggtta

SEQ ID NO: 63 - DNA, 18988 bp, Artificial Sequence
  chemically treated genomic DNA (Homo sapiens)
ttattgaaattcggaatgtagttggtgagatttaggaagtgttttttaatttagtttaattggaagtagttatagggggtaagtggttgtttattatattagtatagttttagaggttttgttaaaagttttttgtttattttattttgaaaattagttattttgattaatattattaattgttatttataagtttttgttatttgtgatttttattttttttaagtaatttggtttatttattataattttaaagtgagtatagtaaattaaatggattttagcgagaagtttttcggggtgaatttattgtgaattattttgaggatttgtaatatgtggttaatttttaattttaattattgatataaaaggagagagtttgtgtagttgaaatagggaagtaggagaagttcgttgggtattgatagattggttttttaagttagttttttttttttttaggaatttggtattttttagttgttttcggggtttgtaggagttttaaaatttttttttatattttttcgtgttttagttttttggattttttttttttttttaaattaaaatgtattttgagggagaggtttgggtaggaggattttttgagtttaggagatttgatttgagtttggagatttgtttggtagaatttttaattagtggtgatgatgttgattttatggattaaaaattgagatattgttaagaagtgagggaagggagcgggggagggtaggaaaattaatattgtttaagtatttattatgtgcgtgttagatattttatatgatgtttagtaaaaatgttttgtttgtatgaataattgttatttttttggtaagtagagtgtagtatgttttttttttgaatggataaatatatgaatatatttttattatatgaagtagatattagttttatattatagatgaggatattgatatttagataagttatgattttaaggttaaatatatataatattttaattatttaattttgttttttttttattgtttagttttttgtttagttttttttgtgtttagaattttgtttttgatttttgtaaaagaacgattagttaaattgattaatatatttatattaacggatgtaaatatgatagaatcgtttttagtttttttttgtaaggattttgaatgttaatgataattttttggggataatgttaatttatagaaatggttttttcggaattttacgttgttcggggaggtattttggtattttagtggtattaaaaatatattttatagtagatatttttttggaggttggatatttatataaagacgacgtattttttataaattaaattttaatagtgtttgtatttatttaaatggatattatttcgaggaggagatagtgatttgcgtattagtttttattattagggatgatttgtaagatatattaggaattggttttttttttattttttcgttttttttttttagaattttataagttttagagtacggttaagataagaggagtattgggaaagaatttgaaaataaaaatatagtttcgtgatttttaatataaagattacgaagagtataataataagtcgtgaaaaaaaatttatatttagaagttggagggttataaagtataagtcgtttaggttagtttgtagagattgtttatgttttcgtttagtaaaaatttggtaggcgatatatcgcgacgaatttcggttgtagaagaggaagagtattatttgtagttcgcggcgtgggaaacgtcgtcggaggggtttcgcgagtcggggaagtgcgcgtagcggggttttaggcggttttaggcgttgagtgcgaggaacgttcgcgttcgtcggcgttcgggagacgtagtcgaaggaggagggcgggcgttttattcgcgttatagttgcggtcggttagagagatcgtagaggtcgggattttcgtagtttttacggtcgttgttgttattgtcggggtggcgcgtttagtcggagaatttcgttcgcgttcggggttgggggcgaggcggggcgttgacgttatttttttttttttatcgtttttaagggggagggagtggggaaagaggtagcgagtcgtcgtagtcgtcggtcgtaattttttaattcggcggttggttgtttgggtacgttttgataaatttggttgttttcgggttttcgtttcggtttcgcgtatttttttttcgtttgcgtttggtgtttaagtttgttttggtcggaagttttcggagatgcggtcgtttgggtttcggcggtacggacgttggtattttggttagggatatgttgaagatttcggggaggtaaagttggtattttaaattcggtttttaatatatatttatatcgcgaggggattacggagttgtcgaggattttagagtttagggtcgaggattcggttagattggtgagttttttgtttaaatcgtgtatgttttttggtatttaagtttaaacgttaatgaaattacgtggggtgtgtggttttaagcgagtgcggggaagcgtgtgcgttttacgggttttcggttttaggagttgcgtatttttttggttttgtgcggatcggcgatgaaagattcgtatgtatagttttgggagtttataaaatatatatagagtattgttaaaaagaatttgagaggcgatgttgtttgtgtattattttgaatgtaatttattatagtaatggtgtttagggagggcgtatcggggtcgcgagatttgtaggggcgtagcgttttttagttcgggtatttggcgaggcgcgttttttgtagggttttgtgcggaggcgaatttggattttttcggcgttcggcgacgtgggcgtttgtttattttagtttttattgattatttattcgggtttattttttatatgagttataaaaattagtttgggtggattggatgtagaggtcgtgttggaggaaagcgttttgtttttggaatcgtttttttaattttttttttaatttttacgagtttttggggatagggttagggagggtcgattatttaaaggataaatgtggaatttgaattatattttttttttttatataaaataattcgatttgtggtagttaataggtatgtttatttcgttttgttggcgtttaaggattagtagaatcgtggtagagttttaagtttgaaatttttatttttggttttcggcggtttttgtggcgacgaagtgtaattttttttaggtagatagattttttagggagtttggaaaatcgggatttttagatagatgtaaaatatttagtaagttttaggaagcgttattatttattaattaatggtaattttttttaggaatttttttgtgttatttaaaaaaaatttcgtgattttacgttagggaatggtatttttgtattttttttattgttttttttttttttttttagtattattttcgttttttcgtttttaggaaacggttggagtttcggtgtgtttgggttttgttgagatttataattcggtaagcggtataagtcggttgggtttggagattaggttatttattttcgaggtgttttatgtatgaaattgatttgtaagtatttggagtaattatggtcgggataaatacgtttttggatgatggagtttgtatttgttggatgtgtgaatttatgtgtattttaattggtgggtagggaatatagggttacgaatcggtatatttattttgtaggtattattttttttttttagttataatttgttagatatttttattattattatttttttcggttatttttaagatggtttataaggtgattgcgttaattttgaatttaggaaatttttttttatatttgattgttttgtcgttttttttttcgttaagttttttttattagttttagggaaatcggatttttttgtttttttagtgttaaaatgtttgagttttataaatttttcgagattaagttcgtttttttgttcgggttgcgttttagcgttttcggtttttcgggtttcggtcgagttcgttttgcgtcgagtttgcggttggagttttgttcgtatcggggatgggtttcgcgttcgggacgtttaggttgggcgttcggcgcggggagttttcggagcgggcgtttcggcgttggggttttttttttgtttaggaatttgtagttgtcggtttggggttacgttttggggtttttggggtcgattttcgggttaggaagttcgcgggacgtcgcgattgttttttgttttataggtttgggcgttcggggtgttagcgggggaggttaggcgttcgcggcggggagggtttggggtttaattcggtagaaaaaggtcgcgggggaagcgttttttttttttggggattgaaggaggaagtagatttcgatttagttgtatttttttggagatttgaaggacgattttagtttattaaattttcgcggatttagagtcgcgttatttaaatgtagatttaggggtttttatatttttatggaaaagttaaagggatgtttttgggaagtttttttattaggttttagtattttttttttttttttttttttttagttaagttaacgttttttttttttggtagggagttttttttaattttttgtatagcgtttgtggttggtcgtaattaatttcggtattataagtttcgttttgtttttcggagtcgcgttagatttcgttgggcgttttttcgttttttagtacggatttggtgttcgtagggattggggttttttgggttcgggcgggattgcgtggtcgaattcgcgggtttagagtcggtagtcggggaaagtgggttcgagttttcgcgttcgagaaacgagcgtcggcgtcggcgggcggggtcggggcggagggattttttgcgttcggggagcgtgaggcgtcggcgtcgagttgggcggtcgggcgcggggagagggcgcggggagagggcgcgggagcggttcgcgcggtaggtattatgcggacgcgcgagttcggcgagggtttcggtaggttcggtttttgttcgggggcgcgttgagacggcgggtgagttttacgagagcgtcgtcgttatttcgggttaattttgcggttagttcgttggggcgcgggtcggcgggcgggggcgagagcgtgtagcgcgttgcggtgcggattttgtgggtgttcgttcggttttcggttcgggtttcggcgttgtcgaaaacggatgagcgcgcgatttttcggagggtggagtgattcggttttttttaattgggaaatttagtattggttaggggggtttcggcggcggagcgggaaaaggaggcgatcgcgcgggatcgattcggggttattgttggggttcgattttttttgatacgtcgtttttttttcgggagttcgtcgggttgcgtcggtttcgcggttttttggggtatttcgtcgtttgcgaaagattcgttcgttgagcggtgtacgcgggaggtttgcgcggggttgtcgggtttttgggtttttgggtgtttgcgttttgtaggagcgttgttcggaggtgtagatgtaatcggtggattgcggagtgaagggttgcgaggttgtatttcggggttgaatatttgtataatgtgcggtttgttagtgttttttgttttttttggaggaggaatttttaagatttttttaaaagaaagagtttttggttttttattgtttttaaaaaaaaatgtttttttttagagagttagttttttgttgtgtgttagatttttttgttttcgttgatgtgaattgtaaggttttggaaataaggacgtaattgtatgagttaggaaagtaaatttataaatattttttatgtagttaagttttttttttgtttgaattgtggttttattaagtggtttttgttaagtaattttcgggtgtttgatagaggcgattttttaaaagtggatattaatagtgattattagtatgagaaaagattgaaaagaaaatgatttttagatatttattttttttttaaaagtagatttttaatgtttcgtatatttagatataggtttcgatagtttaagaaggtatttgtgtgtgagaattaggtaatggtgatgttttttatattatttttaatgagtttggttatgttgtttaatatatttagttgttatagggacgtttgaaaaggtgtttttttagttaatagttaattgtgatatttgtttttgtttttttgttttaggaagatagttttgattttatagttagaattatttttttgtatttaagatgtaaaaatatttaaagtattatgtaattttttaaaataataattggtataagttttgagtgatgttaaatatggtatttaataagtttaaggtaaggtttgatttgaatgaagtttgtatttgtataattattttttgaaaaatgaatattttaaatgagttaaattttttggtattttggaaagaagtgtggttgttagaggattttataaaattatttcgggttatttgtatatttatttgttttttttgaagtattttcgttgggtttttattatgttagtagattatttaaatttatggttcggataggtgttaatagaaaaatgtttaaaaattatggtcgggcgtagtgttttacgtttgtaaatttagttttatgggaggtcgaggcgggcggattatcggaggtcgggggttcgagattaatttgattaatatggagaaatttcgtttttattaaaaatataaaattagcggagtgtggtggtgtatgtttgtaattttagttatttgggaggttgaggtaggagaatcgttttaattcgggaggcggaggttgtggtaagtcgagatcgtgttattgtaatttagtttgggaaaaaaaaagaaaagaaaaagaagagaagaaaaatttttaaaaattatgtataaattaattttgtttttatttttttgattattttttatttttttattgtttttagattttgttttgaggtttttttgaagtagtcgtttttttgaatgttagaggtggataggattttagagattatgttttaatattttattcgtttgttttttatttaagtttggttgattttacgtagaattaattagttaaattaaattagtatattattattgtattagattttgttttagtggtataatttgtagtttaaaggatttgatttaatagtagggagtcgtaaggttggatgtgttgtttaatttttatgagcgggatttgcgttagataattgtttttttgattaaattatgtagaagttgaagttaaattttattttttggttttatttaattgtttagtttgtaagtgtttatttatttttagatattggagaagagtttttgaaatgagtgatatatattagttaagattaggaagttgttatttttttatatttgaggggaattttttattttaaaaatatattttgatgaggaatttgtatattttatttttttaagttttttaagttattttttattgtaagttttagatttaaatatattgtttgaatttttgtttaattttaagggtttattatgtatgtgaagataagtttataaagtaaaaataataaaggtttttatatattgtttaggaaatattagttatgatttaatttgtattttttatagaatattaaggttagagttttgtgataatttgtaatatagatattgatttggtattatttatagttaattttgaggtagcgtaaggtgggtggtgatttttttttgagttattggaaatgagttttttatagagtagttatttgtagtgttgttattagtttcgtggttgtgtttggattttttgttaatttgagaaggatggatgttttatttttttatgttatttttttttatattttttttttaatatagttttgttttatattttttatttttaacgttttatttatttgtttatttattaatttaataatagtggattttttttgtgttaaatattgggttagatataatatttagtgttgaataaatcgtgttttttgtttttaagtagttcgtagtttgataagggagaggataagtatatagttttttatagattagtgtgataagagatttatttaggttaaggtggtttatagtagtattttattgagttgggggatttggggtaggtggatttaggataatgtgagttttgagggaagtgtgaattagaggggaataatttaagtagaggaaatgatgtgtgtaaagtaagttatagaaagtatagtgtggtttgtggtgtgatgagtgtagagaaattttgaagattttatcgtattatgttattttaggaaaaggattggttttttttttttgtttaggtagaatatagagaattttgattatgatttaaataattttatttaaaaagggaggattgtttttatgaggtagaggttaaggagagagaaaaagaaagaaacgttgaagagaaaggtgaaaataaataagttgtatgtgaggagtggagggtaggaaataaagaaaatagtaatgtttgtattatttttcggaagggaagaggttaagatgttatattattttagagtttttattattaggtggtgttattggtttaagatagtttggttattgaatttgttgtaagtttgggaagtatgtttttttgttttgaaataagaagtagtgttgggaaattaggaaattagttagaggttagattattaaaggtttttaatgtaaggttaagaattatatatttagtaggttaaggggaaatattgaatatttttaaattaaagaataatattataaagaagtttgaataggttgattgggattgggggtagaaagtaggaatattaaaagattgtaggaatattttgtatgaataaaatatttattttaattaggtggtagtagtagaaatgtaaagggaattattttgagaaattgagaaagaaatgttaagtttggataatttttgagaaatgaaggtttgagagttaggaggttgtaaagattttagtttattttttaatttttcgaatatatggagtcgaaaggattaagtaagttttttgaatttatatagttgattagtgataaagttggagttaggttttatatttgatgtttttttaatttttttttttttgtttgatttgttagtttgtaaatttggttgatttgggaagtggtgagattggaaaataattggaagagttgttattttgtaatggcgaaagggtgaaaagtttatatagttgttttttggtttttaagggaggtttgggattttatatttaaatttgagaatgtttaagtttttgatataaaatggggtattatttatatttttattgttttattgtttattttaaagacgtttttaatttgaggttggttggatttatggatgtagaatttttatatagtgaaggttaatcgtataatttaggtttgatggtattttaggaggaatgttacgaggtgtttgagagaggttagagttgaaattgtagatttggtgtattgattttttatgatttgaggtagagtagatgagatttttaagggtggtaataaatgtatgtggaggaagagttggaagataagtttgtaatgttagagttttaggtgagttagtgtagagtataaaagagtatggaagagaattaggagaatgttgttatttattttttatatttgtggattgtttttttgttttgggggattttgtgatcgaatgaaggattaggagtgttggggaggggagtgagtggtgttaaaggtgttatgaaattaaggaggatgagtattgagaaaaggttattggtttgatattagtttgtgatgcgggaacggttgttttgttagggtggatttgtaggatttttgtggagtagcgtttggcggagagggagttttaaggaagttagggcggtgttgtgaaatttttttttttgcgatttttgttagtataaaaaaagagaagaataagagtgtttgtttgaaagaagtaaaggtttgaatgaagtttattttattttattttattttatttttttgagacggagtttggttttgtcgtttaggttggagcgtagtggcgtaatttcggtttattgtaagtttcgtttttcgggtttaagcgatttttttgttttagttttttgagtagttgggattataggtgtatgttattacgttcggttaatttttgtatttttagtagagacggggttttattatgttggttaggatggttttaattttttgattttatgatttgtttattttagttttttaaagtattgggattataggtatgagttatcgtgtttggttaagtttattttttaagtaggagaagaatttgtgtgtgtgtatggattttgtataaggtgttaggagtgggaggagttgtagaagaggtaggattttgtggtattagagtatttttatttgtagttagggtgggtggtattttttttgaggtgtaagaagagagaataggtgaagagaatattttaagaagaggagggaagatggatttttttttttgaagattttcgtttttttgttgtatatggaatatttatttttttggttcgttatttagtgaagggttgatcgaatttaattatatagggagtttaatttaacgtataaaataaagttttatttattaatttgggagtggaagaagtggttattgttgattattggttattttgttaagatgttatttaaattatttttatttgtggagaaaaatatattagatgagatgatttttatttataagaggttaatagtttattgagtttttttttgggtaaagtttgttttggaatgtggatgaggagaaagtggttggaggataaggaatatatagagaggggaaagaagagaatagtataggaatgttttattttgttagaaatagatatatagtcgttgtttatttgttttgttttgtcgtttttaggagtatagaataattagaattcgttattttcgtaatgttaatagatatgttttataggtttatgtagataattaggttttatatagaggttgtttgaaaaataggatatttgtttattttttttaagggtaggaatattttaggaatttattttggattgattaaattatgtatatggtgaagttttttgaaaaagttagattgtagttttatattgttattgttagtaaagattatttttagggttaaattggaatcggttgttgattatgtgaaggtaatatttaaagtatgttttgttagagttattagattattgtagttttagttaaagataataatatataaatggagttagtagaagtgattaaatgatatatattaagtttaaggttgttgtttaatttttagggttatagtttttttcgtttatgttgaaaattatatgaagatgggttgaaaagaattagtgtatatttagaaaataaataggatttatttattagtattttagtgtaaggatgaaagtttttaaaagtatcgatatggttatgataattgaattagaaaaatagagagtttttttttttttgttgtaaattttatttggaatgtttgaaattttagaaattatttaatattttttttaatatatagtatttttaaaaagttatttacgttgggtgcggtggtttatgtttgtaattttagtattttgggaggttgaggtgggtggatgatttgtagataggaattcgagattagtttggtcgtttttattaaaatataaaagttagttgggtatgggggtgtatgtttgtatttttagttatttaggaagttgaggtatgagaatcgtttgaatttagaaggtagaggttgtagtgagttacgattgtatcgttgtgttttagtttaggtgatagaataagattgtttttaaaataaataaataaataaaaaaattcgtttataatttataattttttgataattttatgattttgttttgaaaatgtgtttgtcggttaggtttagtggtttataattgtaattttaatattttgggaggtttaggtaggtcgattagttgagtttaggagttcgagattagtttgggtaatatggtgaaattttatttttataaaaatataaaaaattagttgggtatggtggtacgtttaggtatttcggaggcggaggcgggaggattatttgagtttggaaggttggtgttgtagtgagttatgatggtgttattgttttttagtttgggagatagagtaagattttgtttcgggggaagaaagatgtttgtaatttagagattttttaaaaatattttaaaaatgtgatattgaattgaattcgaaattttaaattttaattatgagttaaattttattgacgtttttattatgttgatagaaaatgagagtggagaagagtatagtgagggagaatattgagtttttaatttaataattttgtgtttttattataatatgtgaaatgaaaagtttaataatgttttgttttataaaggttagaatgattatttgtgtttgtaagaattgtgatcgtttagtaataaatatgcggcgtttaatagaattggtgtattgtgtgatgttgtgttttatttaatgttttgtttttgtggcgtgtgaaatttttcgaagatttgagtttgaggttatttaaatatttgaatatatgtagttaggtttttagtataggggttgtgttttgttttgtgaagaatgtgtagttatagtaattgatggaagtattttatatgaaggtttttttaatgaagaaatatgaagatattaatatttgatttttattgtaaaagttatttttttgtcgtatttatagatttttagagatttatgttaaagatatttaagttttagattgggagttttttttttttaaggttagattaagtaaatattttttgttttggtttcggaaaatgtattttagaaattttaaattgtagtgagtttaagtagtgtgattattttttaaatattaaagtatagtttttggtttagatggtttttggagtttaatttttataagtaaaggagtttaggcgataaggttttttttagatgaaatggtgttggagttttttttcgttttagttttattgtttgttttgtatgagagttatagttattgttttgattagggtggtttttatagtgaaatttgaattcgtggtttttggttatattattgtacggttaataatgttttttaaaaagtgtatttttttatttaataatttattttatttatagtagtattttgttagttaagtttgtagagtatatttaggttttttaaagattttagttaggaatgtggtttataagttcgttttagttgtattgtgtttcgtgagaattgttgggtaggatgtggaaggtaattgtatgtttgggaatttagttggggatgagtgggtggtggtgggggttgtggtgggattgagtatttgggatagtatggggagagaatagttaaagtagtttgacgtgttggttatggtttgtgtgttttaggggatggaatagtgttagagttttttggtggggggatggagggggaagtagcgtggcgtattagtaagtattttttttttttgtttttgagatagagttttgttttgttatttaggttggagtgtagtggtgcgattttagtttagtgtaattttcgttttttttgtttacgcgatttttttgtttttgttttttaagtagttgggattataggcgtttattatcgtatttagttattttttgtatttttagtagagataggggttttattatgttggttaggatggtttcggttttttgatttcgtgattcgtttgtttcggtttttcgaagtgttgggattataggcgtgagttatcgcgtttagttggattagtgagtatttatattatatagaattttaagttttaatgttaggttttagttgtagaaaaatttttatttatttattgttttttattatattattatgttgtggttttttttttttttttagtggtcgatattttttttgttagggtttttcgtttggattttttaaattttggggttttgtttttggatttttttttttttttgtttgtttttttttttggtgattttatttagttttgtggttttaaatatcgttttttatatttagataatttttaaatttttatttgtcggttggagttttttatatatttgttgtttatttataatttttatttggatagttcgtagttgtttttattttattttgtttaaaattgatttttcgatttgttttttgaggttgtttttttttttgtttttttttcggtttttggtttttttgttttttacgttgagtagtttttggtattttttttggtattgttttttttttttttttttttttttttttattttagtgtattaggtaattttgaaatagatttataatttgttttttattttcgttgtgttttagtttatacgcgtttcgtttgtgttgtggttgtagtttttgattgttttggtcgttttttagtttttgttttggttgtttataggtttttttattttattgagatcgtggtatttttcggtttagaattcgttgggggattttttatttgatttatattaaattttaaagttttaaaaattgttttttatttatgagtttagacggattttgagaaaaaaaaagatttaggttggatgtagtggtttatatttgtaattttagtagttcgggaggtcgagttgggtagatcgtttgagtttgggtgtttgagattagtttgggtaacgtggtgaaatttcgtttttataaaaaaaataaatatgagttaggcgtgttggtggtttttgagtatgtaaaattttgttagtttaaatttatagacgtatttatagttttagttatttaggaggttgagacgggggttcggaaagtttaaagttttcgtgagtcgtgatcgcgttattgtattttagtttgggtgagagagcgagattttgtttaaaaaagaaaaaaaattgaataaataaatggaggaagatagataaattagtttttagaagaattataaatattttgagtagcgaaattttttgttttttaagaatgggttatatgtagtgatttttttattaagaatatagtatagggaggggtgaaagtaatttgattgtgaggaaatttggtagatattattttagttacgtggttaggagtagcgttaatatcgataaatcgtgttgattttattcgtttgttacggtgtggtggaaacgattttatttttgtggtttttttttttaaaatagaattttaatttaattaggagagaaacgttagattttagttgagggatattttataaaatatttgattagtatttttggaaattgtttagattattaaaagtaaggaaaatttgagaaacgtatattttagaggagttttaggagatatgatagttaaatgtaaggtggtgttttggaagggattttaggatggagagaaggttttgggtaaaatgagtaaatttgagtgaagtatggattgtagttgatgatgtgttagtattggtttgttagttgtatttagtataatgtataaagtgagatgttaatagtaggggaagttttttttgtaatttttttgtaagtttaaaagtattttaaaataaggtttatttttaaaaagaattttttttatgataggtttttttttaggatgtgtttcggttttatcgttgttttttaatcgttgtgttttagttacgtggtttttttttggtttttttaatttagtgtttttttgcggggtgtgattttttgttttagagggtgtttggtaatgtttcgagatagaggtatttttagttattatagttgggtgatgagggggatgttataggttttatgttggtggggattaggaattatattgaatattttacgtttttttaaagaatttaagagttgtttagtatgttattagtgtaagttttgattttttggatttagggttttttttttttttttaggtttttgattttggtttttttttgttttgttttagttttttttttagtatttaattattagtatcggatatattttgtttatttgtttgtttgtgtttggttaggaaatgtattttttattaggatttgttggtaatttggtttatttttgaatttttagcgtttagaattgtatttgatatatagtagatgtttattaaatttatgtaaaaggaattaaataattaatgaaaggggtgagtggatgataaagataatatatatttatgttaaaaaaaaattatagtagagaaaaatgttatagtaattatttttttagttatttgtttttttatcggttttttagaagttattattgttaatagttgtttgtttgtttagatttttttgtttattttaaagtatattcgtgggtatattgtatttattttttttttttttttttttaaataaatataaataggattagtttcgtttttttagtttatatagttagatatatgttaatatatagagtgttattttttaatggttgtatgataattttatacgtagaattaagtaaaaatatttttagtatttgtaatagaattttggtataatattttgttgtataatggatgatggtaaaaatgttttttaaaatataatgtgatttttaaaataaaagatattgtttgttaaatattatttaagtgtttttggttttgtttttttgtttttgagatagagtttagttttgttgtttaggttggagtgtagtggcgcgatttcggtttattgtaatttttgtttttcgggtttaagtgatttttttgttttagtttttggagtaattgagattataggtttgttttattatattttgttaatttttgtatttttagtagagatggggttttattatgttttggttaggttggtttcgaatttttgagtttaagggattcggttgtattggttttttaaagttttgggattataggtgtgagttatcgtgattagtttttttatatgtatttttatttttagtttgtaaattttttgggattgggatttttgttttttattttttaatattatgtaaggttttgtttgataaggttttttatatttgtaggttgaattttttatttgttttgataaaattataagattattttataatatttaaatttttttgagtattagaattgttgattaaatggagatatttaaagagatagttttgggagaaaattgtttttttattttgtttaaatgataattgtttttttagaagttaaaaatttgtttaatttttgattttatttggagaggagaaggtattatagttaaagaataagttagggtggttaatttgaacgtggtttaatattaattaagttttaattgttttaagtatattaggtttttttttttttttaaggtaatgatttatggggtagagttggtagtagttaagttaagatattataaattaatgttgtcgtattaattttaattgggttgttaaatttattttttagtttgttttttatttatttttggtagtatttatattttgtgaatattaatttgagagttattttgtaagatgatagtgttgttttttgtgaagttgtgttgatttataagatgaatttgttggtaaaggggaatagttgatttgaaaataattgttttgtttttttggttagattttagtttagtggatttcgtttatttttttatttgttattgttaaaggtaacgttttttttatttttttagtttttttttttttttcgttagttatttagggattgttttgtagagtttgttattatgtattaatagattgatttgatttttgacgtgtgttagtttagaagatttagtttttgtgtgtgtgtgttatttttttatggaggggtttagggtgataggttgttcgatgttttgaagataggagatattttgtgaataattggttgttgatagtagtggtgataaaatattgatatagttggtaaagtttgttttattgatttagagaggaaaaatgttgtttgatattaggttgttgaattttggttttttttttgtaaattgtttttttttggggtttatgttgttgataagtattatatttgatataattattttaatatttttaagtagttatatagagcgaaatgagataataaatttttatattatgtagggagtgaatttaattatttttatatagaaataatataattttaggatatattttgaaatgagattataagttgtttttatggagcgttatgtaaaattattgttggtttttgtttttttttgaattagttgttagaagttttgtatttttataatattgtaggggtattatgtttgttagtttttgattatttaatttattgtatgtaagtaaatgtaaataatgtttattaatttttaatagttgtttatatttgttttaacgatttaaatataaaaatataatttagttgttatagttagtagttttttatttgatatttatgaagatttttgagtcgtttaaatatgaaagagaggattttgtcgtttaaaaatgaaaaggaagtttttgttaagtttaataattttagatatgttataagaatgttgatatttatattggaaaatatgaaaaatattttaaatcgttgtatttatttatattttatgtgtatggaaaatatttttttaatgagaagtttaaaataatgtatatatttttgtttgttttatttttttaaggtaacgattttgattttttttgttttaga

SEQ ID NO: 64 - DNA, 18988 bp, Artificial Sequence
  chemically treated genomic DNA (Homo sapiens)
tttgaaatagaagaaattagaatcgttattttggggaaataaaataagtaaaagtgtgtatattgttttaaattttttattaaaaaaatattttttatatatatggaatataaataaatgtaacggtttgggatgttttttatgttttttaatataagtattaatatttttgtaatatgtttagaattattaagtttaataaaaattttttttttatttttgaacgataaggtttttttttttatatttaaacgatttaaaaatttttatgagtattaaatgaaaggttattaattgtaataattaagttatatttttatatttaaatcgttaaggtaaatataagtaattgttaaaaattaatgaatattgtttatatttatttatatataatgaattaaatgattaaaagttggtaaatataatgtttttatagtattgtgagaatgtaaagtttttgataattaatttagaaaaaaataaaaattagtagtggttttatatggcgttttataagaatagtttgtaattttattttaaaatgtattttgaaattatattatttttgtataagaatggttaagtttattttttatataatgtaagggtttattgttttatttcgttttatgtaattatttaaaagtattaaaataattatattaagtataatatttattagtaatataagttttaaagaaaggtaatttataaaagaaaaattagaatttagtagtttgatgttaaatagtattttttttttttaagttagtgaagtaaattttattaattatattaatgttttattattattgttgttaataattagttgtttatagaatgttttttatttttagggtatcgaataatttgttattttgggtttttttatgagaagatgatatatatatataaaagttaaattttttaagttaatatacgttaagggttaaattagtttattaatatatggtggtagattttgtaggatagtttttgggtgattggcggagaaaagagagaaattgaagaaatgaagaaaacgttgtttttaataatgataaatgggaaggtgggcgaagtttattgggttgaggtttggttagggaagtaggatagttatttttagattaattgtttttttttgttaataaatttattttgtaaattaatatagttttataaaggatagtattgttattttgtaaagtgatttttaaattaatatttataaaatgtgaatgttattagaggtaaatgaagagtaaattggagggtgggtttgatagtttagttgaaattggtacgataatattaatttatagtattttaatttagttattgttaattttgttttataagttattgttttagggggaaaaaaagatttgatgtgtttaaagtaattaaagtttaattgatattgaattacgtttaagttggttattttaatttgttttttagttatgatgtttttttttttttagataaagttagaaattagatagatttttggtttttaggagaataattattatttaaataaaataagaaaataatttttttttaaaattatttttttaagtatttttatttagttaatagttttaatatttagggaaatttgaatattataaaataattttgtaattttattaaaataaataaaaagtttaatttataggtatggaggattttattagatagaattttgtatggtgttaaggaataaaagataaagattttaattttaagggatttataaattagaaataaaaatatatataaagaggttggttacggtggtttatatttgtaattttagaattttgggaggttaatgtagtcggattttttgagtttaggagttcgagattagtttggttaaaatatggtgaaattttatttttattaaaaatataaaaattagtaggatatggtggagtaagtttgtaattttagttattttagaggttgaggtaggagaattatttgaattcgggaggtagagattgtagtgagtcgagatcgcgttattgtattttagtttgggtaatagagttagattttgttttaaaaataaaaaaataaaattagaaatatttggatgatgtttagtaagtagtgttttttgttttaggagttatattatgttttaggagatatttttattattatttattgtataataaaatattatattaggattttattgtaagtattagaagtatttttgtttaattttacgtataaagttattatgtagttattaaaagatagtattttgtatgttgatatatgtttagttatataaattggaaaaacgaagttgattttatttatgtttatttaaaagagaggagaaggggggtagatataatgtatttacggatatattttaaaatggatagaaaagtttaggtagataagtaattgttaatagtggtaatttttggagaatcggtagagaaataggtagttgagggaatgattattgtggtatttttttttattgtggtttttttttagtatgagtatgtgttgtttttattatttatttattttttttattaattatttaattttttttatataggtttaatgagtatttattatgtattaggtgtagttttagacgttggggatttaaaagtgaattaaattattaataagttttgatggaagatatattttttggttagatatagatagataagtaaatagagtatattcgatgttgataattaagtgttaaggagaaaattaaagtagggtaaagagagattagggttaggaatttgaaggaaaagagggaattttaaatttaaagggttagggtttatattagtgatatgttgggtaatttttagattttttggggaaacgtagagtgtttaatatgatttttggtttttattagtatgaagtttgtggtattttttttattatttagttgtgatgattaaaaatatttttatttcgagatattgttaaatattttttagggtagaaagttatatttcgtagagaagtattagattagggaagttagaaagagattacgtggttggagtatagcggttgagggatagcggtaaggtcggggtatattttgggagagaatttattatgaagggggttttttttaaaaataaattttattttagaatgtttttagatttatagaaaagttgtaaagagagttttttttattgttaatattttattttatatattatattagatataattaataaattagtattgatatattattaattatagtttatattttatttaaatttgtttattttatttaaggttttttttttattttagaattttttttaagatattattttatatttagttgttatgttttttaaggtttttttggaatgtacgttttttagattttttttgtttttaatgatttggatagtttttagaagtattagttaggtattttgtaggatgttttttaattggaatttgacgttttttttttgattagattggggttttgttttggggagaaaagttatagaggtagagtcgtttttattatatcgtagtaagcgggtaaaattaatacgatttatcgatgttgacgttgtttttgattacgtgattgaggtagtatttgttaggtttttttatagttaggttatttttatttttttttgtattgtatttttggtaaggaagttattgtatgtagtttatttttaagagatagagagtttcgttatttaaaatatttataatttttttagaaattgatttgtttatttttttttatttatttatttaatttttttttttttttagatagagtttcgtttttttatttaggttggagtgtagtggcgcgattacggtttacggaagttttgagtttttcgggttttcgttttagttttttgagtagttgggattataggtgcgtttgtagatttagattgatagaattttatatatttaggaattattagtacgtttggtttatgtttgttttttttatagagacggggttttattacgttgtttaggttggttttaaatatttaggtttaagcgatttgtttaattcggtttttcgaattgttaggattataggtgtgagttattgtatttaatttgaattttttttttttttaagattcgtttggatttatggataaaggataatttttaggattttagagtttagtatgaattaaatgagaagttttttagcggattttgaatcgaggagtgttacggttttagtaaaatggaaaaatttgtgggtagttagggtagaagttggagggcgattagagtagttagaggttgtagttataatataggcggagcgcgtgtgggttggggtataacgggggtggggggtagattgtgaatttattttaaggttgtttgatgtattggagtggggagagggagggaaaggaggagagaatagtattagagaagatgttaaagattgtttagcgtagagaataagggggttaggaatcgagagggagataggaggagaagtagttttagggagtagatcgggaggttagttttggatagggtaagatgggaatagttacgggttatttaagtaaagattgtgagtgggtagtagatatgtgggagattttagtcggtagatagaaatttgagagttgtttaaatatgaaagacggtatttaaaattatagaattgaatgagattattaaggaagagagtaggtagaagaaaaaaaaaatttaagagtagaattttaagatttgaagggtttaaacgggaggttttgataggggagatgtcggttattgagggaggaaagggaattatagtatagtggtgtgataagaaatagtgagtaaataaagatttttttatagttgaagtttaatattagaatttggagttttatataatataaatatttattaatttagttgggcgcggtggtttacgtttgtaattttagtatttcgggaggtcgaggtaggcggattacgaggttaagagatcgagattattttggttaatatggtgaaatttttgtttttattaaaaatataaaaagtagttgggtgcggtggtgggcgtttgtagttttagttatttgggaggtagaggtaggagaatcgcgtgaataagggagacggaggttgtattgagttgagatcgtattattgtattttagtttaggtgatagagtaagattttgttttaaaaataaaaaaaaaaagtatttgttgatgcgttacgttgtttttttttttatttttttattagaaggttttggtattgttttattttttaagatatatagattatggttaatacgttagattgttttggttgttttttttttatgttgttttaggtgtttagttttattatagtttttattattatttatttatttttaattggatttttaaatatgtaattattttttatattttatttagtagtttttacgggatataatatagttgggacggatttgtggattatatttttaattgaaatttttgaaaaatttgaatgtattttgtaaatttggttaatagaatgttattgtgagtagaataaattattaaatgaaaaaatatattttttggaagatattgttaatcgtgtagtaatgtaattaagaattacgaatttaggttttattataaaaattattttgattaaaataatggttgtggtttttatgtaaaataaatagtaaagttgaagcggggagagattttaatattattttatttaaaaaggattttatcgtttagatttttttgtttatggaaattaaattttaaagattatttgagttaagggttatattttgatatttagaaggtgattatattatttaaatttattgtaatttgggatttttaaaatgtatttttcgaagttaaaataaagagtgtttatttagtttagttttgaaggagaagggtttttagtttaaagtttaaatatttttagtatagatttttgaaaatttataaatacggtagaaaaataatttttgtagtaaaaattagatattaatatttttatatttttttattagggagatttttatgtaaaatgtttttattaattattgtgattgtatattttttataaaatagaatatagtttttgtgttgaaaatttaattgtatatatttaagtgtttagatgattttaagtttaagttttcgaagggttttatacgttatagagataggatattaggtgagatatagtattatataatgtattaattttgttaaacgtcgtatatttattattgagcggttataatttttataagtataagtagttattttagtttttatggaataggatattattaaattttttattttatatgttatgataaaaatataaaattattaagttgagaatttagtgtttttttttattgtgtttttttttatttttattttttattaatatagtgaaagcgttagtagaatttaatttatgattaaaatttggaatttcgagtttagtttagtgttatatttttaaagtatttttaagagatttttaaattgtaagtattttttttttttcgagatagggttttgttttattttttaggttggagagtagtggtattattatagtttattgtagtattaattttttaggtttaagtgattttttcgttttcgttttcggggtatttgggcgtattattatgtttagttaattttttgtatttttgtagagatggggttttattatgttgtttaggttggtttcgaatttttgagtttaattgatcgatttgtttggattttttaaaatgttgggattatagttgtgagttattgggtttggtcggtaaatatatttttaaagtaggattatgaagttgttaagagattatgaattgtaaacgagtttttttgtttgtttgtttgttttggagatagttttgttttgttatttagattggagtatagcggtgtaatcgtggtttattgtaatttttgttttttgggtttaagcgatttttatgttttagttttttgagtagttaggaatataggtatgtatttttatgtttagttaatttttgtattttagtagagacggttaggttaatttcgaatttttgtttgtaagttatttatttattttagttttttaaagtgttgggattataggtatgagttatcgtatttagcgtaaatggttttttaaaaatattgtatattaaaaagaatgttgaatgatttttaaaattttagatattttaaataaaatttataataggaaaaaaaaaattttttatttttttagtttaattattatagttatgtcggtatttttaaaagtttttatttttatattgaaatattaatgagtagattttgtttattttttgggtgtatattaattttttttaatttatttttatatgatttttagtatgaacggaggaagttgtgattttagaaattgagtagtagttttaggtttggtatatgttatttaattatttttgttaattttatttatatgttgttatttttgattggggttgtaataatttggtaattttagtaagatatattttaaatattgtttttatatgattaataatcggttttaatttaattttgagaatggtttttattgataatgatagtgtggaattataatttggtttttttagaaaattttattatgtatatgatttaattaatttaaaatagatttttgaagtgtttttgtttttaagaaagataaatagatgttttattttttaaatagtttttatataaaatttagttatttatatgaatttataaaatatgtttgttggtattacgaagatgacgggttttagttgttttgtgtttttgggaacgataagataggataggtaggtagcggttgtgtgtttatttttggtagggtgaggtatttttgtgttattttttttttttttttttttatatattttttattttttaattattttttttttatttatattttaggataaattttgtttaaggagaagtttaatggattgttgattttttgtgaatggagattattttatttaatgtatttttttttataaatagaagtaatttaaatgatattttggtagagtagttaataattaataatggttattttttttatttttaagttggtaagtaagattttattttatacgttgaattgggttttttgtataattagattcggttaattttttattaaatgacggattagaaaagtgaatgttttatgtatagtaagaaaacggaaatttttagggagaaaagtttatttttttttttttttttaaaatgttttttttatttgttttttttttttatattttagaagagatgttatttattttagttgtaaataaagatattttgatattataaaattttgttttttttatagttttttttatttttgatattttgtgtagaatttatatatatatataggttttttttttatttaaaaaataagtttggttagatacggtggtttatgtttgtaattttagtattttgggaggttgaggtgggtagattatgaggttaagagattgagattattttggttaatatggtgaaatttcgtttttattaaaaatataaaaattagtcgggcgtggtggtatgtatttgtagttttagttatttaggaggttgaagtaggagaatcgtttgaattcgggaggcggagtttgtagtgagtcgagattgcgttattgcgttttagtttgggcgatagagttagatttcgttttaaaaaaataaaataaaataaaataaaataaattttatttaaatttttgttttttttaaataaatatttttatttttttttttttttatattggtaaagatcgtaagaaaaggagttttatagtatcgttttggtttttttagaatttttttttcgttaaacgttgttttatagagattttgtaggtttattttggtagaatagtcgttttcgtattataagttaatgttaaattaatgatttttttttagtgtttattttttttgattttatgatatttttgatattatttatttttttttttaatatttttgattttttattcggttatagagttttttaaaataaagaggtaatttataggtatgaaaaatgaatgataatatttttttgatttttttttatatttttttatattttatattgatttatttaaaattttggtattataaatttgttttttaattttttttttatatgtatttattattatttttaaagattttatttattttgttttaaattatgaaggattagtgtattaaatttgtaattttagttttaattttttttaaatatttcgtaatattttttttaaaatattattaaatttaagttatacgattggtttttattatataagagttttgtatttatggatttaattaattttaggttgagaacgtttttaaaataaataataaaatagtaaaaatataaatagtattttattttatattagggatttgagtatttttagatttgggtataaaattttaaattttttttagagattaagggataattatatagattttttattttttcgttattgtaaaataatagtttttttagttattttttaattttattattttttaaattaattaagtttgtaaattaataaattaaataaaaaggaaggggttgggagaatattaaatgtggaatttagttttagttttgttattaattaattgtgtgaatttaaggaatttgtttaattttttcgattttatgtattcgagaaattgaaggatggattaaaatttttatagttttttggtttttaaatttttattttttaaaagttatttaaatttgatattttttttttaattttttaaaatggttttttttgtatttttgttgttattatttagttagaatgggtattttgtttatgtagagtatttttatagttttttggtatttttgttttttgtttttaattttagttaatttatttaaatttttttgtgatattattttttagtttgaaaatatttagtatttttttttagtttgttaagtatatgatttttaattttgtattaaagatttttgataatttaatttttaattaattttttaattttttaatattattttttattttaaaataaaaaggtatattttttagatttgtaataagtttagtaattaagttgttttgagttaataatattatttagtggtgaaggttttaaagtaatgtaatattttgattttttttttttcgaaagataatgtaaatattattattttttttgttttttgttttttattttttatatatagtttatttgtttttatttttttttttaacgtttttttttttttttttttttttaatttttgttttataaaaataattttttttttttaaataagattatttaagttatagttaagattttttatgttttatttagataaaaaaaagaagttaattttttttttaagataatatggtacggtgaggtttttagaatttttttgtatttattatattataagttatattatgttttttataatttgttttgtatatattattttttttgtttgaattgtttttttttgatttatattttttttagaatttatattattttaaatttatttgttttagattttttagtttaatgaggtgttgttatggattattttgatttgaatggattttttattatattggtttataagagattgtgtatttgtttttttttttattagattacgagttgtttgagggtaggaaatacgatttgtttagtattagatgttgtgtttggtttaatgtttgatatagaggaggtttattattgttggattggtaaatggatagatgaataaagcgttaagagtgagaaatgtgaggtaggattgtgttggggaggggatatagagagggataatataggaaaataaaatatttattttttttaaattaatagaaaatttaggtataattacgaggttggtaataatattgtaggtggttgttttgtagaggatttatttttaatagtttagaaagaggttattatttattttacgttgttttaaaattggttatagataatgttagattagtgtttgtgttgtagattattataaagttttaattttaatattttatgaaggatatagattaaattatgattaatattttttaagtagtgtatagaagtttttattatttttattttatagatttatttttatatatataatgaatttttggaattaagtaagaatttaggtaatgtatttaaatttggaatttatagtaaaagatgatttaaaaaatttaaaagagtgaaatatgtagattttttattagaatatatttttgaaatgaaaagttttttttaggtatgagaaaatggtaattttttgattttaattgatgtatattatttattttaaaaatttttttttagtgtttaaggataaataagtatttgtaaattgaataattaagtgagattaaaagatagagtttggttttaatttttatataatttggttaaaagaataattatttagcgtaaatttcgtttataaagattaaatagtatatttagttttacggttttttgttattaaattaggttttttaggttataaattatgttattgagatagaatttaatgtaataataatgtattaatttgatttggttgattgattttacgtaaaattagttaaatttgggtggaaagtaagcgggtaaagtgttaaaatataatttttaagattttatttatttttaatatttaaagaaacgattgttttaaagggattttaaagtaaagtttaaaggtaatggaaaggtagaggatgattaggggaatgaaaatagaattagtttgtgtataatttttaaagatttttttttttttttttttttttttttttttttttttaggttgaattgtaatggtacgatttcggtttattataattttcgtttttcgggttgaagcgatttttttgttttagttttttaagtagttgggattataggtatgtattattatatttcgttaattttgtatttttagtagagacggggtttttttatgttggttaggttggtttcggattttcgattttcggtgattcgttcgtttcgattttttatagggttgggtttataggcgtgaggtattacgttcggttataatttttaaatatttttttgttggtatttgttcggattatggatttaaatgatttattaatatgatgagaatttaacggggatattttaaaagagataaatgaatatataggtggttcgaaatgattttataaagttttttaataattatatttttttttagagtgttaaagaatttggtttatttaaggtgtttattttttaaaaaatggttatataaatgtaaattttatttaaattaaattttattttgagtttgttaaatgttatgtttagtattatttaaggtttatattaattgttgttttaaaaaattatatagtgttttaagtatttttatattttaaatataaaggaataattttaattgtggaattagagttgtttttttaagataaaaagataaagataaatattataattaattattaattggagaaatatttttttaaacgtttttgtaataattggatgtgttggatagtataattaaatttattaagaatagtgtgaaaaatattattattatttagtttttatatatagatatttttttaaattatcgaaatttgtatttgaatatacgaagtattaagaatttgtttttgaaaaggaaatgaatatttgaaggttattttttttttaatttttttttatattaataattattgttaatatttatttttaaaaaatcgtttttattaggtattcgggaattgtttaataaaagttatttaatgaaattatagtttagataaaaaaaaaatttaattgtatagaaaatatttatgagtttatttttttaatttatataattgcgtttttgtttttaaagttttgtaatttatattagcgggaataaaaaaatttaatatatagtagaaagttggttttttaaaagaaagtatttttttttaaaggtaatgaaggattaaaaatttttttttttaaaaagattttagaagttttttttttagagaagatagaaaatattgataaatcgtatattgtgtagatgtttagtttcgaaatgtagtttcgtagttttttatttcgtagtttatcggttgtatttgtattttcgggtagcgtttttgtagggcgtaaatatttagagatttagggattcggtagtttcgcgtaggtttttcgcgtgtatcgtttagcgagcgggtttttcgtagacggcgggatgttttaggagatcgcgaggtcggcgtagttcggcgagttttcggagggaaggcggcgtgttagaaaggatcggattttagtaatggtttcggatcggtttcgcgcggtcgtttttttttttcgtttcgtcgtcgggatttttttagttagtgttgaattttttaattgggaaggatcgagttattttatttttcgggaagtcgcgcgtttattcgttttcggtagcgtcggagttcgagtcggggatcgggcggatatttatagagttcgtatcgtagcgcgttgtacgttttcgttttcgttcgtcggttcgcgttttagcgaattaatcgtaaagttggttcgaagtggcgacggcgttttcgtggagtttattcgtcgttttagcgcgttttcgagtagggatcgggtttgtcggggttttcgtcgggttcgcgcgttcgtatggtatttgtcgcgcgagtcgttttcgcgtttttttttcgcgtttttttttcgcgttcggtcgtttagttcggcgtcggcgttttacgtttttcgagcgtaggagattttttcgtttcggtttcgttcgtcggcgtcggcgttcgtttttcgggcgcggaaattcgagtttatttttttcggttgtcggttttgggttcgcgggttcggttacgtagtttcgttcggatttaaagagttttagtttttgcgaatattaggttcgtgttgggagacgagaaggcgtttagcggggtttagcgcggtttcgaggggtagggcgaggtttgtgatgtcgaggttagttacggttagttataggcgttgtgtaaggaattggggaaagttttttgttaagaaagggaaacgttagtttagttaaaaaaaaaaaaaaaaaaaaaaaatgttggggtttaatgagaaagttttttagaggtatttttttagtttttttatagaaatatgggagtttttgaatttgtatttgaatggcgcggttttgggttcgcgaaggtttggtgggttgaagtcgttttttaggtttttaaaggaatgtagttaggtcggaatttatttttttttttaatttttagaaaggggagacgtttttttcgcgatttttttttgtcgagttagattttaggtttttttcgtcgcgggcgtttggtttttttcgttgatatttcggacgtttaggtttgtgggataaaaggtagtcgcggcgtttcgcgggttttttagttcgggagtcggttttaggggttttaaagcgtgattttaggtcgataattgtaagtttttaggtagaggggaagttttagcgtcgagacgttcgtttcgagaatttttcgcgtcgggcgtttagtttgagcgtttcgggcgcggagtttattttcggtgcgggtagggttttagtcgtaggttcggcgtagggcggattcggtcgaagttcggagggtcggaggcgttgggacgtagttcggataagagggcggatttgatttcggaaagtttgtgggatttaggtattttaatattgggaagataaagagattcgatttttttgggattggtgaggggagtttggcggggaggggaacggtagggtagttaagtgtgaaagagaattttttgggtttaaagttaacgtagttattttataagttattttagaggtgatcggaaaaaataataataataaaggtgtttagtaggttgtggttgggaaggaaaaataatgtttgtaagatgagtgtgtcgattcgtagttttatattttttgtttattagttggaatatatatagatttatatatttagtaaatgtaaattttattatttaaagacgtgtttgtttcggttataattgttttaagtgtttataggttaattttatatatggaatatttcgaaagtgggtgatttgatttttaagtttaatcggtttgtgtcgtttgtcgaattgtaaattttagtaaaatttaaatatatcggaattttagtcgttttttgggagcgaggaagcgggagtaatgttaaaaggggaaaagaagaatagtaaaaaaagtataaagatattattttttgacgtaaaattacgggattttttttaaatggtataagagaatttttggagaagattattattaattaataagtaataacgttttttagggtttattagatgttttatatttgtttgggaatttcgattttttaggttttttgagaaatttatttgtttggaagaagttgtatttcgtcgttataggagtcgtcgagagttagggatggagattttagatttaggattttgttacgattttattgatttttaagcgttaatagaacgaaatggatatgtttattagttattataaatcgaattattttatatgagagagagaaatgtggtttaagttttatatttgttttttaaataatcgattttttttaattttgtttttaaaggttcgtggaaattagggagggggttggggagacggttttagaaataaaacgtttttttttagtacggtttttatatttagtttatttaagttgatttttgtaatttatataaagaatgggttcgggtgggtggttagtgaagattggggtgagtaagcgtttacgtcgtcgagcgtcggggaggtttaggttcgttttcgtatagaattttgtaaggagcgcgtttcgttaggtgttcggattagagggcgttgcgtttttgtaaatttcgcggtttcgatgcgttttttttaggtattattgttataataagttatatttaaaataatgtataaatagtatcgttttttaagttttttttaatagtgttttatatgtattttatgaatttttaaagttatgtatacgaattttttatcgtcgattcgtataaagttagagggatgcgtagtttttggagtcgagaattcgtagggcgtatacgttttttcgtattcgtttagagttatatattttacgtaattttattaacgtttaaatttaaatgttaaaaggtatgtacgatttgaataaagaatttattagtttagtcgagttttcggttttgggttttaaagttttcggtagtttcgtgattttttcgcggtgtagatatgtgttaagagtcgggtttgaagtattaattttgttttttcgggatttttagtatgtttttaattagagtgttaacgttcgtgtcgtcgggatttaggcggtcgtattttcggaggttttcgattagggtaaatttaagtattaaacgtaggcgaaaagagagtgcgcggggtcggaacgagggttcgggagtagttaagtttgttaggacgtgtttaggtagttagtcgtcgagttgaggagttgcggtcggcggttgcggcgattcgttgtttttttttttatttttttttttttggaggcggtgggggaggggaggtgacgttagcgtttcgtttcgtttttagtttcgggcgcggacgggatttttcggttgggcgcgttatttcgatagtggtagtagcggtcgtggaggttgcgggggtttcggtttttgcggtttttttggtcggtcgtagttgtggcgcgggtgaaacgttcgtttttttttttcggttgcgtttttcgggcgtcggcgagcgcgggcgtttttcgtatttagcgtttggagtcgtttggagtttcgttgcgcgtattttttcggttcgcggagttttttcggcggcgttttttacgtcgcggattgtaggtgatgtttttttttttttgtagtcgaaattcgtcgcgatgtgtcgtttgttagatttttgttgggcggaagtatgaatagtttttgtagattggtttggacgatttgtattttgtggttttttaatttttggatgtgaatttttttttacgatttattattatgtttttcgtggtttttgtgttgaaaattacggagttgtatttttatttttaaatttttttttaatgttttttttgttttgatcgtattttgaagtttataaggttttgagaggagggggcgaagggataggggaggagttagtttttaatgtgttttataagttatttttagtgataggggttaatacgtaaattattgtttttttttcgaaataatatttatttagataaatgtaaatattgttgaggtttaatttataaagaatgcgtcgtttttatgtaagtgtttagtttttaggaaaatatttgttgtggaatatatttttaatgttattaaagtattaaaatattttttcgaatagcgtgaaatttcgagggagttatttttgtgagttgatattgtttttagaagattgttattaatatttaagatttttgtaaaagggggttgggggcggttttattatatttgtattcgttggtataaatatgttgattagtttagttggtcgtttttttataaaggttaagagtaaaattttgagtatagaggaaattgggtagggagttaaatagtaaggagagaataagattaggtgattggaatgttgtgtgtgtttagttttgaagttataatttgtttaaatgttagtgtttttatttgtgatatgggattaatatttgttttatgtggtaaaaatgtatttatgtgtttatttatttaaaaaaaaaatatattgtattttatttgttagggagataatagttatttatgtaggtaaagtatttttattgagtattatatgaagtgtttagtacgtatatagtaggtatttaaataatattagtttttttgttttttttcgttttttttttttattttttggtagtgttttagtttttaatttataaaattagtattattattattgattggagattttgttaggtaggtttttagatttaagttaggttttttgggtttaagagatttttttgtttaagttttttttttaaggtatattttgatttggaagggaggagaggatttagggagttaggatacggagggatataggaagggattttagagtttttgtagatttcgagggtagttagagggtgttagatttttaaggagggaggaggttggtttgagaggttagtttgttagtgtttagcggattttttttgtttttttgttttaattatataggttttttttttttgtgttaatagttgaaattagaaattgattatatattgtaagtttttaaaatgatttataataaatttatttcgagaggtttttcgttgaagtttatttggtttgttatatttattttaaagttgtaataaataaattaaattatttaaaaaagataaaaattataaatgataggaatttatgaataataattgatgatattagttaaaatagttggtttttaaagtgagatgggtagaaaatttttaatagaatttttagagttgtgttaatgtagtgggtagttatttgttttttgtggttatttttagttaaattaaattaaaaggtattttttgagttttattagttgtatttcgagttttagtga

SEQ ID NO: 65 - DNA, 6179 bp, Artificial Sequence
  chemically treated genomic DNA (Homo sapiens)
taattaaggtttgagttttgatgatttttttttggagttttagtaaatttttttaatgtaaatgggtttaggtattggggtgattatttttattttgttttttgttaaattatggaggtttggggagtttttttagatttttaataaatttgtttgtggaagtttggggagtttttttagatttttaataaaatttatttaattttaaatgggttttgttaagaattttgttatttttgttatgttttaaggtttaggaaaggtttaggtaaaatttttggtgggttttttttatattttagtttttgtataagggtattggtttttaatatttaatttaattatttagttagtattgaaatagttgttatagaggtttatgttagttagatttgttttgttataattttttttattttaagttttttttttggtggaaaatatttttaagtatttttatgagaaaagattttatagaaataaaattttttgagattttgtatgtttgaaaatatttttattttataattagattttattgattgttggttttattgggaattttggattgtaaatgatttttttttggaatttaggatattgtttaatttttttttagtttttagtattattgttaagaagtttaatgtttttttttgtttttatgtttgtttttttgtttgtattttgttattttatttgaagtatttagggaatttaaaaaattttagttgttttgatattttaggattaagtgtttttgtgtgagttttttttattattttgtaagttatttattagattttttttaatttggaaatttaggttttttagtattggggaaatgtttttttttgttaattttgtttttttttttcgtttttttttttttttttatagattagatgtttgattttttgaattgattttatatttttttttttatattttttaattgtttgtttttttgtttttattttgagattttttaattttattttattatttgttattgaattttaatttgttttttaattttttaaagttcgtttttttttttgaatttttttttagaaaaatagttttttgtttttatttttttaaggattggtagattttatttttgacgtgattaggtagggaatttgtatattttggaaaattttttcgtttttatatttttagtatttattagttataaaaatatttttttttaggtaagttaatttttttaaaaaggaattttttaaggttttttttgagggataggaatttgaatatagttattatgggagtttggaggataagttttatagtttagtatgtagatttttatgtattttttttattttaatgtgtagtaggtattttttttttaggtaatatttagttgtttttgtatttttaagatttgagtttttttaatgattttaaggagtaaattttgttgtttttggattgtggtagagtagtgttttaatttagttgtttggtgggggaagtgattttgatggggtaagtagggtttttttattttttttatagattgttaagtaattttgttgtttatagtttttttttttaattatgtttttttagagatttttaggtttggatttaggtattttgggaggttaagagaggtggattatttgaggttaggagtttgaaattagtttggttaatttggtgaaatttcgtttttaataaaaatataaaaattagttgagtgtggtggtatatgtttgtaattttagttgtttaggaggttgaggtatttggatttgtgtttatgttatattaaggatttttaggatagagtagagataaatgtttgagtttaatatattatgttgaataatttattggttttatgttaaatatatagatttttttgaatttttttgtttttttaagtgagaatttttgggagttaatttgggagtttatttttgaaaagatttttaggtgattttgataatattatatatataaatttattattatagtattgttatataggtatatatattttttagttaattttgaagttataatgaattagggataaggggatgaggaaaaggataggttaattttgagaaaaggtcgggtacggtggtttatgtttgtaattttagaattttgggagttcgagagaggtggattatttgaagttaggagttcgaaattagtttggttaatttggtgaaattttgtttttaataaaaatataaaaattagttgagcgtggtggtatatgtttgtaatttttggaggtcgaggtaggagaatagtttgaatttggaaggcggaggttgtagtgagttgagattatattattgtattttagtttgggtaatagtgagattttgttttaaaaaagaaatgaaaaaaaaaatttgagaaaaggatggtttaaaaagggataggtttttagtgatttaggggtattttggagaaggtatgttttgattacgaatgttggtggattttttaatggagagtaggttagggaagtaggagaattaatattaattagagtattaggatggttattcgttggttgggaaagatggttgggagatggtgttaatatatttgatatttagtttgaagatagaatggatgttttttttttttaagtttattttattttttttttttttttttttttttaattattttgttatttttttaatatagatttaaaaaataaaggaaatgattaagttattttgaaaatttgaaatttggaaagttaaaatagttttaaagaaaattttatataaatgtgatttttaggaatagtatttatttaagagaataatttttaaaaagaaaaaaatatatatttattgaaaataaatattgtagtatgtatagaataaggatagatatggtttttatattgtatattttattatgatttttattttaggagtagtatgtgtgtatggttagttatgaattgtggataggtatgaattgtggattagaaagtagagagttataaattaaaggagttggtagaaaagagatatagatgaagaaaaggagggaggggtaagtattggaattattgaattaagatggtatataattaagattttttttgtagtttatatttttaaataggaaaaaagggaggtggagagatggggtgaggtatggatggtgttaattaaaaaaagtaaaaaattttttaattattttttattatttatttaggtttgatgtttatattattatttttattgtttagtaagtaatgttattagaatagataaagtttggtatttgagaatatggaatatatattaaggtgatatatagtgtttattaaatgtgttgtaatgtaatgtgataattttaatagaggaaaaaaatgtgaaattggatttgttatatatttttgtatgttttaaaaatgtagtatagatttttgttatatttatttattttaagtatatttttttataattgtattttttagtataatgattggtatatggtagatagtttttaaggttttggaatgaataggtgagaatttagagaataattgtagatatggaaagatttttgttgatttttttagatttgggttttttaatataaatatatatgttgtgtattaaatagttttatttttattatatttttattgaaagttattttttgtaaatatgtaataacgtatttattaattatatttttttatattttgattttttttgtataaatggagaaattttaaggtttttgggaaaggtatttagttatgaagtagtttttaaagttgtattttggttttatttaattaaatttttatttattttatttttattgatattatatatattataatatttgatgtttatagaaaattaatttttattttaagaagtttatttatagaattatagtttgtgtatttaataattattatgaaatatatatgaaatattaattattattttagagaataatttaaaaatttcgaagtaattattttttttaattttgttattttaatattttgggtataggtattgttggaaaaatataattaaaaattaaaattttttaatttagaaattttttttataaacgttagtagataaaatatttttattattgaataagtattaaacgagattgtgatatatattataggtaatttgttaagagattgtaaagatagaaattttgtttttttgtatagttaagtatatacgatttattatatatacgtttttaagttgaataataattagtttttaagtaagaggatttgatatttgtgatattaattttatttaataattggggtgattatttgtgttagttaattggttttatttagaggaaaaataaattttttttgtttttatgacggaaggtagttttgtaatacggagtaagttgtttatcgaagttacgtttttatttttttatagaaattgggagatagggaaggatgttatttcgttgatatgtgtagtattttaaaaaaaaaaaaaaaaaaaaggtttagagatatttttgattgagtatatagttgataagatttatttagtttttaagtggatttatatatattttaaagagttgagaaagtatttaataattaagaaagtatttaagttttttaagataaatgttcggagagaaagggacgggaaattttattttttatttttaatagggagaattaagttttttatttaaaatttttatgttggtttttgtttatttagttttaaaatagtagatttaaaaaaagtttaatttaagatttatgtttttttatgtgtagggttgttttttacggttaaataaataattttgtttagagaaaatatttattatttttttttggtttttatgtaatttagtttttgagagggaggggaaatatcggattgacgttatgtggtttaattaatgtaaaagataatatcgttttaaaaagtttattataggaatatgggagggttatattttcgaataatgacgtatatttattttattgttattgattatttagtaataattttgtagtttatattatttattttttattaaatttttttggtgaaggacgttttagaaacggttattattgaagagtagattcgtttgggttttttacgtattttagattttcgaagaggtaagaatttattatagggggttatttttaggatttgttgtatgtttttaaatatttattataattttagtattgagtttttaatatttttaggtaggtttaggtattgggagtataggattgaaagatagttttcgtttttaagggatttagagtaaattggagttgttgaaaattattttaaagtaatttacgttaataatagatataagtaaaacgtgggaacgtataggaaaaagtgattaattttgaggttgaaaagtgtttattttaggggtgggggtttcgcggttttaaagtagttttttttttcggagattttagttttagggatcgtttagcgtttttcgggtatatttaatattttaattacgttttcgtttttatttttcgaattttttttcggttgtcgattcgtcgagtagttttttttaggcggttttagtttattatcgtcggttcggttatttttcggtcgcggttaggcgagttttttaaagttttttgtgaggttttcgttcgttttcggttttattttattacggtagtttaggatattcgttagggaggagtaggttatcgaggcggggagagcggtataaacgcgtagatttcgggattttattcgggttggtgagcgagtttagaaagcggcgatcgtagtttcgcgtttttatttttagggttcgtagtttgggttaagcgtgcgtttatttagtttagggtttaagttttgttttttcggggatcgggttaatcggtcgtttttcgttttttgggaggtagtggaggagggggttgagggtcgggcggttgcgttcgtttttcgtttttgtttattggttgaggtttcgagggtgttcggagatcggagtgtagcgggattggttgtagaggttcgtgatagtggcgtttattggttgtggtagttttcgtgacgcggggtggtgattggtttcggagtttgaggggttcgggtttgttaggttttaggtaggtg

SEQ ID NO: 66 - DNA, 6179 bp, Artificial Sequence
  chemically treated genomic DNA (Homo sapiens)
tatttatttagaatttgataagttcgaattttttagatttcggagttagttattatttcgcgttacgggggttgttatagttaataggcgttattgttacgaatttttgtaattaatttcgttgtatttcggttttcgggtattttcgaggttttagttaatgggtaagagcggaaggcgggcgtagtcgttcggtttttagtttttttttttattattttttaggaggcggggagcggtcgattggttcggttttcgaaggggtaggatttgggttttaggttgggtgggcgtacgtttagtttaagttgcgggttttgggagtggagacgcggagttgcggtcgtcgttttttgggttcgtttattagttcgggtggagtttcgaggtttgcgcgtttgtgtcgtttttttcgtttcggtaatttgtttttttttagcgggtgttttgggttgtcgtggtgagatggggtcggagacggacgaaggttttataggaaattttgggaggttcgtttggtcgcggtcgggaagtggtcggatcggcgatgataagttgaggtcgtttggaagggattattcggcgggtcggtagtcggaaaggaattcggagagtgggggcggaggcgtgattaaaatgttaagtgtgttcggagggcgttgggcgatttttggagttgaaattttcgggaagggaagttgttttagggtcgcgaggtttttatttttaaaataggtattttttagttttagaattggttatttttttttgtacgtttttacgttttatttgtatttgttattaacgtggattgttttagaatggtttttagtaattttagtttattttgagttttttaaggacgggaattgttttttaattttgtatttttagtgtttgagtttgtttaaaaatgttagaaatttaatgttggaattgtaatggatgtttaaaagtatatagtaggttttgggagtggttttttataataaatttttattttttcgggagtttagaatgcgtggagaatttaaacgggtttgttttttagtgatggtcgtttttgaagcgttttttattaaaagaatttggtgaaaaatgagtaatgtgaattataagattattattaggtgattagtaatagtaggataggtatgcgttattattcgagggtgtgatttttttatgtttttgtagtagattttttaaggcggtgttattttttgtattggttgaattatatagcgttaattcggtatttttttttttttttaaaaattgagttatataggagttaaagaagagtggtgaatattttttttaagtagggttatttatttaatcgtagagaatagttttatatataaaaaaatataaattttaagttggattttttttaagtttattgttttaaagttaaataaataaaaattaatataaaaattttaaataagaggtttaattttttttattgaaaatggaggatgagatttttcgttttttttttttcgagtatttgttttagaaaatttaagtatttttttaattgttaagtatttttttaattttttgaaatgtgtataaatttatttgaggattagataggttttgttaattgtatgtttagttaggaatgtttttggattttttttttttttttttttttgaaatgttgtatatattaacggagtagtatttttttttattttttagtttttgtgagagagtaggagcgtaatttcggtgagtaatttgtttcgtgttgtaaaattatttttcgttataaagataggagaagtttgttttttttttggataaaattaattaattaatatagatggttattttaattattaagtaaagttaatgttataaatgttaggtttttttatttgaggattagttattgtttaatttgaaaacgtgtatgtaatgggtcgtatatatttggttatataaaagggtaagatttttgtttttgtaattttttagtaaattgtttgtgatgtgtattatagtttcgtttaatgtttatttagtaataaaagtgttttgtttattaacgtttgtggagaggatttttgggttgggagattttggtttttaattatatttttttaataatgtttatatttagaatgttgggatgataaagttaaggaaagtagttatttcggagtttttaaattgttttttaaaatgatggttaatgttttatatgtattttatagtgattgttaaatgtataaattgtggttttgtgagtaaattttttaaaatagaagttaattttttgtgaatattaaatgttatagtatatgtaatgttaataagaatgaaatgaatgaaaatttggttaggtaaggttaaaatataattttggagattgttttatgattgaatattttttttaagaattttagaatttttttatttatataaagggaattaaaatgtagaaagatgtggttggtgaatacgttattatatatttgtagaaagtagtttttaataaagatatggtagaaatagagttgtttgatatataatatgtgtgtttgtgttaaggaatttaaatttagaaaaattagtaagaatttttttatatttataattgttttttgagtttttatttatttattttaaaattttaaaagttgtttattatatgttagttattgtgttaggaaatgtagttgtgaaagaatatatttgaagtaaatgaatgtggtaaaaatttatgttgtatttttgaagtatataaaaatatatagtaaatttagttttatattttttttttttgttggaattattatattgtattgtaatatatttaataaatattgtgtgttattttagtatatattttatgtttttaaatattaaattttgtttgttttaatagtattatttattggataatgaaaataataatgtggatattaaatttaggtgggtaataaaaaatgattgaaaagttttttattttttttgattagtattatttatgttttattttatttttttatttttttttttttttgtttaaaagtatagattgtaagaggaattttggttgtgtgttattttagtttagtagttttaatatttatttttttttttttttttttatttgtgttttttttttgttaatttttttgatttgtgattttttgttttttaatttataatttatatttatttataatttataattaattatatatatatattgtttttaaaatagagattatgatgaggtatgtaatatggaaattatatttatttttattttatatatgttgtagtgtttgtttttagtggatatatatttttttttttttgaaaattgtttttttgaatgaatattgtttttagaggttatatttgtgtgaaattttttttaggattgttttggttttttaaattttaaatttttaaaatggtttaattattttttttattttttgaatttgtgttaggaaaatagtagagtagttggagggggagggaagaaaagaaaatgaagtagatttgaaggaagaaaatatttattttgtttttaaattagatgttaaatgtattaatattattttttaattattttttttagttagcgggtggttattttagtattttaattaatattggtttttttgtttttttgatttgttttttattaagaaatttattaatattcgtaattaagatatgttttttttaaaatgtttttggattattaaaggtttgtttttttttaagttattttttttttagatttttttttttattttttttttaaaatagagttttattgttatttaggttggagtgtagtggtgtgattttagtttattgtaattttcgttttttaggtttaggttgtttttttgtttcggtttttagggattataggtatgtgttattacgtttagttaatttttgtatttttattagagataaagttttattaagttggttaggttggtttcgaatttttgattttaagtgatttatttttttcgggtttttaaagttttgggattataggtataagttatcgtgttcggtttttttttagaattgatttgtttttttttttatttttttatttttggtttattatggttttagagttaattgaaaaatgtgtgtgtttgtgtaatagtgttgtaataatgaatttatatgtgtgatattattagaattatttgaggatttttttaaaaatagatttttagattaatttttaaagatttttatttggaaaggtaaaaaagtttaggaaagtttgtatgtttggtatgagattagtgaattatttaatatggtgtgttgaatttaggtatttatttttgttttgttttgaaaatttttgatataatataaatataggtttaggtgttttagttttttgaatagttgggattataggtatgtgttattatatttagttaatttttgtatttttattagaaacggggttttattaagttggttaggttagttttaaatttttgattttaagtgatttattttttttggttttttaaagtgtttaggtttaggtttagggatttttgagggggtatggttgagaaaagaggttgtaaataataggattgtttgatagtttgtaaaaggagtagggagattttatttgttttattaagattattttttttattaagtagttaggttaaaatattattttattataatttagagataataaggtttattttttggagttattagagaagtttagattttgaagatatagagatagttgaatattatttaggagaaaagtgtttattgtatattggggtaaagggaatatatgaaagtttatatattaaattgtgagatttattttttaagtttttataatgattgtatttaggtttttgttttttagagaagattttagaggatttttttttagggaaattgatttgtttgaggaaaagtatttttataattagtgagtattgagggtgtgggggcggggggattttttaaaatgtatagattttttgtttaattacgttaaaaataaggtttgttaatttttaaagaaatgaaaataggaggttatttttttaaagaaaaatttagagagagaaacgaattttgaaaagttaaaaaataaattaaaatttaatagtagatgataaaatgaaattgagaagttttaaaataaaaataaaaagataagtagttgaaaaatatgaggaaaaaaatgtaggattaatttaggagattaaatatttaatttatagaaagaaaaaaggagacggggagagggggtaaaattagtaaagaaagatatttttttagtattgaaggatttgagtttttagattgaaaaggatttgatgaatggtttgtaaaataatgaaaaagatttatataaaagtatttaattttaaaatgttagaatagttgagattttttaaattttttaaatgttttagataaaataatagaatgtagataaaagaatagatatgagaatagagaaaggtattggattttttaataatgatattgaaaattagaagaaaattgagtaatattttaaattttaaggagagattatttataatttagaatttttaataaaattaataattaatgaagtttaattgtagaataaaagtatttttagatatgtaagattttaaaaagttttatttttatgaaatttttttttatgaaggtatttaagggtgttttttattaaaaagagggtttaaaataagagagattgtggtaggataggtttgattagtataggtttttataataattgttttagtattgattgagtggttaagttaaatattaaaagttagtgtttttatataaaggttgaaatgtaagaaaagtttattaagagttttgtttaggttttttttgggttttagaatatgataaaaataataaaatttttaataggatttatttaggattaaataagttttattggagatttgaagaaattttttaggtttttataaataagtttattgggggtttgaaggaattttttaaatttttatgatttagtaggagataagataagggtagttattttagtatttggatttatttatattaagaaaatttattgaggttttagagaaaggttattaggatttagattttagtta

SEQ ID NO: 67 - DNA, 5377 bp, Artificial Sequence
  chemically treated genomic DNA (Homo sapiens)
gggggtgttcgttggtttttttgggttaggttgattattatggtgtttttttgtatagagatatcgggaaacggttcgaggtgcggaagatcgtgatcgcgtgtttgggcgagtttaattatattattcggttggagtacgtttaggcgcggtttattttgttttataatcgtcgtggcgatttggttatttatttggttagttttatgggtattcgttttattttgttggtagttaggtgtttgttttgtttttgttcgttttgtttagcgtcgtcgttttttatagttcgcgtgtttgtttttgttcgtttatacggtttagggggtattgagtgttatttagtggggtatttttggtattttgggagggataattttgttttgtgggattgttttatgttgtaggaatttttggtttgtaattatttaatgttagtagtgtgttttattttgtgcggtgtttgtgtatttttttagaattttttagttgagtacgtttggtttattgagaaatagttaagttagtaggtatttttggttttatggggttggtttgcgtgggggaagggtgtgtggtttatgtgttgtgggttagatgtttttggtttggggtttcgtagaggttttagggttgtgtgtatttttttttttaggttatatgattatttcgtagatgggtttaatgattgggtttttatgataatttatttttgggatgaggatttttttggcgagtgggttttagagattgaaaatattagcgaagttaataattatggtattgggggtatttgaggggtaggggtacgaggtggagggttggtaggatttcgagtattgggtgtggtgttagtattgttttaatttttgtttttttttcgttttggaatagggacgttgattaagtttattttcgtattttatggtatcgtttttgaggggttgttcgtatttttagaaagtagtggttgtaagatttttacgtttagttaggtttgtgtgggttagtagtgggtgttgttgggttttgggggtttgagtttgggggtaaggcgggtgtttgttttgaagtttagttttaatagaaaaaagttttaagagatttagggtttttggggtttttgggatgattatagttttggggttggaggattttggggatgtggtgatttggtttggggttgttgtggttttggggttatagtttgtttagttgatatatatttgtttttttttttacgtcggtagtgtgcgaggaaggtttttttttgtattagaagagttgtgtttagtattgttttttagggttcgttttttaagttttcgatacgtattatagtatcgagaatgacgtggagattattcgggttagcgtttgcgttttttgttacgttttatgtgttatatgttaggggtcggttttgatagattgttttagttgttttagttacgtttttttggattttgtggagtagatttgttttcggtaaagttagagtagtcgagagttttcgttatagtagtagttatttcggttgttttcggaggtggaggcggggtaacggttgcgggtagggttgttgtttttatatttgtttgaggtggtggtcggttttagttgcgtttttatcgtgttggttttcgttattgtttttttggttttgtagttgcgttttggttttagttttcggggggtgaaggtgtatattatggatcgtggttttattttttataaggggttgttttttgaagtttggtaggaggagtgttcgtttgatttagaagaggacgagggtcggggcgagaggatcgtttttattaaagattagagcgttttttgatgagtttattgtttatttttttaagttaattttttttttgggtattttttaatttattaaagtatttttttattttgggattgggtttggattttagttgggaggtaagaggggtggagattgttttttattttattttcgggtttatttggttatttgaggtgggtttaggattagttggggcgtggggagggtcgtattttatttttagtattttttttatgtggagaaaggagtgaaatttttagggtagtttgtttcggtttcggttttagttagagtttttgcggagtgaagaggggtagtttttgtttgttgggatttttgatttaggtcgtagtttttgtttttttttgtttttttaaagtaataatggttttatttaggtagtcgggggttggtttaggagatatttgagggaggaggttatttttttaagggtttttgtattttttattttgttttttagttttggtgagttttggcggtagtagttattataggaagggattaaggtaaggtaggtgtttttaggtgtgtacgtggtatgtggtttgtggtttgtgttttatgatttatttttgtgtttcgtgtttttattattattggttattaggttggcgtagttaaggtcgaagttttggttgaattttgtgttggtgttttgattatcgtttttttttttgtattcgtttttttcgttagggtttaagtttttgttttttgagttcgggttgtttgggttgttggtatttatagatttggagtttttgggtgggtggtggggaggggcgttggtttagtcggtttttttggttttttattcgatgttgtttttttttgtggggattttaggggttgtttgaggatatatttttattttgtgattattttattttagatgttgatgatttgtttttgtatttttaatgggggtagtagttggattatttacgtttttatatttatcgttcgttttgtttttttttggttgttttggttttgaggtgtgggggttgtagtatgttgttgaggagtgaggaatagttgagttttaagttttgaagaggcgggttagttaggcgggtttaaggaaagggggttttagtgggaggggtaggttgatatttgtgttttaagtggggttcgttatgtcgggggtttataggttattggttttttaagtgttagaggtgggtaggtggtggtattgagtttttttaatattgtgttttggtggagaaagtattgatttgttatgttttttttaaatttttttttttgacgtgttttttgtattttttttattaggataattagtttttttttatttgggagttttttttttttttttattttagttatttttggtatttagttatttgtttaggggtgttttttttttttttatttttttgttttcgtggttagttcggttggttttgtaagatgttgggttggtgtatagtgattttttttttgtaatttaaataggtttagtattgttggttttatttaatggatatgagataatgttagaggttttaaagtgattaaacgtgtagattatgtaaattaggtttagtttttagtgtggtatcgttgtttttgtatcgtagttgaggatagggggttagttaggtttatatagtggtttgtttgtttggatgtgggtttaagttagaaggttaaagttttttaaggggcgggaggatgcgttagtttttagtggaggagttggtgtttttggggtggggttggtgatttttggtttttaggagttgagtattaaatttttaaagttttggtttttagtagtgtgaagaattgggtttattgtgtttttttgggttgaagtgatttggtcgttataggttatagggttgaggtttaaggtggagggaggtttgattgaattaagatgattttttgtggggagtttgagttttaaatggaaaattttacgtttgttcgttttttaatttttgttttttgatttttttaggttttttttgggataggaagtttttgtttgggggtaggaggatggggataaaattattaggatttgtattcgagaagtagtttttgttcgggatatttatttggaaattttatttaaatggaagttggcgtttgagtttttttttagggaatttcgtgaggtggggagggttgggattagggtttttttttttttttttgcggtggttttggtttggtgttaggattgcgcgtttttttttagtattcgcggatattttgggtttttttgggtttagtatttgtttggggtttcgttttgggtttttttttttgatttttattttgcgttttttttcggtgttttcggggcgttgtcgggttttggggtttgcggggcgcgggcggtttttggttgggttattttttttcggtttttttttttttttcgttttcgtggtcgtgcggtcggttagaggttgcggtttagcgcggagtaggggggttggtaggcgtcggggcggtcgggtcggtttcgttcgtttttttttttttataggttcgtttcggggtttgggttaattgaaatcgcgggaggaggaagcgcggaattaggaattggtcggggttcgtatcgggtttgagtcggttcgaggtcgttttaggagtagttgttcgtgcgggtatttttagtttcggggtttggaggagcggtgggagttgggggcgcggtaggtaggggtagagtaggcgtttcgagggttagagatttatttaggtgggggtaggggtcgcggaagggcggggatggtcgtaggggtagggtttaggttgtgggcgtttgaggttttagttggggtaggtttggtttgtcgaggatttgggtaagggtgtttttgtaaggggtggtgggtggaagggtttggggagggaggttttaggttggtttttgttttcgaacgtgcggaggagattttgacgttaaggaagtaatgagggttagtttttaggttaggttgttgttgggtatttatggttgcgtgtgagcgaggtaggattttatttttttttcgtttgtagtttattttgattttatagtttttagttttttcgttttatgttttcgtttttagttgttgttttgtttttagggatggttttttttttgtttttagaatagtattatgggttttttttttgagttgtgtagtttttagggttacggggttttgtagtaaatgtaggaggtcgagtttcgtttattggagggtatgagaaagtggatggtttagcgggttaagagtgatagggagtatgtaggattgttttattatatgtttttgtaggatagtgggggttagagtcgggttattagttttgatagttttattagttaggtgggtttttatgggattttggtgggtgttggttgtatttgttttttttttttttttttgggggttttttggggtagtggttggagatttggtaggttaaggtttgggagttattgtgtttttttttttgttttttttatttgtgttatatagt

SEQ ID NO: 68 - DNA, 5377 bp, Artificial Sequence
  chemically treated genomic DNA (Homo sapiens)
attatatagtatagatgggggaggtagggaggggggtataatggtttttaagttttggtttgttagatttttagttattgttttagagggtttttaggagaggaaggagaaggtagatatagttagtatttattagagttttatagagatttatttgattgatggggttgttagggttgatggttcggttttggtttttattgttttgtagggatatgtggtgaagtagttttgtatattttttgttatttttgattcgttgggttatttatttttttatgttttttagtagacgaagttcggttttttgtatttgttgtaggatttcgtggttttgggggttgtatagtttagaagagaagtttatagtgttgttttggggatagaaaaggggttatttttggaggtaaggtagtagttggagacggaggtatgggacgaggaggttggggattgtagggttaggatggattgtagacggggaggaggtggggttttgtttcgtttatacgtagttatgggtatttagtagtagtttggtttggggattggtttttattgtttttttagcgttagggtttttttcgtacgttcgggaataggagttaatttggagtttttttttttaggtttttttatttattattttttatagggatatttttgtttaggttttcgataggttaagtttgttttagttgaagttttaggcgtttatagtttgagttttgtttttgcggttattttcgttttttcgcggtttttatttttatttgggtgggtttttggttttcggaacgtttgttttgtttttgtttgtcgcgtttttagtttttatcgtttttttaggtttcggggttagaggtattcgtacgggtagttgtttttgggacggtttcggatcgatttaggttcggtgcggatttcggttagtttttgatttcgcgtttttttttttcgcggttttagttggtttaggtttcggggcgggtttgtggaggggaaggggcgggcgggatcggttcgatcgtttcgacgtttgttagtttttttgtttcgcgttgggtcgtagtttttagtcggtcgtacggttacggaaacggaagggaggagggggtcgggaaagaatggtttagttaagagtcgttcgcgtttcgtaggttttagggttcggtagcgtttcgggaatatcgggaaggggcgtaaggtgggggttaggagggggagtttagggcgaggttttaggtagatgttgggtttagggaagtttagggtgttcgcgggtattgaggggaggcgcgtagttttagtattaggttagggttatcgtagaagagaaagagggaattttggttttagttttttttattttacggaattttttaaggagaggtttaggcgttagtttttatttgaataaaatttttaagtaaatatttcgaatagagattgtttttcggatatagattttagtggttttgtttttatttttttatttttaggtaggggttttttgttttaagggagatttggggaaattaaggggtaggggttggggagcggataggcgtggagttttttatttgggatttaggttttttataagaagttattttgatttagttaggtttttttttattttaggttttagttttatagtttgtggcgattagattattttagtttaggaagatataataggtttagttttttatattgttggaaattaggattttgggagtttagtgtttagtttttgaggattaggggttattagttttattttaggggtattagtttttttattaggggttggcgtattttttcgttttttggaggattttggttttttgatttgggtttatatttaggtaggtaggttattgtgtaggtttaattggttttttatttttagttgcgatgtaggagtaacggtattatattggagattgggtttggtttgtatagtttgtacgtttaattattttaaaatttttaatattattttatgtttattaaatagaattagtaatgttgggtttgtttaaattataagaaaaaaattattgtgtattaatttagtattttataaaattagtcgggttggttacgagggtagggggatgggagaggagggggtatttttgggtagatggttgggtattaggaatggttagggtagaaaagaaaaggggatttttagatgggaggggattgattgttttaatgggaggggtgtaaaaggtacgttagaagaggaggtttgaggggggtatgataggttagtgttttttttattagggtatagtgttgggggggtttagtgttattatttgtttatttttggtatttggagagttagtgatttatgaattttcggtatggcgagttttatttgaaatatagatgttagtttgttttttttattgggattttttttttttgagttcgtttggttggttcgtttttttaggatttggggtttaattattttttattttttagtaatatgttgtagtttttatattttagggttagggtagttagggaggagtagggcggacggtgggtgtgagaacgtgggtagtttagttgttatttttattaaaaatataaaaataaattattagtatttaaagtgaaataattataaagtgaaaatatatttttaaatagtttttgaagtttttataggggaaagtagtatcgggtgggaggttagagaggtcggttgggttagcgtttttttttattatttatttaggggttttaggtttgtgagtgttaatagtttaggtagttcgggtttagaaaatagggatttgggttttgacgggagaggcgggtgtaagagaggggacggtggttaggatattagtatagggtttagttagagtttcggttttggttgcgttagtttggtggttagtggtggtggaggtacggagtataggggtgggttatgggatataggttataggttatatgttacgtgtatatttggaggtatttgttttgttttggtttttttttatgatggttgttgtcgttaagatttattagagttgggggatagggtggagggtgtagaagtttttggagaggtggtttttttttttagatattttttaggttagttttcgattgtttggatgggattattattgttttagagggatagggaagggtaagagttgcggtttgggttaggaattttaataagtaagggttgtttttttttatttcgtaggaattttggttggggtcggggtcggggtaagttgttttaaaggttttatttttttttttatatggaaggggtgttgagggtggggtacggttttttttacgttttagttggttttgggtttattttaggtggttaggtgggttcgagggtaggatgggaagtagtttttattttttttgttttttagttggggtttaaatttagttttaagataaaaaaatattttggtgaattaaaaagtgtttaaggaggggattggtttgagggggtgggtagtgggtttattagagggcgttttggtttttgataaaggcggttttttcgtttcggttttcgtttttttttgagttagacgggtattttttttgttaggttttagggggtagttttttgtaggagatgaggttacggtttatggtgtatatttttatttttcgaaaattaaagttagagcgtagttgtaggattaggaagatagtgacgaagattagtacgatgaaggcgtagttgaggtcggttattattttaggtaggtgtgagggtagtagttttgttcgtagtcgttgtttcgtttttattttcgggggtagtcgaggtggttgttgttgtggcggggattttcggttgttttggttttgtcgggagtaagtttgttttatagggtttaaggaggcgtggttggggtagttgaggtagtttgttagggtcggtttttggtatgtggtatatgaggcgtggtagggggcgtagacgttggttcggatggtttttacgttattttcggtgttatagtgcgtatcgaggatttggggggcgaattttggagggtagtgttggatatagtttttttggtgtagggagaagtttttttcgtatattgtcggcgtgggagagagggtaagtgtgtgttagttaaatagattgtagttttaggattatagtagttttaagttaagttattatatttttaggattttttagttttaggattgtggttattttaagagttttaggggttttaggttttttgagatttttttttgttagagttgggttttaggataggtattcgttttatttttagatttaggtttttaaagtttaatagtatttattattgatttatataggtttgattggacgtgagggttttgtagttattgttttttggaggtacgggtagttttttaggggcggtgttatagagtacgagggtgaatttggttagcgtttttgttttagagcggggaggaggtaagagttaagatagtgttggtattatatttagtgttcgagattttgttagttttttatttcgtatttttattttttaagtgtttttagtattatagttgttggtttcgttggtgtttttaatttttaggatttattcgttagagggatttttattttaggaatgagttgttatgaaggtttagttattaaatttatttgcggagtagttatgtggtttggggaggggagtgtatatagttttgaggtttttgcgggattttaagttagggatatttaatttatagtatatgggttatatattttttttttacgtagattaattttatggggttagaagtgtttgttggtttggttgttttttagtgagttagacgtgtttaattgggggattttagaaaggtatataggtatcgtataaggtggggtatattattgatattaaatggttgtaagttagggatttttgtaatatgggatagttttataggataaaattgttttttttaaaatgttaagagtgttttattgagtagtatttagtgttttttgggtcgtgtgagcgagtaaaggtaagtacgcgggttgtgagaggcggcggcgttgggtagggcgggtagggatagagtaagtatttggttgttagtagggtggagcgggtgtttatggggttgattaggtggatggttaggtcgttacggcgattataggatagggtgagtcgcgtttgagcgtgttttagtcgagtgatgtggttgggttcgtttaggtacgcggttacggtttttcgtatttcgagtcgtttttcgatgtttttgtgtaggagagtattatgatggttagtttggtttagagggattagcgggtattttt

SEQ ID NO: 69 - DNA, 6379 bp, Artificial Sequence
  chemically treated genomic DNA (Homo sapiens)
tagcgttaggagataggaagttatgttgagagatatagttatatggggtttagattgaagggatagattaagaagtattttaacgtaagaagatgattgttagtgtggagaggagaattttttttttagaaaattttgtaaatatttggtgattaattagattataaagttgcgtgtttaggggttttttttttttttattgtaggggtttttgggagtggggtagggtttttagtttgaatttaagttaggatttagatatatatagataatgtagataggtcggttttagtagaagtgtatttgtttgaggggttgaggggtttttagaaaaataatttatatggaaggaaatgggaattttatttgattagtttaatttataataagattgagttttttgtagggtaaggagtttgaaaagaattttaaattagtagattgttagggtatgagtagtattggttaggtatttttttaataggtataatatgaagacggggattaaggtattttttttggttttgaaatagaatataaagtagttttggttttttgagggttttaggtgttgagttatagtgagaaagggaatattttcgggttgtttagtaggaggtggaaaggttggagaatagggagatttacgtaggtgtttggtaatgtgtttaggtagaagtagttatatgttcgtgaatatatgtgagatatgttttgaaattgtagaaatattttgggggtggtttgtagtggggtgaagttttatatgagttggaagaagtaagaattagggaaatgtggattataattgttaatggtttttattgtgtaagtgggtgaggtttgggaaaagttgagttttattaggaaagtataaagtttaggtttttttagggaatagttagtaagataatggttgttttgtttttgcggaagtttaatttggatattgttgattagttgaaattgttttttttgaatttttttttatgtagtaagtttatgagttgtaaatgtttttttttgtttaggtttagggtaggaattttttttcgatttttatttttatatatgtttattttatgtcgattaaattttgtgagtaatttttattattaaaaaaattagggataggtgtagagttgtttgtttgagtaagatggggaggagatatagggaggttttaaggtcgttgtgttaagtttatataaagatagattttgagataaaagagataaagatattaagtataaatagttattttgttttttattttattattttttatattttttaaattatttatagaaaaaggtaaatgttagttttttaaaattaaatgtaaaaagtataagtaagtatagttttttataatttacgtggatgaggtttatttgagttttatgtgtttttttttttggttatttattaggtatttgattttgattatgtaatatatagtagttatagagagtaattatttgatgtgacggagggagttttgttatgtagatgatgcggaaggttggtgtggttaagtattgttaaatttgataaatttgtattttgtggtattttttttggggataaggattttgttgtgggaggagatagatattaacgtatttttttatttatttttattggattttggtttatttagcgagagtgattgataatttttaaaggttgttggttaattatttgtaagaggggtttatggagagaggttttttttatttgttatttttttttttattattttatatttataggggtttttaagttttaagagaagggttaagtgtaaatttggtaagttaagaagatttagtagttgttaatttaattagtttttaggaaaaatatatggttatatgagtatagtaaagttgttatagagataggtaggggaggtatatttagaatagggttttatcgtattattcgataaaaataagatttaggttttttaatagtatgaattatttaagttttaaatttaataggggacgatattaaggtttttattggtttttagaatatttgaggaatttgggttgtttgtttttgtatatgttagtagttattataatatatgttgtggcggatggtaatgaagaattggaagtttacgtgttttttttatatcgtgagatgagagatggttttttttattttgggtttgttttttttaattgggtgagagatttttaatgtgttttagggaaatttttgggaaatagttatattgcgttttgtattggttagttgtatgtattattgttagttattgtaataattttaggaagtaatgatattattttgtagatgataaaataagtttagagaggtttagaatttttttaaggttatatagttattaaatggtggagttgagatttaaatttaggtgtttttattttaaagtttattgttttatgagatattaattagaatttttgtatagagaggaatttaggaagagatgaatttaaggagcgttattatttttattggtatatgatatggattttgttatagtttaattttttttttaaggtagttttaaagtggatgggttttaagaaattttatagagattttgagttttgttggtgagtattttttcgattatttaaggtaagtgttaattttagattgatttttttttattatttaatatgtttttggattgttttttttttaagtgaggattattagtataattaatataagattttaaataatattattgagaaagtgtttttattgtttttgtatttatgaaagtttaattatatgaaatttagttggaaatttaaagtgaagttttttttgttgataattttgttttcggattatttatgaattttttattttgtagaaggatttttaaaaatagttttttaataaaggtttatatagtagatttaatttgagtttataaggtattatttttttttatgggaaatggtagtgttggtgatgatgagattgggtatgggataacggtagtggaagggagaggaagttaatggggaagttagggggtcgtggtgatagtaggaataagtggtgtttatgtttttttttatttagtttattagttgagggtaaagatagatatttgggttttataggattttagaaggtatgtttagggtaatattaaatatatggtttgatagaaatttgaattaaagtatcgaatttagtgaacgaggtagaagggtagagagaaggtaggtagaagttatagattagaggttgggatttagggtatagtagaaggtttagaattagagggaaggcggtggtgttttagtagagtttttgggttatggaatttattttaggagtttttttaggttgtttgtagtttgtaatgtgggtgtagagtgtggttaagggagttgtttgttgggattagttttattgtttaggatatttaaatttatttgtatgttattgttattattttatatatattttttttaatttcggtaaaattagtgttaatgttttattaatagattaaggtttggattgaagtataagaaataggatttttaatttaagttaatttaattttttagcgatttttgttaatttatttatttttagagacgtattaatagttttgttttatattgtatagaaatttgtgtagtgagttttttggtagttttatatttttttttttattttagttagatatgtaatttatttaaaagtaatatgggaataagataaattagtgtaggaataattttttggtagaaatatttttattagtttttgagtgtaatattagtttagtaaaagttatttgtaaatatagaagtttttatgtatattaaagatatttaagttttttttaagaaataaattattttatgttattgaaataattttgtgatgtgttattggtatttaaggagttaaatagattttatgggttagttaatttttattgtaagtattagatatgtataggttttagatttaggtatattttagaagttttggttttgttatttattagttatggtaattcgggtaggttatttattttttttaagttttaatttttttatttgtgaaatgggaataatattagttatatgttagggataaatttagggagaatggttagggggttgtgttaaaggttagatataatttttattttaggtgaatgtcgggattaggatagtgagtaggtaaattttgtttttgttttttttttttttataattttaaagttttttgaataatttttatttttattttttgagaatgtttgtgtttttttgttgaaagggtttggttttttagtgtttttttttattatgagttgtttttatgaaaagattttaagggtgatttgaggttacggttattattattataagtttttttttatttttgtttttatttattgttttttaaataaggaagttagcgttgttaggtaaagaatttttgtttaatatgggttttgggtggtttttcgtttttttttttttttgggtttttagttagttttttttttttttagagatgttttttgtttattttatttttgttttatagttggaatgatagtggtttttagaatttttggggagtgtggagggtgatgggggtttggggaggtagttaggtttaagagtaggttaatgttatagttttggataagtgagttgggcgggttgacgttagggcgatgatgggtggaggggagggtcgggttgttgaagtaattataaagataggttaaattaaatattattaattagggacggagtaagcgggcgagttagagagcgttttcgagttatggtttttatcggtcgcggtttagtttgggtttttttgtttttaattcgagtgttcgatggaggttttggttttatgttagtagtttttatttgttttttaaaaataagtttttgtcgttatgtcggagggagaaaaataagaagggcggtatttttagggttattaattttgattacgtgtttgagaggtaaggtggatggttttgggatagaaattgtttattattatgtttcggggagtaggacgtttgtagggtacgttgtgggttttcgtttttttaggtattttagtgggtatggtggtgttttcgtttgtaggtattcgtgttaataatacgttgttggattcgaggggttggggtattttgttgtttaggtttcgcgtcgggttagttggagagattgtcggggtgaattgggaaagtggttatttggtggggattaagcggtagcggaggttttattgtaacgtgggtatcggtttttatttttaggtgtttttcgacggtcggattagcgggatttacgaggagaatttttatagtgagtgttagttgtagttagtcgggacgtttgggggtttgggtttatgtagggttaaaaggtgaaggggttttgttttagcggataggatgtacgataaagggggtagaaatgttgtttattatttagatgattttacgtgattttgtttgggtgtaagtttaatatattgcggtttaagtattttggtgttttttgttatcgttttggttagatttttagtggtattaattattttagtattattggtttatttgatgttttgtaagattattaggaattattagtttgggaagtttttaaggtttgggtagggagaattagttagtatatttggattaaatttgatataagtttatttttatttagttttttttttggagaaggaagggaaatttaattgtaaaatgtttaattgaagtatatttttttttttattttagcggttttttttgtttttaggtttttattttgtaagttgtttgtaagttgttagtttgttgtatggttagttttttatttaagaaaggatgggggttgtaggatttaagaaagttattagttatggtgtggttgttgtgtttttaagattaagtgggttgagatttgttgaaatatgtagagtatatattaagaagaagaagaagaattagaatttatttttttatttaagttaaggattttaagtaattatgttattgaaagtttagatttaaagtttattttaaatagatagttaagtggttattgtagtttttaattttgttattagaatttttttttgtagaattggatttttaatagtataatggtagtattcgatgagtttagtagttagggttttttagagttagagggattatggatggggtaatggagagtttggttttttaggagaagggggatggattgagatgtttttgtcggtttaagtttttattttgatttgtataagttttaggtaatgtggtttttttttttttgttagg

SEQ ID NO: 70 - DNA, 6379 bp, Artificial Sequence
  chemically treated genomic DNA (Homo sapiens)
tttgataaggaaaggggggttatattatttaaggtttgtgtaaattagagtgggaatttgagtcgataagggtattttagtttatttttttttttttagaaagttagattttttattgttttatttatgatttttttaattttaggagattttggttgttggatttatcgagtgttgttattgtgttgttagaaatttagttttgtaagggaaggttttgatagtagagttaggggttgtagtgattatttagttatttgtttaagatgagttttgaatttgggtttttagtgatataattatttgaggtttttgatttgagtaaaaaaataaattttgatttttttttttttttttaatgtgtattttatatgttttaataaattttaatttatttaattttgaaaatatagtagttatattatagttgatggtttttttggattttgtagtttttatttttttttggataggagattaattatatagtaagttggtagtttgtaggtagtttgtaggataagaatttggggatagagggagtcgttgaaataaaaagaaggatgtgttttagttggatattttgtaattgaattttttttttttttttaagaaagaagttgaataaaaatgagtttgtgttaaatttgatttaagtatattaattgattttttttatttaggttttgggggttttttagattaatggtttttaatggttttataaggtattagatgggttagtaatgttgaaatagttagtgttattgaggatttaattaaggcgatggtaaagaatattaggatgtttggatcgtagtatattgagtttgtatttaggtagggttacgtggaattatttaagtggtgagtagtatttttgttttttttatcgtgtattttgttcgttagagtagggtttttttattttttagttttgtatgagtttaaatttttaagcgtttcgattggttgtagttggtatttattgtaggggtttttttcgtgggtttcgttgattcggtcgtcggggagtatttggaggtgaaagtcgatgtttacgttgtagtagagttttcgttgtcgtttgatttttattaaatagttatttttttagtttatttcggtaatttttttagttagttcggcgcgagatttggatagtagggtgttttagtttttcgagtttagtagcgtgttgttggtacgggtgtttgtaggcgagggtattattatgtttattaggatgtttaggaagacgagagtttatagcgtgttttgtagacgttttgtttttcgggatatagtgatgaatagtttttgttttagggttatttattttgttttttaggtacgtggttagaattaatggttttaaaaatatcgttttttttgttttttttttttcggtatggcggtaggggtttatttttggaaggtagatgaaggttgttgatatgaaattaaagtttttatcgggtattcgggttgagagtagagggatttaggttgagtcgcggtcggtagagattatggttcggggacgttttttagttcgttcgtttgtttcgtttttagttgatgatatttgatttgatttatttttatagttgttttagtagttcggtttttttttttatttattatcgttttgacgttaattcgtttagtttatttatttagggttgtaatattaatttgtttttgggtttggttgtttttttagatttttattattttttatattttttaggggttttgggagttattgttattttaattatgaggtaggaatgaagtgagtagggagtatttttgggggaggggggagttggttgggggtttagggaaagagagaggcgagaggttatttaggatttatattgggtagaagttttttgtttggtagcgttggtttttttatttagagggtaataggtagaggtagggatgggaaaaggtttgtggtagtgatgatcgtagttttaagttatttttgagatttttttatggaaatagtttatggtggaggggaatattgaaaggttaaatttttttagtaggagggtatagatatttttagggggtggggatgggggttgtttaaggagttttaagattgtggagggaaggagggtaagggtaaggtttgtttgtttattgttttggtttcgatatttatttggggtggaagttgtgtttggtttttgatatagttttttggttattttttttggatttatttttggtatgtgattgatattatttttattttatagatgaggaagttgaggtttagagaggataaatgatttgttcgagttattatagttaataagtagtaaagttagaatttttaaggtgtgtttgagtttaaagtttgtgtatgtttaatgtttgtagtagaagttggttggtttatagagtttgtttagttttttaaatgttaatagtatattatagagttattttagtagtataaaatgatttattttttaaaaaaaatttgagtgtttttgatgtatatgagaatttttatatttgtagataatttttgttgggttgatattatatttagaaattagtaaaaatatttttgttaggaagttatttttatattgatttattttatttttatattatttttaaatagattatatgtttaattgaagtgagaaaaaaaatgtaaagttattagaaaatttattgtataaatttttatataatataagatagaattattaatacgtttttgagggtgaataagttaataagggtcgttggggaattgaattaatttgagttaaaaattttgttttttgtattttaatttaggttttaatttgttggtgagatattagtattgattttgtcgggattggagagagtatgtgtggggtgatgatagtggtatatagatggatttgagtgttttgagtagtagagttggttttagtaggtagtttttttagttatattttatatttatattgtaggttgtaggtagtttggaaaagtttttggggtgagttttatggtttaaggattttattgaggtattatcgttttttttttgattttaaattttttgttgtgttttgggttttagtttttggtttgtggtttttatttgttttttttttgtttttttgtttcgtttattgggttcgatgttttggtttaaatttttgttaagttatgtgtttagtgttgttttagatatgttttttgaaattttgtgaagtttagatgtttgtttttatttttagttggtaaattgaatggggagggatataggtattatttgtttttattgttattacggttttttgatttttttattggtttttttttttttttattgtcgttgttttatatttaattttattattattagtattgttattttttatgaggaaagatgatgttttataggtttagattgagtttattatgtaggtttttgttggaaaattgtttttaaaaatttttttgtaaagtaaaaggtttatgaataattcgaagataaagttgttaataaaaagaattttattttggatttttagttgggttttatatagttaagtttttatggatgtaagagtagtggggatatttttttagtgatgttgtttggaattttgtgttaattatgttggtggtttttatttagggaagagatagtttagaaatatgttggatggtaaggagaagttagtttgaagttaatatttgttttggataatcggagaggtgtttattagtagagtttagaatttttgtggaattttttggaatttatttattttgggattgttttaggagagagattaaattataataaggtttatgttatatattaataaaaatggtaacgttttttagatttatttttttttggatttttttttgtgtagaggttttggttgatgttttataaagtaatgggttttggaatggggatatttggatttgaattttaattttattatttagtagttgtgtgattttaggaaagttttggatttttttgagtttattttgttatttgtaaaatgatattattattttttaaggttgttatagtgattagtaataatatatataattggttagtgtagagcgtagtatagttattttttagaaatttttttgaaatatattgaaaattttttatttaattaaagaggataaatttaaagtgagaaagattattttttattttacggtgtgggagagatacgtgggtttttagttttttattgttattcgttatagtatatgttgtgatggttgttaatatatgtagaagtaggtagtttagattttttaaatgttttgaaaattagtgagagttttggtgtcgttttttgttaaatttaaaatttaagtaatttatgttattaaaaagtttgggttttatttttatcgggtgatgcgatgaggttttgttttgaatgtattttttttgtttgtttttatagtaattttattgtgtttatatagttatatattttttttgaaggttaattaggttgataattgttaggtttttttggtttattagatttgtatttgattttttttttggggtttagggatttttatggatgtgaagtgatagagaaaagagtaataggtggaagaggtttttttttatggattttttttgtaaatagttggttaatagtttttggggattgttaattattttcgttggatgagttaagatttagtggaggtgagtgggaaaatacgttaatgtttatttttttttataatagggtttttgtttttaagggggatattataaaatatagatttgttagatttggtaatgtttagttatattaatttttcgtattatttgtatggtagaatttttttcgttatattaggtggttgttttttgtgattgttgtgtgttatataattaggattaaatgtttgatgggtgattaaaagggaaagtatataaaatttagatgagttttatttacgtagattgtgaaaagttgtgtttatttgtattttttatatttggttttgaaaaattagtatttgtttttttttatagataatttggaaaatgtggaaaatgataaggtggaaaataaaatagttgtttgtgtttagtgtttttgttttttttgttttaaagtttgtttttgtgtgagtttggtatagcggttttgaagtttttttgtattttttttttattttgtttagataggtagttttgtatttatttttggtttttttagtggtagagattgtttataggatttaatcggtatgagatggatatgtgtagagatgaggatcgaggaaggatttttgttttaggtttgagtaaagagggatatttgtagtttataaatttgttatatgagggagaatttaagagaaatagttttaattgattaatagtgtttaggttggattttcgtaaagataaggtagttattattttgttagttattttttggggaaatttaaattttgtatttttttagtagaatttaattttttttaggttttatttatttatatagtgggagttattaatagttataatttatatttttttagtttttgttttttttaatttatgtggaattttattttattataaattatttttaagatatttttgtagttttagagtatgttttatatatgtttacgagtatgtgattgtttttgtttgggtatattgttaggtatttgcgtggatttttttgttttttagtttttttattttttgttgggtagttcgggggtgtttttttttttattatagtttagtatttgaagtttttaaggagttagaattgttttatgttttgttttaaagttaggaagaatattttagttttcgtttttatgttatatttattaaggaaatatttggttagtattatttatgttttggtaatttgttgatttgaagttttttttagattttttgttttgtaaaggatttagttttgttatgggttaagttgattaggtgggatttttatttttttttatgtggattatttttttggaggttttttaattttttagataaatatatttttgttggggtcggtttatttgtattgtttatatgtgtttgaattttggtttgagtttagattggagattttgttttatttttagagatttttataatggggagggaaggagtttttgaatacgtagttttgtggtttggttggttattaagtatttgtagagttttttgggagaaagatttttttttttatattagtagttatttttttgcgttaaagtgttttttgatttatttttttaatttgagttttatgtggttgtgttttttagtatgattttttattttttagcgttg

SEQ ID NO: 71 - DNA, 5919 bp, Artificial Sequence
  chemically treated genomic DNA (Homo sapiens)
tttttttttttgtttttttttattttttttttttttttgataaaatagtatgaatatggttatatgtagtgtggtttttttttgttttgggttatgtagatgttatattttgtgttttatattttttgacgttttagtatattggtttttagagagttaggtttggttagggttttggtttgtattaagtttggaagtgataagatttaagagttgtttatttttgtttgttgacgatacggttagttttgttagggttttttttgagtttatagagttttttttttagatgttgatagttttttttttttagttatattgggtatgtagaatttagggattttttttatttgatatagatatgttgtggtaatatatacgtgggtattattggaagtggtaatattgtatttgtgtgtgaatatgagagattgtataagtttatgtttttttatagaggagagttttatgtgggtttatgttatcggagagggttgtgtatatttgtgtgtgtgtgtgtgtgtgtgtgtgtgtgtgtgtgtgtgtatttttatatggggggtggggggatagtgtgggggtattcgtatttgtgtatgttagtaggaatggttgtatttgtttgtatttgtgataggtaatggagagaaatgtttgaaagtttagattttggagttaaatattaggatatattatgtttgtggtttttttttttgagatagagttttattatgttgtttaggttggagtatagtggtatgattatagtttattgtagtttttattttttggttttgagtggtttttttgttttagtttttcgaggtacgtgttattatgttaagttaatttttggagtttttttggtttttttttgttttttttttttttgagatagagttttattgttatttaggttggagtgtagtgataggcgtaagttatcgtgtttggttaatttttgtattttttgtagagatgggatttgttatattgtttaggttggtttcgaatttttggatttaagtaatttttttgttttggttttttaaagttttgggattatagatatgagttattgtgattggttaattttgggtaggtttttaaatttttttgtgttttagttgttttattagtaataataatatttaggttaggtgtagtggtttatttttgtaattttaatattttgggaggttaaggtaggtggattatttgaggttaggaatttaagattagtttggttaatatagtgaaaatttatcgttattaaaaatatagaaattagtttggtatggtgttgggtgtttgtaattttagttatttaggaggttgaggtaagagaatggtttgaatttaggaggcggaggttgtagtgagttgagattatgttattgtattttagtttgggtgataagagtgaaatttttttttaaaataaataaattaataataataatattatttaaattatagggttgtgtggataaaatgagataatataggtaaagtgtttaatgtagtggttagcgtatatagtaagcgttataaattttgtatttgttatttttttatagaggatgtgtgtgtgtgtgtgtgtgtgtgtgtgtgtttatgtgtatgtatatttatgtgtagacggatgagggttggaggtgtgtgtatatggggtgtgtgtatattagaagatgtttgtgttaggaatttgtgtagaggagtttggagtttgtgtatgaggtagttgaggtaatgtgttaattgagaaggggtttgaagggttgtgtggatttgggtattagtatggtgcgttatttgaggtgtgtatgtgtgtttttttgtgagaaggttttatttttatttttggtttttttgttttttttttaaaatagagatagggttttattttgttttttaggttggagtgtagcggtgtaattatagtttttgtagtttcgaatttttaggtttaagtaatttttttattttagtttttcgagtagttgggattataggtgggtgttattaggattggttaattaaaaaaagatttttttttatagagacggggtgtttttatgttgtttaggttggttttaagtttttgggtttaagtaattattttgtttcggtttattaaagttttgggatagtaggtgtgaattattgtgttcggttttatttttgtttttgtattagttttatttttttttttattagtttttgaaatttttttcgttgggttttggatggtttttagttttttatttttattttttgttttggttttaattagttttgtagtattttggggcgttttagatatagtggttttattttagggaggggtttcggggtaaaggttttaggtagggtttagtgaataggggttattttagggtaggttttttattatagttcgttttatagtttattatatgggtgtgatgtttttatttttatttaatatatatatgagagattatttagagtaaagggtgagaggggtaggtggggttagggtggagattaaagtattgatgtgacggaattattagttaggtaattggatttggtggatttaggaagattttttggaagaggtgagtggtgttaggtagaaaggataggatttagagagaagaggaagagaatatttgtaaggatgattggattggggatcgagagagagaagttgggggtttttttttttaggattttggggtttttttggggtaaattagggtttataaggttggttttattttaaattttttatttttatattttaggaaattaagtttttttattagtcggtttttttttgagtgttgtaatggtaatgtttttggtagggtgtgggggatttttgtttaatgattttttgttttgttgtttagaggatatcgttgttagaaaagggttggtttattgtggggttttttaaggtattttggtagttttagtttttgatttggttttttttttggtatggggataggaggagagtttcggaggtaggtatttatttttatttagttattatatggaattttagggtggttgggagtatagtagggtttagaggaaggattgttttttgtttgtttgtttgtttgtttttgagatggagttttgttttgttattcgggttggagtgtagtggtgcgatttcggtttattgtaagttttattttttaggtttaagtgattttgttgtttcggttttttaagtagttgggattataggcgtttatttttacgtttggttaatttttgtatttttagtagagacggggttttattatattggttaggttggtttcgaatttttgattttgtgatttatttatttcggttttttaaagtgttgggattataggcgtgagttattgcgtttggtcggaagaattggtttttaggagatggtgattggggattgtgagggagttgagtatggtttgatagaaattttgttagagagatgattataatgtttaaaattatgtgtgtttgagtgtgttcgtttgttaatttggtaggtattttatgtatatgtgtatgtgtatgtgtgtgtgttattgtgagtttgggtttgttagagtttgtattggcgtgtgatggggttggtacgtatatttatgtaaatatatgttgtgagtgttattgtgtgattgtgttggtgggttaggtgagtatgagtgtgaaagagagttggtgtgggtggtttgttttatgtgacgggggttgtgtaagtgtgttaggggtgataggaaggaaagtgaaggtagaagttatgttggggtagagtttaggttttttggttttttgaagagggtaggagttgggtagttgttgatagaaatattggtagagattttattttttttgtttttttgttttatttttaggtttttgattttttttaaggattatgtcgtagttttattgatttaggagtaggggtttaaggggtgagtggggtagattgagggtttttagggttaggaaatagggtgggggtggtttttttgaattttataattttttatagttttttttttttataaggattttgttgttaggtaacggatgggggagttagaatgaggtagtttgagaggttgaaggttggatttacgataggaaatggttttgatttttttttgtagtgattttttaggtgtagatatatagttttatatatatttatatataaatatgcgtagatatatagatatatatgtagagatatatatatttagagataggtatattgtttttatatagagataggtgtatatttatagatatatagatatagagatatttatttatatagataggtatatatatatttatatagaaatatatgtatataaatacggttttatagatatatatatatgtagttaaatatatatatagagatttttatatattttcgtatatatataaatttgtatatatagatagatatttataaagagttgtatatatatgtatatttatataggtaaatttatttatatttagagatatataaagacgtatatgtataagtatattgaaagagttatagaaatataatatattaaagtaataggatttaatttgagtaatatagtaagattttgtttttattaaaaattaaataaattagttaggggtattggtacgtatttgtatagttttagtttttgggaggttgagattagaggattatttgagtttaggagattaaggttgtagtaagttatgattgtgttattgtattttagtttgggtaatagagtgagattttgttttaaaataaaataaaaaaagtaaagtaataggaggtaaaaatatgtaaataagtatagtaatattttaatgtagaaagttagttttagagatatagatatgagttaatgggaagagaagtattgaggggggatatattgtgaggtagattgaacggtatagtaggtggtttagtttcgtttttattttttatagggaggattttaatttaggtttaagagggaaagttacgtgtttgtatgagcgtatgagtatgtgtatgcgcgtgtgtgtatagggtggtgtatttggtaggggtttttgagtgaggtatgttttattttgtagtagggaatttggaatgggttgtgtgttttgtaagaaattggagtcggtggttacggttaaggaggatgttggtttggaaggggattttagaagttacggggtagtagattattatgggtttgattttattaaggttcggtttgtatttttatttgtttatatttttaattatagtaatttttttttttaggttattaattttggtttttttgatagtggtattattaggggtgtgttaggtgagtttaaggggtcggaggtaggagttgtttggattttgggagaaattgagggaagaagaagagatgcgaatttgtttttaggagtttttaggaggatgtggtagatataatttcgtttttaagattatatgggttgagggagtttgtatagtttttttattagaaattatagtttgtaggggagggttaagaagttttatttttagtttgagaggggtaggattttgtgatagatgtaagtgataaagagaaattttttgtttttttaggtgttattttttagatgggaagtttttttggtggggaagaggaggagtgggtaataaggggattttttatggtgggaggaatgggtttgaagttgtgtgttttaagttgtggagattaaattagaaattttttggattttaaaggtttttgggaattagagtattaaaggagtggggaggtgtagtatttggttggggaataggaatttggggtgtagtttttttggtgtttttgttttatgttttattttgttgagtagttttgattttgtagg

SEQ ID NO: 72 - DNA, 5919 bp, Artificial Sequence
  chemically treated genomic DNA (Homo sapiens)
tttgtagagttagggttatttagtagggtagggtatggggtagaagtattaagggggttgtattttaaatttttgttttttagttaggtgttgtatttttttatttttttagtgttttggtttttaaaggtttttggggtttaaggaatttttgatttggtttttatagtttaggatatataattttaagtttattttttttattatggaggatttttttgttgtttatttttttttttttttattaagaagattttttatttgggaagtggtatttaaaagggtaagaagtttttttttgttatttgtatttgttataggattttgttttttttagattgggagtagagttttttgatttttttttgtagattgtggtttttgatgggagggttgtatagatttttttagtttatgtgattttgaaagcggggttgtatttgttatatttttttggaggtttttaagggtaagttcgtatttttttttttttttttagttttttttaggatttaggtagtttttgttttcgattttttggatttatttgatatatttttgatggtgttattattaaggaagttagggttgatggtttgagaggagaagttgttgtagttggggatgtgggtaaatgaggatgtaggtcgggttttagtggggttaggtttatagtggtttgttgtttcgtagtttttgaagtttttttttaggttagtattttttttggtcgtggttatcggttttaattttttgtagaatatatagtttattttaggttttttgttatagaatggggtatgttttatttaaggatttttgttaggtgtattattttgtgtatatacgcgtatgtatatgtttatacgtttatataggtacgtggtttttttttttgggtttagattggggttttttttgtaagggataaaggcggaattgggttatttattgtatcgtttagtttgttttatagtatgtttttttttagtgtttttttttttattggtttatgtttatatttttggggttggttttttatattgggatattgttatgtttatttgtatatttttgttttttattgttttgttttttttgttttgttttgagataagattttattttgttgtttaggttggagtgtagtggtataattatagtttgttgtagttttgattttttgggtttaagtgattttttggttttagttttttaagaattgggattatataggtgcgtgttagtatttttggttaatttgtttgatttttagtagagataaggttttgttatattgtttaggttgggttttattgttttgatatgttgtgtttttgtgatttttttagtgtgtttgtatatgtgcgtttttgtgtgtttttaagtatgggtgagtttgtttgtgtgggtatgtatgtgtgtgtagttttttgtggatgtttgtttgtgtgtgtaggtttgtgtgtatacgagagtgtataaaagtttttgtgtatgtgtttggttgtatgtgtatatgtttgtaagatcgtgtttgtgtgtatgtgtttttgtgtgagtatgtgtgtgtttgtttgtgtgagtgggtgtttttgtgtttgtgtgtttatgaatgtgtatttatttttgtgtgggagtagtgtgtttgtttttggatgtgtgtatttttgtatgtatgtttatatatttgcgtatgtttgtgtgtgagtgtgtgtgaggttgtgtgtttgtatttggagagttattgtagagggggattaaggttattttttgtcgtgggtttagtttttagttttttaagttgttttattttggtttttttattcgttatttagtaatagggtttttgtaggaggaggaggttgtgaggagttgtggggtttaggaaggttatttttattttgttttttgattttgaaagtttttagtttattttatttattttttaggtttttatttttgggttagtggggttgcggtatgatttttgggaggggttagagatttgagggtgagatagaaggataaggaagatgaagtttttgttaatgtttttgttagtagttgtttagtttttgttttttttaggaagttagaaggtttgggttttgttttagtatgatttttgtttttatttttttttttattatttttggtatatttatataattttcgttatatagggtaaattatttatattagtttttttttatatttatatttatttgatttattagtatagttatataataatatttatagtatatatttgtatgagtgtgcgtgttaattttattatacgttaatataggttttaataagtttaagtttataatagtatatatatatatatatgtatatatatatggggtgtttgttaggttaatagacgaatatatttagatatatatgattttgaatattataattatttttttaataggatttttattaagttatgtttagtttttttatagtttttagttattattttttaaaaattagttttttcggttaggcgtagtggtttacgtttataattttagtattttgggagatcgaggtgagtggattataaggttaggagttcgagattagtttggttaatatggtgaaatttcgtttttattaaaaatataaaaattagttagacgtggaggtgggcgtttgtagttttagttatttgggaggtcgaggtagtagaattatttgaatttgggaggtggagtttgtagtgagtcgagatcgtattattgtattttagttcgggtgatagagtaagattttattttaaaaataaataaataaataaataaaaaatagttttttttttgaattttgttgtgtttttagttattttagggttttatgtggtggttgagtgagagtggatatttattttcggagttttttttttatttttatattagagaaaggattaggttagaagttggggttattagagtattttgggaagttttataatgagttaatttttttttggtagcggtattttttgagtaatagggtaggaggttattgagtaagggttttttatattttgttagaaatattgttattgtaatatttagagaggaatcgattggtgagagggtttggttttttaagatgtgagaatggagagtttagggtggggttaattttgtgaattttgatttgttttagaggggttttaaggttttagaagaaagggtttttagtttttttttttcgatttttagtttagttatttttatagatatttttttttttttttttttgggttttattttttttatttagtattatttattttttttagaaagtttttttggatttattaggtttagttgtttggttgatggtttcgttatattagtgttttggtttttattttagttttatttgttttttttattttttgttttaagtgattttttatgtgtgtattgggtgggggtgggggtattatatttatgtggtgaattgtggggcgggttgtggtgagaagtttgttttaaaatagtttttgtttattgggttttgtttgagatttttgtttcgggatttttttttgggatgaaattattgtgtttaaaacgttttaggatgttatagggttagttagagttagggtagaaaatagaggtggaggattggaagttatttagggtttagcgggagggattttaggaattggtgaaaagagagatggggttgatataaaaataagggtgaggtcgggtatagtggtttatatttgttattttaggattttggtaggtcgaggtaggatgattgtttgagtttaggagtttgagattagtttgagtaatatagggatatttcgtttttataaaaaaaaatttttttttaattagttagttttgatggtatttatttgtagttttagttattcgggaggttgaggtgggaggattgtttaagtttgggagttcgaggttgtaggagttgtgattgtatcgttgtattttagtttgggagatagagtaagattttgtttttattttaaaaagaaaatagaaaaattaagggtgagaataaagtttttttataggaagatatatatatatattttaaatggcgtattatgttgatatttagatttatatagttttttagatttttttttagttggtatattattttagttgttttatgtataggttttaggtttttttgtatagatttttagtataaatattttttagtgtatatatattttatatatatatatttttagtttttattcgtttgtatatagatgtgtatgtatatgaatatatatatatatatatatatatatatatattttttataaaagaatagtaaatataaaatttatagcgtttattatatgcgttggttattgtattaagtattttatttatattattttattttatttatataattttatgatttaagtagtattattattattaatttatttattttgagagggagttttatttttgttatttaggttggagtgtaatggtatgattttagtttattgtaattttcgttttttgggtttaagttatttttttgttttagttttttgagtagttgggattataggtatttaatattatgttaggttaatttttgtatttttagtagcgatgggtttttattatgttggttaggttggttttgaatttttgattttaagtgatttatttgttttggttttttaaagtgttgggattataggggtgagttattgtatttggtttaagtattattattattgatgaggtaattgaagtatagagaggtttggaaatttgtttagggttggttagttatagtggtttatatttgtaattttagaattttgggaagttaaggtaagaggattgtttgggtttaggaattcgagattaatttgggtaatatggtaaattttatttttataaaaaatataaaaattggttaggtacggtggtttacgtttgttattgtattttagtttgagtgatagtgaagttttgttttaaaaaaaaaaaaaataaaaaaaaattaaaaaaattttaaaaattagtttggtatggtggtacgtgtttcgagaggttgaggtaggaggattatttaagattaggagatagaggttgtagtgagttatgattatgttattgtattttagtttgggtagtatagtgaaattttgttttaaaaaagaaggttatagatatgatgtattttggtgtttggttttagaatttgagtttttaagtatttttttttattgtttattatagatatagatagatgtagttatttttgttagtatgtataaatgcggatgtttttatattgtttttttattttttatgtagggatatatatatatatatatatatatatatatatatatatatatagatatatatagtttttttcggtgatatggatttatatagagtttttttttataggagaatatagatttatataattttttatgtttatatatagatataatattgttatttttaataatatttacgtatatattgttataatatatttatattagatggaggggatttttgaattttgtatgtttagtatggttggaagggagagattattagtatttgagaaggaagttttgtgggtttaggaagagttttggtaggattgatcgtgtcgttagtaggtagaggtaggtagtttttgggttttattatttttaaatttgatgtagattaaagttttggttaggtttggttttttggggattagtatgttgaggcgttaggggatgtagggtatagggtatgatatttgtatggtttaaggtagggaggggttatattgtatgtagttatgtttatgttgttttgttagaggaaagaaagagatggggaaagatagaaaaaggag

SEQ ID NO: 73 - DNA, 6316 bp, Artificial Sequence
  chemically treated genomic DNA (Homo sapiens)
atgtattatgttacgagttgtttttttcgattgtttagttaggttattgttggattaagttggtagggttttaagtaaagtagggatattgatgagcgtgtatgtgcgtgtgtatatttgattaaaaatattttagtgttaaattaagattattttggaattatttataatgtagaaattggaatgtttagtaagaggataatagtttgcggttattagttataatagttatgaaggttttatagaaatatggaaagataaaagtcgtttgtatggaaaaggttcgaatgaaatatattatagtgattatagtggttttgttgagatgatggaattatgatttattttttagattttttttttttttaatttttttaaaatgttatatttaatgattatgagtgtattaaaagtaataaaataggaaaaagagtaaggagaagagttaatggttggtagttaagtgttgagatataattgattttaggtaagatagtagtgatattgattagaggaggtttttagagattattttaattggttattttttttttaggttttatttgtttttttgatttgtcgttttttttgttttatgtttttttaattattttagtttggtttttttgttttttttttttttaatttttttagtatgtttttaataaaatgtatttgttttatttttttttgttaggattattaattatttttaaataatgatatggtaaatgtgaatgagttaatatgtagttttttttggtgaatatatagttagagataatgatataaaggaataatttgagtttttttttggtttgtttaatttttatagatttttatttttatttatttatttatttatttatttatttatttatttagttttgtttttgttagtgattttgatgatgatttagaaggtacgtttatcgtatttgtggattatttgaagcgggagttatagaaagtttataggatggtagaattagagattagaaagatttcgatatgttggaaagatagattaaaataaataaaaggtttaaataatacgtttagggtttgtagtttgagttaatttaagcggcggttgtataagggtagttagatagtagtttttatgagaaagttttggggttttaattaagaataagttttggaagagtttaaggtatgaaggcgttgatagaaaaggtttttttgattttaggttttaggaatagaagtaagtttttttcgtagtagtttttgggagtagtaggaggagaattttaagtaaagttaatggcgattttataaatattagtagcgtttatttatgttcgggagaaggtagttaggagtagacgggagtatgagtagtaggaataggaggagttagggagtttaggtcgggcggttttagaggtgttattagggtagtgttgttttgttttcggtggtattggttttatttttaggagggggttgttttttttgtttttttttttacgttgttttttttatttgaacgatttttttttttcgtttttattgggtttttttataggtttttttttttgtttgaaagaaaaattatttttaggagtagggaaatgataattgtgttgtatttttaattttaagcgtgttatttgtagggatattgatatgttggatggaatttttggagcgtgttagttgaagagtgattaaagggatgtggatgttgaggttggagataagatgtttatggtataggaggtgtttttaagtgtttaataaatttttatgtggagatattggagtattgaataggaattttacgaattgattcggtagatgggttgaatggtttttaaatttagtataagatgtttaagttttttgaaaatgggggtattttagttatagtggtagttttttatagtaagatttttgagttaatggggttattagtatttgataagtaaatttatatatgtgtttgtttggtgaatttcgtagaattttttagtagagatttgggagcgtgtgttttttagattaaggagtttgaattgtttagaggatatgtattgtgaagttttttaaaatataatatagaagggttttatgagattatttggtttttgtatttaattatatatatttgtattatgtagagtatgtttatagagtgtatttttttttttgtattaagttatttaatttaagtggaaaagaaatttttgattgatttttagtgattgtggttgattagttttatgtttggtttttggaggaaggtgagagtttgggtttttttttgttttttatattggtgttttaatatttttatttagtttcgaatattaaagttgatggatttagtaatagtgtgtttttgaataggggtgagaaagaaattttaagagaatgtttgtagttgataataagagagagtgtttggttttgttaattaaataggagatgaaatgtttttttgtatgtgagtaggaagtaagtagattgtttattttaatagttttttatatttattaggcgtgttgaattttattttttttattagtattatttataaaattttttttattagtgatttagttaggagagtgttatagtttatttttatttaaaggtattattttttttggggagaggattgggagttatatatttattttttatatttaagttaaaatttgtagtatttttgagttttttgtgagaacgttaatgtaattaataaagaagttatagttaataaattgttgattttaattaaaagtaattttttaaaagagtagttgggaaatgtggaagtttatttttattgtagtatagttttaatataaattttagattcgattgtgattttattaattttaaataattgagtaatatgttaatattattgattagtattttagattataaagattgttttagttgtttattaaatatttgttttggttttatagatataatgtagatttattgttggtagtaggtttggaaagtgttgtttttttatgagttaaaaatattaaaatggtatttgaaaaaatgtattagtaaattaaatttttgtatatggtattatggattatttttttttagagttaaatgtgtgttttttttgagaagttttttttgggttttttttgttaataaatgtgtttttatttttttgagttgatggaggattaaatatttttttagtattggaatgtcggttttgtagttattttaagtgtttatttttttattatagtttaagttttttagaaggtaaagatgatggttttttattagtgtttttagttttaatttaatgtttggtttttgttgaatgttgtagaaggataatgttgatagtttttttttgaaagagggtgtgggagtgataagtagtttttaggtgagattaatagatattgtggtttcgtacgtatgttttaggttgtgttttgggttgggggattagtaaggagaaggattagttgttcgtttttagttgttttgagggatgatgttgtgggttttagaggaggtaggggtgcgggaggtagagaaaggcgttaggaagagtggtgaggagaattggaaaaatagaaagcgttggtgaagttagtaggtaagtaatgatttcggtagttttttttgtttttgaagtagaagggatttagggatagttagtggtttaggttttgcggttttaggtgtttagacgtgtattttttgtgtggagtggtcggggtttttttttggtgtgtagtttagaaatgtggtaattttgggttatttaatttttttaggcggggaggtagtttagttttttaggaagagtttttggtttcgtttaagagttattatagttttttgtattatatttttttgacgggttttaataggattattttttaaatttgcggtatttatagagataagattgggttgtttcgtgtagttaggacgattttagtttttgaggtaatggagatataattgaggaataacgtggaattagtgttatagtaaatgatttagggttttaagttaattttagtcggttgtggttagagttatttattttgagtagtaagttgttattagaaagatttttttttcgagtatttagggaataaagtttaagtgttttgcgtttttaagttgtaggagtagttttacgttttagttttttaaaggtattataatgttattttttgttttgtttttaggaagtagaagattgaggaaatgatttgggcgggtgtattaatgcggtcgaaaaagatacggatacgtttttttgggatttgagttggttcgtagtttttttaaaggtgttaagtaagcgttagttttttttaggcgttttaggtttagtgttttgtgtcgagggttttcggtgtttttttagatttttcgggatagtttgaaggggttaggagcggcgggatagcgcgggaagagtaggtaaggggagatagtcggattgcgttttagtttttcgtgttaagaatatcgtcgcggaggcgcggttagttttttttggatcggatttttcgtttttagggttaggcggcggagttttagttttgttttttttttagtttcgggcggtttttagagttgagtaagtcgggtggagggagtttgtaaggattttttgagcgcgatgggtaggaggaggggtaagggtaagagggcgcggagtaaagattttgaatttgtcggggtcgcgttttcgggttcgcgtcgttagtatttttttacgcgcgttcggtttcgggttattcgttttcgtcggttttcgttttttttcgtagtcgtagggaagcgagtttgggaggaagaagagggtaggtggggaggcggatgaggggtgggggattttttgacgttattagaaggaggtgtcggggtaggaagtgggttggggaaaggttataaatcgttttcgttttcggttgttttttatcgaggttcgcgggaggttcggagcgcgttaggcggatatttttttcggttttttttcggtagcggcggcggttcggagcgggtttcggggttcgggtgtagcggttagcgggcgtttggcggcgaggattattcggggaagtggttgttttttggttggagtcgcgagacgggcgtttagggcgcggggtcggcggcggcgaacgagaggacggattttggcggtcgggtcgttggtcgcggggagcgcgggtatcgggcgagtaggtcgcgtcgcgtttattatggttagttattgggatatcggggttttgttgtgcgcgttgtttagttgtttgttttttataggtgaggcgcggttgggggtcggggtttgaggcgggttgcgatggggcggtcggagggtagagttttcgaggttagggcggggtgtacgcggggagacgaggttgtagttcggagaagttggttacggcgagaatttgggatattagttgtagcgggtacgtttggggtcgttgcgtttttttttcgagggagcgtttcgaggagtggttggtttggattcgcgagtattagcgtttagatcgggttcgcgttggggttgttcgtttgcgataggatcgttgattttttatttagttgtcgggttggggttttattgtcgaggttttgggtattaggagtagtacgtatcgggatttgtttggtatttagagtttatttttagaggatttggggtaggtacgtagggtttttcggagtcgggagtagaggtttttgaaagtttgttaggttgttcggggttgggttgaggtcgggattttggtgatattgggtattggtcgcgatttcgcgttacgagagtgtaggaggggagtcgatttggaggggattcgtgtttgcgggggagtaggaggattttaggagagggttagcgtcggtattttatgattcgtttgagtttttaagtcggattgtttcggggaacgttcggcgagcgttcgttttttttcgtcgttttcggatcgcggggttttagtgcgttgcgtttagttattcgggtggggtttttgtcgggagtaggcgtggtgcgcggtttagttcgtgtcgcggatattagtgattttgatttataagggtagtttagggtttaaatatcgttaatttattgatttataagtttagtttttaaaattcgagcgaagagagggcgggcgattttgattaaacgatgtggtttgaggaatcgatgaggttcgttcgttatttaagttagttttcgttgggcgtttgggagacgggcggtggaatagttaggggtcgggggttttattagtagttagat

SEQ ID NO: 74 - DNA, 6316 bp, Artificial Sequence
  chemically treated genomic DNA (Homo sapiens)
gtttaattgttggtaaaattttcggtttttgattgttttatcgttcgttttttaaacgtttagcgaaggttgatttaggtggcgggcggattttatcgattttttaaattatatcgtttggttaaaatcgttcgtttttttttcgttcggattttaaaggttaggtttgtaagttagtaagttaacggtatttgggttttgggttgtttttgtgggttagggttattgatgttcgcgatacggattggatcgcgtattacgtttgttttcggtagaggttttattcgggtggttgagcgtagcgtattggggtttcgcggttcgagagcggcggggaggagcgggcgttcgtcgagcgtttttcgggatagttcggtttggggatttaagcgggttatgggatgtcggcgttggtttttttttgagatttttttgttttttcgtaggtacgagttttttttaaatcggttttttttttatattttcgtgacgcgaggtcgcggttagtgtttaatattattaaagtttcggttttagtttagtttcgggtagtttggtaggtttttaggagtttttgttttcggtttcgggggattttgcgtatttgttttaggttttttgggaatgggttttgggtgttaggtaggtttcggtgcgtgttgtttttagtgtttagggtttcggtagtgagattttaattcgatagttggataagggattagcgattttgtcgtaaacggatagttttagcgcggattcggtttgagcgttgatgttcgcgggtttaggttagttatttttcgaggcgttttttcggagaaagggcgtagcggttttaagcgtgttcgttgtaattagtgttttaggttttcgtcgtagttagttttttcgggttatagtttcgttttttcgcgtgtatttcgttttggtttcggaggttttgtttttcggtcgttttatcgtagttcgttttaggtttcggtttttagtcgcgttttatttgtgagaagtagatagttgagtagcgcgtatagtaggatttcggtgttttagtagttgattatggtgagcgcgacgcggtttgttcgttcggtgttcgcgtttttcgcggttaacgattcggtcgttagagttcgttttttcgttcgtcgtcgtcggtttcgcgttttgagcgttcgtttcgcggttttagttaggagataattattttttcgggtaattttcgtcgttaggcgttcgttggtcgttgtattcgagtttcggagttcgtttcgagtcgtcgtcgttgtcggggaggagtcgagaggagtgttcgtttggcgcgtttcgagtttttcgcggatttcgatgaagagtagtcgagggcgggggcgatttataatttttttttagtttattttttatttcggtatttttttttggtgacgttaaggggttttttattttttattcgtttttttatttattttttttttttttttaggttcgtttttttgcggttacggagaggggcgggggtcgacgagggcgggtggttcggggtcgagcgcgcgtggggaggtgttggcgacgcgggttcgggagcgcggtttcggtaggtttagggtttttgtttcgcgtttttttgtttttgtttttttttttgtttatcgcgtttaggaaatttttgtagattttttttattcggtttatttagttttgggggtcgttcgaaattggggaagggataaggttgaagtttcgtcgtttggttttaggggcggaaagttcgatttaagggaagttggtcgcgttttcgcgacggtgtttttggtacggaggattgaggcgtagttcggttgtttttttttgtttgtttttttcgcgttgtttcgtcgtttttgatttttttagattgtttcgagaagtttaggaaggtatcggagattttcggtataaggtattgaatttggagcgtttgaggggaattgacgtttgtttggtatttttgggaagattgcgaattagtttaggttttaggggagcgtgttcgtgtttttttcggtcgtattgatgtattcgtttaagttatttttttagttttttgttttttagaagtaaaataaggaataatattatgatatttttaaaaagttgaggcgtgaaattgtttttgtaatttggaagcgtagggtatttgaattttattttttaaatgttcgaaaaagaaatttttttggtggtagtttgttatttaagatgagtgattttgattataatcggttgaaattaatttgaggttttagattatttgttatgatattaattttacgttgttttttaattatgtttttattattttaaaggttgaagtcgttttggttgtacggagtagtttagttttgtttttgtaaatatcgtagatttgaaaaatagttttattggaattcgttagagggatgtaatataagggattgtgatggtttttgaacggagttagagattttttttgaaggattggattattttttcgtttaggaaggttgggtaatttaaagttgttatatttttgggttgtatattaaggagaggtttcggttattttatataggaaatgtacgtttgggtatttggagtcgtaggatttgagttattaattgtttttggattttttttgttttagaggtaaggaagattgtcggagttattgtttgtttgttggttttattagcgttttttgtttttttagttttttttattattttttttggcgtttttttttgtttttcgtatttttgttttttttaaaatttatagtattattttttagaatagttggaagcggatagttgatttttttttttgttggttttttagtttagaatatagtttgggatatacgtgcggagttatagtgtttgttggttttatttgagagttgtttgttatttttatatttttttttaaggagaagttgttagtattgtttttttgtagtatttaataggggttaggtattgggttagggttgaaaatattgatggagagttattatttttgttttttaaagggtttggattgtgataagaaggtggatatttgaagtggttgtaggatcggtattttagtgttggaggggtgtttagttttttattagtttagagaagtaaaggtatatttattggtagggaaaatttaaggagggttttttaggagagatatatatttgattttgggggaaagtggtttatagtattatgtataaaggtttaatttgttaatatatttttttaaatgttattttgatatttttaatttataaagagataatattttttaaatttgttgttagtaatgaatttatattgtgtttgtaaagttagaataggtatttgatggatagttgaaataatttttataatttaagatgttaattaatgatattaatatgttgtttaattatttaaggttagtagagttatagtcgaatttaagatttatattaaaattatgttgtagtaagggtgggtttttatattttttaattatttttttgaaaagttgtttttaattagagttagtaatttattgattatgatttttttgttagttgtattagcgtttttataaagaatttaaaaatgttataaattttagtttagatatggggaataaatgtatagtttttaattttttttttaaaagagataatatttttgaatgagaatgggttatagtatttttttaattaaattattaatgaaagaggttttatagataatattgatggagaagatggaatttaatacgtttggtgggtataaaaagttattgaagtaggtaatttgtttgttttttgtttatatataaaagaatattttattttttgtttggttagtaaaattagatatttttttttgttattagttataaatatttttttgaggttttttttttatttttatttagaagtatattgttgttaaatttattagttttaatattcgagattgaataagagtgttggagtattagtgtgagagataggagggagtttaggtttttatttttttttaaagattaagtatggagttgattagttatagttattgaggattagttaggaattttttttttatttgggttaggtagtttgatataaaaggaaaaatatattttatgggtatattttgtataatgtaaatatgtatggttgaatataagaattaaatgattttataaaatttttttgtgttatattttaaaaagttttatagtatatattttttggatagtttaggttttttggtttaaaaagtatacgtttttaaatttttgttaagaagttttgcggagtttattaggtaggtatatgtatgagtttatttattagatgttgatgattttattggtttaaaagttttgttatgggaagttattattgtggttgaaatgtttttatttttaaagaatttaaatattttgtattgggtttaaaagttatttaatttatttatcgagttaattcgtggaatttttatttaatgttttaatatttttatatgaaaatttattgaatatttaaaaatattttttgtgttatgggtattttgtttttagttttaatatttatatttttttggttattttttagttgatacgttttagaaattttatttagtatattagtgtttttgtaggtgatacgtttaggattgaaaatgtagtataattattatttttttatttttagaggtagttttttttttaggtagagagaaaagtttgtgggaaggtttagtgggagcgaggaaggaaaatcgtttaggtgggaagagtagcgtggagaaggaagtaaaggggatagtttttttttggagataaggttagtgttatcgagagtagggtagtattgttttggtggtatttttggggtcgttcggtttgggttttttggttttttttgtttttgttatttatgttttcgtttgtttttgattattttttttcgggtatgggtgggcgttgttggtgtttataagatcgttattggttttatttggaattttttttttgttatttttaggggttattacggagagaatttgtttttgtttttgggatttaagattaaaggagttttttttgttagcgtttttatattttggatttttttagaatttatttttggttaaagttttaaggtttttttatgagagttgttatttggttgtttttgtgtagtcgtcgtttgggttgatttaggttgtaggttttgagcgtgttgtttaagttttttgtttgttttagtttgtttttttagtatgtcgaagtttttttggtttttgattttgttattttgtggattttttatagttttcgttttaaatgatttataaatacggtaaacgtgttttttgggttattattaaaattattgataaggataaagttgagtgagtgaatgaatgaatgaatgaatggatggatgaaagtagagatttgtggaggttgagtaaattaaggaaggatttaaattatttttttgtgttattatttttagttgtatgtttattaaaggaggttgtatattaatttatttatatttattatgttattatttaggaataattgatggttttagtaagagaaaataagataggtatattttattgaaggtatattagaaaagttgaaaggaaaaaaaataaaaagattagattgggatagttagagaagtatggggtaggggaagcggtaaattagagaagtaaataaggtttaaaggaaaagtggttaattagagtaatttttaggaattttttttaattagtattattattattttgtttaaggttagttgtattttagtatttaattgttagttattgatttttttttttatttttttttttgttttattatttttaatatatttatagttattaaatataatattttagaaagattaaaagaagggaaggtttggaggatgagttataattttattattttagtagagttattgtgattattgtggtgtattttattcgagttttttttatatagacggtttttatttttttatgtttttatagagtttttataattgttgtagttaatagtcgtaaattattatttttttgttagatattttagtttttgtattgtaaataattttaaaataattttaatttgatattggaatgtttttagttagatgtatatacgtatatgtacgtttattaatatttttgttttatttaaaattttattagtttagtttaatagtgatttggttgagtagtcgaaggaaatagttcgtagtatggtgtat

SEQ ID NO: 75 - DNA, 8372 bp, Artificial Sequence
  chemically treated genomic DNA (Homo sapiens)
gtttataattttagtattttgggaggttgaggtgggaggattatttgaggttaggggttagagattagtttggttagtatggtgaaattttgtttttattaaaagtataaaaattattcgggtatggtggtatatgtttgtaattttagttatttgggaaattgaggtaggagatttaattgaatttaggaggtggaggttgtagtgagttaagatcgtattattgtattttagtttgggtaatggttgggagtagtggtttatatttgttattttagcgtgaagagaggtgaaggtaggagaagtatttgaggttaggaatttgagattagtttgggtaatatattgagattttatttttataaaaaaaaaaaaaaaaagtaaagatttgaatagatatttgtttaaaaaacgtttagcgcggtggtttatgtttgtaattttagtattttgggaggttaaggtaggcggattataaggttaagagatcgagagtattttggttaatatagtgaaattttttttttattaaaagtataaaaaattagtcgggcgtggtggtaggcgtttgtagttttagttatttaggaggttgaggaaggagaatggcgtgaattcgggaggcggagtttgtagtgagcggagatcgcgttattgtattttagtttgggcgatagagtaagattttattttaaaaataaataaataaatggttatatatatttagttatagaaatgagtaaagtattgatatatattataatatgaatgagttttgaaaatgttatgttgtgaatttaggaggtggagtttgtagtgagtagagattatgttattgtattttagtttgggttatagtgcgaaatttcgtttttaaaaaaaataataatattaagaaaagaaaatgttatgttggtttagtgcggtggtttatatttggaattttagtagtttgggaggttgaggtaggaggattatttgaggagtgtaggaggtcgaggttgcggtgagttaagattgggttattgtattttagtatgggtaatagtaagattttatttaaaaaaaaaaaaaaaagaagaagaagaaagaaagaaaaaaaaagtaaaaatgttatgttaagtaaagaagttagataaaagattatataatatatgaatgagtttatttatttgaaatgtttataatgggtaaatttatagcgataggaagtaaattagtggatattaggggatgagggaagggggaaatagggagtaattattttataggtgtggggtgttttttggagtgatgaagttttgaaattaaagaaaggtggtggttgtataatattgtgaatgtaataaatggtattgaagtgtatattttaaagtagttaattgtttgttatatgaatttaattttaagtaaaaacgtaaattttaaaggttaggtgcggtggtttatatttgtaattttagtattttgtgagatcgaggtaggtagattgtttgagttaaaaaaaattagttgggcgtagtggtacgcgtttgtagttttagttattcgggagattgaggaaggaggatcgttttagtttagaaggttgaggttgtagtgagttgcgattttgttattgtattttagtttaggtatttaggtattagagtgagattttattttaaattaaataaataaataaataaataaaaataatatagattttaattaaagagtgaatagaaattgataaatataaatattatttttaatgttttggttatgttgagaatgtatagggtgttaagtttttttttttttattgtagttttaaaaggtagggattttttggggtttagagatgggaagggattgagttagttttatagagttattaaggtatagtggtagggttttttaggtttttttgtttttaaatttttagcgatggttgtggttttttggggtttttttttggtttttttgggtggaagttggtgaggttagaggttaggaacgtttttgtagttataaggcgggggttagtgattgaggaggttggaatgtgttttttttgaaaggatttttttgtggttttagtgacggttagagtaggaagagatttttaaagttatgtaatatatatatatatattttagatttgaatttttgtttttttagttgttttagtggttttagtatttattgtttgggggcggtggggtcgggtgtagggtgatgtttttggagtaggtaagtgaatgtagttaaggttgatttgtgttattttttttttggttatttgtgttatatttgatttgtttagtttgggttttgttaggaagttgaggtattagtgtgtgtgtatatgtgttgtgtgagtgtttttatgtgtgattagttttaaaggtttttatttttgggttgttttgttttgttttgttttgttttgttttttgacggagttttattttgttgtttatgttggagtgtaatggcgtaattttggtttattgtaattttcgtttttcgggtttaagtgatttttttgttttagttttttaagtagttgggattataggtatgggttattatgtttagttaatttttgtatttttggtaaagacggggtttttttatgttagttaggttggtttcgaaattttgatttcgtgatttatttgttttagttttttaaagtgttgggattataggcgtgagttacggtatttagtttatgtgttaaatttttattatgtgttgtgttaagtatgtgatattatttgtgttttttaataatttttgagatagttattattatgtttttattttatagataatgaaagaggttttgagagattgtgtgttttatttaggttatataattggtgagtagtttaattatatttaaatttagattttagagttgtttgattttagtacgggtgttttgtttacggattatattgttttaaaaatatttttttttttttttttttttttttttttttttttttttttttttttatatatatatatatatatatatatatatagagatgatgatgataagagggtgataagtattgggtcgtttaaaggtaaaggagaggtattaggttggtaattattttttgagtgtataatattttatagtttataaagtatttttatatttgtgattttatttgattttataatagttttgtgagattagtagggaggtttagttgaaggaaggtgatttgtttagtgttatatagatagaaaatggtagttttgggattagaattttaggggtaatttggattttttggttttaagttttgagtgtatttatagatttttggtttgtgtttttaaggaaagtagtttagagggtaaagttagagttgatgaaatggaaggatcgatggagaagtaggagagtttagtttttttttgatttatttattttgagttttgttttgttttttaggttggattgtagtggcgtagttatagtttatcgtagttttaatttttttggtttaagttattttttcgttttagtttttagaatagttgggattataaggtaggcgtattattatgtttagaaaattttataattttttgtagagatggggttttaaatggttttttttgttttggttttttaaagtgttaggattataagtatgagttattatatttggttttagttttttttttgtagtcgtgtgataattgatagtttagtattttatttgggttttagtttttttatttatgatggaagtaattagagagaagttttgggatggtgtttagtattaatattttggatgtgcgataaggtgtttgtgaaggtgtaagggttttgaaaattttggttgagtttgggtttggagtgtttacggttgtgatttggtaatttgtgttagttatttatttagcgattttaagtaatttattttagtattttttagttttagtttttttatttgtaaaatagggatgaggatgatatttgttttatatttatttatttttgatatattttttaaataagtttggtggttataagttttcgaaaggtattgatcgtaatgaagatggcgtttattagattttaggatatttgtagtggttttgaattaaaattcgttatagtttttgaaattattttgagtaatattattatattgtattttatgtggggttagtttaaagtattattttatcgtaaatatttaaaatatattatttagtttgggtaatacggcgagatttaatttttataaaaaatataaaaattatttgggtgtggtgacgcgcgtttgtagttttatttatttggagggggcgttgaggtaggagaatttttttagtttaggaagttgagtttgtagtgcgtcgagatcgagttattgtattttagtttgggtgatagagattcggttttaaaaatataaagtaaaataaaatatgttattatttttgtaattttggtttgttatttatttattttttatatattcgaagttttaaaataaggttagtggaaagattttattttacgaagttttgggtggcggttggcgtggtttttagagatgtgattttttcgtgttattttgtgggagtagaaacggaggttagtttaggtttcgagagggttggggcggggcgcgggttttggtaggtgcgttagttcgtaggggaattcggggttttatttgggcgcggcgaggaagttatattatgtatgggtagttacgttaggggggcgggttcgtagtcgtcggggaacgtcgagtcgggtttatttcggtgaaaaggttgtagtcggatttggggaggcgtcgttaagttcgggatcgacgggttaaggcggcgcgtttcgggggtggagtttggaggtgatcgcgtcgttgtaacgtttttatttttcgcggtcgtagtggtttagttcgagaattttttatttataaaaagaaaagatttcgtacggcgcgggtgagttagaatttagtagtcgtgtatttcgtagagtcgttagtttcgggtatgtttcgagatttcggggaattcggttcgagtttcgggaacggcggcgggtacggcggtttcgcgtagttttcggtcgtagcgtaggtagtttagtaggtgagtggggttcgacgtcggtggttttacgggaggatcgcgcgtgggaggtcggggttaattttcgtacgtttcgggattggagcggggaatcggagtcggggtcgggttgggggttggggcgaggattttgtttttcgtcgttcggggttagttgtttttatcgcgtagcgggtagtagagattcgcgaatttttttttttttagtcgtttttttttttttcgtcgttcgcgttcgttttttcgttttcgtgttcgttttttttttttttgtttatttttgatttttgcgtttattttgttttagaaggggcgtgggcgtttagggtggtcgtttcgaaggttaggagggttttttcgtttcgggttgaatttttgggatttggagtttgggttggggtgagggtttttatacgggagggaggcgggattcgtcgggagagtagttgggttagggtgggagtttcggttcggtttgcgatttttcgcgtgttcgttcgtttgtttgtttttcgttttttcgtcgttaagtttttatcgtttttcggtttggggagtttaggggggttcgggtagtggaatttgttaggttttcggagatcggttttcgatttttttgtcgaatgcggcgaatagagatttcgaggtttcgggacgtgcgcggggttaggttgcgggcgattttcgcgattttatttttagtttttaacggcgttcgttgttcgtcggggggtattcgggaggttgtaggtgtttattttttgtcgaggggttgcgagtacgtgtcgataggggagggaaggaggggcgttcgtttcgtcgagttacggcggtcgagttacggcggttgagttattcggggcgtttttttttttttggtttggagcggttcgggttcgggagtgggagatgtcgtcggcggtgtttcggattcggaattggggttattgggacgtcgggttcgtagcgtttgggttcgggttatcgttgtcgggatttgtttgggtttgtgggcgtttttcggacgattgggcgtttatatttagggtttagcggtagagttagaatttattttttttagaatattgagttttattttaatttattttttagatagttggttgatagaatgggaatagggacgttgtgttgggcgtttgttatattatttattatattttacggaatcgaagattttatcgattgaaaaaaaaatttattataattttatgttattaattttttttttttttttttttttttttttttttttttgagatagggtttttttttgttgtttagattatagagtagtggtgtaattatagtttattgtagttttagttttttgggtttaagtaattttattgagattttagttgggaagcgatttggttataggtacgtattattatatttaattaattttttaatttttttgtagaaatgaagttttattgtgttgttcggtgtgattttaaatttttgagtttaagtgatttttttattttagttttttaaagtgttgggtatgagttattatgtttagtttattaaaattttttaaattgttaattaaattatgattttagagttattaaagggtattttttaatattagtgaaattttgtaatttttatttgtaataatattaaaaatgaggaaattgaggtatatggaggttaaataatttgtttatggttatatagttagtaagtagttgagagttgagattagaattgggatagtttgttatgttaggtggttaaagtttgttattttaatattttgggaggttgaggtgggtggattgttttagtttaggaatttgagattattttgggtaatttagtgagattttgtttttataaaaaaatttaaaaaaaattagttaggtcgtgcgcggtgttttatgtttataattttagtattgtgggaggttaaggcgggtggattattagaggttaggagtttaagattagtttggttaatatagtgaaattttgtttttattaaaaatataaaaattagttgggtatagttgtgggcgtttgtagttttagttattcgggaggttgaggtaggagaattgtttgaatttaggaggtggaggttgtagtgaggcgagatcgggttattgtattttaatttgggtgataaagtaagattgtgttttaaaaaaaaaaaaaaaaaaaaaacggaaaagaaaaaaaaaattagttaaatgtggtggtgtacgtcggtagttttagttatttgggaggttgaggtgggaggattgtttgagttcgtaggttattgtattttaatttgggtgaaagagtgagattttgttttaagaaaaaaaaaaaaaaaagtaatggaatggtttgaatttagagtagtgatttttttttgttttagtttttttgtattgggtatttgttatttattagattgtcgtatatatttttttatttgatttttatagtttttttttgagttgggagttgtaattatttttttcgtgtaaataggtgtaggagtgggtaagagtttagttgttgggtttattggttttgtgtttgcggataattgttttttcgtttgaaaatgaagatattaggttgggcgttgtggtttacgtttgtaattttagtattttgggaggtcgaggcgggtggattatttgaggttgggagttggagattagtttggtaaatatggtgaaattttgtttttattataaatataaaaattagtcgggtatggtggtgtacgtttataattttagttatttaggaggttggggtaggaggattattcgaatttgggaggcgtaggttgtagtgagttgagatcgtgttattatattttagtttgggtaatagagtgagattttatttgaaaaaaaaaaaagaaaaaaaagaaagaaaagaaaatgaagatattattgtgttaatgatatgagttagtatttgtaaagtggttagaatagtttttggtagtttgtgttttataaatgttagttttaatggggaaatgggggtatagagaggttatgtgatttgttttaaagttatatagtttatgagtagggatttgttattaggttagtttttgattgttaagttgtgttttttttgtttttagagttagtttgtatattgaaggtagatagtagtgtagtttttgtttagtggaagttttttaatttatacggattttatttgtggttttttattttttattttttaga

SEQ ID NO: 76 - DNA, 8372 bp, Artificial Sequence
  chemically treated genomic DNA (Homo sapiens)
tttaaggaataagaaatggaaggttatagatgaggttcgtgtggattgaggggtttttattgggtagaggttatattgttgtttatttttaatgtataggttagttttgggaatagaaagagtatagtttggtagttagagattgatttggtggtaaatttttgtttataagttgtgtggttttggggtaggttatataatttttttgtgtttttatttttttattagaattaatatttataaagtataaattgttaggaattgttttaattattttataaatattgatttatattattggtatagtaatatttttattttttttttttttttttttttttttttttttttttagatggagttttattttgttgtttaggttggagtgtagtggtacgattttagtttattgtaatttgcgttttttaggttcgagtgatttttttgttttagttttttgagtagttgggattataggcgtgtattattatgttcggttaatttttgtatttgtggtagagatagggttttattatgtttgttaggttggtttttagtttttaattttaggtgatttattcgtttcggttttttaaagtgttgggattataggcgtgaattatagcgtttagtttagtatttttatttttagacgggagaatagttgttcgtagatatagagttaatgagtttagtagttgggtttttatttatttttgtatttgtttgtacgaagaggataattatagtttttagtttaaggggaggttgtgagaattaggtgagagaatgtgtgcgatagtttggtaagtggtaggtgtttagtgtagaggggttgaggtaggaaagagttattgttttgggtttaggttattttattgttttttttttttttttttttgagatagggttttatttttttatttaggttggagtgtagtgatttgcgggtttaagtaatttttttattttagttttttaagtagttgggattatcgacgtgtattattatatttggttaattttttttttttttttcgttttttttttttttttttttttgagatatagttttgttttgttatttaggttggagtgtagtagttcgatttcgttttattgtaatttttattttttggatttaagtaatttttttgttttagtttttcgagtagttgggattataggcgtttataattgtgtttagttaatttttgtatttttagtagagatagggttttattatgttggttaggttggttttgaatttttgatttttggtgatttattcgttttggttttttatagtgttgggattataggtatgaggtatcgcgtacggtttggttaattttttttaaatttttttgtagagatagggttttattaggttgtttagggtggttttaaatttttgagttgaagtagtttatttattttagttttttaaagtgttgagatgataggttttagttatttggtatggtaggttgttttaattttaattttagtttttagttgtttattggttgtgtgattatgggtaagttatttaatttttatgtgttttagtttttttatttttaatattgttataggtgaggattataggattttattgatgttaagaagtattttttaatagttttgaaattatagtttaattggtaatttaaaaaattttagtggattaggtatggtggtttatatttagtattttgggaggttgaggtagaaggattatttgagtttaggagtttgaggttatatcgggtaatatagtgagattttatttttataaaaaaattaaaaaattagttgggtgtggtggtgcgtgtttgtggttaggtcgttttttagttaggattttagtaggattgtttgagtttaggaggttgaggttgtagtgagttgtgattgtattattgttttatagtttgggtaatagagggagattttgttttagaaaaaaaaaaaaaaagaaagagaaggaaagaaaattagtggtataaagttatagtgggttttttttttaatcgatgaggttttcgatttcgtgaaatatggtaaatgatgtagtaagcgtttagtataacgtttttgtttttattttattagttagttatttgaggagtgggttgggatggggtttagtgttttgggagaagtgggttttagttttgtcgttgggttttgggtgtgggcgtttaatcgttcgggaagcgtttataagtttaggtaagtttcgatagcggtagttcgagtttaagcgttgcgggttcggcgttttagtgattttagtttcgggttcgaggtatcgtcggcggtattttttattttcgggttcgggtcgttttaggttaggaagggagggacgtttcgggtgatttagtcgtcgtgattcggtcgtcgtgattcggcggaacggacgttttttttttttttttttgtcgatacgtgttcgtagtttttcgataggaaatgggtatttgtagtttttcgggtgtttttcggcgggtagcgggcgtcgttaggggttgagagtggggtcgcgagagtcgttcgtagtttgatttcgcgtacgtttcggaatttcgaggtttttattcgtcgtattcggtaaagggatcgagggtcggttttcggggatttggtaggttttattgttcggatttttttggattttttaggtcgagaaacgatagggatttggcgacggaggggcgaaggatagatagacggacggatacgcggagggtcgtagatcgggtcgggatttttattttggtttagttgttttttcgacggatttcgtttttttttcgtgtggggatttttattttagtttagattttagattttaggaatttagttcgaagcggagagatttttttagttttcgaggcgattattttaggcgtttacgttttttttgaagtagggtggacgtagaagttagaggtgggtaggaggagagaaagcgggtacggagacggagggacggacgcggacggcgagggagaagggggcggttgggagaaggggagttcgcgggtttttgttgttcgttgcgcggtgggggtaattggtttcggacggcgaggggtaggattttcgttttagtttttagttcggtttcgatttcggtttttcgttttagtttcggagcgtgcgggagttgatttcggttttttacgcgcggttttttcgtgggattatcggcgtcgggttttatttatttgttgggttgtttgcgttgcggtcgggggttgcgcggggtcgtcgtattcgtcgtcgttttcggagttcgggtcgggtttttcgaagtttcggaatatgttcggggttggcggttttgcggggtatacggttgttgggttttgatttattcgcgtcgtgcggagttttttttttttatgaatgaaaagttttcgggttgaattattgcgatcgcggggggtgggggcgttgtagcggcgcggttatttttaggttttattttcgagacgcgtcgttttggttcgtcggtttcgaatttggcgacgtttttttaagttcggttgtagtttttttatcgggatgggttcggttcggcgtttttcggcggttgcgggttcgtttttttgacgtagttgtttatatatggtgtaattttttcgtcgcgtttaggtggagtttcgggtttttttgcggattgacgtatttgttagagttcgcgtttcgttttagttttttcgaggtttgggttaattttcgtttttgtttttataaaatagtacgaaagaattatatttttaggagttacgttaatcgttatttaaagtttcgtggagtgaggtttttttattggttttgttttaaggtttcgagtatatgaaaagtgaataaatgataaattagggttataaaaatggtggtatattttattttattttatatttttgagatcgggtttttgttatttaggttggagtgtagtggttcgatttcggcgtattgtaggtttaattttttgagttaaagggatttttttgttttagcgttttttttaagtaagtgggattataggcgcgcgttattatatttaggtaatttttgtgttttttgtagggattgggtttcgtcgtattgtttaggttgggtggtatattttaaatgtttgcgataaggtaatgttttgaattaattttatataaaatgtaatataatagtattatttaggataattttaggagttataacgagttttaatttagggttattataggtgttttgaggtttgataaacgttatttttattacggttagtgtttttcggaggtttgtggttattagatttgtttggagagtatgttaaaggtgagtgaatgtgaggtaggtattatttttatttttgttttatagatggggaaattgaggttgggagatgttgaaatgaattgtttgaagtcgttaagtgagtagttggtataggttgttaagttatagtcgtgggtattttaagtttaggtttagttaagatttttaaagtttttatatttttatagatattttgtcgtatatttagaatgttagtgttgggtattattttaaagtttttttttgattatttttattatagatgaggaaattgaggtttagatggagtattgagttgttagttgttatacgattatagaaagagggttggggttaggtgtggtggtttatgtttgtaattttagtattttggaaggttaaggtagaaagaattatttgagattttatttttataaaaaattataaaattttttggatatggtggtacgtttgttttgtggttttagttgttttggaggttgaggcgggaggatggtttaagttagggaggttgaggttgcggtgagttgtgattgcgttattgtagtttagtttgggggatagagtaagatttaaagtaaatagattaagagagggttgggtttttttgtttttttatcggtttttttattttattagttttagttttgttttttgggttattttttttgggaatataggttagaagtttgtgggtgtatttaggatttagagttaggaagtttagattgtttttggggttttagttttagagttattattttttgtttgtgtgatattgggtaggttatttttttttaattgggtttttttgttgattttatagagttgttgtgggattaagtgagattatagatgtgaaaatgttttgtaagttataaagtgttatgtatttagaaagtggttattagtttggtgttttttttttgtttttgagcgatttaatgtttgttatttttttgttattattatttttgtgtgtgtgtgtgtgtgtgtgtgtgtgtgagagagagagagagagagagaaagagagagagaaaggagaggagagtgtttttgaggtagtatgattcgtggatagaatattcgtgttggggttagatagttttggggtttgggtttgaatgtggttaggttgtttattagttgtgtgatttaggtgaggtatataattttttagagttttttttattatttgtgaaatggagatataatgataattattttaagggttgttggaggatataagtaatgttatatgtttagtatagtatatagtaagaatttgatatataggttgggtgtcgtggtttacgtttgtaattttagtattttgggaggttgaggtaggtggattacgaggttaggatttcgagattagtttgattaatatggagaaatttcgtttttattaaaaatataaaaattagttgggtatggtggtttatgtttgtagttttagttgtttgggaggttgaggtaggagaattatttgaattcgggaggcggaggttgtagtgagttaagattgcgttattgtattttagtatgggtaatagagtaagatttcgttaaaaaataaaataaaataaaataaaataaaataatttaggggtgagagtttttgggattgattatatatgaaggtatttatatagtatatgtgtatatatattgatattttaattttttggtagagtttaagttggataggttaagtgtgatataggtaattaggggaggggtgatataggttagttttgattgtatttatttgtttgttttagaaatattattttgtattcgattttatcgtttttaagtagtggatgttggggttattggggtagttgagggagtagggatttaggtttggggtgtgtgtgtgtgtgttatatgattttgaaagtttttttttgttttaatcgttattggagttataaggaggtttttttagagggagtatattttaatttttttagttattaattttcgttttgtggttgtagaaacgtttttggtttttgattttattagtttttatttagggaggttaggagagaattttagggggttatagttatcgttggaagtttgggggtagggaggtttgagggattttgttattgtgttttggtggttttgtaagattggtttagtttttttttatttttgagttttagagaatttttgttttttggggttgtagtgaaggagaggaggtttggtattttgtgtatttttagtatggttagggtattggaggtgatatttatgtttattagtttttatttattttttaattgaagtttatgttgtttttgtttgtttgtttgtttgtttggtttgagataggattttattttgatgtttagatgtttaggttggagtgtaatggtaggatcgtagtttattgtagttttaattttttgggttgaagcgattttttttttttagtttttcgagtagttggggttataggcgcgtgttattacgtttagttaattttttttggtttaagtaatttgtttgtttcggttttataaagtgttaggattataggtgtgagttatcgtatttggtttttgaagtttacgtttttatttgagattaaatttatgtaataaataattaattattttaaagtgtatattttaatgttatttattatatttataatgttgtataattattatttttttttagttttaaaattttattattttagaaaatattttatatttatgaagtaattattttttatttttttttttttttattttttggtatttattaatttgttttttgtcgttatggatttgtttattgtgggtattttaaataaatggatttatttatatattatgtggttttttgtttgatttttttatttagtataatatttttgttttttttttttttttttttttttttttttttttttttttttttagatggagttttgttgttgtttatattggagtgtagtggtttaattttggtttatcgtagtttcggttttttgtattttttaagtgatttttttgttttagttttttaaattgttgggattttaggtgtgagttatcgtattgggttagtataatattttttttttttagtattattattttttttaaaaacggagtttcgtattgtggtttaggttggaatgtagtggtatgatttttgtttattgtaagttttattttttgggtttatagtataatatttttaaggtttatttatgttatagtatgtattagtattttgtttatttttatggttgagtatatataattatttatttatttatttttgagatggagttttgttttgtcgtttaggttggagtgtagtggcgcgattttcgtttattgtaagtttcgtttttcgggtttacgttattttttttttttagttttttgagtagttgggattataggcgtttgttattacgttcggttaattttttgtatttttagtagagaaggggttttattgtgttagttaagatgttttcgattttttgattttgtgattcgtttgttttggttttttaaagtgttgggattataggtatgagttatcgcgttgggcgttttttggatagatatttatttaaatttttattttttttttttttttttgtagaaatgaggttttaatatattgtttaggttagttttaaatttttggttttaagtattttttttgtttttatttttttttacgttgaaatgataggtgtgagttattgtttttaattattgtttagattggagtgtagtggtacgattttggtttattgtagtttttattttttgggtttaattgagttttttgttttagttttttaagtagttgggattataggtatgtgttattatgttcgggtaatttttgtatttttagtagagatagggttttattatgttggttaggttggtttttaatttttgattttaagtgatttttttattttagttttttaaagtgttgggattataggt

SEQ ID NO: 77 - DNA, 14537 bp, Artificial Sequence
  chemically treated genomic DNA (Homo sapiens)
attggtatatagtttatttatgaaatgggaattatgttgggtgaaggtttatgtgttatatttgagaagattttagttgggagggttgtttttggaattttaaggaggttgtgtaaagttataggagagaaagttatatttgttttttttttaggtgtggatttttgtttattagtgggtatagttttttttttgttttatatttgagagatataatatatgttttagtggttgatatttatagttggaaaattatgagtaggttgttgtgatattttgtatttcggttttttttttggtaatttatagttattttgttgtttatattttttttatagatgttatgtgtaaggataaatgaggcgatgtgtgtgaaagggttttatgtattcggtgttgatatgtgtgggttagtatagttttgaaggggtagttattttgggattttttattttttaggggttaaatattggttaggatggataaataaggagatcggtaaaagtaaggtaagagaggttttagagatttagagaggtaatgagaagatagtttatttatttttttttttttagtttatttatttttttttttttattttagttttttttttttttttttttttttttatttgatatggttttttttttaagttgagggatgtcgttgaggttatttgtttagtggagaattaaggcgtatttttaagtgtaggataaagttatgtattagataaagattatgttttttaagattagtaagagagagataaagatattttaataggaggtaggttatgttatgttttggggaaaaagaagagtttggtgtcggagaattttagttgtatttttaatagattattaatttattaattagtttttttggataagttatttaattttattgtttttttttgtaattagggaataatatttatttttagcgtttgttgtgagaattttatagaataagttttgtatttagtatggtgtttggttttgattttagtatttaataaagggttatttttatttttagtattttagggagttagaggattttttttaattggatgattttggaatgattttttaaggagagggtatttggagattgaattttttgtatggtaggtatagttcgttgaggtattcgtttaatcgggggaggttagtttcgtagtagtattagggtatagcgttgtgtgttcggcgttggggggattgaaagggggtgagcgggttgcggaacgtaagtttttcggcgggtagagggagttagtacgagttttggagtaggagagggtcgggattaaagcgttttgaggtaggttagggcgtattaaagggaggttagtgaattgtattagtatagatttcgtgatgttttgtagacgtttttaggttgttgggttttacgggaatttataagaaaggaaaggatcggggagttggtagggcgagggcgggcgagggcgcgagggtgcgttcgttcgcgcgttttcggcggcgtttggtcggggttgggcgcgttcgggattgcggaggtcgcggaggaagttttcgttttttttttttcgttttttttttttcgcgttattggaaggattgtgtgggagagatttagaagtattcggattttcgatcgttaggtgggggagggcggggtagtttttattgtttaaaggaaaattaaaagtgcgtttgttcgcgtcgtttcgatacgcggttgttattgggagggtttaggtagggcgttttggtcgcgtttttttttgtagtttttaagatttggttagggcggtttgaggttcgcgtggcgcggggaggggttgagaatcgagtgggaaaatgttacgattttttttgtgtttttttcgtttttatttttatttttagttttttgagttttgttgttgtcgttggggaaggattgattcgttttgcgttaaaggattgtatttatttagttttgttgggagaggcgcgtaaatatttaggtaagttaggacgtagggatggggagggggaagaaaaaagtaaagtatttacggtcggcgcgcgcgttcgtttgttttatattttttttttgggtttgcggagttggggattttgtttagcgggtagtagcggaggtgcgaggagtttggttggtttcgtttcgtcgcgtacgcgcgcgcgtttttggggatagcgtttaggatagaatgtgttttatagttgtaaataatgatttcgagtattgtttgggattatcgtattttggggtttttggggcggttagatgtcgttagtcgtttcggaaatgttagcgttttatatagagttttaggaaagtttcgcgttttcggttttatttttttttgttattaatatttttattttgtagataaggaaattgaggatagaagttgtgtgacggtgtatagcgagttgttagtaatggatttttaatattttttaatattgggtttttataaggattttgtggggtatagatggttggcgttatttaagaattgggtaaattgaggttaatatagattttggattaaaatttaagttttttgattttcgttatagtatttttttatttatatatattattattttagcggaaggattggagttttagagtagagaagggtttaaggttatgtttttaaatttttttattttataggaggaaattgaggtttagagaggttaaggaattcgtttaagattttatagttcgtaaatagcgtagtcgggcgtttttgttttaaggtttgtgttttgtattttgcgtcgcgttttttttagtttcgtttagcgagggaggaggatttaaatgttcggtaattcgcgttttgaatttcgttttaaaatagttgaagacgataacgttggggtatattttttcgttggttttttttttttttttttaattcgtaatagtttggagtttgtttataaacgttcgattatttttattagatgcgttttaattgttcggcgtatagggcggtcggaatgttttgattggttaattttatttttaaggttatttttaacgaattaattgtaggatcgaaaatatgaaaaataaaaaataaaaagggaatcggtaggtagatcgttacggagggaaaaataggtaggttagtttcgttcggcgtcgtgtttcgttaatattcggtcgtagggcggcgcgggtattttgcgcgttcggggcgttcgttgtattcggcggcgtcgcggagggcgtttacgatcgcgcgtagtcgcgttttttttgcgagcggttttgcgcgttcggttttcggtttttcggtggcgtcgtatcgaatcgttcgtttcgtcgttagggttgtgattattttttaaaattcggaggcgagattcgcgcggtcgttttcggggtttcgtttcgagtttttttttagggcgggggagaggtcgtagcgtattcgggagcgggcgagggaatttttttttttttacgttattcgaaagcgaggaaattcgtattcgcgttttttaacgtaaatgattatttttggtaacgtgcgttaatggaataaattatatgcgttgggtttcgggcgttaagggaatagattaagggcgttgggttcggggggtgagcgggggaatggggagggtcggggatgtttcggcgtattcgaatcgtgcgtggcgttcgttttcgttcgtgttatcgtttggatttttcgcgcggggtgcgcggttggcgttagcgcggtcgggagtcggggttgggaggggagagatgcgttcgtttttttttttttcgcgtttttttttttttcgcggtttttttttttcgttttttcgtgcgtttttttttgtaaggtggagtttggggttgacgtgagtgaatttatatggtatagggttggagaataaagagtgtgagttgaattcgtgttattgtagtgatttatttcgggtagagcgttagggtttcgagcgaattagcgagcgagcgaacgagcggcgttcggcggggatagaaagagggagagagagagagagagagagggagaggcgcggtcgggcgaggcgggttcgttcgggagcgggtttcggggaaggggtgcgggtttgggcgtcggagcggggagcggggtcgcgttttttttagcgttagttttatttgagttttacgagtcgttgtttttttggcgcgttcggggtcgcgggacgggcgtacgtcgtttttttttagttaagtattcgagtcgtttcgaaattcgggcggcgagtcggttacgggaagtttatttttcggttttttttttaaaaggaagaaatagaagttttttttagcggatagttttttttttcgtttttttggttttgtttgaaatcgggggtttttagggttggtaggttaggttcgttgggtttttaattttttttttaatttttaatttttgattgggtcgtgggttttcgttgagtttcggttgcgcgcgggggcgggagggcgcgcgtaggggagggatcgagagacgcgtcgattttttagagggagggatcgggtggataattggtttcgcggcgttcgtagagtcggaaagaagtgttgtaagggacgttcgggggacgttgtttttgaggtgtcgtcgtttttttgttttcgtttttcgcggtgggggagaaatttaggagcgaagtttagagttcgcggcgcggtcggcggacgaacgagcgcgtagtagtcggtgcgcggtcgcggcgagggcgggggaagaaaaatattttgtttttttttcggtttttatcgcggattatgtattaggattatttcgggaattttgatatttcgtttcggggtagtagcggtttttttgcgtacgtcgagttttattttagcggcggcggcggttagtaggtaggtgcgggtttcggtgtatttggcggcgcgggcggatttttgtttttttttcgtcgttattgttttttttgttttttttttttttttttggcgagaaaatatttacgggttatcgttgtaagttttggattttcgtttttttttttttttttatttttttttaaaataggggattggagagtgggtttgaagagataatatgtttttttttttttacgttatattttatttagatagatttttggaattgtaggttttttattaggagtttgttatttttttttaaaaaaataatttgtttttaaagtagtcggattggtttgtattggagggattgtgcgtgtgatttttgtgtttataaatattaggaaggtgttgttggcgggggggtgttgatggcgtgtttgttttttgttgtagtttttttattcgttttgtttcgagagagagttgggttaacgtaggtttaatataatatgaagtttatcgtggttagtatttgtggagtttagtatagttggttgtagtaagggatgtttatgttttataaggcggtggttttggtttttagaaggggttagggtgggtttttagggaggggtggatttagttggaaagaattttggaacgtggtttttttttggatttgatgggggggttttttgttttaaagtgattttttatatttggtgagtttttaaaatggtttttttgttttttttttgttttttatggtgtttttataagtatttatagtagagatagtttagtttgtttattgagggtgtagttaatgtatttttcgtaatgagtattaaggtgatgagtttaaaattcgaaaagttgttgattatgtttgttttttagtttcgttagtggtttgtgttgaatgtaaatataatgagggaataggttgaagtttgtatttatttttttcgtttttcgttcgataaattttaaacgtttgtttgtttttttttttttgaaattaggaagggattttttgattttttttttgtttttttttttaatgtgtttttagtagtgattattggagtattataattttattgtttggtttagtatagattttggggtttggagggaagttagatcggatattagtgttttaattgaataatttgtgttattagggttttgagtttaggatgtgagcggaggtaattttcggttttggaagaaaattagataggaaattagtgttaggaagaaggaagagaatttagtttagtagagtgtaatagggttttattatcgaagtaaaaagtagttgttggttaatttttagtatgttgtaatatatgagtattttgtaattagtaataattagtgtacggggtttcgtatagacgtttgtttattcggttcggtagtgtgtgaggcgttttttaaatcggagggattggtaaggtaatgttatttgagataagttttttggtttgttcgttttttggtgtggtggtggttgggtgggggacgaggaggaattggtggatttttttgttattgttttaagtgtgaataaaattgttttgtggttttaaggattgattttagaggtttttgtttttttataagtttatgttatgattttgttcgattttgggtttaaggtaattttattatatattagataaaatttgtaattattttattttttttcgttttttgtattggaagatttttttggtaattagtggatgggttttttttttttatggtattttagtggatcgatttatatgagatagttttttggtttttttttggggaagtgaattttattttttttagtttttttttttgggggtttaatatttttgattagtttgttgttagttttttaatttagagttttttcgttttttttagttttatgaagttggattttaatatatggttatgagttttagtgattttgggggtggggggagtagattagtttttgttatagtttttgtttttatatatggtaggaatttgaggtatgaaaaatattttttgttttagttatagttttaattttaaaggttggttattggtgattttgttttgttagtaatcgttgtatatattttttttttttggatttttttttttgttgttgtttttttttttttaatttttttaggaaaatattttttagatatatgttttgtttggttgtttgattattacggttttagggtttgagtattacgtaatttagttagttatataaatataggttattttataatttgtttttattagttgggtttttttttaatgaaaaaataaaataaaaataagatttagaatttttttaaggttgttatttgttttttagataatttgtgaaaataaattaagggtagtattttttttttggagttaaggaatattagattagtattttttttttttaattatttttttttaagatatatatatatatatatatatatatatatatatatatatatatatataaaattttttagagtgaatttttgttaattgtattagattgggatattttttatattaaagaatttttattagaaatgattgtgatttttaagttagttttaattatatttttttagtgttttttacgggaaatttttaggaaaattattttgggaatgtatttttttagttttagagagtgttaaattggtgagtttggaatttttaggatgttttttttttttaatgagggataaataaatgttatatatttaatcgtggttaattaggaattgtttgattttgagttttttttttgtttttttttaaataaaatttggttaaaaagaggagtgttttttcgttgtgtataagtattttagaatttaaagtataataaaaaattggtgggaatgtgggaggtatagattaagggtttgggtgtttttttttttttttttgatgttatagatgttgtagattaggattaaataaaatgttattttaagaatttgtttgtttcgttgatttttgatggtggaagttagttttatttttttattaaagggaatggggtgaaatagtagttatgtattgtttgaaaggtatttgaatttttttatttaaaacgttgagtgtatttttattatttatttttgtttttgtttgttttattatttaaggtgagggtaaaattgggagatttgtttttttttttttattttaatataaatatagtagaatttatttatttttgttattgttatttttttttttgttttttttttggggagattaaatgtttatttgaatgttgcggttatgtttagatttagaaaggttttgtagtatttttttttttgtagttgtttttagcgtatttttttgaaaattttttttattaataaatttttgttttttgaagggtgaatttgatatttggaaattattaaaagtttttttggagtcgagtttgatatataagtttggatgattaggttgaggttaaagtagggtgtgattttgtgttttgtaggtttttagagtttatttgggagagtatgtttacgataaaggatattaaagtaggtatttttgtcgttaataatttggatttttttttttatttgttagataggaataaagatattggttgtgagaattaaggagacgaacgtttcggtttatttgttgaaataaataaaaaaatagtattattattttgtggatatgttttatttatgttgtatgtggtgttttttggtggttatagtattttaaaatgatagtagttgttttgattgaggtaaatatatttgttttaaattttatttggtaattttattttttttttattttttgggttagagagggaaggtataagattttttttggtttatttggtttttcggttttgtttcgtggtagtgagatttttttaggtttatttttcggtggttttaatggaggatgagaggacgtgttatttttatggagtatagagtcgttagggagttgtgggggttttaaaggggtttatatattagtggagtgaattttttagtgttttggagtggcgtttttggttaaaagggttttggtagggaagtagttggggagtttggacgagggttaaggttttttttttttgtttttttttttttttgttttttttttttttggtaggtagttaggtggaggaggatagagtaagttttttaagggaatttaggaaagcgtggaggttgaagggaggcgagttatttaagatagtatttataaattgtaacgttttgggaaattataatttattagtaatagtttttattgtgatatagtggtatttttttagagaggaatgaaatgttagaggttaaagtgatgtttaacgtagaatttgtgaagaatggttaaattttttatggaaggttttggggaatattttaggtttagtaaaaatatagagtatttgcgttaaattggattttagtggggatgtgatgggaggtatgagatagattgtgtttttatttttttttttttttgggagttaattttttaggatgttggaattgttttttttttattttgggaatttaaagaaagggtttttaaagggaaagaatttagtttttttttagatatatttaattatatttgtttgtttggtaaggtagtttatagagtttatagggttttatggtttgaatgtttgataatttagataaaaatttatttgatggagaatcgtttggttaaggggttgggttaagaattttaattttgatttttattttatatattagttttgtttatttacgagtttttgggataagttttcggttttattcggttttgtaggggtttaaattttagttttaatatttgttagtaaaaagttatgggtttatagttgaagttaaggttttagtatagagttttaggaggtagtttttttaaattagtaattgttgtggggggaatttttttgatttgttgaggtttggtggttttagagggttcgtgttttcggtcgttttttttattggtagtggaaggagtatacgtattttttttaagtagttcggtggtattttagtaatagggtatagtagggtgatgggagtttttatgtttaaagattataaggtttgtaagggtttgaacgtcggtttagggtttggaggtttaagttgataagtgagagttcgttttttcggttatttgggttggaggaatattttagttttgattttttgtttttttattttttttgtattcgtttttttttaatttgagtatgggagatgagaatgaatttttgggataggggttggtaaattatgttttgagtatttttttaaataaaatatagtggtatagttttgtttatttgtttatatgttatttagggttgttttcgtattgtagtggtagaattgaggtgtagttaagatcgtatagtttattaagtttaaaatatttgttgtttgattttttatagtaaaagtttgttaaattttgttttaggaggtggatggggattattatatttttttataggtatttttgtttatttcgtagttgatagggtgatatagtgaaatatttggaggttttgttaggttggaatgttatataggtatttagtatttttaaagtgtttttgaggaggatatgttggttatagagttttaggtagtcgagtgaggttttgggttattttttttgattttattatttttagtatatttttggtatgtatgtagtaggtttgaaattgttttgtagtttttagttgagtagttttattttggtttgtgtttagtgttaattcgttcgtagagaattacgatttatttttagtgtgatatgtggttgattttcgggtttattggtatagaagaatgttaggttaatttttgggattataaatttttaattttatttttttttttttattttagtgtttgaataatacgtttttgaataatacgtttttgaataatatgttgggagttgagataagatttatttgttagatttaattgaaatttttgtgtgtttttaagagaagttttttttggagataaaagttttttttattagagtttcgggtttttttggggatgggatattgttttttttgtagtttagagttagtgtattatttagatggttttgttttttgtttgaaataaggtgtatatgcgttttagaggtagttattattttttggttggtttttattgttgttttgttttgtttagattaagttattgttgcgaggaatttggttgatgtatatcggggagtatatattacggatttgttttttagagcgggtggattagagggttttagaggggttaataggtatttatttattttgaaggggtttttgttttttagttttgttttagattttttgttgggttttttaagtttaaaacgggagtatttttatttgttggaatgaggagtgatttttttaggtgtttttttaaaaggaaagttgatagtttttttatggaggagggagttatattaaattattgtgttgaatgttttaggtgtattttaaatttagaatttggtttggggagagaaatggaatttaaaagttgggtgttttttaggagtgggtagttggtatttttttttagagttttttgggtagagtatataggtatatttaatgatgatggtggtggtgatggtgattttttattggtttggagtaatgttttttaattttggttgtataatagattttttttgggggtttaaaaaaaaaaaaaaagtttattagagttttgttttaaattaattattttagaggtttaatggcgaggttttgatattagtgtgttttttataagttttttggaatattttaatgtgtagttagggttgagaattattggcgtgtttttatagtttgtgattataagtagttatttatttaatttttatggtagtgtagtgagtttgatgagtatttttttttatatttatggaattgagtttttgagtttagggtaaggtatttagtggttaagttaggttttaattttatgttttttgatttcgagtgtagtgttgatttttcgttttttttatttagtagtttatgaaaaaaatagttgtttgggatttggtgtttttatatatatttagttatgtttgttgtttttacgattttgtttatttatagtttagttttaattggttattttttttttttgaagattattttttatttggatgtttttttgtttattgtattttttttttttttatatgtatatatttgttgttttttagttagcgtttgataaaaagtttatttttttttgtttttagaaatgtaatttagaatttattattttgggtagttttttttacgggattttagaatttattgtattgggtaatttttttttagtattttagaatttattgttttaggtagttttttttttgaattttagaatgatgtattgtatcggataatttttttttagaatgttagaaattattgttttgtgtaattttttttttgaattttagaatgtattgtattgggtaatttttttttagaattttagaatttattgttttgtgtagtttttttttcgaattttagaatgtattgtgttgggtaatttttttttagaattttagaatttattgttttaggtggtttttttttcgaattttagaatgtattgtaatgggtaatttttttttagaattttagaattaattgttttaggtagttttttttttaaattttagaatttattgtattgggtaatttttttttagaattttagaatttattgtgttgggtagttttttttattgaagtttttggtttgggttttcgaggtggtttggttgatgaggtagtcgttttaatatgtagattagggttaggtagatagtagggaattgagtaagaaggggtttttagttttgttagttgtagtgaggtattttatgtgttatttatatagtaggaattttgatgttgtgataaggtaaagataatggtggtgttagtttttattgttgcgaatgtttttattttagttggtttgattggattagtatagggagggttttatagtatttatgttaatgatagtggggttttattcggggttagatagatttgtggtattttttttgtgagaggggaggtttataggggatgatttgatattttgtttgagggtagtgggggtggataattagtatttagggttggattttgaggaagaaagtaatggaaaaggagtttgtatattattgtgtttaggggttttggtttttttgttaggttggattgggtttgaattttgatttcgttgtttattagtaatgtggttttgaataagttatttaattttattaagtttaaatttttgtttttaaaatggagttaatggtcgttttttatttagagagagaattagtgagataatttaggtaagttatggtgtttgatatttagtaagtgtttaggaagtgttgttagttattgtttttattttatttagtttttaagtggggaagaaattatttggagaagttttatgtggatataggagttatttgaagatgaaggtttatttgggttttattagggggatttgtttttgaaaagttggaagtagggggtttttttttttttttcgttttttgtagtttttagtagttgttttggagaaaggttaggattagttgttaaggagtatagtttattttagtttttatattttgttattattttatattttaaatagaatgttttttgtagtatgttttagagagttttgtaacgtggtttgggtataaattaagaagcggggagaaaattgtattagtagtattagagttttttatagaaatatttgtgaatatagattaatgtttatgtagttgggtagagagatatatttagttagtttgttttaagtaagatgttgatgatgggaagggaggagggataaggatagtaagggatgtttggttgtaaatgtcgttatttgttagttttttgggttagaggatatttttttacggatttggttgtgttttgatggagttatagttttgttttgaatttttttggaaagtgataaaggtagatatagtatgtttttttggtgatttttgttggtttaaggttattggtgtgtaaatttttttaaggtgttttgagttggtattttgagaaatagttggtaggcgatttagaggtttaaaaatttaggtgttatattttgtagatgtgtattttggagagttgttaagagggtttgtcgagtgtgagtgttggggattacgtttattttggaagttatttggaataggatagtatttttattgagttatttggggatggagtttttaggattttagttagggagtagattcgacgtgaagttttaggtataattaagattttttttttgatttttggatgtataggatttgtttaggtttatttggggttttgattttgtttttcgaatattgattgtgttttgtgttggtttttgttttagttttgtttaattattattaattattttgtttagtttagtatttattggtttatttgtattttttttttttattttaga

SEQ ID NO: 78 - DNA, 14537 bp, Artificial Sequence
  chemically treated genomic DNA (Homo sapiens)
tttgaaatgaggaaaaaaaatataaatgagttaataaatattaagttgaataggatagttaataataattgaatagagttgaggtaaaaattagtatagagtatagttagtgttcgaagggtaaggttaggattttaggtgggtttggataagttttgtgtatttaagaattaaggggggaattttaattatgtttggggttttacgtcggatttgttttttgattggggttttgagaattttatttttaggtggtttagtgaggatattgttttattttaaatgatttttaagatagacgtggtttttagtatttatattcggtaggtttttttggtagttttttaggatatatatttgtaggatgtggtatttgggtttttaagtttttgagtcgtttgttaattgttttttagggtattagtttaggatattttgaagggatttgtatattagtagttttggattaataaagattattaagggagtatattgtgtttgtttttgttattttttaaagaggtttaggatagagttatgattttattagggtatagttaggttcgtgaaaagatgttttttaatttaggagattaataagtagcggtatttgtagttagatattttttgttgtttttgttttttttttttttttattattagtattttgtttggggtagattggttgagtgtgtttttttatttagttatataggtattgatttatgtttatagatgtttttgtgggaaattttggtgttgttagtgtagtttttttttcgttttttaatttatgtttagattacgttgtagagttttttggaatatgttgtaggaagtattttatttaaaatataagatgatgatagagtatagaaattaaaatgggttgtgttttttagtagttggttttgatttttttttaaggtagttattggaaattgtaagaagcgggaaggagagaagagttttttatttttagttttttagaggtaagtttttttaatggaatttaggtgaatttttatttttagatgatttttgtgtttatataaagtttttttaagtagttttttttttatttaaaaattgggtgagatgaagataatagttaataatattttttgggtatttattaaatgttagatattatggtttatttagattattttattaattttttttttgagtgaagaacgattattagttttattttagggatagaaatttaggtttagtgagattaagtaatttatttaaggttatattgttaataagtagcggggttaggatttaaatttagtttagtttgataaagaggttagagtttttgaatatagtggtatataagttttttttttattgtttttttttttaaaatttagttttaagtgttggttatttatttttattgtttttagatagagtgttaggttattttttatagatttttttttttataaagaaggtattataggtttgtttggtttcgaatggaattttattattattagtatggatgttgtagaattttttttatgttggtttaattagattaattaggatagaagtattcgtagtaatggaagttggtattattattgtttttgttttgttataatattagggtttttgttgtgtaaataatatatagagtattttattatagttgatagagttggggatttttttttgtttaattttttgttatttgtttgattttagtttgtatgttggaacggttgttttattaattagattatttcgggggtttaggttaagggttttagtgaagagagttgtttagtataatggattttgggattttggaggaaagttatttagtgtaatggattttggggtttgggaggagagttgtttaaagtaattggttttaggattttggaggaaagttatttattgtaatgtattttgggattcgggaggagagttatttagagtaatgggttttgggattttggaggaaagttatttagtataatgtattttgggattcgggaggagagttgtatagagtaatgggttttgggattttggaggaaagttatttagtataatgtattttgagatttaagaggagagttgtatagaataatggtttttggtattttggagaaaagttattcggtgtaatgtattattttgagatttaggaggagagttgtttagagtaatgggttttgggatattggaggaaagttatttagtataatggattttgggatttcgtgaagagagttgtttagggtgatagattttgagttgtatttttgaaggtaaagaaaagtgggttttttattaggcgttgattgaaaagtagtaggtgtgtgtatatgaaggagggaagagtgtagtgaataggaaagtatttaagtgggaaatgatttttaaggaggaaaaatggttaattggggttgggttgtgagtaggtagagtcgtgagaatagtaggtatggttgagtgtgtgtagaagtattaagttttagatagttattttttttatgagttgttggatgggaggggcggggagttaatattgtattcggggttaggaggtatggggttgaggtttggtttagttattgagtgttttgttttgggtttaaggatttaattttatggatgtaaaggggaatatttattaaatttattgtattgttatgaggattaaatgagtagttatttgtaattataggttataaaagtacgttagtggtttttaattttggttatatattagaatattttaaggagtttgtaaaaaatatattaatgttagagtttcgttattagatttttaaaataattggtttggggtagggttttgataagttttttttttttttttaaatttttaaggagagtttgttgtgtagttagggttgagaaatattgttttaaattaatggaaggttattattattattattattattattagatgtgtttgtgtattttgtttaggaggttttggggagaagtgttagttatttatttttgggaagtatttaatttttaaattttatttttttttttaagttaggttttgggtttgaaatgtatttgaggtatttagtataatggtttgatatgatttttttttttatggggaagttgttagttttttttttaggaaagtatttaagaaagttattttttattttaataaataaaagtgttttcgttttaggtttggggaatttagtagaaaatttgaagtaaagttgagggataaagatttttttagaataagtggatgtttattagtttttttgaggttttttagtttattcgttttggagggtaggttcgtggtgtgtgtttttcggtatatattagttagatttttcgtagtaatggtttggtttagataaaataagatagtaataaaaattagttaggaggtaatgattgtttttgaaacgtatgtatattttgttttagataggaggtaaagttatttggataatatattggttttaaattgtaaggaaaataatgttttatttttagaggggttcggggttttgataaagaaggtttttgtttttaagaggagttttttttggagatatataaaagttttaattagatttggtagatgggttttgttttaatttttagtatgttatttagaaacgtgttatttagaaacgtgttatttagatattggggtaggagagaagaggtgaagttaggagtttgtggttttagaagttagtttagtatttttttatgttaatagattcgagaattagttatatgttatattggagataaatcgtggttttttacggacgagttaatattaaatataaattaagatagagttgtttagttgggggttatagggtagttttaaatttgttgtatgtatgttaggagtgtgttgggagtgatgggattaggagaggtaatttaaaattttattcggttgtttggggttttgtagttaatatgttttttttaaggatattttgaagatgttggatgtttatgtagtattttagtttggtaaagtttttaaatattttattgtgttattttgttaattgcggggtgggtaagaatgtttataaaaggatatagtggtttttatttattttttagagtagagtttagtaaatttttgttgtgaagggttagatagtaaatattttaggtttggtgggttatacggttttggttgtattttaattttgttattgtagtgcgaaagtagttttagataatatgtaaataaataggtaggattgtgttattgtattttatttagaaaaatatttaggatatagtttgttaatttttgttttagaggtttatttttattttttatgtttaggttggagggaaacgaatatagaggaaataagaaagtaaaaagttagaattgagatgtttttttaatttaggtagtcgaggagacgggtttttatttattagtttgaatttttagattttgagtcgacgtttaaatttttataagttttgtggtttttgggtatggaaatttttattattttgttgtattttgttgttagggtgttatcgggttgtttgggaaggatgcgtgtgttttttttattgttaatgagaaagacggtcgaaaatacggattttttagggttattaaattttagtaggttagagaagttttttttataatagttgttgatttgggaaaattgttttttgagattttatattggagttttggttttagttatgaatttatggttttttgttgataggtattggaattagggtttgggtttttataggatcggatggggtcgagggtttattttagagattcgtgagtgggtagaattggtatgtgagatggaagttagggttggggtttttggtttagttttttggttaggcgattttttattagatagatttttgtttgggttattaagtatttaagttatgaagttttgtggattttgtaaattgttttgttaggtaagtaggtatgattgagtgtatttaggaagggattgggttttttttttttaagaattttttttttagatttttaggatggaaaagggataattttaatattttagaagattggtttttaagaagagaaaaggataagggtataatttgttttatattttttattatatttttattgaggtttagtttaacgtaaatattttgtatttttattgaatttgggatgttttttaaagttttttataaggaatttaattattttttataggttttgcgttgaatattattttgatttttgatattttatttttttttgaagaaatattattatgttataatggaaattgttgttaataagttgtgattttttaaagcgttatagtttataaatgttgttttaggtgattcgtttttttttagtttttacgtttttttgggtttttttgaaagatttattttatttttttttatttggttgtttgttagggggaagagaagtagggaaggaaagaaatagaaagagaaggttttagttttcgtttaggttttttagttgtttttttgttagggtttttttggttagaagcgttattttaaagtattggggaatttattttattagtgtgtgggtttttttggagtttttatagttttttggcggttttgtattttatgggaatgatacgtttttttattttttattaaagttatcggaaggtgagtttaggaaagttttattgttacgggatagggtcgagagattaggtgggttaggagaaattttatattttttttttttggtttagggagtggagaagggatagaattattagatggggtttggaatagatatatttgttttaattagggtagttgttgttattttgaaatattgtggttattaaaagatattatatataatatagatgagatatatttataaagtaatgatgttatttttttatttgttttaataaatagatcggaacgttcgtttttttaatttttataattagtatttttatttttatttaataaatgagaaaaaaaatttaagttattgacggtaaaggtgtttgttttggtgttttttgtcgtgggtatgtttttttaggtagattttagaggtttgtaggatatagggttatattttattttggttttagtttgattatttagatttgtatgttagattcggttttaaagaggtttttggtaatttttaaatattaaatttattttttaaaggataaagatttgttagtagggaggatttttaaaagaatacgttgaaagtaattgtaaaagagggggtattgtaaaatttttttgagtttaagtatagtcgtagtatttagataagtatttagtttttttaaggaaaaaataaggaaggggatgatagtgataaggatgaataagttttgttgtgtttgtattaagatagagaagaaaaaataagttttttaattttatttttattttgaataataagataggtagaagtagaaatgggtagtggaaatgtatttagcgttttggataggaaaatttaaatgttttttagataatatatgattgttattttattttattttttttgatgaaaaagtgaagttgatttttattattaagaattagcggaatagataaatttttgggataatattttgtttgattttaatttataatatttgtaatattaaggggaaaaaaaaaagtatttagatttttaatttatgttttttatatttttattaattttttattatattttaagttttagggtatttgtgtataacgaaaaagtatttttttttttaattaggttttatttagaagaaaataaaaaagaaatttaaagttaagtagtttttagttaattacggttaaatatgtggtatttatttgttttttattaaaaagaaaaagtattttaagaattttaaatttattaatttaatattttttgggattggaaaaatatatttttaagatagtttttttaaaaatttttcgtagagggtattagagaggtatgattgaggttagtttgggaattatagttatttttggtaaaagttttttgatgtgaggaatgttttagtttggtatagttggtaaaagtttattttggggaattttgtgtgtgtgtgtgtgtgtgtgtgtgtgtgtgtgtgtgtgtgtgtgtgttttgggaaggggtggttgaggaagaagagtgttagtttggtattttttaattttaaaaaggaaatattgtttttgatttatttttataagttatttgagaaataaatagtagttttggaaaagttttaggttttgtttttgttttgtttttttattaaaagggggtttagttgatgaaaataagttatgaaatgatttatgtttgtgtaattggttggattgcgtaatgtttaggttttgaaatcgtaatagttaagtagttaggtagggtatatatttgggagatgtttttttaggaaagttaggagagaaaaaataatagtaaaaagaaaaatttaagaaggggaggtgtgtgtaacggttattgataaaataaaattattaatgattaatttttgagattaaaattataattggaataggaaatattttttatgttttaagtttttgttatatataagaatagaggttgtaataaagattagtttgttttttttatttttaaagttattggagtttatggttatgtattaagatttagttttatgaagttagagaggacgggaaagttttgggttgaagaattggtaataaattaattaggaatattggatttttaaaagagagagttgaaaaaaataaaatttatttttttagagaaaaattagagaattgttttatatggatcggtttattgagatgttataaaagagaaaggtttatttattaattgttaggaaagttttttagtataggaagcggagagaaataaagtgattataggttttatttggtatgtagtaaagttattttgagtttaagatcgggtaaggttatagtatagatttgtgaaggaataaaagtttttgaggttagtttttaggattatagaataattttgtttatatttggagtaatgatagaaaaatttattagttttttttcgttttttatttaattattattatattaaggagcggataggttaagaaatttgttttaagtggtattattttgttaattttttcggtttgaaaggcgttttatatattgtcgggtcgaatgggtaggcgtttatgcgaaatttcgtgtattggttattgttaattgtaaaatatttatgtgttatagtatgttaggaattagttaatagttgttttttgtttcggtaatgaggttttattatattttgttggattgagtttttttttttttttttagtattggttttttgtttgatttttttttaaaatcgggaattgttttcgtttatattttgggtttaaagttttagtgatatagattatttagttggggtattgatgttcggtttgatttttttttaggttttagggtttatgttaaattaggtagtgagattgtaatattttaatgattattgttaaagatatattagggaaaagaatagagaagaaattaaaagatttttttttgattttagggaggaggagatagataggcgtttggggtttgtcgaacgggagacggagggagtgggtatagattttaatttatttttttattatgtttatatttaatataaattattagcggggttgggaagtaaatataattaataatttttcggattttaaatttattattttggtgtttattacgaagggtgtattgattgtatttttaatgaatagattaggttgtttttattgtgggtgtttataggagtattatgggaggtagagggaagatagaaaagttattttggggatttattaggtatagggaattattttggaataagggatttttttattagatttaaaagagagttacgttttaaaattttttttagttgagtttatttttttttggaagtttattttagttttttttagaggttaaggttatcgttttatggagtatgagtattttttgttgtagttaattatgttagattttatagatgttgattacggtgggttttatgttgtattgggtttgcgttaatttagttttttttcgagatagagcgggtgggggagttgtagtagagggtagatacgttattagtattttttcgttaatagtatttttttggtatttataaatatagagattatacgtataatttttttagtgtaaattagttcggttgttttagaaataagttgtttttttggaaggaggtaataggtttttggtagggggtttataattttaggagtttatttgggtaaaatataacgtgagaggaaaagggtatgttgtttttttaagtttattttttaattttttattttaaaagggggtgggggggaaggggaggacgaaaatttagaatttataacggtggttcgtaggtattttttcgttaagaaaaagaaaagaaagtaaaagaggtagtggcggcgagaagagggtaggggttcgttcgcgtcgttaggtgtatcggggttcgtatttatttgttggtcgtcgtcgtcgttggagtaggattcggcgtgcgtaggagagtcgttgttgtttcgggacgaggtgttaaagttttcgggataattttggtatatgattcgcggtgggggtcggagaggaaatagggtgttttttttttttcgttttcgtcgcggtcgcgtatcggttgttgcgcgttcgttcgttcgtcggtcgcgtcgcgggttttgggtttcgtttttgggttttttttttatcgcggagggcgaggatagggaggcggcgatattttaggaatagcgtttttcgagcgttttttatagtattttttttcggttttgcgagcgtcgcgggattagttgtttattcgatttttttttttaaaaagtcggcgcgtttttcggttttttttttgcgcgcgttttttcgttttcgcgcgtagtcggagtttagcggggatttacggtttaattaaaaattggaaattaaaaaaaagattaggagtttagcgagtttggtttgttagttttggggattttcgattttagatagggttaaaaaggcggaaagaaaagttgttcgttgggagaaatttttgttttttttttttagaaaaggagtcggagaataaatttttcgtggtcgattcgtcgttcgagtttcggggcggttcggatatttgattaggagaaggcggcgtgcgttcgtttcgcggtttcgagcgcgttagggggatagcggttcgtggggtttaagtagagttggcgttgagagggacgcggtttcgtttttcgtttcggcgtttagattcgtatttttttttcggagttcgttttcggacgggttcgtttcgttcggtcgcgtttttttttttttttttttttttttttttttttttttgttttcgtcgagcgtcgttcgttcgttcgttcgttggttcgttcggagttttagcgttttgttcgagatgagttattataatggtacgagtttaatttatattttttattttttagttttgtattatgtggatttatttacgttaattttagattttattttgtagggaggagcgtacgaggaggcggggggaggaggtcgcggaggaggaagaggcgcgggaggggaggaggcgggcgtatttttttttttttagtttcggttttcggtcgcgttgacgttaatcgcgtatttcgcgcgaggaatttaggcggtggtacgggcgggagcgggcgttacgtacggttcggatgcgtcgaggtattttcggttttttttattttttcgtttatttttcgggtttagcgtttttggtttgtttttttggcgttcggggtttagcgtatgtggtttgttttattggcgtacgttgttaaagatggttatttgcgttagaggacgcgagtgcgggttttttcgttttcgggtgacgtggagggagagggattttttcgttcgttttcgagtgcgttgcggtttttttttcgttttgggaaggggttcggggcggggtttcgagagcggtcgcgcgggtttcgttttcggattttagaaaataattatagttttgacggcgagacgggcggttcggtgcggcgttatcgggaggtcgggagtcgggcgcgtagagtcgttcgtagggagggcgcggttgcgcgcggtcgtaggcgtttttcgcggcgtcgtcgagtgtagcgggcgtttcgggcgcgtagggtgttcgcgtcgttttgcggtcgggtgttggcggggtacggcgtcgggcggggttggtttgtttattttttttttcgtggcggtttgtttatcggttttttttttgttttttgttttttatgttttcggttttatagttaattcgttaggagtagttttgaagatgaaattaattagttaagatatttcggtcgttttatacgtcgggtaattaggacgtatttaataagagtaatcgggcgtttataagtaaattttagattgttacgaattaaaaaaaaaaaaaaaaagttagcgagagggtgtgttttaacgttgtcgtttttagttgttttggagcgaagtttagggcgcgggttgtcggatatttgggtttttttttttcgttgggcggggttgggaggggcgcggcgtagggtatagagtatagattttagagtaggaacgttcggttacgttatttacgagttgtgagattttggacgaattttttaatttttttgggttttagtttttttttataaagtgaaggagtttggagatatgattttaggtttttttttgttttggagttttaattttttcgttgagatgatggtgtgtgtgaatggagaagtattgtagcggaagttagggaatttaggttttggtttagggtttgtgttagttttagtttatttaatttttaagtagcgttagttatttgtattttatagggtttttatgaggatttaatgttaagaggtgttgagagtttattgttgataattcgttgtgtatcgttatataatttttgtttttagtttttttatttgtaaagtgggggtgttggtagtagagaaaaatagagtcgggaacgcgaagtttttttggggttttatataaagcgttggtattttcgggacggttggcggtatttggtcgttttaagggttttaagatacggtaattttaaataatattcggggttattgtttatagttataaaatatattttgttttgaacgttatttttaaggacgcgcgcgcgtgcgcgacgaggcgaggttagttagatttttcgtattttcgttgttgttcgttggatagagtttttaatttcgtaggtttaggagaggggtgtggggtaggcggacgcgcgcgtcggtcgtgggtgttttgttttttttttttttttttttatttttgcgttttggtttgtttgggtgtttacgcgttttttttagtaggattgagtaaatgtagttttttgacgtaaaacgaattagtttttttttagcggtagtagtaaaatttagaaaattgggggtgggggtagggacgggaggggtatagaagaaatcgtgatatttttttattcggtttttagttttttttcgcgttacgcgggttttaggtcgttttagttaagttttgggggttgtaaagggaggcgcggttaaagcgttttgtttgagtttttttagtagtaatcgcgtgtcggagcggcgcgaatagacgtatttttggtttttttttgagtagtagaggttgtttcgtttttttttatttggcggtcgaaaattcgggtgtttttgggttttttttatatagtttttttagtaacgcggggggaaagaggcgggggaaggggagcgggagtttttttcgcggttttcgtagtttcgggcgcgtttagtttcggttaggcgtcgtcgggagcgcgcgggcgagcgtattttcgcgttttcgttcgttttcgttttgttagtttttcggttttttttttttttgtgggttttcgtaaagtttagtagtttggagacgtttgtagagtattacggaatttgtgttgatgtaatttattagtttttttttggtgcgttttggtttgttttagagcgttttgatttcggtttttttttattttagaattcgtgttggttttttttgttcgtcgggaggtttgcgtttcgtagttcgtttatttttttttagtttttttagcgtcggatatatagcgttgtgttttggtgttgttgcgggattgatttttttcggttgagcgagtgttttagcgaattgtgtttgttatatagagaatttagtttttaagtgttttttttttgggaaattattttagaattatttagttagaaagggttttttggttttttggaatgttaaaaatagaggtgattttttattgagtgttaaaattagagttaggtattatgttgaatatagggtttgttttgtgaaatttttatagtaaacgttggaggtgggtattattttttggttgtagaagaagatagtgagattgaataatttgtttaggggaattggttagtgagttagtgatttgttaggagtgtagttgagatttttcgatattaggtttttttttttttttaggatatggtatgatttgttttttgttggaatgtttttgttttttttttattggttttgaaaggtatggtttttatttggtgtatgattttattttatatttagaggtgcgttttaattttttattgaataaatagttttagcggtattttttagtttagagaagaggttatgttaagtgagggaagggaaggggaagagggaagttggggtgggaagaaaagggtagatgagttgggaagaaaagggtaggtgagttgtttttttattgtttttttgggtttttgagattttttttgttttatttttgtcggtttttttgtttgtttattttggttagtgtttggtttttgagagatgaggaattttagaatagttgtttttttagagttgtgttggtttatatatattagtatcggatatatgaagtttttttatatatatcgttttatttgtttttatatatgatatttgtgaaagggatatagatagtagagtgattgtggattgttagaaaggaggtcgaggtgtagagtgttatagtagtttatttataattttttagttgtaagtgttagttattgaggtatgtattgtattttttaggtgtggagtagagaaaaggttatatttattgatgaatagggatttatatttggggaagaagtaagtatgatttttttttttgtggttttatataatttttttgaaattttaagagtaatttttttagttaaagtttttttagatgtgatatataagtttttatttaatatgatttttattttatgaatgggttatatgttaat

SEQ ID NO: 79 - DNA, 7272 bp, Artificial Sequence
  chemically treated genomic DNA (Homo sapiens)
ggtttgttttagaatgttagtttgattgtttatttggttcgtatattttaggatattttggttgttatatttgtttttgattttttagggttggtagttatcgattgggaggtatggcgtttacgttgggtttttaattgggatattaaggatatttatcggtagcgtttacgggtattggtataggtatagtattttgattggttagttttttaggtggaggtagtagtttaggattagttttagggagttgtacgggtttggatggtaggtattttttagttggggcgggtattgcgttttcgcggtttttggggtttttatggtttttttgattgttataattatgattttttaagttttaattatatcggttagtgtttattaggtattcgtgtttaaaatgattagttagggtggttgtggggttagagtcgtgttttttattttagtatttatatgttcgtagtgttggagggtatagggaagttatagatgtatgtgtaatatcgtgtggtcgaggtatttcgtgtggttgtggttgttggtgattttaatttgtcggtgttgttttatgtttagattttttatgatacgataaattattttttgtttttggtgagttttttgtaatttgtttattttgttaatttgttttgttagatattaggtttagttttggggtattttagttttgggatatttttttcgtttttttttttttgagatagagttttattttgttatttaggttggagtgtagtggtacgattttggtttattgtaagttttgtttttcgggtttatgttatttttttgttttagttttcgagtagttgggatataggcgttcgttattatatttagttaattttttgtattttttagtagagttagggttttattgtgttagttaggatggttttaattttttgatttcgtgatttattcgtttcggttttttaaagtgttgggattataggcgtgagttatcgcgttcggtttttaattttgggatatttttatttatttatttattttttttttttttttttttttgagacggagttttgttttgttatttaggttggagtgtaggggtaagattttagtttttgtattttttatttttcggatttaagtgatttttttgttttagttttttaagtagttgggattataggtatgttattaatatgtttggttaatttttgtatttttagtagaaatggggttttattatgttggttaggttggtttcgaatttttgattttaggtgatttttttattttagttttttaaagtgttgggattataggtatgagttatcgcgtttggcgtatgggtatatttattgagtgtgtatttggtgttaagttttgtgttaggtataggtaatttaatatttattggaatgatgtagtttttgtttgtatggaatttataggttagaggaggaagtagtttgtttttggttttatggttagagtagttttaggtgaaggttatgaattatttgttttatttaatggtgttttagtagtttgttatatggtgggaaggaggttttatagagttgtgttgttttttttttaggatgagttggagtatagtttgggggagagtgcggtttagggggtagttggagtggtgttttgggtgagttgggaaaatataagaattaaggtgagtttaggtttggtatgagggtgggggtgggggaggggtggggttattaagttgacggggtagattttgatttattttttttatttgtaaagttttggttgattagtaggtgagtgttttagtgttttgggtgggtttatatatggttatggtgtttttgacgttattttttttttttatttaggaattatgttaggttattaaggagtatatggatattatattggggttttttattttgaacgtgattagtggggtttttttttgtagttaagttttgtgtttcggttatggtcgttgtgttcgtcgtattagttattttaaagttttttttttttttaattttgttagtttttttatttagtttacgtttggtggtgggtttttgagtttgcggggtgtttttttatttgaagattaggtatagatggttgtggagtttaaatgtcgatgttattttggttggtaggtatcgtggtgtgagcggaagagtatgtggtgattggttatatattgagttgtatatattgagaatttaatgtattttgggtttggttagggtttttttaaatatatgtatagttatataagttatggttatagtaaagagtatatttagttattgttataggtatattttttgtatatatatgtatatttatagattggaatagtggtataaggagttagaattatagtagatattatttattttatgtttatatgtatttatttggtaaggttatagataatttttttagagatattgagttagtttttgaattgtagtaattataaaggttgatatttattgagtgtttattttttgttaattttcgtgttaagcgttttatgtggatttatttattttttataatgaggttatgaggaaattgagttatttatattgagagtaagtacgttgtttaaggttgtatagtaagaaaagggagaagttgagatttaaatttaggttgtttagtttcgggggtatagtttttgtatttttattgagtttgtggtaattagttttgtacgatttttgaatttgttgagaggtattagtttagtaaataaagtagttatgatttatttagttgtttattgagcgtttaaaatgtttaggtttcggtatttaaagggtataggaaaggtttgttatttttattagatttgacgttagtttaagggcggttgttttttagggtggggtttaaattttaagaggaagttttatttgatcggatcgtttttaagttgttttggggtaggaggtcggcgggaatcgaagttagatttgttagagtttggggcggggttggcggaggtagagttagttggaggcggggtttgcgtttggttgaagtgacgtgttgggttggggtagggtttggaagaagttaaatcgaggcgggatttaagttgtgacgtaaggagaaggaggaggggtttgtatggggtcgggtggggaggaggcggatttaaatggagatggggtggggtttagtaggggcggagttagggtagagattgagtcggcgtttggcgggtgttgtgacgcgtaaattaggggcgggttttaagcggcgacgcgcgggtgttgggaggttttagaacgtcgtggcgtgtcgtaggacgcgacggttgtagaatattcgtcgtatcgttgggggttaacgttgtcggatcgaggagttcgaggtggcgattgagtgagatatttagttgtgcggagttaggacgcggaatattttagaggttagtattaatatgttagtatcgtattttttttatttgttgtttgtaggtttatttcgcgcgtgcggtttttaagtggttatgttattttgtacgtttttttcgcgttagtcgttcgtttttagattatgtcgagttatatttgtttatagagtcgagttttcgaagtttttatttttaaaagttttatagtttgtgatttattaggagggagggggaaatcgaggttcgggagagacggagaagttattttttgaggatttcggagtttcgtttatagtgggtggggtcggtattgaaggggttaaggtcgcggggaagtttcgggtttagttttaggggcggattttggggttttttttttttagattaaagggtgcggttgttgtagaggtggttgatgtaggtgaggggtttatagttttgtgaatggtgtgggaggtgaggggaggggggtgtttgttattgattagtgtttaattggttttaagtttaggagaggtaaggggagttaggaggttttttttggagtaggtgagtagaaggagggggtttagttgttcgtttacgattagaaaatttttagtatagatttgtcggacggtaggattttggttaagatgggaaaatagtagggtttgggtataggaggtttgggtttttaatttggtgatcgttggatattttgtggatataggaaggaagttgtggtttttatttagggtgtttgcgaaatttaagttagtggggaattaagtttgtagaggtaatattgttgtgtgattgtgggttaggtttagtgttggtgttgttggggttttatttgaggagatagttgggtttatatttaaagtgttttgagatgggtagagttgggaagggggttatgggttttaggtggggaaggtagttaagataggttaaagtttagtttgatgggtgtatgagtggggttttaggatttattaaggtagtgggtatagtttaggtagttgaaaaggttgggagttggaggagattcggaatatagggagaagaaagggataggaagattttcgggtagttttttttatggagggaattttgggtaggtttgagtagggggtatagtgtttgttttgtattttttattttatgttttagtggtggattaggaggattattggaagatagaaggttagtaagtagattgggtcggttgttttatagatttggtggttatagattttttgtgaggggaggttttgaggaggataaatttgtagttagagtaggttggggttaggatttttaggttttgttttagttttaagtagtttatttattatttttagtttttttttaatgtggggtagatatttggatttatttgttttgttttataggggatgggttttttttaggttatttgtgttattaggtgagtgtgggataaagtgtagtttattattttttagttttagtatgtatggttttttttgtattttgttagtttttttttgttttaattttatttttttttttggtatagtttagtatggttgttatttataggaggagagttattgtggtttgaagagatgttattgtttggagattggggttttaatttttagtttggtattgagttatttgtaatttagtagtaggtgattttggtttttagtttgatttagttgaatttggattttgtgtataggtaagagttgattttgagttttggtttagttaagttgatttttatattagattttatatatcggatggagttgattttgagtattagtttagttgagttgattttggattttgcgtgttagttaaagttgtttttggattttatatgttaattagagatgatttttaattttggtttaattgagtttattttggattttgaatattagttagaggagattttagtttttagtttggttgagttgattttggagtttgtgtatcgtcgattcgagtttttggatgtttgtgttgattttattaatgattagtggtttcgtagtcgtatttttcgtttgtattttttgggttagtttttagatgttttttttttttgtttgatgttgttaagtttttattttatatttgaagtagtattcgttgtggtgggttatgttcgtttgttacgggtgttgaattagttttagagttttttagtggagatagtggtggtggttcgggttttgaggggtcgtggttttggtcgtcgttttatggagggtttggaggtttttgttcgggttcggggttttcgtaagttgtattttattatttatgattaggtgtatttttatatttatttgggttattagttgggtgagtttgtgtagggtttggtttttattagtagacggttgtttgttattttgtttaatgttttttttatagtttttttttttcggttatttaggaaggttttaaatttgattgtttaagttgttttaaggggttttaagggatttttattgttattatttttttttttatttgagtgtttgattattttatttttagttttattagggttttttttaaaaagtttgttggagatataatattaaaatgtgagggggcgttttatattttggatggaaaaagatatttgaggttatttagggtaaggaattgtttttttggtttaatagattgtttcgatagtttataagttttagtttattgattatattttagtttttagtttttggggggtagttttaatttgggtatgttttttgggtattagtggggttaggaggtggttttggtttagagtcgttagtgtggttgaataaaggtttttttgggtatggttgtgatagtttatttgttgatttttttatttttattttttattttttttgtaggttttttatttttgtagaagtttttagatttattttggttttgaggttattgatgggaggatgtttgttttttgtttttattttttatttggtttaggagatagggtggttgtttttttttttatttatttattattatttattgagtatttattgtgtgttaagttttggacgggatataggtaatgggtaattagataaataggtatatagtagtaggatttatgtggtataggggaggtatagaggttttgggaatttaagtgattttattttatttggggatttaggagattttttagggtagtgatgttatagtagagatttgagtgttaggtaggaattaaattaggtaggtgaggaggtgggagttgattgtttttggaagagggaataaggtgggtagaggaaagaaggggatttgtgatagttgtgggaggatatagtggtgtattgataaagacggaatatgggagggaatgtatttttagtttattgtaaagttcgttttggtgtgtatttgttattcgatgttcggggtattatagttagtttgcggtgtggttgttttaaaaggtttaagagatttttggggaaatatgttttttttagttttttttgtaaggatggggaggagttgggggagtttttttggttttttttgttatgtggaaggtgtggttatagttgcggattttaagtttatattttttttttttttgtaggtttttatttttggggaatgattacgtaattgggtttagttttggtgttgggggtggttttgtgtttgggttgtggttagtttttattataggtttttgaacgttttttttttgtgttgtggaatgtatttttagtatattgtgaggttcgttttggtgtgtatttgttatttaatgttttgggtattatagttaatcgtggttagtatttttacgg

SEQ ID NO: 80 - DNA, 7272 bp, Artificial Sequence
  chemically treated genomic DNA (Homo sapiens)
tcgtgaaaatgttggttacggttggttatgatgtttagagtattgagtggtaggtgtatattaaagcgggttttatagtgtgttgagggtatattttatagtatagagaaggggcgtttagggatttgtggtaggggttggttataatttaggtatagggttatttttagtattagggttgggtttagttgcgtggttattttttaaggatggaaatttgtaggagagaggggggtgtaagtttagagttcgtagttatggttatattttttatatggtagggaaagttaggaaagtttttttagtttttttttatttttataggaggagttggggaaagtatgtttttttaggggttttttgggttttttaaagtagttatatcgtaagttggttatgatgtttcgggtatcgagtggtaggtgtatattaaagcgggttttatagtgagttgagggtatatttttttttatgtttcgtttttgttaatatattattgtgtttttttataattgttataagttttttttttttttttgtttattttgtttttttttttaagaatagttagtttttatttttttatttgtttggtttaatttttatttagtatttaggtttttgttgtgatattattgttttgggaggttttttggatttttaggtggagtgaagttatttgggtttttaaagtttttgtattttttttgtgttatatggattttgttattgtatgtttgtttgtttagttatttattgtttatgtttcgtttagggtttgatatatagtaggtgtttagtgaatggtaatgagtgaatggggaagaaaatagttattttgttttttgagttaggtggggggtaaaggtaaaggataggtatttttttattaatggttttagggttaaggtggatttggagatttttgtagggataagggatttgtagaagaggtgagaggtgagggtagggggattaataaataaattgttatagttatatttaagagagtttttatttagttatattgacggttttgagttagagttattttttggttttattggtatttaggaaatatgtttaggttaaagttgttttttaggggttaggggttgaggtatggttagtgggttgaggtttgtagattgtcggggtagtttattgaattagaaagatagttttttgttttggatggttttagatgtttttttttatttagaatatggggcgtttttttatattttgatattgtgtttttagtaggttttttgaagggggttttgatggaattgggggtgagatggttaggtatttaggtaggggagggggtggtggtaatggaggttttttgggattttttggggtagtttgggtagttaggtttggggtttttttgggtggtcggggagagggggttgtggggaaggtattaagtagggtggtaggtagtcgtttgttggtgaagattaggttttgtataggtttatttagttggtagtttaggtgggtatagaagtgtatttggttatgggtggtgagatgtagtttgcggaagtttcgggttcgagtaaagatttttaggttttttatgaggcggcggttaaagttacggttttttagggttcgggttattattattgtttttattaagaggttttggggttggtttagtattcgtgataggcgggtatggtttattataacgggtgttgttttaagtgtggggtgggggtttagtagtattaggtagagggggaaggtatttgaggattggtttagggagtgtaggcgggaggtgcggttgcggggttattgattattgatgaggttagtataagtatttaggagttcgggtcggcggtgtataggttttagggttaatttagttaggttaggagttggggttttttttggttggtgtttaggatttagggtaagtttagttggattaggattgaaggttatttttggttggtatgtggaatttaggggtagttttggttggtacgtaggatttagagttagtttagttgggttggtatttaggattagttttattcggtgtgtagggtttagtgtaggggttagtttggttgggttagggtttagagttagtttttgtttatgtataggatttaggtttagttgagttaggttgggagttaaggttatttgttgttaggttgtaggtggtttagtgttaggttggaggttaagattttagtttttaggtagtagtatttttttagattatagtggttttttttttgtagataatagttatgttgggttgtgttaggagggagggtggggttggagtagggaagggttgatagagtgtaggggggattatgtatattggaattggggagtggtgggttgtattttgttttatatttatttgatagtataggtgatttggaagagatttattttttatagagtagggtagatagatttaggtgtttattttatattggagggaggttgggagtgatggatgagttgtttaaggttggggtagaatttaggagttttggttttagtttgttttggttataaatttgttttttttaggatttttttttatagggggtttgtaattattaggtttataaaatagtcgatttaatttatttgttggttttttgttttttagtagtttttttagtttattattagggtatgggatagaagatgtaaagtagatattatattttttgtttaaatttatttaaggttttttttataggaaaaattgttcgggagtttttttgttttttttttttttttatgtttcgagttttttttagtttttagtttttttaattatttgggttatgtttattgttttagtggattttggggttttatttatgtatttattaggttgagttttggtttgttttgattgttttttttatttggagtttatggttttttttttaattttgtttattttaggatattttggatatagatttaattgtttttttagatggggttttagtagtattagtattgggtttggtttatagttatatagtagtattgtttttgtaggtttggttttttattggtttgagtttcgtaggtattttagataaggattatagttttttttttatatttatagggtgtttaacggttattaggttgggggtttagattttttgtgtttaaattttattgtttttttattttaattaaggttttgtcgttcggtaggtttatgttgggggttttttagtcgtgggcgggtagttgagttttttttttttatttatttgttttagagggggttttttggttttttttattttttttgagtttgaggttaattaaatattggttagtaataggtatttttttttttttattttttatattatttatagggttgtaagttttttatttgtattagttatttttgtagtagtcgtattttttggtttagagggaggaagttttaggattcgtttttagggttgagttcggggttttttcgcggttttaatttttttagtgtcgattttatttattgtgggcggggtttcggggtttttagagagtggttttttcgtttttttcgggtttcggttttttttttttttttagtgggttataggttgtggagtttttgggaatgaggatttcgagagttcgattttgtgggtaggtgtggttcggtatggtttggaaacgaacgattgacgcggggagggcgtgtagggtggtatggttatttggggatcgtacgcgcggggtggatttataggtagtaaatgggaagggtgcggtattgatatgttgatgttggtttttgggatgtttcgcgttttagtttcgtatagttgggtattttatttagtcgttatttcggatttttcggttcgataacgttggtttttagcggtgcggcggatgttttgtagtcgtcgcgttttgcggtacgttacggcgttttaaggttttttagtattcgcgcgtcgtcgtttagaattcgtttttggtttgcgcgttataatattcgttaggcgtcgatttagtttttattttggtttcgtttttgttgagttttattttatttttatttgagttcgttttttttttattcggttttatataggttttttttttttttttttgcgttatagtttaggtttcgtttcgatttggttttttttaggttttgttttagtttagtacgttattttagttaggcgtaggtttcgtttttagttggttttgttttcgttagtttcgttttaggttttgataagtttagtttcggttttcgtcggttttttgttttaggatagtttggaaacggttcgattaggtggggtttttttttgaaatttgggttttattttgggaagtagtcgtttttagattgacgttagatttggtgagagtgataagttttttttgtgttttttggatatcggggtttggatattttaggcgtttagtaaatagttaagtaaattatgattgttttatttgttggattggtgttttttagtagatttaggggtcgtgtagggttggttattataaatttagtaggagtgtaagggttgtattttcggagttagatagtttgggtttgaattttaatttttttttttttttgttgtgtaattttgggtaacgtgtttatttttaatgtgagtgatttagtttttttatagttttattgtgaggaatgaataagtttatataaaacgtttagtacggggattggtaaagagtaggtatttagtgaatgttagtttttgtgattgttgtagtttaaagattggtttagtgtttttggaggaattgtttatgattttgttaagtagatgtatatggatatggaatgaatggtgtttgttgtggttttaattttttatgttattattttagtttgtaagtatgtatgtgtgtgtagggaatatgtttgtgatagtggttgagtgtattttttattgtgattatgatttgtatgattgtgtatgtatttgaggaagttttggttagatttagagtgtattaggtttttaatatgtgtaatttagtgtgtggttaattattatatgttttttcgtttatattacggtgtttgttagttagggtagtatcgatatttgaattttatagttatttgtgtttgatttttaagtgagagggtatttcgtaggtttaggggtttattattaggcgtgagttggatggagaaattggtagggttaaggaggaggagggttttggggtggttggtgcggcggatatagcggttatggtcggagtatagggtttgattgtagagaagggttttattggttacgtttaggatgaagggttttagtgtagtgtttatatattttttgatggtttgatatgatttttaggtgggaagggaggatagcgttagggatattatggttatgtatggatttatttagggtattgaggtatttatttgttggttagttaggattttgtaggtagaaagggtaagttagggtttatttcgttagtttaatggttttattttttttttatttttatttttatgttaggtttaagtttattttggtttttgtatttttttagtttatttagagtattattttagttgttttttgggtcgtatttttttttaggttgtgttttagtttattttgggaaggagatagtatagttttgtggggttttttttttattatgtggtagattgttggaatattattagatgggataaataatttataatttttatttggggttgttttggttatgggattagaggtaaattgtttttttttttagtttatgaattttatgtagatagggattatattattttaataaatgttgaattgtttgtgtttggtatagaatttggtattaagtgtatatttaatggatgtgtttatgcgttaggcgcggtggtttatatttgtaattttagtattttgggaggttgaggtgggaggattatttgaagttaggagttcgagattagtttggttaatatggtgaaattttatttttattaaaaatataaaaattagttagatatgttgatggtatgtttgtaattttaattatttgggaggttgaggtaggagaattatttgaattcggaaggtggagggtgtaggagttgagattttgtttttgtattttagtttgggtgatagagtaagatttcgttttaaaaaaaaaaaaaaaaaaaggatgaatgaatggatgaaaatgttttaaggttgggggtcgggcgcggtggtttacgtttgtaattttagtattttgggaggtcgaggcggatggattacgaggttaggagattgagattattttggttaatatagtgaaattttgattttattaaaaaatataaaaaattagttgggtgtggtggcgggcgtttgtattttagttattcggaggttgaggtaggagaatggtatgaattcgggaggtagagtttgtagtgagttaagatcgtgttattgtattttagtttgggtgatagagtgagattttgttttaaaaaaaaaaaaacgaagaaaatgttttaaagttaaagtattttaaggttggatttaatatttgataaggtaggttgataaggtgggtaggttatagaagatttattaggggtagaaagtggtttgtcgtgttatagaagatttggatatagggtagtatcggtagattggggttattagtagttatagttatacggaatgtttcggttatacggtgttgtatatatatttgtgatttttttgtgttttttagtattgcgggtatgtagatgttgggatagagggtacggttttggttttatagttattttagttggttattttgggtacggatgtttgatgggtattggtcggtgtagttggggtttagaaagttatagttgtagtagttagggaagttatagaagttttagaggtcgcgaggacgtagtgttcgttttagttggagggtgtttgttatttaggttcgtgtagttttttggaattggttttgggttattgtttttatttgaggagttggttaattagggtgttgtgtttgtattagtgttcgtgagcgttgtcggtaaatgtttttggtgttttagttgaaggtttagcgtgggcgttatgttttttagtcgatgattgttagttttgagaagttaggagtaggtatggtagttaggatgttttggaatgtgcgggttaggtgggtaattaggttggtattttggggtagatt

SEQ ID NO: 81 - DNA, 10609 bp, Artificial Sequence
  chemically treated genomic DNA (Homo sapiens)
tttgttgattgaaaaagtgtgtttgtttgataagtttttagtttttgttttttttcgagaaaagtgtgaaattatgtagttgatttgtagtttagttttaaattttttttttaattgtttttattttagttgtttgtatttggtttttaggtttttagtttagtttttttttttgtttttatatttttattatgatattaggaaatatgttatttttaagtacgggttaaatgtggttttatttgttattttttaaagtttgttggaggttgttagaagtagggattatgtttaagggttgttatttttttatatttatttaggttggtttttgagataaaagagtatatatttttgaaattaaagttatttgttgtcggttttattttttttttttgttattttttttttgtttgtaagtgtatgtgttttaagagaaagtaatttgtttgtgtagaagattgttagtggttttttttttattttggtatttagtttttgtatatatttgaaattttattatacgttttgtaagtttataatttgggtttattggtattgttttattgattggtatatgacgaaatatgaatgtgtttgtgtttaatgtgtattttgtagattggattgtggtttgtttatattaggaggagggagtgtatgtttaattagatttattttggatcgaagtattttgtgtttgtggtagtaaaggattgaatttattttttaggttagttttcgttaattattatagggttatgtggagaagtatattttttatagtatggtagtagaaagggttgtgatttgttgataatgtttgttttgtttatgggagtagggtgcggcgttttttgaattttgtgttcggtaattttttttaggttgtttaatattattggtatatttgtaaagaattataggattagggaaattttaaatagattaagttttatttgtttagtagaaaaagggtttttttttttgtaaaaggattggagaatagaggttttatagttgtaatttagatattttgattataggtataggatttaattggtgaaaatgttttttattagtttttttaggtatgataatttgtagaagattatagttatgagtttatggtatgtggtatttttttgattagagtaattttagggttttatatttacgatggtattatttagtgtttttcggtgttttagagatttatagtaagtgaattagtatattttatgttacgatgtatttatagtattggatattaaagttatagtatataattttgtataataaaggatatttttattttagtatgaatgattaaaagtttgttttgtagtaaggagtttgggtatattgaatatagtttatgtagcgttttttgatttttttgttacgaagtagttagtttgattgttttacgggggagaaagaagattataagtttttatataaatatttttattgtgattaatttttaatgatttgaaattgtatttattgatttatttttatttttttttatgtgttattgaagagaaaagagtaagtaagatttgtatagaaatattatttaatttagaatgttaaatgcgtgaagtggtgatggtgttgttttttttataaaagaggattgttttttttaaaatgattttgattatttttaatttatttatttaattaatatttattgagtgattattgtgtgttaggtattgttttggttacgtaagatgtagtagttaaaaaaaaataaaaatttttgtttttaaggagttgatgattttttttttttattattttataaaattatagataagttgttagttgtttattatagtatattttttttttaaagtggattttgaaagattatttttttttagtttggttaaatgtaggattttgttttttttagggtttttatatggggtttattttgttttgttggagttggaagagtggtttgtaatgagtgtttttattatttttaggttttgtttttttattatagtgtataagtttttagagaaaattagagtattttatgttattttttaaaattgtttgtttttatttaatatgtttgttcgtttgaagaaagtatgatgggttgtatgttaattatatttatgtaagggaaatagttgttaaattgttttaaagatgtagatataaattttttttttcgtgtaaattaggattttttgattttgatattattaatatttggggttaggtaatttttgtttgtaggaggttgttttgtgtattgtaggaagttttagtagtatttttggtttttatttagtaggtattaggagtattttttttttttgagtgtgataatttaaaatgtttttagatattgtttaatatgttttttgtaggggagtggtaaagttatttttagttgagaattattgttgtaagtgatatgagtttgtgatttaggttttatattttttaattatagtagattagtgaaatttatggaaaaaaagaaaaaatatttgggataagaagtgttttttgtttggtttttgtagaaatgtggagtaattttttattacgaaagagttaatattatatgagtaagttattagtttgatgaagtaatattaataataaatgatgaaatttttttagtatattatgttttggaaatagtttgtattttttattggaaatttgttaaaattatatttatttattataagttataaagtatgttgggtacggtatattgtaagttaattttaaatgatttaggagtaaatgtgttttagatttggtgagtttagtttaagtagtaggcgttttttttttaaatatttttatttttaagaattgatatttaatttaataagtatttattgaaatgtgtaatatgagagagttttagaatagtttgatattgtttttattatttagtttagtagaaaagtagtgtttagaagagtgtttagggagtatttttttgatatggtattttttgtattggtttgtaagatagtatagaaaagtatgtttttttttttgttgttttaagttttttttattttgtgttagttgtgttttttttagtgaataaatgttattatatatgatggtatgtgttttttatgtgattttttggttttaaatgggttagtttgcggttttggtagggatttttattggtttgttttatttgatttttgttggtttgttggggtattgtaagtttaaagggggattatttaattaatttgtatttttgaattttttttattttttatatatatattagtagattttaaaatgtaaggtatattgttgataaaagttataggaggggtttgttacggtggtttacgtttgtaatgttagtattttgggaggtcgaggcgggcggattatttgaggttaggagtttaagattagtttgattaatatggtgaaattttatttttattaaaaatataaaaaattagttgggtgtggtggtaggtatttgtaattttagttatttgtgaggttgaggtagaggttgtagtgagttaagatcgttttattgtattttagtttgggtaatagagtgagattttattttaaagttataggagggatcggttttaatatagagagggtaaaagagaaatataataggttatagaatttttatttatttggttgttatttattgttttaggtattggtaatgtagttgtgatgaaaatagatagggtttcgtttttttggaatttgtagtttattgggtaatgagataaataaataggttttgttttaatatggcgttaagggtgttagaaggagggagatgaggatgttatgggagtattttagaaagtataatttagtttggaagggtagggtagtcggagaacgttttgtagaggaagcggtgttttattaattaggatatggatacgttatatattaaagaggaaggggaaaaagtgtttaaggttatgttttaaggttcgaagcgggtgggggaatggagtttttgaggatttgagaagttgggcgtgtttgaataggagagtcgagataggaagagtgggaagtaaataaggaggaggaaatgaggatgttttttaggatgttgattggagtaattgggatattggtggttttatttatttagatgaggagtttgggagaagagggtttgaggagggtggggtggtaataattcgagtttttaattcgttattaattttgtaatatgggaatgatttttttttaatgtttttgaaggatgttaaaagttaatggaaatttgaaaagttaattagtagttttaagtgattttattattgtagattattatgatattttgtaaatatattttgattttttaggttttgtcgattttattttttatttagtaattagtttttagttttgatatttagtattattttagtgtttaaaattgattagttttgtgtttgaagatgtggtatttatgagtgaagtagtttagtgatttgattgaaggttgtattttggtttatttaatatttttgtgtttttttttttaaattttttgtgttttgatggaagtttttattttaatgttgtatagatttattttatagagtatgtattattttttttagatggttaaaggtagaattggtaaatatgattggatcgtttgtaggtaggtgtatgttgttatagaattttacgagatataggttttattcgaggaaagttgttgtatggtgaatattgtgtttcgtgatgatgttgttatttagaatatatggggaataaatgcgattgtggggttaaggaattgaatttttttttaattatttttttagttattgtttttttttatgttttttaataggtttgaaatagttaatagtgagttttgttaattatttttcgtttattgtagagtaatttagtaattagggagtattttagtttacgtgtttttttttttgtttttggtaggaatttagataatgggttgtgtgtaatgtaaggataaagaagtaataaaattgacggaggagagggacggtagtttgaattagagttttgggtatcgttatggtatagattttattttttagtattattttagtttcggtgtgatttttatttttaattataataatttttacgtagtcgggggttaaggatttatcgtttttggaggtgtgaatttttcgttttatacggggattttgcgtacgagaggaggaataggtaagtttttaaagttatagagtgtagagagggggtagttatttttaaattttttggtaattgaatatttgggtttttattatttttttttgattaggggttttatatgtaagtttttaatttgttttttttattagatgaggggttgtaagaaaagttagagtttgatgtataaataaaatgtttggttatagggttgtaaggtgttttaagttgttgttttttgaggattttatatgggttagtgagttataatattttattgaggtattgtaggttaatgatttttagttttatttggttggttggtatagaagaattagggtagtttttttaaaatacggatgtttgagttatgttttagttttttgaattagaggttttaggattgggtttgggtgtgtgtattttgagttttttagatattaatgtattttttttttttatttatttttttttaatttttagtttgttttttttttttttttttttttggaagtttttttgttttttatattataaggttatattttgttgttatgtgtatttgttgatttagttaatattttgtaaaatatttggcgtacgtttttagatatatgtttttcgaaatatttgtaagttatgttatgtatttttagttatttaaattttttttgagtatgtgaattatggtaattagatattttatattatttgttttagaattattttgtttattgtaaaagtttgaaagaatgtagtattttttagtttatttggtagtagatgttttatataaaagtttgaaagaatttagtattttttagtttatttggtagtaggtatttttttatttagggaggaggtattattaaggtattagtaagttttttttttttttgtatttaatatatattatatattagtgtagttgtattaaggagtttgattttgagtttttggatattatttattttttttttgttagtatagtatattttgtttagtagaagaagtatttatgtttatttttatgttgtggtgattttagttttttttttaatttaggttttgtatgggttgaatacgtgttaagtatttttatttattttttttatttttttaaaggtgtttgaagagatatagataggtagtttaaggttatttgttttttgatgatgtaggagaaaaaaagaggtaaatataatttttatttttgtgtttatcgtgagaagtataagggttttgttagtttagattgttaattttattgatatagttattgtttttgtttatttatttacgagtgttggatatggatttttgggtttgtaggtattatttattaaagttattagagagggttatttgtgttgagtatgtgggtttttatcgtagttaggaggagtttttgtttaagaggttatttgattttttataaaatttgaaagttaaaatatagtatttttaaatgttggtagatttttttgttttgagttatttggttttaatatatatgtatgtttttttttttaatattgtttttagttttgtaaggttaagaataacgtttgtgtttttttgtaattttttttgattttttttttagtttttggaatatggaatataaaagtttttagtgagaatttgttagttgatgtaaggagagagtggggtgttggtttttatgtgttttgttttttatatagtggggttggtttggttttatttttaaattgtttttaaagaagggaatttggttatggagtgttaaataagaataggtatgattttacgggtatttatatttttgttttaagttaatttttttttttattttttaaagaaatttaaggaaagaaggaaagttgttaaatgagtttagttttgtatggttagatttttgaatgttaatttttttgaggaaagttttatttgggatggggtagaaagataagttttatttttttttgtggtttttgaatagtgttatgatatatttttttttttggaattatttatatagtaaattggtagtttggtaaaaaaggtggattttggtcgggtgtagtagtttatgtttgtaattttagtattttggaaggttgaggtgggtggattatttgagcgtaggagtttgagattattttggttaatatggcgaaatttcgtttttattaaaaaatataaaaaattagttaggcgtggtggtgggcgtttgtaattttagttattcgggaggttgaggtaggagaagtgtttaaattcgggaggcggaggttgtagtgagtcgagattacgttattgtattttagtttgggtaataagagtgaatttttattttaaaagaaaaaaaaaaaagtgggttttttgttatttttgtaggttatagtaggtattttgaagtgtagagagattagaatgaaaaggtagattgtagggaattattattagttattaattgttgtataataaattgttataaaatttagtagtttaaaataaaatatatttaatttttttttttttttaattttagatgttttttatttagaggtttttaaaagaaataaaatagaaaagttaatagtttgattaaatatatagtttaaaaatgttttttgacgtttaataataagttttaggaaagaaaattatagagttattttgaatggggtaaataagttattattggtaagtttgtggtattagtaaaataaaaataaaaaattaaatttcggttaggcgtagtggtttatatttgtaattttagtattttgggaggttgaggtaggtagattacgatgttaggagtttaagattagtttgtttaatatggtgaaatttcgtttttattaaaaatataaaaaattagttgggtatggtggtaggtatttgtaattttagttattcgggaggttgaggtaggagaattatttgaattcgggaggcggaggttgtagtgagttgagattatgttattgtattttagtttgggcgataagagtgaaattttattttaaaaaaaaaaaaaaaaaattaatttttttgattatatagatatttttatattttttttttttaatcgggtataaaagatttttttttataattttttttataatttaatggttatttattatatgatgtttaattaattttttttttaatatatagaggttatgttttttaaattttatttagacgagtatggtatttagttagatatttttggtaatagatttttttttttttttaattaaattattaaatttttgttttaattaatgtagaagtattaattagtgggagatttaggtttataattgtattaggtatatagagggtgttgcgtttagtttgggtttttataaagtagtaatattttagggagtatagaattagtgatatcgtgatttttaaaaaataaaataaaaataaatttattttatgattatgtaatttttattagaatttatattttttagagtagttaggattttggaaattatgaaatgttattgatatttattattaaatataagtataaaatgtaagaattaaaaaatatttaaaagaaataattgtttagttttagtttttgagttaggaggatttgggttgtggaaatagggagggttagtaatttgttttagtataaaagaaaatagattttgaggtagataattgattatatatagttgattagataagtatatagttttggaaggtaatttaatttattattgtttttaagatatatgtaattgttttaataaaagagttttaataatagtgtattattttatatgtattaaaatagaaataattgtgtatttatgaattaggaattttatagttttaaaattggttttttttatatttgaatatttgtagtgatgatataaagtgtggtatcgtttggatttaaatttttttttatgtttttttgtttatgtgtgtttatatattaattaaaattataaaatttaaatttatagtttttgtgggttaggaatttgcgaatggttagttcggttttttagaattttttataggttgtaattaaggtacgttggttgggttatagttattttatagtttagttgagaatgatttgtttttaaatttatgtagtgttggtaggattcggtgtttcgttggttgttggttagaggttatttttagtttttggttatatgggttttattagtatggcgttttgttttattaaagtatataagttgaagtggtaatagagagagtttgttagaaagacggaagttattattttttgaagtttagttatttaagggattgtatattttgttgagtagaagtaagtcgttagatttagtttatatttaaggggaggggtttgtacgagattgaatattaggaggtaggagttattggggattatgttagaattatgtttgttgggttgggtatagtaggttatatttataattttagtattttgggaggttaagttagggggattatttgtatttaggaattcgagattagtttgggtaatatagtgagattttcgtttttatttgaaaaaaaaaaaagaattatgtttaattatatggaggaaattttaggttaaatgatattggatattttttgttgttgttagtaaatttttgtaaattaggaagggtttttttagagagttagatgagaggatatagggtgggtgtgaggaagagtgagtgttataagatagtgtgaggagaggtgagtttaaggtagggggaggataagggagagggttttatttttagtagtggggcgagtagtataaaattgtaaaatgaattgtagatgttaagggtagtatattttttaattggggtgaatattatagaaacggttttttttaaatttttttaagttgtaggaggtattttttattacgttttatgttattgttttattaggagaaagggtggtgtattttatttagaaattaatataggttttaagtggaggagaagatacgattagtaaaggatgttagtaattgttgtagagttttgtaaatttgaattttgacgttgacgttgtttttttgtttgggatgtaattttaatatttttttgttttttagtttttattaaaagttattatagaaagaagttttttaggtttaggttttttttagatatagtaaggttttttttataaagattaaggtataaatatagttttgtgattgtggttttgatacgttaattataatattttattatgttattagtgttggttagatgtagattgtgagaatgagattttagtgaagatttaattttttggaattaatttttttttgtgtaataatttttttttttgtgaatttcgtttcggtagg

SEQ ID NO: 82 - DNA, 10609 bp, Artificial Sequence
  chemically treated genomic DNA (Homo sapiens)
tttgtcgaaacgaaatttataagaagggagattattatataaggggaaattaattttaagaaattaaatttttattaaaattttatttttataatttatatttagttagtattaataatatgatgaagtgttgtaattaacgtgttaaaattatagttatagggttgtgtttatgttttggtttttgtaggggaagttttattgtatttgaaagaaatttagatttgaagggtttttttttgtaatagtttttaatgagggttgaggagtagggaaatattaaaattgtattttaaataaaagggtagcgttagcgttagggtttaggtttgtagggttttgtagtagttattgatattttttgttggtcgtatttttttttttatttggagtttatgttagtttttgggtaaaatgtattatttttttttttggtaaaatagtaatatagaacgtaataggaaatgttttttgtagtttggggaaatttagagaagatcgtttttgtaatatttattttaattagaggatgtattgtttttggtatttgtagtttattttgtagttttgtgttgttcgttttattgttgaaaatggaatttttttttttgttttttttttattttgaatttatttttttttatattgttttgtagtatttatttttttttatatttattttatgtttttttatttggttttttagagaggttttttttggtttatagaagtttgttagtagtagtagagaatatttagtgttatttggtttaggattttttttatataattaggtataattttttttttttttttaaatagagacgggggttttattatgttgtttaggttggtttcgaatttttgggtgtaagtgatttttttggtttggttttttaaagtgttgggattataggtgtgatttattgtgtttaatttaataggtataattttagtatagtttttagtgatttttgttttttagtatttagtttcgtgtaagtttttttttttgagtgtgggttggatttaacgatttgtttttatttaatagaatgtgtagttttttaagtgattaggttttaaaagatggtgattttcgtttttttagtagattttttttattgttattttagtttgtgtattttgatgaagtaaggcgttatgttggtgaggtttatgtgattaagaattgagggtggtttttggttaatagttagcgaggtatcgaattttgttagtattatatgagtttggaagtagattatttttagttaaattgtgagatgattatagtttagttaacgtattttgattatagtttgtgagagattttgaaggatcgaattgattattcgtagatttttgatttatagaaattgtaaatttaggttttataattttaattgatgtatggatatatataaataaaaaagtatgaaggaagatttggatttaagcggtgttatattttatgttattattataagtgtttaagtgtaaagaaaattagttttgaaattatgaaatttttgatttataaatatatagttatttttattttagtatatataagataatatattgttattaaagtttttttattaaggtaattgtatatgttttaaaagtaatggtaaattaagttgttttttaaaattgtgtatttgtttggttagttgtgtatgattagttatttattttagagtttatttttttttgtgttgggataggttgttggttttttttgtttttatagtttaaatttttttagtttagaagttagggttaagtagttattttttttgagtattttttagtttttatattttatgtttgtatttgatgataaatgttagtgatattttatagtttttaaagttttggttgttttgagaagtgtagattttagtgaaaattatatagttataagataaatttgtttttgttttattttttaaaagttacggtattattggttttatgttttttggaatattattgttttgtgaaagtttaggttgaacgtagtattttttgtgtatttagtatagttataaatttgggttttttattagttgatatttttgtattagttaaggtagaaatttgatagtttggttagaggggaggggaaatttgttgttagaaatgtttaattaagtgttatattcgtttgggtaagatttgggaaatataatttttgtatattaaaaaaaaaattagttaaatattatatagtagatagttattaaattataaaaaaaattatgaagaaagattttttgtattcgattgaaaaaaagagatatagagatatttatatgattaagagagttaattttttttttttttttttgagatggagttttatttttgtcgtttaggttggagtgtagtggtataattttagtttattgtaattttcgtttttcgggtttaagtgatttttttgttttagtttttcgagtagttgagattataggtgtttgttattatgtttagttaattttttgtatttttagtagagacggggttttattatgttgggtaggttggttttgaatttttgatatcgtgatttgtttgttttagttttttaaagtgttgggattataggtgtaagttattgcgtttggtcgagatttaattttttatttttgttttattagtgttatagatttgttagtggtaatttatttattttatttaagataattttgtagtttttttttttaggatttgttgttaaacgttaaaagatatttttgagttgtatgtttgattagattgttagtttttttgttttattttttttaagaatttttgaataaaaaatatttgaaattgaaaaaaaaaagaaattaaatgtgttttgttttaagttgttaagttttgtggtaatttgttatatagtagttgataattaatagtagttttttgtagtttgtttttttattttggtttttttgtattttagagtgtttgttatgatttatagaaatgatagggagtttattttttttttttttttttgagatggagatttatttttgttgtttaagttggagtgtaatggcgtgatttcggtttattgtagttttcgtttttcgggtttaagtattttttttgttttagtttttcgagtagttgggattataggcgtttattattacgtttggttaattttttgtattttttagtagagacggggtttcgttatgttggttaggatggttttaaatttttgcgtttaagtgatttatttattttagttttttaaagtgttgggattataggtatgagttattgtattcggttagagtttattttttttattaagttgttaatttgttgtgtaggtagttttaagggaagaaatgtgttatggtattatttaaggattatagagaagagtggggtttgtttttttgttttattttaagtgggattttttttaggagagttagtatttagaggtttgattatgtaaagttaggtttatttggtaattttttttttttttttagatttttttgaaaggtaagaaaagagattggtttaaaataaaaatgtgggtgttcgtaaggttatgtttatttttatttaatattttatgattagatttttttttttaaaaataatttaaaaatgaagttaagttagttttattgtgtggaaggtaaggtatatgaagattagtattttattttttttttgtattagttgataagtttttattgagggtttttatgttttatgttttaggagttgaggggagaattaaaggaggttatagagaaatatagacgttgtttttggttttataggattgaaggtagtattgggagaaaggatatgtatatatattaaaattaaataatttaaggtagaaaaatttgttaatatttgggagtattgtgttttaatttttaaattttataagggattaggtagttttttaaataaagattttttttgattacggtggagatttatatgtttaatataagtggttttttttagtgattttaatgaatgatatttgtagatttaggggtttatatttagtattcgtgaatgaatgaataaggataatggttgtgttagtagaattaatagtttgggttggtaaagtttttatgttttttacggtaggtataaggatgggggttgtgtttgttttttttttttttttgtattattagaagatagatggttttagattgtttgtttgtgtttttttaggtatttttgggaaggtgggaaggatgggtaaaggtatttagtacgtatttaatttatgtaaggtttgggttaaaaggaaagttagagttattatagtatgagggtgaatataaatattttttttattgggtagagtgtgttatgttagtagaagagaagtagataatgtttaaaggtttagggttaggttttttgatataattatattgatgtgtgatgtgtgttgggtgtagagggaaaaaaaatttgttaatgttttagtagtgttttttttttaggtgaaaaggtatttgttgttagatgggttgagagatattggatttttttaaatttttatataagatatttgttgttagatgaattgagagatgttgtatttttttaaatttttgtaataaataaaataattttggaataaataatgtgaaatatttagttattatggtttatatatttagagaaaatttggatgattagggatgtatgatataatttataaatatttcggaaaatatatgtttgagaacgtacgttagatattttataaagtattagttaagttagtaaatatatatggtagtagaatatagttttgtggtatgaaagataaggaaatttttaaaaaaaaaaaaaaaagaaaggtaggttgaggattaggaagaagtgagtgggaagagggagtatattaatatttagagaatttaaaatatatatatttagatttagttttggagtttttaatttaaaagattgggatatggtttaggtattcgtgttttgaaaaggttgttttagtttttttgtgttaattagttaggtgaggttgagagttattgatttatagtgttttagtagaatgttgtagtttattaatttatatagaatttttagaaagtagtaatttggggtattttgtaattttgtagttaagtattttgtttgtatattaaattttggttttttttataattttttatttagtagaggagatagattagaaatttatatgtgaaatttttagttaaagggaagtgatgggaatttagatgtttaattgttaaaagatttaagggtggttgttttttttttgtattttgtgattttgggggtttatttgttttttttttcgtacgtaaggttttcgtatgagacgaagagtttatatttttaaagacggtgagtttttggttttcggttgcgtggaagttgttgtagttggggatggaggttatatcgaagttggggtagtgttgaggggtggggtttgtgttatagcggtatttagagttttggtttaggttgtcgtttttttttttcgttagttttgttgtttttttatttttatattgtatatagtttattatttaaatttttgttaaagataaaaaagggggtacgtaagttgggatgttttttagttgttgggttgttttatagtaaacgaggagtaattgataaggtttattgttggttattttaggtttattagggggtatgaggaaaggtagtggttggggagatggttaggaggaagtttagttttttgattttataatcgtatttgttttttatatgttttggatgatagtattattacggagtataatgtttattatgtagtaatttttttcgaataaggtttgtatttcgtaaaattttgtaatagtatatatttgtttatagacggtttaattatatttattaattttgtttttagttatttaaaaaaaataatatatgttttgtagaatgagtttatgtaatattagaataaaaatttttattagggtataggaaatttaaggaagagggtataggagtgttggataagttagaatataatttttaattaagttattagattgttttatttatgggtattatatttttaggtataaaattggttaattttaagtattaagatgatgttaagtattaaaattaagaattagttattggatgaaaaataaaatcggtagaatttaagaggttagagtatatttgtaggatgttatgatagtttatagtaatgaaattatttaaagttgttaattaattttttaaatttttattagtttttgatattttttaaaaatattaaaaaaaaattatttttatgttatagagttagtggcggattaaaaattcgagttgttgttattttattttttttaaattttttttttttaggttttttatttaagtaaatgggattattagtgttttagttgttttagttagtattttgagaagtatttttatttttttttttttgtttattttttattttttttgtttcggtttttttatttaaatacgtttaattttttagatttttaaagattttatttttttattcgtttcgggttttggaatataattttgaatatttttttttttttttttttgatatgtgacgtatttatgttttagttaataaggtatcgttttttttgtaaggcgtttttcgattgttttgtttttttaggttgggttgtgttttttgaagtgtttttatggtatttttatttttttttttttggtatttttggcgttatattaaaatagggtttgtttatttgttttattgtttaatggattgtaagttttaggaaagcgggattttgtttgtttttattatagttatattgttagtgtttggaataataaatagtaattagatgagtgaagattttgtagtttattatgttttttttttattttttttgtattaaagtcgattttttttgtgattttgagatggagttttattttgttgtttaggttggagtgtagtggagcgattttggtttattataatttttgttttagttttataagtagttgggattataggtgtttgttattatatttagttaattttttgtatttttagtagagatggggttttattatgttggttaggttggttttgaatttttgattttaggtgattcgttcgtttcggttttttaaagtattggtattataggcgtgaattatcgtgataggttttttttgtgatttttattagtagtgtattttgtattttaaaatttattggtatgtgtgtgagaagtgaagaagatttagaaatataagttggttaaatggtttttttttggatttgtaatattttaataagttaataggggttaggtagaataggttagtggaggtttttgttaaaatcgtaaattagtttatttgggattaaagaattatataagaaatatatgttattatgtgtaataatatttatttattggggagggtatagttggtataggatgggaagggtttgaggtagtaaaggagaaggtatgtttttttatattattttgtaaattaatgtaggaggtgttatattagaagagtgttttttgggtatttttttgagtattgtttttttgttggattgggtgatgggagtagtattagattgttttaaagtttttttatattatatattttaataaatatttattgaattgaatgttagtttttgagaatgaaaatgtttggaaaagagacgtttattgtttgagttgagtttattaaatttggaatatatttatttttaaattatttgagattaatttatagtatatcgtgtttaatatgttttgtaatttatggtaaatggatatgattttaataagtttttaataggaaatgtaagttatttttaaggtatgatgtattaaaggaattttattatttgttgttgatgttgttttattagattgataatttgtttatataatattaattttttcgtggtggaaagttgttttatatttttgtaaagattagatagaaaatattttttgttttagatgttttttttttttttttatgaattttattgatttattgtaattagagaatgtgagatttgaattatagatttatattatttatagtagtggtttttagttgggggtaattttattatttttttgtaagagatatattgggtaatgtttggagatattttgggttgttatatttagaggggagggatatttttgatatttattgggtagaggttaagaatgttgttaaaattttttgtaatgtataggatagttttttataaataagagttatttggttttaaatgttaatagtgttaaggttaagaaattttgatttatacgaaggaaagaatttatatttatatttttgaagtagtttaatagttgttttttttatatggatgtgattaatatgtaatttattatgttttttttaggcgaataggtatgttaggtagaagtaggtagttttaaagagtgatatgaagtgttttgattttttttagaagtttgtgtattgtgatagagaaatagaatttggaagtaatgagaatatttattgtaaattatttttttaattttagtaaaataaaataagttttatataagaattttgaagaaaataggattttatatttaattaaattaagaaaaaataattttttaaaatttattttaaaaaagaaatatattataataagtaattagtagtttatttataattttatgaagtaatagagaagaaaaattattagttttttgaaggtaggaatttttgtttttttttaattgttgtattttgcgtggttagaatagtgtttggtatatagtagttatttaataaatattagttaaataaataaattaaaaataattaaaattattttggagaaaataatttttttttatagaagagatagtattattattattttacgtatttgatattttgagttaagtaatgtttttatatagattttgtttatttttttttttttaatgatatataggaagaagtgaaaataaattagtaaatgtagttttaagttattaaaagttaattataatgaaaatatttatgtaggaatttgtggttttttttttttttcgtggggtagttagattaattgtttcgtgatagaagagttagaagacgttatatgagttgtatttagtgtgtttaggttttttgttataaggtaaatttttgattatttatgttaaaataaaagtattttttattatgtagagttatgtgttgtggttttaatgtttaatgttgtaagtgtatcgtgatatagaatgtattaatttatttgttatagatttttggggtatcgggaaatattgaatgatgttatcgtgaatgtggagttttggagttattttgattaggaaaatattatatgttatgaatttatggttatagttttttgtaagttattatgtttagaaaaattggtgaagggtatttttattaattggattttgtgtttgtgattaaggtgtttggattatagttgtgaagtttttattttttaatttttttgtaaagggaggggttttttttttattaagtaaataaaatttgatttatttaaaatttttttagttttgtggttttttatagatgtgttaatagtgttaagtaatttgggaagaattgtcggatataggatttaaggaacgtcgtattttgtttttataagtagggtagatattattaatagattatagttttttttgttgttatgttatgggagatatgtttttttatatagttttgtagtgattgacggaaattgatttaaaggatagatttaattttttattattataggtatagggtgtttcgatttaagatgagtttggttgaatatatattttttttttttgatgtagatagattatagtttagtttataagatgtatattaaatatagatatatttatatttcgttatgtgttaattaataaagtaatgttagtaagtttaagttataagtttgtaggacgtgtgataagattttaggtgtgtgtaggagttaggtattaaaatgggaaaaaggttattggtagttttttgtataagtaaattatttttttttgagatatatatatttgtaggtagaggaggaatggtaggaagaggaagtgaaatcgataataaataattttaattttaggggtgtatgtttttttgttttagaagttaatttaggtgggtgtgaagaagtgatagtttttaggtataatttttgtttttgatagtttttagtagattttggagagtgataggtaaagttatatttggttcgtatttagaggtggtatgttttttggtattataatggaagtataagaataaggaagggaattgaattaagaatttagaaattaaatgtaagtaattgagatgggggtagttgaaaaaagaatttaaagttgaattgtagattaattgtatggttttatatttttttcggaaaaaagtaaaaattggaagtttattaagtaaatatatttttttagttagtagg

SEQ ID NO: 83 - DNA, 6413 bp, Artificial Sequence
  chemically treated genomic DNA (Homo sapiens)
  unsure 2387, 2644: n is a or g or c or t
tttttattgattttatttttataattatttggggagtaggtatggttgaatttttattttatagacgtggaaatgaagatttaggtaaggtttttaaagttattaaagattgtatagttattgagtggttaaggttttgttttttttttttgaggatagtgttatagtagttagagttaagtttagagaataaagcgggtgatgtttttgggtgaaataaatttgggttttagaaaatttcgtttatagttttttttttgtttttaaattgcggtggttgtggcggtttatatttgattagttgagtattattatttagtggttattaggtttagttttttttttcgggataggttatggatgaatagatttgttggttattaaggtttagttagagagattgtgttttttttatttagtttgttgattattacgttgtgttaggtattgggttagggttaagggtttaagtagaattagcgggtagtagttatgtggtaaaattgtcgtttgaattagaggttggtttatttggtaaatattaggtattttgtgtgtgggttgatgttatatgtggggttggtttgttttaggaggtatttgggttttattttgtaagtagaaggttatttagtagattttgatgtgagggaggggtttaggaaggttattttgtttttattttagtttgaagtaggtatagtttggttgtaggttttttgaaagggtatttagatttttttttttatggttggtattattttgttgtgtagtttagaaggtagtttagggtttggttagaggttttagaagttggggttttttatttggggaagtaggagaggaggtattttagagaatggggtttgagttaggttaggaggatggggggtttgggtggaggttggacgggttgagggtttatttttttttgtttgttgtgtttgtttgtagtagatgtaaattagagtgtggtttagaatagagagaggatagttatagcggtttatatttgtaattttagtattttgggaggttgaggttagaggattatttgaggttaggagtttaagattagtttgggtaatataataagatttggtttttgaaaaaaaaaattatttgggtatattgttatgtgtttgtagttttagttttttggtaggttgtggtaggaggattgtttgagtttagaagtttgaggttgtagtgggttatgatggtgttattgtattttggttttgggtggtaaagtgagattttgtttttaaaaaaaaaaaaagagagagagagaatatattgttatattgtttattattagggtttggtatatgaatgtatatagtggaaaattatgtagttgttaaatgatgatgtagataaatatttattgatgtggaaagatgtttataatatattgttgagtgagaaaagtaaattataaaataatttgtacggtatgagtttattttgaaaaaaatgattatatatgtgtggaaaaaatttggtagtgtttatttttaggtggtaaaatgatggttaattatatttttttgtattgtttatttatagtttttgatttttttataatgaatatttaattaaaaagataatgaaagtttggaatataattacgattaaatttgtttgtatttttggttttttgtgtagatatttttagatagttaagggttggttaggcgtgatttatatgtatcggttgtataggttatgtttgtaattttagtattttgggaggaagaggtgggagggttatttgagtttaatagttcgagattagtttgggtaatatggcgaaattttgtttttagtaaaatataaaaatgagttgggtatggtggtgtatttttgtggttttagttattagagaggttgaggtgggtggatcgtttgagttagggagattgaggttgtagtgagttgtgatagtattattttattttagtttgggtaatagagtaagattttgttttaaaaaataaaaataagatagttaagggttgagtgtgaggaaaggtttgagggttgagaaggggtggaggatgtatttgggtttatgataggggtttacggaggtggttgatggtaaaagttgggggattttaattgttgatgttgaaataagtttgtgttttatatatatagggatagtttattgagttttaatgataggtattttttgtttattatattttttttttttaggatagttttgtttttattttaattagattttttttgaattaaaagggaaggttatatgttgtgatttgttgggtagtttggaaaggcgggttatttttagttatagagatgagatagagtttagataagagtttatttttagttttgtttttttattatgntgattttattttatttttttatttattgagatagagtttttgttatttaggttggggtgtagtgatgcgatattggtttattgtagtttttattttttgggtttaggtgatttttttattttagtttttcgaatagttgggattatagtagtgtattattatatttggttaatttttttgtattttttgtatagataaaattttattatattgtttaggttggtttcgaatttttggatttaagcgattcgtttatnttagttttttaaagtgttcggattataggtatgagttattatgtttagttttgttttttttttaaagttttttgtttttttttaggtttttagtttatagtaggattaaaggttattgggcgtttatttcgtttttaagatgtttttttttatgttattgtttacgtttaggttagatgtgattagagtttaaggagtttttatttttttttttgtgttgggatttatagagggagattttaggaggtagtttgtttattatatgtttaaatgtagagtatattttgggttgggcgtagtggcgtataattgtaattttagtattttgggaggttgatgtggaaggattatttgagtttagaagttttagattagtttgggtaatatggtaagattttatttttataaaaaaagttaaaaaattagttacgtgtggtgatatatatttgtagttttagttatttaggaggttgaggtgaggggattatttaaggttgggaggttgaggttgtagtgagtcgtggttgcgttattgtattttagtttgggtaatagtgagattttgttttaaaagataaaaaaaaaaaaaaaaaaaaaaagaatatattttggtgtggagtaggggacgttgttttgatagaggttcgggggtttgagttggttttgtgagttggggaggaggtagatagttaggttttgtttgtaagtagatttggtagtattgggttggtcgttttttagggttttttttttatgtttagtgaatgatttattttggtatagatataatgttcggggtgggtatagtgtttgtttttcgtcgtattttagttttttttaaatgtttttcgagaagtttattgagtagggggtttgtattgtattttagtttgatagtttggtattttgggataaaagtagtatagttttttaggggttgtttttgttgtgtggcgttatcggcggtggagaataaggttttatttagtttgtgtttaggaaaggggattaggggatgtttaggtatggatagtgggtggtagggggggagaggagggttgtttgttttttagaagtttaaggatataaatgggtgaggggattgggtagggttttgattttgtgggattagagtggagggcgtagatggatttgaagtttttagggataatagggtttaggttttaggtttttagttgggtttagtggttttagcgtttttaaatttatttatttttagaggttttttttatttttttaggttgatgtgtgggaattcgaggaaataaatttttagtgggagacggaggggtggttagggaaacggggcgttgtaggaataaagacgagttagtatagttagtttatgtgtaacggttttgtggagttgttaaggtttggtttttgggagagaggtatagggaggttagataaggaaggggtgatttggagggatagatttaggggttaaagttttgataaggtaagagagtgtcggtttttttttgttttattaggatttttattgttatatagaggttatgattgatttttagataaagggttggtgtttaattttagtttttagttttagaattttagggaatgaatgggtagagagtaggaatgtgggatatttgtgtttaagggaaggattttaggagtttgttgggaatgaggtttagtaggaaatgaggtggtttttgagggtatagaataggtttatttttcgttaaatttttagtattttgtaggtatttatagttgagtgagataatgtttgggttatgaaattaaaaagttggaaagtaggttagaggttatttggtatagttttttttttttttttttttttttttttttgtgagataaggtttttttttgttgtttaggttggagtggcgtaaatatagtttattgtagttttaatttattgggtttaagtaattttttagttttagttttttaaagtgttgggattataagtatgagttattttatttagtttttttttttttttttaattgatgtataataattgtaagtatttattatggtttaattaatttttttttgatttatttttttagagagagggtttttttgttttagcggttagggttttagatttatggtttggttttaggtattatttgttttatgtaggagttggcgtgtttaggaagttttgtttttgggtatagtgattttagtggggtgaggggagttttttttatagttgggttgcggtttaattttatttttttaggttatgttagggggtgttgttaggggtattcgggtatcgttagtttagtttatttttttataaagttttcgtattttaggagcgagtagagttagagtaggatggagaggagacgtattattttcgttgttcgtcgtttttacgtttttttaggggagatgatggtggggggtttggtttttggtcgtcgtttgggttttggtattcgtttttttttggttcgaatgttttttttattttcgattcgggtggatttttttttggttggggtatttaatgttggttttaaggagattcgggttagtgagcgggtagagatgatggagtttaatgatcgttttgttagttatatcgagaaggttcgttttttggaatagtaaaataaggcgttggttgttgagttgaattagttgcgggttaaggagtttattaagttggtagacgtttattaggttgagttgcgagagttgcggttgcggttcgattaatttatcgttaatagcgttcggttggaggttgagagggataatttggtataggatttggttattgtgaggtagaagtgaggaggggatggggaaggggggttttgtgagtagaaggggttgaatttttaagaaggagtgttcgagaagttttagggaggggtcgaatttttttgttttttgggtttttttattttttgatggggtattatttttgttttttaatatgatgggagggattagaaataggtttagggtttcggggatttgatgttcgtatgttttttgttaggagtttagggtttttttagtatttttttattggggaaagtagtgtaggagtagcggggtttttgtgttttatttatggttgggttttgtgattgtgggtagcgagtttatttattttgagtttgtgtttatataaaggaggagttggaagcggagaaggttgatgtttatgagggagattggattttggggtgaagaaagtgagggaaagagtaggtaggtttgggcgtaaagtataggtgattgtttgttattagtttgtgatttttattaagttattttgatttgtatagttgtgaagcggtggttataataaaatttattttaaaaggtggttatttgggattagaggaatttttaggggtatggcgttttattgagttgataggatatgtatgtgtgtttttaagtgtaggaggatatgtgcgtgtgtgtgtgtgtgtgtgtaatagtgagtgtatgtttgtggatgcgtttgtgtgagtagaagtaggtgtattaattttgataaggtattttagtaatgagttaaggtaaaagtttatatttgtttattttttagataagttttttgtttaaggttttttaatttttaatttttttgttgttttattggttttgggtgggggtggtttttgtgatagttgttttaagggagattgaggtaggtatttaagtgtttttagaagagtttggatttaggaatgtgtttttttattttagg

SEQ ID NO: 84 - DNA, 6413 bp, Artificial Sequence
  chemically treated genomic DNA (Homo sapiens)
  unsure 3770, 4027: n is a or g or c or t
tttggagtggggggatatatttttgggtttaggtttttttgaggatatttgaatatttgttttagttttttttgaggtagttgttatagagattatttttatttaggattagtagagtagtaggaggattaagggttggggggttttagatagaggatttgtttggaggatgagtagatgtgggtttttgttttaatttattattaaggtgttttattagggttggtgtatttgtttttgtttatataggcgtatttataagtatatatttattgttgtatatatatatatatatacgtatatgtttttttgtatttgaaggtatatatgtatgttttgttagtttagtgaagcgttatgtttttggggatttttttgattttaggtaattattttttgaaatgaattttattatgattatcgttttatagttgtgtaagttaaagtaatttgatgggggttataagttggtggtaggtagttatttgtgttttgcgtttagatttgtttgtttttttttttattttttttattttagaatttaattttttttatggatattaatttttttcgtttttaattttttttttatatggatataggtttagaataggtgagttcgttgtttatagttataaagtttagttatgaatgaaatataggggtttcgttgtttttgtattgttttttttagtagggaggtgttgaggggattttggatttttggtagaaggtatgcgggtattagattttcggggttttgggtttgtttttggttttttttattatgttggggggtaaggatagtgttttattaagaggtagggaggtttagggagtagggaggttcggtttttttttgagatttttcgggtatttttttttggggatttagttttttttgtttataaggttttttttttttattttttttttatttttgttttatagtggttaggttttgtgttagattgttttttttaatttttagtcgggcgttgttggcggtgagttgatcgagtcgtagtcgtagttttcgtagtttagtttggtagacgtttgttagtttggtgggttttttggttcgtagttggtttagtttagtagttagcgttttgttttgttgttttaggaagcgaattttttcgatgtagttggtaaagcggttattgagttttattatttttgttcgtttattggttcgggtttttttgaagttagtattgagtgttttagttagggagaaatttattcgggtcgggagtggagggggtattcgagttagggagaggcgggtgttaggatttagacggcggttaggagttaggttttttattattattttttttgaggagacgtaggagcggcgagtagcggaggtgatgcgttttttttttattttgttttggttttgttcgtttttgggatgcgagggttttatgaaggagtgggttagattggcgatgttcgggtgtttttggtaatattttttggtatagtttgagggggtggggttgggtcgtagtttagttatggggagagttttttttattttattgaggttattgtgtttagaggtagagttttttgggtacgttaatttttgtatgaggtaggtggtatttggagttagattatgggtttggggttttgatcgttgaagtaagaggattttttttttaggaaggtgggttaagaaagggttggttggattatgatgaatatttataattattatgtattaattaaaaaggaaggaaagggttgagtggggtggtttatgtttgtaattttagtattttgggaggttgaggttggaggattgtttgagtttagtaggttgaggttgtagtgagttgtgtttgcgttattttagtttgggtaatagagagagattttgttttataaaaaaaaaaaaaaaaaagggaaggaagggttgtattagatgatttttgatttgttttttaattttttgattttataatttaggtattattttatttagttgtaagtgtttgtaaggtgttgggaatttggcgaagaatgaatttgttttgtatttttaagggttattttattttttattaggttttatttttagtagatttttggagttttttttttgaatatagatgttttatatttttgttttttgtttatttattttttggagttttggggttgggggttgggattggatattagttttttgtttaagggttaattatggtttttatgtggtagtggaggttttgatagggtaagagggggtcggtatttttttgttttattaggattttagtttttggatttgtttttttaggttattttttttttgtttggtttttttgtgttttttttttagagattaggttttgatagttttataaagtcgttatatatgagttggttgtgttggttcgtttttatttttgtagcgtttcgtttttttggttattttttcgttttttattggagatttattttttcgagtttttatatattagtttggagagatgggaagaatttttggggatggatgggtttggaaacgttggagttattgggtttaattaggagtttgagatttgggttttgttgtttttggagattttaggtttatttacgttttttattttggttttatagggttagaattttgtttagtttttttatttatttgtgtttttggatttttgggaagtagatagtttttttttttttttttgttatttattgtttatgtttgggtattttttgatttttttttttgggtataggttgaatagagttttgttttttatcgtcggtggcgttatatagtaagggtagtttttagggggttgtgttgtttttattttaagatgttaggttgttaggttggggtgtaatgtaagttttttgtttaatgggtttttcggaaggtatttgaggggggttggggtgcggcgggaagtaggtattgtgtttatttcgaatattgtgtttgtgttaaggtgagttatttattgggtatgaagaggaggttttggggggcggttagtttaatgttgttaggtttgtttgtagataaggtttggttgtttgttttttttttagtttatagagttagtttaggttttcgagtttttgttagagtagcgttttttattttatattaggatatgttttttttttttttttttttttttttgttttttgagatagggttttattgttgtttaggttggagtgtagtggcgtaattacgatttattgtagttttaattttttagttttaagtgatttttttattttagttttttgaatagttgggattataggtgtgtgttattatacgtggttgattttttaattttttttgtagagatagggttttgttatgttgtttaggttggtttagaatttttgggtttaagtgatttttttatattagttttttaaagtgttggaattatagttgtgcgttattgcgtttagtttagggtatgttttgtatttggatatgtgatggatagattgttttttgaggtttttttttgtgagttttagtatagagagggaggtgggagttttttaggttttagttatatttgatttgggcgtaagtagtgatataggaaagagtattttgaagacggggtgagcgtttagtgatttttgattttgttatgaattggggatttggggaaggataggaggttttaaaggaagagtaaggttgggtatagtggtttatgtttgtaattcgagtattttgggaggttgangtgggcggatcgtttgagtttaggagttcgagattagtttgggtaatgtggtgaaattttgtttgtataaaaaatataaaaaaattagttaggtatggtggtgtattattgtgattttagttattcgggaggttgaggtgggaggattatttgagtttaggaggtggagattgtagtaagttaatgtcgtattattgtattttagtttgggtgatagagattttgttttaataaataaaaaaatgaaataaaattantataatagaaaagtaagattggggataagtttttgtttgaattttgttttatttttgtggttaggagtggttcgtttttttaggttgtttagtaagttatagtatgtagtttttttttttggtttaagggaagtttagttaaaataagggtaaagttgttttagagagaaaagatgtgatgagtaggaggtgtttgttattgaagtttagtgaattgtttttgtgtatgtgagatataagtttgttttagtattagtagttggagttttttagtttttgttattagttattttcgtggatttttgttataggtttaggtgtattttttatttttttttaatttttagatttttttttatatttaatttttaattattttgtttttgttttttgagatagggttttgttttgttgtttaggttagagtgaagtggtgttattatagtttattatagttttaatttttttggtttaagcgatttatttattttagtttttttagtagttgggattatagagatatattattatgtttagtttatttttgtattttattagagataaggtttcgttatgttgtttaggttggtttcgaattgttgggtttaagtgatttttttattttttttttttaaagtgttgggattataggtatgatttatataatcggtatatatagattacgtttggttaatttttaattatttaaaggtgtttgtatagagaattaaagatatagatagatttggtcgtggttgtgttttaaatttttattatttttttaattaaatatttattgtagaaaggttagaaattatagataagtaatataaaaaaatgtaattagttattattttgttatttggagataaatattattagattttttttatatatatataattattttttttaaaatgggtttatgtcgtataaattattttgtaatttgttttttttatttaataatatgttgtgaatatttttttatattaataaatatttgtttgtattattatttaatagttgtatgattttttattatatgtatttatgtattaagttttagtggtggatagtatgatagtatgttttttttttttttttttttttttttagagataaagttttattttgttatttagggttagagtgtagtggtattattatagtttattgtagttttagatttttgagtttaagtaatttttttgttatagtttgttaaggagttgggattataggtatatgatagtgtgtttagataatttttttttttagagattaagttttgttatgttgtttaggttggttttgaatttttggttttaagtgattttttggttttagttttttaaagtgttaggattatagatgtgagtcgttgtgattgttttttttttgttttaaattatattttgatttgtatttgttgtaggtagatatagtaaatagagaagggtaggtttttagttcgtttagtttttatttaaattttttatttttttagtttggtttaggttttattttttggggtgtttttttttttgtttttttaaatggaaggttttaatttttaaagtttttggttaaattttagattgttttttagattgtatagtaggataatattagttatggagagagaagtttggatgtttttttaaggagtttatagttaagttgtgtttgttttaagttgaggtgaggataagatgatttttttgagttttttttttatattagaatttgttagatgattttttgtttatagggtaaagtttagatgttttttgggatagattagttttatatgtggtattaatttatatatagggtgtttggtgtttgttaaataggttagtttttaatttaaacggtagttttgttatatgattgttgttcgttggttttgtttgggtttttggttttggtttagtgtttggtatagcgtggtggttagtaagttgggtgaagagaatatagtttttttggttgagttttggtgattagtaagtttgtttatttatggtttgtttcgaggaagggaattgagtttggtggttattagatggtggtgtttagttggttaggtgtgagtcgttatagttatcgtagtttagaggtagggagaaagttgtaggcggagttttttaaaatttaaatttgttttatttaggggtattattcgttttgttttttagatttgattttgattgttatagtattgtttttaaggagagggagtaaagttttggttatttagtagttgtgtagtttttgatgattttaagaattttgtttgagtttttatttttacgtttgtaaaatggggatttaattatgtttgttttttaggtagttgtaagaataaaattagtgaaag

SEQ ID NO: 85 - DNA, 6056 bp, Artificial Sequence
  chemically treated genomic DNA (Homo sapiens)
aattacgttacgtgggttatatggggagatattagtttgagttaggaggtagaaggagtaatggtagagtaagatttagagtttttattgtagtttttttatgaaggaatgagtgaggtagagtaggtaagtttgagtaagtttaggattggatagtttgaataatttttaattgggttataagtggtttttgtaaagtattttgttttgaggtgattgagggtaaaggaaatattggtttagtgtatgagagttagataaaggaggtagttttgggtgtggattttggattgtttggtttgtatatgaaagatacgttgttagtaagttgtttattatttttaggaattagttaattttgggaggagtattttttaggattagtaaggtttaagatattaaagtattataaaatagaaaataaaaggtatgattaatataaatatttaggaaggttttgtttggtaaatgaggaataattagtttaagattgagcgttggatttgaataataagttataaaaataatatattaaaatatgaaattgttttttcggattaattaaatatatttaagaataagatttaaaaagatttataggaatataaaaatgtttagtattttatatagtaaaatttattgtttggttttagttagagattgttaggtatgtaaagatgtaggaaagtatagtatataatgagattaagagatttaaaattatatagatgttagaattagtaaagaaggatattaaaagttataattgtgtattttaaaagttgagtagattttaaaagaagattttttgattttaagaattattatagagttgtatttattaaaatagtatggtattttattaagttaagtaaatagattaaaggaatagagtttgaaaataaatttatatatgtatataaaatgagtttttttaaagttataaaggtaatgtattggagaaaggatagtatttttaataaatggtgttagaataattggatatttgtatggaaaaattttttaaaatttgggtttatattttatgttatataaaaaaattaattttaaatggattatttatttaaaattataaaatttttagaagaaatgtaattttaaattttgggttaagtaaaaatttagatataatattaaaagtattatttatgaaagattaaattaatatattagattattaaaataaaaaattgttttttaatgatattgttaaaagattaattacgaaattttggtaaagttaagtttaataaaaaatgtgtatttagaatatataaagaatttgtggttaggtatcgtggtttacgtttgtaattttagtattttgggaggtcgaggttagattatttgaggttaggagttcgagattagtaatatggagaaatttcgtttttagtaaaaatataaaattagtttagtgtggtggtatatatttgtaattttagttatttaggaaggttgaggtaggagaatcgtttgaatttaggaggcggaggttgcggtgagtcgagatcgtgttattgtattttagtttgggtaataagagtaaaattttgttttaaaaaataaagaatttgtaaagtttaataataagatatggggaaaaaatttgaatagatttgagaagatatagatggtaaatatgtatattaaaatatgtttaatattattagttattagggaaatgtttaagttaaagttagagagatattgttatatatttagaagaatggttaatgtttaaaaaatttattatgttatgtgttgttgaatatgtaaagtaataagaatttttaaatattgttgatggggatgtaaaattgtattattattttggaaaatagtttgatagttttttaagatattaaaaatatatttattttatgatttttatattttatttttaggtatttatttaagagaaaaggaaatatatgtttatgtaaaaatttatatatgaatttttatagtagttttatttgtaatagttaaaaattggaaataatttaaatatttattaatagatgaatggataaattgtggtatatcgtttagtgtaatattcggtaataaaaaggaattattggtatacgtgagtgagtttttaaataattgtgttaagtgaaaagttatatagaagagagtatattcggttgggtgtggtggtttatgtttgtaattttagtattttgggaggttgaggtaggtagattatttgagattaggagtttaagattaatttggttaatatggtgaaattttatttttattaaaaatataaaaattagttgggtatggtggtatgtttttgtagttttagatatttgggaggttgaggtaggataattgtttgaatttgggagggggaggttgtagtgagttgagattgtattttagtatgggtgataaagtgagattttatttaaaaaaaaaaaaaaaaaagtatattttatatgattttatatatttttaaattttataaatgtaaattgtaaaaaataaagtaaattaatggttgtttttggatgttagtgggtatggagaggcgggagggagggattattaagaggtatgataaaattttcggggtgataggtatatttattattttgattgtgatagtggttttatagatgtatatatgtgtaaaatgtattatattgtatattttaattttgtgtagtgttcggaatgtttattttttgtgttttaattatattttaatgaagggttattttaaaaaataaaatatttttaaaaaataagtcgagcgtaatggtttatgtttgtaattttagtattttgggaagttaaggcgggtagattataaggttaggagtttaagatcggtttggttaatatggtgaaattttgtttttattaaaaatataaaaattagttaggtatgatagtagttttttgtagttttagttattcgggattttgaggtaggagaatgttttgaatttggtggggtagaggttgtagtgagttaagattatgttattgtattttagtttgggtgatagagtgagattttgttttaaaaaaaaaaaaaaaaaaaaaaaaagttgtgtatagttggaaaagaaaatattagattttatgggtgattggtaattagttttaagtggaataagtgtatttttttttttttttaggttttagagaaaaatttttatgttgggttgatagtagtagttaggattagttgtttaagattttggattttcgagatgaagatcgttagtagaggttgattttttttgtgggtttatgttttaaagtattttatttgggtttaaatatttttttttttaggatagaaaagaagttttcgagttttggttatgttgggtttgtggagtatattattttttttacgtgtttttttttgatgtttttagtatttttgtaagatgtttttagtatttttgtaaggtaggttaaggtatgaggagttataggtttagggagttgaaggtagattttaagagttgggtgtggatgttgtatttttgagtttgggtcgtttgggttttgtttagtttgggaagtatttttaaatttattttttgttagttttttataattttgcgggagggtaaagtttagattattatggttgtttttattatgtagttgtagattaggaaattgaggtttagggaggtttttattggttttgttttagggataacgaggtttgaggtttgttttttataggaggattatgatggtttttttgttttaaatggtttttttggaaggggtttgtttatttaggtgaattttggggtcgagtagttttagtgatagtttttgggatggttgtaggagagggagtagtatgtaggcgttaacgttatagattggtattaggttattcgggtttatattttggtttttttagtttttggttttttgaatttggataagtaattttttttttttattttttgtttttttgagatagtttcgtttcgttatttaggttggagtgtaatggtataatttcggtttattgtaatttttgtttattaggtttaagtaatttttttgttttagttttttaagtagttgggattataggtatttattattacgtttgattaattttttttttttttttttagtagagatggggttttgttatgttggttagtttggttttgaatttttgatttttattcgtttcggttttttaaagtgttgggattataggtatgagttacgtcgtttggttaataagtttttttaatttttttttgttttagtcgatttatttggaaaatagagtatttattttttttaaatgagaagagaagtaaaggagtataaggttattagaatagtatttggtttaagggaggttatggaagtgtttgttgaataaaaaaatggttttatttttggtttagttttaaaggtttgagtttttgttattgttatttagatagttttgggtggaggttttgttgatattgaagagtgtttgtttttttttttttaatgcggtagatattttttaaaatttacgttatttttatttttattttagtgggataatgggaggtttggtgtattttatttttaagatgagggaataggttttgagaggattatatcgttagtaagtgataggttgggattaaggttaggtttgtttgttttttagattaggtttgagtgaggatcggtttgagtacggtttatttgttttttttttcgtttagagtttgggttggagttgttttggttagtgttttttgttttattaggttgtatgagttataagttgttatttgtggagttcggtggttttgttttcgatagttttgttggtggtcgtgaaggttttaaatatttgtatggtaatgaggttaatttttttcgtttgattcgttttaggttttggtttcgttattgtatcgtgtgtttttgtttaagaggtagagagattgaaattatttgttgtcgtttggatttttttagagattgtttggaatattagttcgggttttcgtatattattttggtaggaattttttagtgataattgagagtttgtgggttggtttagggttagtggtgggtagggagttagtagggcgtaagggattggagagtttggtatttttttaataggagttttagggagagtttagaggtttgtttatgtgataggtttattagtttgtttggtttagggtcggtttttatatcgttttgatttaaataatagattgtttatagaataaatgtatgttggtttaagtttttatttttttataattttttttgttggttttttttattatttattttattttgttttattttggggagtttgaatattttgttttagagtaggggtatagggaaatatttttatggtttttgagttgttgggtagggttagtttttaaaataaggagagttgggagggagttggattttaggatggagtgttgagagttgaaagttttatttaatagaggggagggagtagagattttaaaaagggaaaggtttggttaggttttatagtaagttaggagtagagcgggtttgaattgtgagatttttaatttttttaaagtttttgggtaagaagttcgtttaaagtagtgagattagtggggtttgaggaaaatttttttttttattgtttttattttagttttgggatttaatattattttgtttttattttttttggttatttttttttgttttgagaagttgttatgtatttagttagattgggaatgtgttggaatttatgtattataggggatggatgcgtcgtttatagtttttgtgggttatggttgtgagggaaagttagagttggtggttggggtgtgtaggtttaggaggatttttgttttttttttagttttggagtttttttttgttgttgagtttttttttatttagtagggttttattgtttttagattttattttttggtttagtatatgatttttttattttgggttttagtattttttcggatatttttaaattt

SEQ ID NO: 86 - DNA, 6056 bp, Artificial Sequence
  chemically treated genomic DNA (Homo sapiens)
gaatttagagatgttcggggggatattgaggtttagagtggggaagttatgtgttaagttaggaggtaaggtttgggggtagtggggttttgttagatgaggaaagatttagtagtagaggggggttttaaggttaaggaggaggtaggggtttttttgggtttatatattttagttattagttttgatttttttttatagttatggtttatagggattgtaagcggcgtatttattttttgtggtgtatggattttagtatatttttagtttggttggatgtataatagttttttagggtaaaaggagatggttaaggagggtgaggataggatggtgttgggttttaggattgggatggaggtagtgaggaaaaggattttttttagattttattgattttattgttttaggcggattttttatttaaaggttttggagagattggagattttatagtttaggttcgttttgtttttgatttgttgtgggatttggttaggtttttttttttttgggatttttgtttttttttttttgttaaataggatttttagtttttagtattttattttggggtttagtttttttttagttttttttgttttagggattggttttgtttagtagtttagaagttatagaagtgtttttttatgtttttattttggaatagggtgtttaggttttttagagtgaggtaaaatggggtagatggtgggaggggttagtagagaggattatgagaaagtgaaagtttaaattaatatatatttattttgtgagtaatttattatttaaattaaaacggtatgagagtcggttttgggttaggtaagttgataaatttgttatataagtaggtttttgagttttttttgaaatttttgttggagaaatgttaagttttttagttttttgcgttttgttgattttttgtttattattggttttaagttagtttataaatttttaattgttattgagagatttttattaggatggtgtgcgaggattcgagttggtgttttaggtaatttttgggagaatttaggcggtagtagatagttttagtttttttgttttttggatagaagtatacgatgtagtagcggagttagagtttgaaacggattaagcggagaaggttggttttattgttatgtaggtgtttagagtttttacgattattagtaaggttgtcgagggtagggttatcgagttttataagtggtagtttgtggtttatgtagtttggtgaggtagagagtattggttaggatagttttagtttaagttttaaacggaggaggaagtaggtgggtcgtatttaggtcggtttttatttaggtttagtttaggaggtagataggtttggttttggttttagtttgttatttgttggcgatgtggtttttttagagtttgtttttttattttgggaatgaggtatattaagttttttattattttattggagtgagagtgaggatgacgtaagttttggaaagtgtttatcgtattgaggggaggagggtaggtattttttaatgttagtagggtttttatttagggttgtttgggtggtaatggtaggaatttaaatttttggggttaggttagagatgaagttatttttttatttaataagtatttttatagttttttttgggttaggtattgttttgatggttttatatttttttatttttttttttatttgaaggaggtaggtgttttgttttttaggtgagtcgattgaggtagaaagaggttaaggggatttgttggttaggcggcgtggtttatgtttgtagttttagtattttgggaggtcgaggcgggtggaggttagaagtttaagattaggttggttaatatggtaaaattttatttttattaaaaaaaaaaaaaaaaaattagttaggcgtggtggtgggtgtttgtaattttagttatttgggaggttgaggtaggagaattgtttgaatttggtgggtagaggttgtagtgagtcgagattgtgttattgtattttagtttgggtgacggagcgagattgttttaaaaaaataaaaaataaagaaaggggattatttgtttaagtttaaagagttaggaattggaggagttagagtgtaagttcgggtggtttggtgttagtttgtgacgttaacgtttgtatgttgtttttttttttatagttattttagggattattattggggttgttcggttttaggatttatttaaatgagtaagttttttttaaaggggttatttgaagtaggagaattattatggtttttttgtggggaatagattttaagtttcgttgtttttggagtaaagttagtaaggatttttttggattttagttttttgatttgtagttatatggtggaagtagttatgatgatttgggttttgttttttcgtaggattgtaaaagattagtaaagagtgggtttggaagtattttttagattgagtaaaatttaggcggtttaggtttaggggtgtagtatttatatttagtttttagaatttgtttttagttttttgggtttatagttttttatgttttagtttgttttgtagggatgttgagaatattttgtagggatgttgagaatattaaaaggaaatacgtagaaaagatgatgtgttttataggtttaatatgattaagattcgggaattttttttttgttttaaaagggaggatatttgagtttaaataaggtgttttaggatatgagtttataggagagattagtttttgttgacggtttttatttcgagaatttagagttttgggtaattgattttagttgttgttattaatttagtatggaggtttttttttgggatttggaaggaaaggaaaatgtatttgttttatttagagttagttgttaattatttatgaaatttagtatttttttttttaattatgtataattttttttttttttttttttttttttgagatagagttttattttgttatttaggttggagtgtagtggtatgattttggtttattgtaatttttgttttattaggtttaaggtatttttttgttttaggatttcgagtagttgggattataggagattgttattatgtttggttaatttttgtatttttagtagagatagggttttattatattagttaggtcggttttgaatttttgattttgtgatttgttcgttttggttttttaaagtgttgggattataggtatgagttattgcgttcggtttgttttttaaaaatattttattttttaaaataattttttattgaggtataattgaaatataaaaagtagatatttcgagtattatataagattaaaatgtgtaatatgatatattttgtatatgtatatatttatgaagttattattataattaagatagtaaatgtatttgttatttcgaaagttttgttatgttttttggtaatttttttttttcgtttttttatgtttattgatatttaaaagtaattattgatttgttttgttttttatagtttgtatttgtgagatttggggatatatggaattatataggatatatttttttttttttttttttaggtgaagttttattttgttatttatattggagtgtagttttagtttattgtaattttttttttttagatttaagtagttattttgttttagttttttaggtatttgggattataggagtatgttattatgtttagttaatttttgtatttttagtagagatggggttttattatgttggttaggttggttttgaatttttgattttaagtgatttgtttgttttagttttttaaagtgttgggattataggtatgagttattatatttagtcggatgtatttttttttatatggttttttatttagtataattatttagagatttatttacgtgtattagtagtttttttttattgtcgagtattgtattggacggtgtgttataatttatttatttatttgttgatggatgtttgagttgtttttagtttttggttattataaataaagttgttatgaaaatttatgtataagtttttgtatggatatatattttttttttttttgggtaaatatttaggaatggaatgtggggattataaggtagatgtatttttaatgttttaagaaattgttaaattgttttttaaagtggtggtgtagttttatatttttattagtagtgtttgggagtttttgttgttttatatatttaatagtatatagtatggtgagttttttaaatattagttatttttttgggtgtgtagtaatatttttttggttttaatttgggtatttttttaatgattaatgatgttgaatatgttttaatgtgtatgtttgttatttgtatttttttaagtttgtttaaattttttttttatgttttattattgagttttgtaaattttttattttttgagatagagttttgtttttgttgtttaggttggagtgtaatggtacgatttcggtttatcgtaattttcgttttttgggtttaagcgatttttttgttttagtttttttgagtagttggggttataggtatgtgttattatattgggttaattttgtatttttattagaaacggggtttttttatgttgttggtttcgagtttttgattttaggtgatttggtttcggttttttaaagtgttgggattataggcgtgagttacggtgtttggttataaattttttatatattttggatatatattttttattagatttagttttgttaaaatttcgtggttagttttttaatagtgttattggaaagtagttttttattttggtggtttaatatattagtttggttttttatggatagtatttttggtattatatttgaatttttgtttaatttaaggtttagggttatattttttttagaagttttatagttttaagtggatgatttatttggaattaatttttttgtatggtatgaggtatagatttaagttttgagggatttttttatatagatatttaattgttttggtattatttgttgaaaatgttattttttttttagtgtattatttttgtggttttgaaaaaatttattttgtatatatgtgtggatttgtttttagattttgtttttttgatttatttgtttaatttgatgaaatattatgttgttttgatgagtatagttttatagtaatttttgaaattagggagtttttttttaaaatttgtttagtttttgaaatatatagttataatttttaatgtttttttttgttaattttaatatttgtgtagttttggattttttaattttattatgtgttgtgtttttttgtatttttgtatgtttagtaatttttgattggagttagatagtgaattttattgtgtggggtattggatatttttatatttttataaatttttttgagttttatttttggatatatttaattggttcggaaaaatagttttatgttttaatgtgttgtttttatgatttgttatttaggtttagcgtttagttttgggttaattattttttatttattaggtaaggtttttttggatatttgtattaattatgttttttgttttttgttttatgatgttttggtattttgggttttgttaattttgaaggatgttttttttagggttagttaatttttagagatagtaaataatttgttggtagcgtgttttttatgtataaattaaataatttaaagtttatatttaaaattgttttttttatttaatttttatatattaagttagtattttttttatttttaattattttagggtaaggtattttatagagattatttataatttagttgaaaattatttagattatttaattttaaatttgtttaaatttgtttattttgttttatttatttttttatgagaaaattataatgaaggttttgggttttgttttgttattgttttttttgttttttgatttaggttggtgtttttttatatggtttacgtaacgtggtt

SEQ ID NO: 87 - DNA, 5333 bp, Artificial Sequence
  chemically treated genomic DNA (Homo sapiens)
atgtttgtaattttagtattttggtaggttaaggcgggtggattatttgaggttaggagttcgaggttagtttgatgattatggtgaaattttatttttattaaaaatataaaattaatcgggtatggtggtatatgtttgtaattttagttattcgggaggttgaggtaggagaatcgtttaaatttaggaagtggaggttttagtgagttgagattgtgttattgtattttagtttgggtaataagagtaaaattttattaaaaaaaataatatatgtatatatatattataattttatatatatatatatattatgtaattttttttattattttatatatatatattacgtaatggtaaaatgttttttttgtttttttagtagattgttagttttagaagagaaaggattatgtttttggtttatttagatatgtttatcggtttggtatagtttttggtttatgttataggtaataattatttgtagaatcggtgaatgtatgaatagaagaatgagtgaatgaatgaatagacgaaaggtagaaatttagttttaggtcgggcgtgggtggtttatatttgtaattttagtattttgggaggtcgaggcgggtggattataagattaagagatggagattaatttggttaatatagtgaaatttcgtttttattaaaaatataaaatattagtcgggtatggcggtaggtttttgtagttcgagttattagggagtttgaggtaggagaatggtatgaatttaggggggcggagtttgtagtgagttaagatcgcgttattgtattttagtttgggcgatagagtaagattcggttttaaaaaaaaaaaaaaaagaaatttagttttaaagagtttatagtttggtaagaggaataaaatgtttgtaaatagttataggataggttaaaggaaggagaggttatttttagttgagggtattttattaggaaagtattttagattttttataattattagatatatttcgatgttttttatttttttattaatggatcgtttttttggagaataatttttaatgtgaaattatttagtacgttaagttaggtagatttttgtgtattttttggttgtttagagattattaattagtgtaaataatttttttattaatatatagtagtgtttgttttttttttttttaagtttttcgaggtttttttttcgtgtttgaattttttggatatattatgtggtaaattgaagggtttaacgagatataggaagtgaaatacgatgtatattgaaacgtgtaatataaatatgtagtatgaagtgtttcggtttattaattcgagttatgttgggtgttttttttttattattttttttaatgtttatggatattttattttgtggttgaagttttttgtgtttaattttttttatttttattgaatattttttgtgtagggatttgatttttgttttgttagttttgtattgaggtaagttttgtttatgtttagtagtgttattatttttattagatgaggtttttaaagagtttggtatggaaggaaagtttggggggttttagaagttattatttaggaattgggagagttttaggtaagttattttatttttttgggttttagtatttttatttatatttttatggttagtagagtgttaagtatatagtggatacgtagaagtattgattattttttttattttttttaggagagtttttgggaatttttatataatattttttgaagattttaatttaatgagttaagtaattgattcggtagtaaatttatggaaaggatattagaagttaaaaggaggtagagtatgttttagtataataattagtttttgattttaaggaagaaagaatagagttgtaggtgagaagtgtgcgttttaaattattaaagtgagagtggaaggagtatttattagttttttggaggcgatttttaagatcggtgagaatggtttcgaaaaatgtgatcgtttttaattttatagttttgaatttaataggagattttgaagtttgaaagatattattttaggattaatagtagatttgtgattttttatagtaggtatatagaattttagagttagtcgaggttggatataggaagggtttttaaatatatagagaaatttatggattttaaattataaagggaggttttttaaaagaattaagatgattttgagatttattttgagtttttttttttttttttttttggatgtagagtttcgttttgtcgtttaggttggagtgtagtggcgtgattttggttaattgtaatttttatttcgcgggtttaagtaattttttgtttcggttttttgaatagttgggattataggcgtttgttattatatttggttaatttttgtatttttagtagagacgggattttattattttggttaggttggttttgaatttttgattttatgatttatttattttggtttttttaagtggtgggattataggcgtgtgtttaattttttttgagttttttgaggttgatattagaggtgagaagtttagtttttttttattggttatgtggggagaggttttagtttgtagtaattagggatttggttttaagtgatgttttaatagtgggcgattttttagtattgttaggagaattttaagtttaatttaaagttgattttttattagtaatgaatgatagatatggtttttattgtttaaggttttgggaagatttagattagagaaaacgattatcgatttttatttatatttgtgggttttagtttttttttttggtttatggttattatagtaattttttgtaaaggtgtttttttaggggtttttagagttttttgagttattataattttgggttaatagaaatggagaggtaagaggagatatttttttgttttggttggttttacgtgtttatggtagtaatttgtttggggagtttcgttatttttgtgtttatttgtagagttatgtagtggtttttaattagggtttttgttatttttatttttaagggaggttggagattttttttatggtcgaaaatttatatttaagttttcggtattagtaaaaaggttttgttatgggggttttttgttttagttgagattggaggaatatggaagaagttaaaataattaaataatttagtagtattatattatttgttttggagaaaaaaaaatttaatattattattttttgttttttgagatggagttttgttttgttgtataggttggagtgtagtggcgtaattttggtttacggtaatttttgttttttgggtttaagtgattttttcgttttagtttttcgagtagttgggattataggtttatgttattacgtttagttaatttttgtatttttagtagagatggagttttgttatgttggttagtttggttttgaatttttgattttaagtgatttatttattttaaagttatttaaagtttggggattataagcgtgagttattgtgttcggtttggagaaaggattttaaatgacgtaatgtaggaagagtaaggttgtggagatttgttgttttggttgaggtagtttatgtaattagtttttttgagttatagttttttgatttgtgaaatcggaagaaaataatattttttttataagataagtggtaggttagatgtgagaatgtataggtaggttttcggtaattggaaaagttttatatagatttgaaaaggaggaggagaaaaaagaggaggggtttttatggttggatagggtatttttttttttttttttttttttttttttttttttttttttgaggtggagttttgttttgttgttaaggttggagtgtagtagtacgattttcgtttattgtaagttttgtttttcggatttacgttatttttttgttttagtttttcgagtagttgggaatataggcgttcgttattacgtttagttaatttttttgtatttttagtatagagtggattttatttggttagttaagatggttttgatttattgatttcgtgattcgttcgtttcggttttttaaagtgttgggattataggtatgagttatcgcgtttagtttgatagagtatttttcggcgtgatgtgttttgagttttaaagttgaggaagagatttaaatttttaagagtttttttaattttgagattttttgatggttttagggttatgggaggaagagtttgtggttcgtgtttgttttcgggatttttgttttttggtttgtgtttttgttgtaagtttaaggagttggggtaatattttgagtttgggtttttcgtttttagggatttgggggagttttagtaatgtttagggaaaggggagagtaaagtgtggggttggttttttttagtggttagtgttggaattgtatttagttgatttaggttgatttaggagtttttagtagaagtggaatttaggattgaatcgtgtttataatttttataatttattggttgtgtttggtttttttttttaatatatatattttgtttggtgggtggaggttaaatatgcggggaggaggaaagggataggatagagaatgggatgtggtcggtagggggttttaaggattggttattttgatattttttttcgcgtttaggttggttattatggtttgcggttagagggtatttacgtgatttttaaagagaggataagttgggtggtatttttggttgatattttgtgtataatttttataatattggtgacggtgggaagggaaagatgataagttagggggtatgattttagtatgtgtgggaggagtttttaaattatttattagtataagttcgttagtggttttatgtataaatgtatatagaaataggtgggggtaatagtgggagagaaggggttaggtataaaaagggtttataagagattagtttaaggattttaaggtttaatttttcgaattatttagggttttgtggatagtttatttagcggtaatggttataggtaagcgtttttaaaatttttttgggtataatgtgttttgaggggagaggtagcgatttgtagatgggacgggggtattaatttttaggtttggggtttttgaatgtgagtatcgttatgtaagtttagtatttggttaattttagaaagtttttggtttttggagggatggagagagaaaaataaatagtttttggagtagggagagtgttggttttttgtttttcggttttttttgttgttttttggtttttttttagg

SEQ ID NO: 88 - DNA, 5333 bp, Artificial Sequence
  chemically treated genomic DNA (Homo sapiens)
tttggggagaaattagagggtaatagagggagtcggagagtaagaggttagtattttttttgttttaggagttgtttgtttttttttttttatttttttagggattaggagttttttgagattggttaaatattgggtttatatggcgatatttatatttagaagttttaaatttgagggttagtgttttcgttttatttataggtcgttgtttttttttttaggatatattgtgtttaaagggattttaggggcgtttatttgtagttattgtcgttaggtgagttgtttataggattttgagtggttcggggagttgggttttgggatttttgagttggttttttgtgggttttttttatatttggtttttttttttttattgttgtttttatttgtttttgtgtatatttatgtatggggttattgacgggtttgtgttaatggataatttagaagttttttttatatatgttgggattatgttttttggtttgttatttttttttttttatcgttattagtgttgtgagggttgtgtatagagtgttagttagagatattatttaatttgttttttttttaagggttacgtgggtgttttttggtcgtaggttatggtggttaatttgaacgcggagaaggatgttaggatagttagtttttgagattttttatcgattatattttattttttattttattttttttttttttttcgtatgtttaatttttatttattagatagaatgtgtgtgttgggaaaaggggttaagtatagttaatagattgtgggggttgtgagtacgatttagttttgaattttatttttgttgaggatttttgggttagtttgagttagttggatgtagttttaatattgattattagagagaattaattttatattttgtttttttttttttttgagtattgttggggtttttttaggtttttggggacgaagaatttagatttaaggtattgttttagttttttggatttgtagtagagatataaattaagaaatagaaatttcgggagtagatacggattataagtttttttttttatagttttgaaattattagagaattttaaagttagaagagtttttgaagatttgagttttttttttagttttggaatttagaatatattacgtcgaaagatgttttattaggttgggcgcggtggtttatgtttgtaattttagtattttgggaggtcgaggcgggcggattacgaggttagtagattaagattattttggttaattaggtgaaatttattttgtattaaaaatgtaaaaaagttagttgggcgtagtggcggacgtttgtatttttagttattcgggaggttgaggtaggagaatggcgtgaattcgggaggtagagtttgtagtgagcggagatcgtgttgttgtattttaattttggtaatagagtaagattttattttaaaaaaaaaaaaaaaaaaaaaaagaaaaagaaaaagaaagatgttttgtttagttatggaagttttttttttttttttttttttttttttttagatttgtatagagtttttttagttgtcgagggtttgtttgtgtatttttatatttgatttgttatttgttttgtgaaggaggtattattttttttcgattttatagattaagagattgtggtttagagagattgattgtatgagttattttagttagggtagtagatttttataattttgttttttttatattgcgttatttaaagttttttttttaggtcggatatagtggtttacgtttgtaatttttaaattttgggtggttttgaggtgggtggattatttgaggttaggagtttaaggttagattagttaatatggtaaaattttatttttattaaaagtataaaaattagttgggcgtggtggtatgagtttgtaattttaattattcgggaggttgaggcgggagaattatttgaatttaggaggtagaggttgtcgtgagttaagattgcgttattgtattttagtttgtgtagtagagtagaattttattttaaaaaataaaaaataataatattaaatttttttttttttagagtaggtagtgtgatgttattgagttatttagttattttagttttttttatgtttttttaattttaattggggtagggagtttttatgatagggtttttttgttagtgtcggggatttagatgtggattttcggttatggaagaagtttttagttttttttaggaatgagggtggtaggggttttagttggggattattgtataattttgtaggtggatataggggtggcgaggttttttagataggttattgttatgaatacgtgggattagttagggtaggggagtgtttttttttatttttttatttttgttgatttagaattatggtgatttagaggattttagggatttttggggaaatatttttataaggggttattgtggtaattatggattagagggaagaattgaggtttataggtgtgggtagaagtcggtgatcgttttttttagtttagatttttttagagttttgagtaatggagattatgtttattatttattgttagtaaaaaattaattttgaattagatttgggatttttttaatagtattgggaagtcgtttattgttggggtattatttgaggttagatttttggttgttgtaggttggagtttttttttatatggttagtggggagaggttgggttttttatttttggtgttagttttaaaaggtttaggaaaagttgggtatacgtttgtaattttattatttagggaggttaaggtgggtggattatgagattaggagtttaagattagtttggttaagatggtgaaatttcgtttttgttaaaaatataaaaattagttaggtgtggtggtaggcgtttgtaattttagttatttaggaggtcgaggtagggaattgtttgaattcgcgaggtggaggttgtagttagttaagattacgttattgtattttagtttgggcgatagagcgagattttgtatttaaaaaaaaaaaaaaaaaaaagtttaggataaattttagaattattttggtttttttaaagaatttttttttataatttaggatttatgaatttttttgtgtgtttggaagttttttttatgtttaatttcgattaattttagggttttgtgtgtttgttgtggaaagttatagatttgttgttgattttaaagtggtgttttttaggttttaagattttttgttaggtttaagattgtggggttgaggacgattatatttttcgaagttatttttatcggttttagggatcgtttttaagggattggtgggtgttttttttatttttattttggtgatttgaggcgtatattttttatttgtagttttgtttttttttttttgagattagaggttggttattgtattgggatatattttatttttttttggtttttaatgttttttttatgagtttgttatcgagttaattatttggtttattggattgaggtttttagagaatattatatggggatttttaagggtttttttaggggaggtgaggaagatgattaatatttttgcgtgtttattatgtgtttggtattttattgattatggggatgtgagtgaggatattgaggtttaaagagataaggtggtttgtttggagtttttttagtttttaagtgatggtttttaaggttttttaggttttttttttatgttaagttttttagaaattttatttagtaaagatggtggtattattaggtatggataaaatttgttttagtgtaaagttagtaggataggggttaagtttttgtatagaggatgtttaatgaagatggggggaattgaatataaggaattttagttatagaatgaggtgtttataggtattaaggaaagtggtagaaaagaagtatttagtatagttcgggttagtgaatcgaggtattttatgttgtatatttgtattgtacgttttagtgtatatcgtgttttattttttgtatttcgttggattttttagtttgttatatgatatgtttagggggtttaggtacggaggaagggtttcggaaggtttggggaggagaggggtagatattgttgtgtattgatggggggattgtttgtattggttgatgatttttgaataattaagaagtatataaggatttatttaatttgacgtgttaagtaattttatattggggattattttttagggagacgatttattgatagagaagtgaaaagtatcgagatgtgtttagtagttgtaggaagtttggggtgtttttttgatggggtgtttttagttggaaatagttttttttttttttgatttgttttgtggttatttgtagatattttattttttttattagattgtaagttttttgaggttggattttttttttttttttttttgagatcgagttttgttttgtcgtttaggttggagtgtagtggcgcgattttggtttattgtaagtttcgtttttttgggtttatgttatttttttgttttaggttttttagtagttcggattataggagtttatcgttatgttcggttaatgttttgtatttttagtagagacggggttttattgtgttagttaggttggtttttattttttgattttgtgatttattcgtttcggttttttaaagtgttgggattataggtgtgagttatttacgttcggtttgaggttggatttttgtttttcgtttatttatttatttatttatttttttatttatgtatttatcgattttataagtagttgttgtttataatatgggttagagattgtattaggtcgatggatatatttagataaattaaagatatgatttttttttttttggagttaataatttattgggggggtagagaaaatattttattattacgtaatgtatatatataaaatggtaaaaaaaattatataatgtgtatatatatataaaattgtaatatatatatatatatattattttttttgatggagttttgtttttgttatttaggttggagtgtaatggtataattttagtttattgaaatttttattttttgggtttaagcgatttttttgttttagtttttcgagtagttgggattataggtatgtgttattatgttcgattaattttgtatttttagtagagatggggttttattatggttattaggttggtttcgaatttttgattttaggtgatttattcgttttggtttattaaaatgttgggattataggtat

SEQ ID NO: 89 - DNA, 8513 bp, Artificial Sequence
  chemically treated genomic DNA (Homo sapiens)
tagatggtgaaatttgagttgatggggaggaggatttttattttttgtaggggtttgatgggtagtatagttggttaattttgggatttagagggtaggtcggttggttgattattaggtttggaagatttaggtagttggttttaaagaggttttaggttagtagttagatatgagttgtgagggttaagtatagttatttattagatgatttatttttagtttttttgagttttagataatagaagataggtggttgtatttttggttaagggtaggtgtggtagtggtgtttgttgttattgtgtttttattggtttttagtaattagatttaatagacggagtaattgttattcgaggtttttgaattagggttatttattaggagtatgcggttttttgatgtttagttttggttggtgttgttgtgggtattggtgcgagtataggggatagggtttgtgtgttttttttgtgggggttttaaattggtattttaagtagaacgagttttggtgttggagttagttaagtagtaaattttggatgggttgtatttgattagtcgttttagaataatttattttttattttaggtagcgttgattagagtttttcggagattatagttagggagtgtggttttagggaatggggaggaggttattagttttgttattgttataggtgggtgagggagagagtaataggtaaagagtagatagggaaagggaggtagaaggggagtttggtaggagtagtagagggagtggggtgtggtaggagaaggaggagttggggtagggattggttgtagaggatataaagtagtttttatttttttagaggtaggttcgagggagagtagtgggtagggtttggggagttttagaggagagttttatttttatttatatttttttttttttttttgtttttcgggtagattttattttagtttatagttttttgtttattttttatttgtttatttttcggttttattatttgtattatgttcgtttgtggttgtacgtgttttttattttttttggtattttttgtttgaggatttttcgatggggattaaggaggaggcgttaagggtttcgtatttttttggttgagtattatattattaatttgggttggtatattttaattttgttttttagtggtttgaggggtgagaagtttggtgttttgaaattgtaattagattgtagatttttagaaggtaatagtatagttattggataatcgaggcggtttttggatatagtaggatattagtagttttttttagagtttaagattcgagttaatgagtttggagtaggtcgggttaggaggaggatttttatttgtgagtttgcgatttttttatgttgtaggcgagattattacgtagatttttaggaattgggatggcgggattggatattgtagttcgaggggtattagttgaattattgtagtgggtagtgttttttttatttggttggtagtttaggtattgttgtttttttttattttgtcgtttttagtttttttaaagttaataatttttggtttgttagtattttttgttgtgtttttattgttcgaaggttttttttttttttttatttggattataatggtaatgtggttaagacggatgtgttagatatggtggtggaggtttgtggttgtagttagtaagaggatttggggttttggagtgaagagattaagatgaagttttttaggtatagggtatttgtgattggaggtattagatttttgatttatattttaatttaataattatttggtaatatgatttatttgatttttatgggatttaaatgggtatttttttgtttgagattttggtttattttaggttggttgatgtgttgggagatgggtaaagcgttttttttaaaggggtttatttagaaagtatgattttttgttttaagttttgtgagaagatgttagggattagggagggagggagggaaggtagagaaaaattatttagttttttttaagatgagaaagtttttaagtgaggggaggaggaagtagatagatggtttagtaggtttgaagtagggtaagtaggttggtttagggtaagggttgttgaggtattttaagggaaggttaagagggagatgggtaaggcgttgagggaggatgtttaggggatttttagaaataggagttaggaaaatgaggtattaagtttaagaagttttttggttttttttaggggataggatttattgggagataagtatttatattttttttttttttttttatttttttgagatcgagtttcgttttgttattaggttggagtgtagtgatacgattttggtttattgtaattttcgttttttgggtttaagtgatttttttgttttagtttttcgagtagttgggattataggcgtttattaatttttgtatttttagtagaaacgaggttttaatatgttggttaggatggttttaattttttgattttttgatttattcgatttggtttttcgaagtgatgagattataggcgtgagttatcgcgtttggtttatatttttttaataaaaaggagaaagaaaattaataaatgtgagttataaagaagggttagggtgatggtttagagtaatagttttttaagtgtattttgtaggtttttgggaggtttttttttaggggtgtttataaagttaaagttatttttataataatattaatatgttatttgttttttgaatttttattattttaaaattgtattgtggagttttttagaggtcgtgtgatatgtgattatattatttttttgatattattgttaatggaatgtgtgtttgtatggttttgtgttatagttttttttagttttaatttttaatgtggtgaattgatagatgtaaattatatgaataaaagtttaatgatttttttttttttgagacggagtttcgttttgtcgtttaggttggagtgtagtggtataatttcggtttattgtaatttttattttttaggtttaagcgatttttttgttttagttttttgagtagttgggattataggtttgcgttattatgtttagttattttttgtatttttagtagagatggggttttattatgttggttaggttggtttcggatttttgatttgaggtgattcgtttgttttggttttttaaagtgttgggattataggtttgagttattgtgtttaatttaatgatttttaagagtatagaggaaattaaaaagtttgagatttattggtttatagaattgggtggggagaagaaagtaaggtgttttaagagagttttttttgttgggtatcggtggttttagttatttaggaggttaaggtcggaagatcgtttaaatttaggagttcgaggttatgattatatttgtgaatagtttttgtattttagtttgggtaaatagtgaggtttcgttttaaataaaaataaataaatatataaatatataaatagtttttttggaagaaggggttcgaggttgggataggagtatgtgtggggtgttttttttttagtgtttattagtttggtttgattgagttgggtttttgatttttttggggataattagtttgggttaaagttttagatttttttttatttttattttttttttttttttttgatttttagattgaatagttaatttattgattttttatatttaagggggtggtttttggaagtagagttaggatgtgggaggtttgtttgtggggttgaaaaaaaggggagagggtgttttttttttttgttatgttttttttttttttttataaaaattagagattgaaatgttgttttttttttatattcggttacgatggtaatgtaaatttaaagaggtagggtatttttttgttaggtagtatcgttgggtatagtaatttttgttttttcgttttttagagtttatatatttattttttgggtttttaagtgggttttagtgaggggttttttttttaattgggttttttttttagttttttagtttttttgtttcgatttcgagcgggtgttatgtgtgagaacggttagtagagggagtagaaagtttggaagagtagttagagtttgtagtgacgtggtgcggaggggcggtattttttagaatttcgagacgtagagtcggggttttagggaaaggggttttagttttagggttttttggtgatttcgtgaattatattttgtatttagagttttagtcgttgttttttgtttttatgttttatagattttttatttttttttagagtttttaatttaatttgatttgttttaaatcgtaattttgtttcggtcgttgtaagttttatttaaagggtgaggtttgtagataaattataggatggtagaatgtttagttagtattaattaaaggcgattattttatttttattattatcgttttcggttgaatttttttttttgtttcgtaatattttttttaatttggttgtcggggtttttttggggtagtcgatttagaaatttaagtcgggatttagtatttattaatagtagcgtgtttagtcggggcgcgggggggggcgtaacgagtatagggttttttaagggagggggaggattttgggggttttgggggtgtaataagttcggtatttttttttttgtttttagttatttcgttttattttttagaacggtaagagggagggaaatagaagggaggtgaggggcgagcgggaagagcggcggcgcgttagcgttggagagagaaaaagtttttgtaaaagggaaaaaaaaagtttgcgtttttcgcgggtggttcgggtttgcggcgcggttgggtcggcgggagggttgggggttaggttgggggggtgggggtggtatcgaggttgcgttgtcgtggtttttttcgttttttttttttatcgtatattttttagtttagattttagttttggatcgcgtatttcgagtttagcgtttagatagaggtgagaagggggggtaggcgggggattatttgggagtagtgggggagggggtttgaggggatgtttagttttttagggatttattttagattcgggatatagaggtaaaataggggtgggagagtttggggtgagatattagaaattttagattttttatttgtgtttttttttgtattttttttttttttttttttttttttttgttagtttgtgtatttttgttttagggaatcgtgggtttttgttttcgttttttttatatattagaaatattttatttttatgcggttaagtttaagaggttggagggatggttagttggaggtttgcgttgtagagaggtaattttaggtgtgtgtttgcgcgtggggtaggaagatgttagtgtttttgaaaggtggggattgtaaaggagggagttttaggtggggtggggacgggtgtgtgggaggtaatagagttattaggggttagttaggtttgaatttttgatttgttttgtgatagatgtgttagtggatgtttgtgttttaggggaaaggagtgttttttggatttggaagggggttggggcgggggggggttgtttaaggtttagtgaaggttttagaatgattttatgtaatttggatttttgagttttaagggttgtgggtaaggagtttaggaggagtcggggagattttgttttgattttttgattttaggattatcggggtagcgggagttagtcgtaggagatttttatcggggttgggcgggattattggttattgttagtttgtgtattttcgttggtatttcgtttaaacgggagttggggatcgaggttttttttttggtttagattattttgtttgtttttgtttttcgttttgaatttttttttaggttttatgatttcgaaataattagtattgggtagttagttttcgggataggattacggaaaggggatttcgtagagtttggggattgagggttttaggggtttggagagttggggttttttaggataggtttttacgttttagtagagggagaaggcgggcggtttttcgggggatatgtaagggtcggaataagtgtggttttttttagggggcggggtttagagatttttttttttttattattatttttttggtattttcgtttttgacgttattagggggttttcgggggtttggaggggttaatttttgggaagtcggttgttataattagtaatttaaggtgttcgggtttttttttttttttatatatatttaattttattgatttagttattttttttgtttttttttttttatattttttggatttttttttttttttaattttattaacggggatttttattttttagtagtgtttttttgggcgttattgtttgtttttcggatgtgttgagaggaggagggaagaatgtggttcgttttttagtttttatttttatggttcgttttattgggttttcggggcgggtggggggagcggagtcgtttgtagttagtgtttgcggcggcgatttgggtgggtcgaggaggtacgggggcggggaaggcgggatcgggagtaggggggcggagtcgatttttgggagttggggagcgggggtgcgagggggacgttggaaaatagggagatatcgaagatggtttagggtttcggtaggggaattttagagttttttgttttatttcgaatttttatattttagaaaaattttatcgaagttaaaaaagttggcgatattttttttttattagtttgaaggggagatatgggtgggttgtggaacgcgtgggcgaggaggggtgtagttttatttttttggaggtttttcggtagttaggtagtggggtagaaagatgattgagtaggtaagtttgggggagtttttagtgtttgggggattatttgtaaattttttttttttttttgggtgagttatagagggaaggaggcgggagaattgtttttttatttagttgttaattagttgtgtttttcgttttttatattagttttaaggtcgagttgggaggttttggatgcgggattcgtatttcggttggaaaaggaggagttagaaaagggtatagtttaggttgtcgggtcgggttgggtcgcggggttcgggtttcgttttttattttatttcgtttttattttaaattttagtatttcgggattatttatcgcgtcggtcggttcggttcgttttcggtggttttttattttatttcgttttattttatttttattttcgggagattggaaaattcgggatggagttaaaattggagtttgaaaagaaaaacggatagtagtattttttttttcgttacgtttttataaggattatattgttttttttatttttttagagtttttttttatatttttttttttgtttttttaaaatagagattaaaaagattaggtgggtttgatttaaattattttagaataatattagtttttatttttgtgtttaatagatttagaagattttttttaggaattttatttttttttttatattgttttttgtttaagagggtagatggtttgtgtttttttttggttttatttggttttgtgtcgggattgtggttagggttttttttgttggatattgtagagattgtatacgggttgtttttggggaggggtacgagaaggaagggggaacgggttttagtagagtcgtttagtgtttgaagttagatttattatacgagtttttttattttatttttaaagtcggtttagggttatagtaagaagaattagagggtttatgttattaaaattatttgaagttaatataggtataattagtttaaaatatgttttttatatatagattatataggtaaagtttttatttaggtaaagtttttatttagtttttaagaagatttttagagtatatagattataagattgtttttgtttttttgggatattatttttttttatttttttttttatttagcgagtgatgttttttttgttttgagacggagtttagttttgttatttaggttggagtgtagtggtattatttcggtttattgaaattttcgttttttaggtttaagcgatttttttgttttagtttttcgagtagttgggattataggtattcgttattatgattggttaatttttgtttttttgtagagacgggggttttattatgttggttaggttggtttttaattgattttaggtgattttttcgttttagttttttaaagcgttggaattataggcgtgagttattgtgttcggtttagtgatgttttttttaattcgaatttcgtggtagatgttttagaggggtgggggatattagggatgttttgtttaggattttgtgtttgagattgttgtttgatagtttttattttttttatttttatatttattttttttttttgtagt

SEQ ID NO: 90 - DNA, 8513 bp, Artificial Sequence
  chemically treated genomic DNA (Homo sapiens)
attgtagaaagggaaggtaggtataaaggtggaggaaatagagattgttagatagtagttttaggtatagaattttgggtagaatatttttggtattttttatttttttaagatatttgttacggaattcgagttgaaaagagtattattgagtcgggtatagtggtttacgtttgtaattttaacgttttgagaggttgaggcgggaggattatttgaggttagttgaagattagtttggttaatatggtgaaattttcgtttttataaaaaaataaaaattagttagttatgatggcgggtgtttgtaattttagttattcggaaggttgaggtagaagaatcgtttgaatttgggaggcggaggttttagtgagtcgagatggtgttattgtattttagtttgggtgatagagttagatttcgttttaaaataaaaaaagtattattcgttgagtgaggggaggggtaaggggaaatgatgttttagagaggtagaggtagttttgtagtttgtgtattttggggatttttttgggaattgggtgggagttttgtttgggtgggagttttgtttgtgtggtttgtgtgtagaaggtatgttttggattaattgtgtttatattaattttaagtgattttagtaatatggattttttaattttttttgttgtaattttgggtcggttttgagggtgggatgggagaattcgtgtgatggatttgattttaagtattgggcggttttgttagagttcgtttttttttttttttcgtgtttttttttagggatagttcgtgtataatttttgtagtgtttagtagagggagttttagttatagtttcgatatagagttaggtggggttaggagggagtataagttatttgtttttttagatagaaaatagtgtggaggaggaggtaaggtttttgaggggagttttttgggtttgttgggtataaaggtgaaagttggtgttattttggggtagtttaaattaggtttatttaatttttttggtttttgttttgggggaataggaaaggaagtatgaggggagattttgagagaatgaaaaaaataatgtgatttttataaaagcgtagcgaggaagaaggtgttgttgttcgtttttttttttaaattttagttttgattttatttcgggttttttagtttttcgggaatgagggtggggtggggcgggatggggtggagaattatcgggagcgggtcgggtcggtcggcgcggtgggtgatttcgggatgttgggatttagggtgagggcggggtgagatggggagcggaattcggatttcgcgatttagttcggttcggtagtttgggttgtatttttttttaatttttttttttttaatcgaggtgcggatttcgtatttaagattttttaattcgattttggaattaatgtggggggcggggggtatagttggttggtagttggatggggggataattttttcgtttttttttttttatgatttatttaggggaaggagggaagtttgtaaatgattttttaaatattagagatttttttaaatttgtttatttagttatttttttgttttattgtttagttgtcgaagagtttttaaggaaatggggttatattttttttcgtttacgcgttttatagtttatttatattttttttttaggttagtaaaaggaaaatgtcgttaatttttttagtttcggtaaagtttttttggggtgtgagagttcgggatgggatagggagttttagggtttttttgtcggagttttaaattattttcggtgtttttttgttttttagcgtttttttcgtattttcgttttttaatttttaggagtcggtttcgtttttttattttcggtttcgtttttttcgttttcgtgttttttcggtttatttaagtcgtcgtcgtaggtattggttgtagacggtttcgttttttttattcgtttcgggagtttagtagagcgagttataggggtgggggttgaggggcgggttatattttttttttttttttttagtatattcggaaagtaggtagtggcgtttaggggggtattattggagagtgggggttttcgttggtggggttagaaagggagaagaatttagaaagtataggggagagaaagtagagaaagtgattgggttaataaaattaggtgtgtatggggaggaggaggggttcggatattttaggttgttggttatagtagtcggttttttaagggttaatttttttagattttcgggaattttttggtgacgttaagggcggggatgttagggagataatggtggagggggagaggtttttggatttcgttttttagggaaaattatatttatttcgatttttatatatttttcgggaaatcgttcgttttttttttttattggaacgtaaagatttattttagaagattttagttttttagatttttaaaatttttagtttttaggttttacggggtttttttttcgtaattttgtttcgaaagttagttgtttagtgttgattgtttcggggttatgggatttgaaagaggatttagagcggggagtaagggtaggtagggtggtttgagttagaggaggggtttcgatttttagttttcgtttgggcggggtgttaacggggatatataggttggtagtggttagtggtttcgtttagtttcggtaggggttttttgcggttggttttcgttgtttcggtggttttgaggttagagggttaagataaggttttttcggttttttttgagttttttgtttatagtttttgggatttaggagtttaaattgtatggggttattttagggtttttattagattttggatagttttttttcgttttagtttttttttaagtttagaagatattttttttttttaaagtataagtatttattggtatatttgttataagataggttaaaggtttaagtttggttggtttttagtggttttgttgttttttatatattcgtttttattttatttggagtttttttttttgtagtttttattttttagaaatattgatatttttttattttacgcgtagatatatatttggggttatttttttataacgtagatttttagttagttatttttttagttttttaaatttaatcgtatgaaagtaagatatttttaatatatgggagaggcggagataaagatttacggttttttgagatagagatatatagattgatagaagaaaaaaagggaagaaaaagaagatatagagaaagatataagtgaaaaatttggagtttttaatgttttattttaggtttttttatttttattttgtttttatgtttcgggtttgggatgagtttttaagaagttgagtatttttttaggtttttttttttattgtttttaggtggtttttcgtttgttttttttttttatttttgtttgggcgttgggttcgggatgcgcggtttagggttggagtttgggttggggggtgtgcggtggggagggggggcggagagggttacggtagcgtagtttcgatgttatttttatttttttaatttggtttttagttttttcgtcggtttagtcgcgtcgtaagttcggattattcgcgagaagcgtaaatttttttttttttttttgtaaaaattttttttttttttagcgttggcgcgtcgtcgtttttttcgttcgttttttattttttttttattttttttttttttgtcgttttggaggatgaggcggggtagttggaagtaagagaaggggtgtcgggtttattgtatttttaggatttttaggatttttttttttttttgagggattttatattcgttacgttttttttcgcgtttcggttgaatacgttgttgttggtgagtattaaatttcggtttggatttttggatcggttgttttaaagaggtttcgataattagattgaggaaaatattgcggggtagggggagaagtttaatcgagaacgataatagtggaggtagggtagtcgtttttggttggtgttaattgagtattttgttattttgtggtttatttgtaggttttattttttggatggaatttgtagcggtcgggatagagttgcggtttggggtaaattaagttgggttgggggttttggaagaaggtgaggagtttatggagtataaaagtaaggagtagcggttgaggttttgggtgtagggtgtggtttacgaggttattaaggagttttgggattgaagtttttttttttagaatttcggttttacgtttcgaagttttggagggtgtcgttttttcgtattacgttattgtaggttttagttgtttttttaggttttttgttttttttgttggtcgtttttatatatgatattcgttcggagtcgaagtagaagagttggggaattgaaggaggagtttagttgaaggaggagttttttattaaagtttatttaaaagtttaggaggtggatatgtgagttttgagaaacggagaggtagaggttgttatgtttagcggtattgtttgatagggaagtgttttgtttttttagatttgtattgttatcgtgatcggatataagggaggggtagtattttagtttttgatttttatgagaaagaggaggaagtatgataaggaaaaagggtattttttttttttttttttaattttataggtagattttttatattttagttttgtttttaagaattatttttttgggtgtggaaggttagtgggttaattgtttagtttgagggttaagggggaaaagaaaaggtgaaggtagggggagatttgggattttgatttaggttagttatttttagaggggttagagatttagtttagttagattagattaatgggtattgaaaaaaaggtattttatatatgtttttgttttagtttcgagtttttttttttagaggagttatttatgtatttatgtatttatttatttttatttgggacggggttttattatttgtttaggttggagtgtagaggttatttataagtgtgattatagtttcgaatttttgggtttaagcggtttttcggttttagttttttaagtagttgggattatcggtgtttagtaagaagagtttttttagaatattttatttttttttttttatttagttttatagattagtgagttttaaattttttggttttttttatatttttaaaagttattaggttaggtatagtggtttagatttgtaattttagtattttgggaggttaaggtaggcggattattttaagttaggagttcgagattagtttggttaatatggtgaaattttatttttattaaaaatataaaaaatagttgggtatggtggcgtaggtttgtagttttagttatttaggaggttgaggtaggagaatcgtttgaatttgggaggtggaggttgtagtgagtcgagattgtgttattgtattttagtttgggcgatagagcgagatttcgttttaaaaaaaaaaaaattattgagtttttgtttatatgatttatatttattaatttattatattagaaattaaaattgaaaaagattgtaatataagattatataagtatatattttattaataatgatgttagaaagatgatgtaattatatgttatacggtttttggaaaattttataatataattttaagataatgagaatttaaaaggtaaataatatgttagtattattatgaaaatagttttgattttgtggatatttttgaaaagggattttttagaagtttatagagtatatttgaagaattgttgttttggattattattttaatttttttttatgatttatatttgttgatttttttttttttttttattaagaaagtataagttaggcgcggtggtttacgtttataattttattatttcgggaggttaagtcgggtggattaagaggttaagagattgagattattttggttaatatgttgaaatttcgtttttattaagaatataaaaattagtgggcgtttgtaattttagttgttcgggaggttgaggtagaagaattatttgaatttaggagacggaggttgtagtgagttaagatcgtgttattgtattttagtttggtgatagagcgagattcgattttaaaaaaataaaaaagaagaaagaaagtataaatgtttgttttttagtgggttttgttttttgggaaaaattagggaattttttaggtttagtgttttatttttttgatttttgtttttgggggttttttaagtatttttttttagcgttttgtttattttttttttgatttttttttaaggtattttaatagtttttattttgggttagtttgtttattttgttttaagtttgttggattatttatttgtttttttttttttttatttgaggatttttttattttgggagaggttaagtaatttttttttgttttttttttttttttttttagtttttgatatttttttataggatttagggtaggaaattatgttttttgggtagatttttttagaagaaacgttttatttattttttaatatattagttaatttggaataagttagagttttagataagaaagtgtttatttgggttttataggggttaagtgagttatattgttaggtggttgttgggttggggtgtggattaggaatttgatgtttttagttatagatgttttgtgtttgggaaattttattttggtttttttattttaaagttttaggtttttttgttagttgtagttataggtttttattattatatttggtatattcgttttgattatattgttattatgatttaggtagaggagagagaggggttttcgggtagtagggatataataggaggtattggtaggttaaggattgttggttttgaggaggttgaagacggtagaatggaaagaggtagtaatgtttgggttgttagttaggtggggagggtattgtttattgtagtaatttagttggtatttttcgggttgtagtatttagtttcgttattttagtttttggaagtttacgtaatggtttcgtttgtaatataagggggtcgtaggtttataggtgggggttttttttttggttcggtttgttttaggtttattggttcggattttaagttttaggaagggttgttggtgttttgttgtgtttaagagtcgtttcggttgtttagtaattgtgttgttgttttttaggggtttgtagtttagttgtagttttaggatattagattttttattttttaagttattagagggtagagttaaggtatgttagtttaggttggtgatgtggtgtttagttaggagagtgcgggatttttggcgttttttttttggtttttatcggaagatttttaagtaaagagtgttaggaagggtggggagtacgtgtagttataggcgggtatggtataggtggtgggatcgaggagtggataggtgaaaagtgagtagggagttgtaggttgaagtggagtttgttcgaaagatagaaaagggaaagaaaatgtgagtagagatgaagtttttttttgagattttttaagttttgtttattgttttttttcgaatttatttttagaaaagtagagattgttttgtgttttttgtaattagtttttgttttagttttttttttttttgttatattttattttttttgttgtttttgttaggttttttttttgtttttttttttttgtttgttttttgtttgttgtttttttttttatttatttgtgatagtagtaaagttgatgattttttttttattttttggagttatattttttggttgtagttttcggagggttttggttagcgttgtttggggtggaggatgagttattttgggacgattggttaggtgtaatttatttaggatttgttgtttggttagttttagtattagagttcgttttgtttggggtgttagtttggagtttttataggagggatatatagattttgttttttgtgttcgtattagtgtttatagtagtattagttagagttggatattagggagtcgtatgtttttggtgaatggttttggtttaggagtttcggatggtagttgtttcgtttgttgagtttgattgttgggggttaatgagggtatagtgatagtagatattattgttatatttatttttggttaagggtatagttatttgttttttattgtttgggatttaggaaggttgaaagtagattatttgatggatagttgtgtttgatttttatagtttatgtttggttattgatttggggtttttttagagttagttgtttgggttttttaaatttagtggttagttagtcgatttattttttgagttttaggattggttagttgtgttgtttattaggtttttgtagggggtggaggtttttttttttattagtttaggttttattatttg

SEQ ID NO: 91 - DNA, 6169 bp, Artificial Sequence
  chemically treated genomic DNA (Homo sapiens)
ggtttgggagtattttttttgtttttagatatttagagtcgtttttgagtaatttagtatgttttgtttgttggcgcgttgattggggcgcgtcggggtcgggagaattcggcgtggattttttcgcgttgatgtaatgatgatggatgcggcgacgcggttgtagatagcgttgcgcgggttcggcgcgttcgttaatgaatttatcgcgtcgtcgtcgcggtttgggatttcgggtaggggacgtaggcgcgggtaaaagtggtgaaaggcgtgaaaaatattttttgttatcgtcggaggaaattagaatttgaagggaattcgataggaaagcgtagagaaagagcgagtttttaaataaaattggttatattcgtataatttgagtaaaataattattataattaatggggattcgtttttgtaatggtgaaagtttttgtttgggtttttattggtttttcgttttttgtaggtttaagtgacgattttaaagaggacgatttgaggcgtttgtgtgtaagtgttgtttaatatgtaggtttcggtaagaattcgttaaggtggtaaaggttgcggtttttttgttcgttttttgtttttttgtttatttttaaatgtagacgtgtattatagcgttattaggttagtggttttaggaagttttaaatgttttgtgttgtaagaggttgacgtaggtttagatttataatttagaaagaaaagatttatttgtaggtaggttgtaaataggagacggattagatttaaaatagggtttggaattaattgtgttttgggtttaggtttcggggaaattataaaaggtttagggatagttgagtgggaaaaagttttgattgtttgtttttaggaaggaatgtttatttttttttttatttatgaaattttaagttttaggaaggatatattattagagtaattttttttgcgttgttttttttttttttttttatcgagtttttgggatttaaatattagttataaatatttttttttttaagtatgaaaagttaaggggtatgttagtaaattttgtatgtaatgttttagtggtgaaagggattgaaggagaatagtgtggagtcgtaagtaaggaaattatgtcgggggaaaaagtattattttatttatatttgaaaaatagtggtatgttttttttagggaaaagtttttgaagtgaagtagaatttaacgtttttttttgatgtttaagttttaaataaattatattttattattttttaaattttaggttttaaaagtgtcgtggagttattgttttagtggtgttttgagattttatgaggaatttttattgattatttttatttcgaatgtttgaatggattagtttaggagtgattttttaagtttttgattattttttgaaaattttattattataatttaaagcggttattttttgtcgtttattgattttttatttatagtttgatgaggtgtgggcgtttagaatgttaaatttttttttttataattgatagggataaagttgtaaaataagttgatataatttataggagtgtataggaagtagatgtttgatttggtatattgttatttttatagtttagttttaagtataaattatatttttaaataattaggtattaattaatgagatttaaaaataagttgttaaaatagaagggggtagattgttgagtgattaagggtttatttttaaaaaaatttattttagacgggggtaggaattagtattttttaagattattaattagtgtgattttagttagtgtttggagttttatttttttttatttgagtttttttttatggtgatgagtattgggagggttttattgttttgttaaaataaagttttttgttttgggggaaaaattaataattttataaaaattaggtttgttaaggaattttgggaatttgttttttgatttttattaattagtattttttgttaaggaagatatttagtttttattaggaattttatttttgaatgggtttttttttggtgtatttgtatgttttagtgtgtagttttaacgttgtagattttatttaaatatagttaataaaattgttatgtgtgtgtcgaagggaataattatagtatagtaaatttttgtttattttaatggttaagaatggagtgtttggattaattaaatatttttgttaaagtttttagtttttatagaatttgttagtttttaacgaaatattgaatatgaaaagaaaatgtatgtagttaaattagtggtgattgaaatttaagacgttgtagagttttgtaagttatagggttattgatgcgattatttatgtatttagtaaatatttttacgtgaattaagtgttgggaaagtagaagttttgtttttatggagtatatagtttggaaaggggaggtggatgtttagtatagatttttttagatgaaggagagtttattattgtgatgggtgttaggataggtttgtgtagggtgttagaatttaggattttagagtgtagtttatttattagtttattaggttagtaaagattttaatgagtatatattgtattgggtatatagtagtgagtaaaaataaacgtgtagaatagttgtttaaggtttacgtttgtatttttagtattttgggaggtcgaggcgggtggattatttgaggttaggagttcgagattagtttggttaatatgataaaattttatttttagtaaaaatataaaaaattagttgggtatggtggtgggcgtttgtaattttagttatttgggaggttgaggtaggagaatcgtttgaagttgggaggtagaggttgtagtgagttgagattacgttattgtattttagtttgggtaatagagtgagattttgttttaaaagaaataaaatcgaaaaaataaaaataaataaataaaaaaataagttttagtgaatttgataattagtaacgtttgttaatattgaggtttcgggtgttattttttaaggtaaatgtattgtaggaatttgaatgtttagtaagtattgtagaaatattgatataaatggtttttgtattaagtgagaaataatgatgttaattgtattggattatttttgtggtatattttaaagatgatatttaaattaatttttaaggattattataaaaagtaattattttgagattgttagagttagaagggattattaaagattttttttttaagggttttttgtttagatttttggaaaagtttggaaggtttgtgattttttggaaattaaatgtatatttttaagtttaagggtattttttggggagaagttttttaatttttaatatttttttaagatgttattttttttcgtttaaagtaaaggttagattttattgttcgattttgttatttgatagatgagattattgaggtttagtaataggttgttggcggttgtgtattggttagttagttttagggggcgttatgtaggtagttttgtttttgggatttacgtacggtggttgtattcggaagggaaattttaagtttttttttttgttgtataatattttgttagtgttttttgaggggtgtttttgaatttggagtggattttataattgatatgtaaatttaatttagtgtttttttttttttttttattttataaaagttgtttttaaataatttgtgtgttttataatgaatgatattggataattttagaaaagagatggaagtgagtggaagagtcggtgttatagtgtgttatgtggtttttggtttttaagtattttagttatttgaattttagattaaggaggaatttattatataatgaagagtttgtagtttttttgtaaatatgtgttaaagtagattgaaaatattttattttgtattttaatttttagttggttaagtagttgtttattttattttattaattattgttgtgattgaggatgtcgatatttattaaatgtagaaaaataagtaagatggttagatttaagaaatgttttttatgaatgttgtaatttagataatttgaagaaaatatgttagagagggtattttttttttttttttgtattttttgtaggtgtagaatatgattgtaaaaaggaatatgaattagagtgaaaattgatgaatgatgagttagggcgattattatatgaatgaagttagtgaaagatagatttattgaatttgtttttagttgagttttgatattttttaagtgagtttagtttttgttaaggtattttttaatttttttatgtggaattaagagcgtgttgttttattatttttgttttaaaagtgtaatttaaatgaattgaaatatttttatgttttaaagaggttaaagagtatagtttattagaatgaattaggattaagaggtatattgtaatttagatatttttatgaaagaggtaaaaattattgattatttggtttgaattattttttgatttagaatttggagtaggttttcgatgttagaaattgtcggattttttttaaaatatttaattaataattaaaaattttttttttttttggaatttgtttaaatgtttttttttgtaaagttggttatttgaagagatatttgtagacgtggttttaaaaagtaatgtgatatttgttttatatgatagatatagttgtaaattgagatttttatatcgtttgatattaaacgtttagtagggatttgggaaaagtattatgttatgggtatttttttcggtttttttttttgtttgtgtagagttttattggtttgttaaattttgagatttttttttttgttagaaaatttgtggagaagtgttatttatattttgaattttttaaagttttaggttttttttagatgataggtgaagtggatttttgaaagttttttttttttttttattattttggaaagttgatggttttgttgttttttttagggtatttttggtcgaagagagttgaagtaatgagaagatattatggaggtttagttttatagttttacgattattgaaaagaaaaaagttgagaattttatagtgaagtgttttattcgaatagatgtgagcgagaaagtcgttgtttttagtattatttttaatggtgagtagtatagggattattagtagtttagtttggagttatttttgtgttttttgtattttttgtgaattgagcgtttgtatttggattagtgtttgttttaggagacgttaaagaaagtaaatggagtaggggcggggggacggcggggggatatggaatgtagtaatttttattttggtatttaatttatacgttgatttttaaattttttaatttgagatgtaaatgtgataggttatttattattagaagtttttgttttggtattttggaaattattttgattagtttggtaagagtttaaaatgttttgtgttgtatatggattatttatattattcggaataattagtataaaagatataaaagttgttttgttaaaattagtgataggatagtagttttttttaattttaattttaagtagtttattttaaaggattttaagaattgttaatgattgaattttaaggtaatgttagtatttgagatgtaggttttgttgttagtttataaaaatttaatttatttatttgtgtttagagataatatagagttattgtttttgtattttgtgtttttaaagtttaagtaaagtgttgagaggtattttagtttaagtatggagtgttgaaaataaattttagagtatttttggtataaatagattgaatatgttaatggtaatttttattttttgtttttgttgtttttttattgtgggttattaatgttttttttttttgtagattttatagttatttttggtttttttgaatttttttgtttttttatgggtttttaggaagaatgagttggttcgtttttttcgtttttggatattgtttatttgggtatattgatttgtatgagttaatttgttatttttatattttttatattttaagataggttttatttgattgatttataagtttttatatttatttagagagttagaattttttttggaaggtaattgtagtttagaatatta

SEQ ID NO: 92 - DNA, 6169 bp, Artificial Sequence
  chemically treated genomic DNA (Homo sapiens)
taatgttttggattgtagttattttttaaaggagattttgattttttaggtggatgtaaaaatttgtaaattaattaagtaaaatttgttttggaatatagaaaatataagaatagtaggttgatttatataaattagtgtgtttagataggtagtgtttaggaacgaggaaaacgggttagtttattttttttaaaggtttatggaaaagtagagaaatttagggaggttaagaatggttatgaaatttataaaaaggaaaggtattagtggtttataatggagaaatagtagggataggaagtgaaggttattattaatatatttagtttgtttgtattagggatgttttggaatttatttttaatattttatgtttgaattgaaatgttttttaatattttgtttaaattttaaaaatatagaatatagaaatagtggttttgtgttatttttgaatataaataagtaaattaaatttttataagttaataataaaatttgtattttagatattaatattattttgaggtttagttattaataatttttaaaattttttaaagtagattatttaaagttggggttggaggagattgttgttttgttattaattttgataagataatttttgtgttttttgtattaattatttcgagtagtgtagatgatttatatgtaatataaagtattttgaatttttgttagattagttaagatgatttttaaaatgttaaaataggaatttttgataataaataatttattatatttatattttaaattagaaagtttggaagttaacgtgtaggttgagtgttaaaatagagattattatattttatgttttttcgtcgttttttcgtttttgttttatttgttttttttagcgttttttagaataaatattggtttaggtgtaaacgtttaatttataaggaatgtagagaatatagaaatgattttaggttgggttgttggtaatttttgtgttgtttattattagaagtggtgttggaggtaacggttttttcgtttatatttgttcgagtggagtattttattatggaatttttaatttttttttttttagtggtcgtggagttgtgggattgggtttttatgatgtttttttattattttagtttttttcgattaaaaatgttttaaagaaaataatagagttattaattttttaaaatggtggaaaaaaaaaaaaaatttttaaaagtttattttatttgttatttgagaaaagtttagagttttaggaaatttaaaatgtggatgatatttttttataggttttttggtaaaaaaaaaagttttaaaatttaataaattagtgaaattttatataagtaaaaaagagaatcgagggaaatgtttataatatggtattttttttaaatttttattgagcgtttggtattaaacggtataaaaattttaatttgtaattgtgtttattatgtgaaataagtgttatattattttttaaagttacgtttgtaaatgtttttttaggtggttaattttataggaaggggtatttgaataaattttaaagggagggaaggtttttaattattaattagatgttttaaagagagttcgataatttttaatatcgaaggtttattttaaattttgaattagaggataatttaggttaagtagttagtgatttttgttttttttataaagatatttgaattgtaatatattttttaattttaatttattttggtaagttatattttttaatttttttaaagtatgagaatattttagtttatttaagttatatttttaagataaaggtaatagaataatacgtttttgattttatatggaaaagttgaaaggtgttttagtaaagattgggtttatttaggaaatattaaaatttagttaaaggtaggtttagtaggtttgttttttattggttttatttatgtgataatcgttttaatttattatttattaatttttattttggtttatgtttttttttgtagttatgttttatatttataaagaatataagaaaagaggaaaagtattttttttagtatgttttttttaagttatttagattgtaatatttatggaaagtattttttaggtttggttattttgtttatttttttatatttagtaaatgtcgatatttttaattatagtagtggttagtgaaatgaaataagtaattgtttgattaattaaaagttaaaatataagataaaatatttttagtttattttaatatatatttgtaagggaattgtaagttttttattgtataataaatttttttttgatttggaatttaagtaattagaatgtttaagaattagaggttatatggtatattgtagtatcggtttttttatttatttttattttttttttgagattatttagtgttatttattgtaaaatatataagttatttaagaatagtttttgtagaataaaaaagaaaaaagaagtattaagttaaatttatatattaattgtaagatttattttaaatttagagatattttttaaagggtattgataaagtattatataatagaaaagggggtttgagatttttttttcgagtgtagttatcgtgcgtgagttttaagggtagggttatttgtatggcgttttttggggttagttggttagtgtataatcgttaataatttgttgttgagttttagtgattttatttgttaaatgatagaatcgggtagtgagatttgatttttattttgggcgggaggaagtaatattttaagaaggtgttaaaagttaaagagtttttttttagaaaatatttttaaatttaaaagtatatatttaatttttaagggattatagattttttaagtttttttaagaatttggatagagaatttttaaaggagaaatttttgatggttttttttagttttaataattttagaataattattttttgtaatggtttttgaaaattgatttaaatattatttttaaagtatgttataagaataatttaatataattggtattattgttttttatttggtataagaattatttgtattagtgtttttatagtgtttgttaagtatttagatttttgtaatgtatttgttttggaggatggtattcggaattttaatgttagtaagcgttattaattgttagatttattaaagtttgtttttttgtttgtttgtttttgttttttcggttttgttttttttgagatagagttttattttgttgtttaggttggagtgtaatggcgtgattttagtttattgtaatttttgttttttagttttaagcgatttttttgttttagttttttaagtagttgggattataggcgtttattattatgtttagttaattttttgtatttttattagagatgaggttttgttatgttggttaggttggtttcgaatttttgattttaggtgatttattcgtttcggttttttaaagtgttgggagtataggcgtgagttttgaataattgttttatacgtttatttttgtttattgttgtatatttagtgtagtatatatttattgaagtttttgttgatttgatgaattaatgaatgaattgtattttagaattttgaattttaatattttatataaatttattttagtatttattataatgataaatttttttttatttggaaaagtttgtgttgaatatttattttttttttttaggttgtatgttttatgaggataaggtttttatttttttagtatttagtttacgtaagaatgtttattgagtatataaatgatcgtattaatgattttgtgatttataggattttgtagcgttttgaattttaattattattggtttagttatatatattttttttttatatttagtgtttcgttgaaaattggtaaattttataaaaattaaaaattttagtagaaatatttaattgatttaaatattttatttttagttattgggataagtaagaatttattatgttataattgtttttttcgatatatatataatagttttattggttgtatttgagtagagtttataacgttaaaattgtatattgaaatatgtaaatgtattagaaaaaaatttatttagagatgggatttttagtaagaattaagtattttttttagtagagggtgttaattaataggaattaggagataagtttttaaaattttttgataaatttggtttttgtggagttgttggttttttttttaaggtaaaggattttattttaataaagtaataaaatttttttaatgtttattattatagagagaggtttaagtgagaagaggtaaagttttaggtattgattgaaattatattaattaatggttttaaagaatattaatttttattttcgtttgaaatggatttttttaaaaataggtttttggttatttaataatttatttttttttattttgataatttatttttggattttattagttagtatttaattatttaaaagtgtggtttatgtttggaattgggttataaagatggtaatgtgttaaattagatatttgttttttgtatatttttataaattatattagtttattttataattttgtttttgttagttataaagaagaaagtttaatattttagacgtttatattttattaaattgtgggtgaagagttagtgagcggtaaaaggtggtcgttttgagttgtggtgatggaatttttagggaatagttaggagtttggaaagttatttttgagttggtttatttaagtattcgggatagaagtggttagtagaaattttttatggaattttaaaatattattaggatagtagttttacgatatttttaaaatttggagtttaaaaaataatgaagtataatttatttagaatttaagtattaagggaaaacgttaagttttgttttattttaaagatttttttttgaggaaaatatgttattgttttttagatgtgaatgaaatgatattttttttttcgatatagtttttttgtttacgattttatattgtttttttttaattttttttattattgaaatattatatgtaagatttgttggtatgttttttgattttttatgtttaaggggaaaaatgtttgtagttgatgtttgagttttaggagttcggtgaagaaaaaaaaaaaaagtaacgtaaggaaaattgttttaatggtatattttttttaaagtttgaagttttataggtaaaaggagggataaatatttttttttgaaagtaaatagttaaggtttttttttatttaattatttttgaattttttgtaattttttcgaggtttaaatttagggtataattaattttagattttattttaaatttaattcgttttttatttgtaatttgtttgtaggtgggttttttttttttaaattataaatttgaatttgcgttaattttttataatataaggtatttaaagttttttggagttattgatttggtgacgttgtagtgtacgtttgtatttgaaagtaagtaagagaatagaaagcgagtaagagaatcgtaatttttattattttggcgaatttttgtcgggatttatatattaaatagtatttgtatatagacgttttaagtcgttttttttagagtcgttatttagatttgtaaggggcgggggattagtggaaatttaaatagaaatttttattattataaaggcgagtttttattgattatggtaattgttttgtttaggttgtacgggtatggttaattttgtttgaaagttcgttttttttttgcgtttttttgtcgagttttttttaggttttggtttttttcgacggtggtaagggatgttttttacgttttttattatttttgttcgcgtttgcgttttttgttcgaggttttaggtcgcggcggcggcgcggtgggtttattagcgggcgcgtcgggttcgcgtagcgttgtttgtagtcgcgtcgtcgtatttattattattatattagcgcggggaagtttacgtcgagttttttcggtttcggcgcgttttagttagcgcgttagtaaatagaatatgttggattgtttagagacggttttgggtgtttgggggtagaaggggtgtttttaggtt

SEQ ID NO: 93 - DNA, 6415 bp, Artificial Sequence
  chemically treated genomic DNA (Homo sapiens)
ttggttaatatggtgaaacgttgtttttattaaaattataaaaattagttgggtatggtggcgtatgtttgtaattttagttatttgggaggttgaggtaggagaatcgtttgaaatcggaaggcggacgttgtagtgagtcgagattgtgttatttgtattttagtttgggtaataagagtaagattttgttttaaaataaataatagtaaaaaaattttataatagttattttcgagtttttttagtgttttgatattattttgtagtttgagggttttagggatggcgtcgtttgaattttgggtgtttttgttttttattataggagttgttgatggcgtacgattttattaagttttattcgttgaagtcgaagttgttagaggtattggacgagatgttgacgtacgatatcgttaagtttatgtttttgttgcggtaggaggagttggagagtatcgaggtgggcgtgtaggggggcgtttttgagggtatttatatgggttcgtttgtggagcggggatttgacgaggttatggaggacggcgaggagggttcggacgacgaggtcgagtgggtggtgattaaggataagtttaaatacgacgagattttttataatttggcgtttgtcgacggtaagttgagcggttttaaggttaagatttggatggtggggattaagttttttaatttagtgttggggcgtatttggaagtttagcgatgtggatcgcgacggtatgttggatgatgaggagttcgcgttggttagttattttatcgaggttaagttggaaggttacgggttgttcgttaatttgtttcgtcgtttggtgttattttttaagcgacgttataagggtttcgtcgagtgagtcggttttttttttatggttttgttgtggttttttagttttagtcggttgtacgtatatttttgtttcggtttatatacgttttgtttgttttttttgtttagttgtaaggatcgggggtttttttttttattatcgttagatatttcggtggaagtatttagaggggattacgggagggataaggtttttttgttcgttttttatatttttagttttacgtttatttaggtatattatatatatattggtatacgtaggtatttatttattcgttatttatttaaatatttattgagtatttattatgtgtttagttttgttttaggtattgggtattattatagagaataaaatagataaatatatttgtttttatggaaggtgacgtttttaggagagggtatttatatagttacgtaaatatatattaatttttggtagggtttttagttttttttttggttgagtagttttgtggttgaaatgattagtagataaatagatttttttttgtttcgtttttttttgtttagttaggtaatatttttaatcggttttattatatttttaggtttcgggattatggggggtttagaggggagatatatttattgtttttttagatgggttttttcgtagtttttttttttgttcggggaaagtttttaattttgtttatatttatttatttttttttttttttttttttttttttttttttttttttttttttttgtttttgtttttaattttgtttatatttattttttttttttttttttttttttttttttgtttttgtttttagttttgtttatatttttttttttttttgttttgtttttttttttttttttgatagaattttgttttgtcgtttaggttggagtgtagtggtgagattttagtttattgtaatttttattttttgggttgaagtgattttcgtgttttagttttttgagtagttgggattgtaggtacgcgttattacgtttagttaatttttgtatttgagtagagacggggttttattatgttggttaggttggtttcgaatttcgtattttaggtgatttgttcgttttggttttttaaagtgatgggattataggtatgagttatcgtgttcggttttatatttatttttttaaaaaggatttcgtagtaggtagaaaagttttttttattttgtttttttgatattgtgtttttttggagatattttcgttttttatttacgtgtttgtggttggaattgtttagtttgtttttggttttttggaagtttttttatagttggtaatttggatttaaggattgttgggttatcgtttttttgtttattattattttatatttaagtggagtttttacgtagaaaggtttcggggttttattttagttttttttttagggatgtcgtgggcgggggagggggtttttggtgttatagttttttttttatttttaaagggacgtcgacgttgtttgttgtttttattatatattagtgtttgattttggtaggggattttatggaaaagatggggaagagtaaaatatatggagacgacgtattttttaggatgttcgttgggatttttacgtttattattgttttttattttatggttgggaggggtttttgaacggaatagtgtttttatagagcgaataaagttaaggtttttttttatgtggtagtgaggttggtttgggatagggatcgttcgtttttttttagggaaagagagatttgggtaggatttggggtggggggaggttttttttcgtgtttttaggggcggggtggagttcgtgatttaatgtagcgaggtttggtgatttaggtttgggttgggggttagaacggtatatttttcgaggaaaagtgattttggggtttttttttcgggatattttttttttttatttttcgcggcgggggtttgggaattaagttttggggcgcgcgcggggtgtgtgtgtgtgtgtgtgtgtgtgtgtgtgtgtgtgtgtattcgggtacgaagtgtttttttagttttcgttttgttcggtaacgtgtttttgtataatttgggtatataattttcgacgcgtaatattaggaatacgttggtttttggttggggaagtggtgattttgtttatacgggttgttaggagtgtgcgcgcgtttacgtatcggggatttttggttagagttgggtagcgtatcgtgcgcgtcgagtttcgcgtatttatatttaggttatatttacggcgtttcgggatacgttggtcgcgtatttatttcgtttacgcgggtttagtttcgcggttcgcggcgttttttggcggacgtttagaaaatagataggttgtggtcgttaaaatttttgtttaggtgattcggcgtttaggtttcggggttgcgatttagggtttgttatttttagggtttgttatttttttaacgttttgcgtaaggatttagttgaatttcgttgtgtgattatgcgtgtgtcgtttgttttttttgtgttttttttttttatgagtttagagtggtttttatgaggtttggatttttttgatttgattgttttgtttttgagatagggttttgttttgttatttaggttggagtgtaatggtgtaattacggtttattgtattttttaatttttgggtttaagcgatttttttattttagtttttcgagtatttgggattataggcgtatattattacgtttggttaatttttaaatttttggtagatataggattttattatgttgtttaggttggttttgaatttttgggtttaagcgatttttttgtatcggttttttaaagtgttgggattagaggcgtgaattattacgttttgttatggatttttttgaatggttgttagggtttaagagtttttgagtttttttttttatttgtaaatgataaagatgagttgattttaagatgaagttttagagggtaaggtagtaataatagttaatatttagatgttagacgtagttttaagcgttttatatatgtttaattttttgtatgatttatgacgtagatgtattgttattatttttattttatagatgaggaaattgaggtatagtgaagtagttcgtttaagatgaatgattttgagtttgtatttttagggttttaaaagtgtatgtttttaatatttttttaatgttttgtgtttttaattttgatatttcgaaagttatttgatttttaagattttaggattggaatatttgagaggataaaatttttgagattggaatgtgtgttgtgcggaatttgttattgacggttttgattttttaagaaaacgagattaaaaaataattaggtcgagtatggtggtttatatttgtaattttagtattttcggaggttgaggagggagaattatttgagtttaggggtttaagattagtttggataatatagtgagatttttgttttttaaaaaaaaatatatatatattagtttggatcgggagtggtggtgtgagtttgtaattttagcgttttgggaggtttaggaaggaggattatttgaaattagatgtttgagattagtttgggtaatatggggaggttttatttttataaaaaataaaaataaaaaattagttaggtgcggatgtatttttttgtggtcgtagttattcgggaggttgaggtaggagaatttttgagtttaggagttggaggttgtagtgagttattatttttttattgtattttagtttgggggtaataaagtgagattttatttattaaagaaaaaaattagtttgagtaaagattttaggcggtcgggaaaggtgttcgtttaagggcgaaagttaagaatttgtaattttttcgttttttttttattattcgtcgtcgttaggaatttttagatttcgttgtaaagaatggaggaaggaggagttatttattttttattaagatggtagttttttggtaattttagttattttataaatatggttgttataggaagtacgttacggaagagggtgggaaatttgcgcgcgtacgttgtaaaggggttttttgggacgttagtggttgagttttttttttgataagatggcggtaggaggtagtggcgttggtgggaagcgtagttcgaaaagcgatgtcgattttggttttttggggttgcggtttatttcggtggatttagcgttgaggcggcggcggcgaggtttaagaaataagaagcggggttggcggcggtttgtttaggagtcgttggggttggaggttgattagtttttggaagacgtgcggttataggagcgtacgagcgggtacgttgggcgggattttcgggaggtgggacggtttttgcgtttaggtgtaaggttaggcgtgtttgcgtggattcgtcgggggtcgggggtcgggggtcgggggttgggggtttttgtttcggggatcgtcgaggaaatggagagtatgggtaggggatttagtatgggaagttggagagtttgatagagttattagatttagtagataaatatataggacgtttaattaaatttggattttaggtaaataatgaataatttttagtataaatacgttttatgtatttattttagtttgttgttttttaaatatgtgtgtgtgtgtatgtatatatgtgtgtgtatatatatgtgtatatgtgtgtatatatatatgtgtatatgtgtgtgtgtatatatatgtatatatatatgttttttagacggagtttcgttttatcgtttaggttggagtaggcgcgattttagtttatcgtaattttcgttttttaggtttaagcgatttttttgttttagttttttagtagttgggattataggcgggcgttattacgttcggttatttttttttttttttttttttttttttttttttgagacggagtttttttttgtagtttaggttggagtgtaatggtacgatttcggtttattgtaatttttgttttttgggtttaagtgatttttttgttttagttttttaagtagttgggattataggtatgtattattacgttcggttaatttttgtatttttagtagagatagggttttgttatgttataggttaggttggttttgaatttttgattttaggtgatttattcgtttcggttttttaaggtgttaagattataggtgtgagttattatatttagtttaatttttgtatttttagtaaaggtagggttttattatgttggttaggttgtttttgaatttttgattttaggtgagttattcgtttgggttttttaaagtgttgggattataggcgtgagttattgcgtttggtagttttttttaaatattaagttttgtaaattgttgggcgaagttttagtttggaagagttcggtggcgggatttgattaagcggaagatgaaggttggatttgttaggttaaattttttttttttttaatatttttggttgatgttttgtatttttgttttttagt

SEQ ID NO: 94 - DNA, 6415 bp, Artificial Sequence
  chemically treated genomic DNA (Homo sapiens)
attgggggatagaaatgtagaatattagttagagatgttggagaggaaagagatttaatttggtaggtttagtttttatttttcgtttagttaagtttcgttatcggatttttttaggttaaggtttcgtttagtagtttatagaatttagtatttaggaaggattgttaggcgtagtggtttacgtttgtaattttagtattttgggaggtttaggcgggtggtttatttgaggttaggagtttaagagtagtttggttaatatggtgaaattttgtttttattaaaaatataaaaattaggttgggtgtggtggtttatatttgtaattttagtattttagggggtcggggcgggtggattatttaaggttaggagtttaagattagtttggtttgtaatatggtaaaattttgtttttattaaaaatataaaaattagtcggacgtggtggtgtatgtttgtaattttagttatttgggaggttgaagtaggagaattatttgaatttaggaggtagaggttgtagtgagtcgagatcgtgttattgtattttagtttggattatagagaaagatttcgttttaaaaaaaaaagaaaaaagaaaagaaaagaaaaatagtcgagcgtggtggcgttcgtttgtaattttagttattaaggagttgaggtaggagaatcgtttgagtttgggaggcggaggttgcggtgagttgagatcgcgtttattttagtttgggcgatagagcgagatttcgtttgaaaaatatatatatatatatatatatatatatatatatatatatatatatatatatatatatatatatatatatatatatatatatatatatatatatatatatatatatttagaaaatagtaagttaaggtggatgtatggaacgtatttatgttaaaaattatttattgtttatttaaaatttaaatttaattgagcgttttgtatatttatttgttaaatttggtaattttattaagttttttagttttttatgttgagttttttgtttatgttttttattttttcggcggttttcgggataggagtttttaattttcgattttcgattttcgattttcgacgagtttacgtaagtacgtttggttttgtatttgggcgtaggaatcgttttatttttcggaagtttcgtttaacgtattcgttcgtgcgtttttgtagtcgtacgttttttaggaattggttaatttttagttttagcggtttttgagtaagtcgtcgttagtttcgttttttattttttgggtttcgtcgtcgtcgttttagcgttgggtttatcgaagtgggtcgtagttttaggaaattagaatcggtatcgtttttcgagttgcgttttttattaacgttattgttttttgtcgttattttgttaaaggaagaatttagttattggcgttttaaaaagtttttttgtagcgtgcgcgcgtagattttttattttttttcgtgacgtattttttgtggtagttatatttataaagtgattggagttgttaggaggttgttattttggtaaaggataaatggttttttttttttttattttttatagcgggatttgaagatttttaacggcggcgggtggtaggaaagagacgggaaggttgtaggtttttagttttcgtttttaagcgaatatttttttcggtcgtttggggtttttgtttaaattgatttttttttttaatagataaggttttattttgttgtttttaggttggagtgtagtggaagggtaatggtttattgtagtttttaatttttaagtttagggatttttttattttagtttttcgagtagttgcgattatagaagggtgtattcgtatttggttaattttttatttttattttttgtagaaatggagtttttttatgttgtttaggttggttttaaatatttggttttaagtgatttttttttttaggttttttaaagcgttgggattataggtttatattattattttcggtttaaattgatgtgtgtgtgtttttttttaagagataaaggttttattatgttgtttaggttggttttgaatttttgggtttaagtgattttttttttttagttttcgaaaatgttaggattatagatgtgagttattatgttcggtttgattattttttaatttcgtttttttagaaagttagaatcgttagtggtagatttcgtataatatatattttaattttagaagttttgtttttttaaatgttttaattttaggattttagaaattaagtaattttcggaatattaaagttggaagtatagaatattagaggaatgttagaaatatatatttttaggattttagaagtgtagatttagaattatttattttgagcgggttattttattgtgttttagtttttttatttgtaaaataaagatgataatagtatatttgcgttataagttatgtagaagattaaatatatgtaaagcgtttaaggttgcgtttggtatttgagtgttagttattgttattgttttgttttttgaggttttattttagaattaatttatttttgttatttataaataaggaaggaagtttagaggtttttgggttttggtagttatttaaagggatttatggtagggcgtggtgatttacgtttttaattttagtattttgggaggtcgatgtaggaggatcgtttgagtttaggaatttaagattagtttgggtaatatagtgagattttgtgtttgttaaaaatttaaaaattagttaggcgtgatggtgtgcgtttgtagttttaggtattcgggaggttgaggtgggaggatcgtttgagtttaggagttggagggtgtagtgagtcgtgattgtattattgtattttagtttgggtgatagagtaagattttgttttaaaaataaaataattaaattaaaggaatttaggttttataaaagttattttggatttataaaggaaaaaggtatagagagggtaggcgatatacgtatggttatatagcgaaatttaattggatttttgcgtagagcgttggaaaggtgataggttttaaaggtgataggttttggatcgtagtttcgagatttgagcgtcgaattatttgggtagggattttggcgattatagtttatttgttttttgagcgttcgttagggggcgtcgcgagtcgcgaaattgggttcgcgtgggcgggatgagtgcgcggttagcgtgtttcgggacgtcgtgggtgtggtttggatgtgagtgcgcgggattcggcgcgtacggtgcgttgtttagttttggttaagagttttcggtgcgtgagcgcgcgtatatttttggtagttcgtgtgggtaaggttattatttttttaattagaaattagcgtgtttttggtgttacgcgtcgggagttatgtatttaggttgtgtaagggtacgttgtcgggtagggcgggagttgggagagtatttcgtgttcgaatatatatatatatatatatatatatatatatatatatatatttcgcgcgcgttttagggtttggtttttaggttttcgtcgcgggaggtgggaggaagggatgtttcggggggagggttttagagttattttttttcggaaaatatgtcgttttggtttttagtttaggtttgagttattaggtttcgttgtattgagttacggattttatttcgtttttgagagtacggaagggggtttttttttattttaaattttgtttaggtttttttttttttgggggagggcgggcgatttttgttttaagttagttttattgttatatgggaagaagttttggttttattcgttttgtggggatattgtttcgtttagaggttttttttagttatggggtgggggatagtggtgggcgtgggaattttagcgagtattttggagggtgcgtcgtttttatgtattttgtttttttttattttttttatggggttttttgttagggttaagtattaatatgtggtgaaggtagtaaatagcgtcggcgtttttttaggggtggggagagggttgtagtattaagaattttttttttcgtttacgatatttttgaaaaggagattaaaataaagtttcggggtttttttacgtaggggttttatttaaatatggaatggtggtaggtagagaggcggtggtttagtaatttttaagtttagattattagttgtggggaggtttttagggggttaggagtaggttgggtagttttagttatagatacgtgggtggaggacggaaatatttttaagggggtatagtattagaggagtaggatggaaggggtttttttgtttgttacgggattttttttaaagaaatgggtgtgaagtcgggtacggtggtttatgtttgtaattttattattttgggaggttaaggcgagtagattatttgagatgcggagttcgagattagtttggttaatatggtgaaatttcgtttttatttaaatataaaaattagttgggcgtggtggcgcgtgtttgtagttttagttatttaggaggttgaggtacgagaattattttaatttaggaggtggaggttgtagtgagttgagattttattattgtattttagtttgggcgatagagtaagattttattaaaaaagaaagaaaggataggataggaaagggaaggggtgtggatagaattgggggtaaaaataaaaaagaaggaaggaaggaaagaaagaaatgggtatgggtagaattgggggtaaaaataaaaaagaaggaaggaaggaaagaaaagaaggaaggaaggaaggaaataaatgggtgtgggtagaattgggggtttttttcgagtaagggaaggggttgcggaggggtttatttgaggaagtagtaggtgtgttttttttttgagttttttatggtttcgagatttgaggatgtgatggagtcggttgagggtgttgtttggttgggtaggaggaagcggagtagaagggggtttgtttatttgttagttattttagttatagggttgtttagttaggggaggggttgggggttttgttaggaattagtgtgtgtttgcgtgattgtgtaggtgtttttttttgggaacgttattttttatgagggtagatgtatttgtttattttgttttttatggtaatgtttagtgtttagaatagggttgggtatatagtaggtgtttaataaatatttgaatgaatgacggatggatggatgtttgcgtgtgttagtgtgtgtgtgatgtgtttaagtgaacgtgaggttggaggtgtgaagggcggatagagaagttttgtttttttcgtggttttttttaaatgtttttatcggggtgtttggcggtagtgaggagggagattttcggtttttatagttgggtagggagggtaggtagggcgtgtgtgagtcggagtaggggtgtgcgtgtagtcgattggagttggggagttatagtagggttatgggaggggggtcggtttattcggcggagtttttgtggcgtcgtttggagggtggtattaggcgacggggtaggttggcgggtagttcgtggttttttagtttggtttcgatgaggtggttggttagcgcgaattttttattatttagtatgtcgtcgcggtttatatcgttgagtttttagatgcgttttagtattgagttggggagtttggtttttattatttaggttttggttttggagtcgtttagtttgtcgtcggtaggcgttaggttgtagaagatttcgtcgtatttggatttgtttttggttattatttattcggtttcgtcgttcgagtttttttcgtcgttttttatggtttcgttaggttttcgttttataaacgggtttatgtgggtgtttttaaaagcgtttttttgtacgtttatttcggtgttttttagttttttttgtcgtagtaggggtatgagtttggcgatgtcgtgcgttagtatttcgtttagtgtttttagtagtttcggttttagcgagtgaaatttggtgaagtcgtgcgttattagtagtttttgtggtgggggataggggtatttagaatttaagcggcgttatttttgaggtttttaggttgtaaggtggtattaggatattggagaagttcgggggtagttgttgtggggtttttttattgttgtttgttttgagatagagttttgtttttgttgtttaggttggagtgtaaatggtataatttcggtttattgtaacgttcgtttttcggttttaagcgatttttttgttttagttttttaagtagttgggattataggtatgcgttattatgtttagttaatttttgtaattttaatagagatagcgttttattatgttggttag

SEQ ID NO: 95 - DNA, 5033 bp, Artificial Sequence
  chemically treated genomic DNA (Homo sapiens)
tatggttttgtttttagtattaaggagttgagggttgaggaagtttttgaggtaggtcgtagtgatgtgatagaggggttgcgaggtttattacgatagggttagtttatgttttttttgtttcgtaggtgaaagtggaagagttagatgagaagtgggtaggttttttgcggttggggttgattatattagtatcgggggagatgggattcggggtaggcggtggtggtttagggttgtttttttttttgttagagtttcggacgaagattatttggatggtatttagttgtgaagtgaggcgtgatgggtagttttagaggatgaattatggtcggaatttagagaggttgggggtgaagtggttggttttagggataggggaggggttgggagtggaggtggtagggagaggtgggttgaatatcgttcgtttttgttttatttcggttttaggtggggagtcgtgtgggtgttcgtcggggggtagatgatacgatgtatattttggtggatggagaggatatggggtttgtagttattggtattgttaaggtagatttgaacgtttttttgggttttgggaggatggttgaggttttttgttgatttttgattttttgggttttgtgtgttttttagaacgtgtgggttgtgttggatttttacgggttagttcgcggtgtgttaattgttagttttacgagattggaggagttagaaggtatttagttttttttttttagtttagatatcggtagtgagggcgaggaggatgacgagggcgaggagtatggtttgggagtaagaggttgtagtatggtttgttgtgtatatggatgggtagttgttgggtcgttggatgttaggttttttttgggttttttgatcgttgggtggaggtttatatttaggatttgtgtaaattttagtggggtgggttagttttggtattggtaatttatgtagtttagtttttttttttatattagggttagaatgaagtgggtattatatttattattttcgagtttttggagaattatgggaagaatatttttttgtttaatgggaatcgtacggttatacgggtggttagttataattagggtatcgttgttattaattaatttttggtgttttagttgttggtgtaggtgggttttttttttttatttttagtttttttcgttttatagtgatttatggttaatttttttgaaaaaaggtttttttgtgtggagaaaaagaaagtaagttatttggatgagttttttaggtttttatttatagtttgtaatgagggttattagttagttattacgaagtttttatttggtgattggtgagggaagtagtagggataggttggaggagtttaagagaaatgtttgattttatatgtgggagtagagagggttttttagaagaaggtgtttttttgttataaattgaaagatatgtgaaagttagttagttgagttcgggtgcggtggtttatatttgtaattttagaatttttggaggttaaggtaggcggatcgtttgagtttacgagttcgcgattagtttaggtaatatagtgaaattttgtttttataaaaaaaatataaaaattttttaggtatggtggtacgagtttgtaattttagttattcgggagatggggtggattagggggtagttgtgttagatgtgttttagttttgttatgcgtttgtggatttttatgggtagtgtgagtaggttagtggtagtgggggtagggaggaggggtgtttgagagtttgcgttgtttaggataggggaaatttttgttttagggagggattagtaggttttggggtttgattaagttttgtttgattatttttttttttgtaggtgataatcgtgaattttgagttaggggttgttagtgggaaaagtgttggaatttaaggggatatggagaaagtagatatggtggacggtgtgttagtttaaagggatttagtttttgtttttatttttttatttttatttttttagtttagtttttgtgatttgtgtttttttgtttttttaggtattaaagagagtgtgtgttggggtttattatttgtcgttagttttttaaagagttgcgagtattatgttttttgttttcgtttttaagaatttttgttgtttttcggtgagttttatagttcgttagaattgattttatttttagggttaggtttagagttttggagagtagttggagggtgttattgtggttgaggtgggagttatagtattaagtttgttatttattgtttcgtagaagattattttatgttttcgttaaagcgaagtttgtgttattgtgagttttgtcggaagttgcgaggagacgaggtttataggcgtagaggggagttttttcgggaatatgtattgttttttggttggtgtaggtttaattttaggtatatatgggtaaggttatgttttttttttattgttttttttttggagaaacggggattttaagagggtgtatggaagaagtaatagaattttttgtttaaggaaaagttaggaagtgttagggattttttgtttaaggaagagtttcgtgaagtttttttattggggagttagtggttttcgttgtatttgtttcgtttgtttattttttagagtgaattttcgtttggaggttgggatattaattaagaagtggtatatggtatattacgggagtaatgttgtcgttgtacggagagtgttggatcgaggggagttgggagtaggtattggcgagtaggtttatgtaaggtgggttgagtttggggggttgtggaggaataaaaagggttattttgatttagttttttttttaggtattgtttttattttgagttgtcgttttttgaagggagaatttggggtagggttcgaggagtttggcgagaattgtgtattttttcgggaggagtagtttttttttgtgttgttttttttttttttttatatgttgggggcgaaattttgtttagaagaattttttttttttttttatttcgttttgttagttgttagtttttaatttagttttttttttatttattgaataaatattatttatatatttttttagtgggtaaaaaaaggaattttgtttttgtggaatttttgttttttttttttataatgtttatacgtaataagtattatttatttatttatttttatttttattttttttgagacggagttttgttttgttatttaggttggagtgtagtggcgtgattttattgtaatttttattttttgggtttaagcgatttttttgttttagttttttgagtagttgggattataggtacgtattattaagttcggataatttttgtatttttagtagagacggggtttcgttatgttggttaggatggtttcgattttttgatttcgtgattcgtttatttcggttttttaaagggttgggataggcgtgagttatcgcgtttcgttagtatttagtatttttaaaggtaataagtaaggattatggaaatagagaaagaatggggcggagatagtagtgcggttggtgtggatattttaagaaggtgggagagattcgagtaaaggtttgaagaaggaagtgaagggtgtagttgagtaggttttgggaggaagagtattttaggtagaatagttagagcgaagtttttataaggtgggagtattttttaggtatagtaaggtttgtgtggttggaatagattttgtaagggggaggtgatggggcgagaggttttatttttttatttttttttgtttgatagatttcgggattttaaattttagcggacgtattaggtttaggtggcgttttaggtgtgtgtgcgttttggtttttatatttcgggattttttttcgttgtttttggagaattttttgatttttattttagtttagtcgaatttgagtgggttattaaggagaagggggttatatttttttgtgttttgttggtacgggtggaatgaggggtgagatattattattataagtatagtcgggtcgcgggtttatggattttgagtggcgattgtttttattttattttcgtgattcgtggtatgcgtaggtgttggagtttggtagtcgcgtaggagtatgtaggtaggtttttagatgtaggtggtaagtggtatagttttatgttcggaggtttagtatttcgtttgatgggaggagtcgtgggagtttagttttaggttttggtatttttttttatgtattgatttggggaatatgatttttttttatttttttattttatattatttaatttattttcgtttttgtttttggttattgtgaattttagaggagtttttttttgtgtttatatgaagttgtttttttcggggttatcgggcgggagtggggaagggtgggcgtacggaagatgggggtttttgtatagttgttattgattttgatttttaaggagttaataaatatcgttttagagttttcgtttcggtttttttttcgcgcgttttttttcggagttcgcgttttttggggtgttattaggtgggttcgcgaaattaaagagagttgaggatgttaaggttagtttgtagtcgtcgtcgtttacgttttcggcgacggggtttgtacgtcgcgggtattcgtcgtagcgcgttttcgtttttttttatttgtgaggtcggtcgtcgtcgtgatttcggaaggattcggtcgggtcgtcggatgtgacgtaggggttagggcgcgtcggagtcgttgagaaagcgtagagaaggcgggtaggaagggtagtcgttcgcgttggttgggtagggagcggtagtagcgagtcggggatttcggcgtcgttcgcgcgcggtgggattggggttgcggtttcggtcgggtggcgggtttttgggatacgtgatcggggcggcgagcgggtcgggcggacgggttttcgtttgggtcgggcgcggttttttttgagcgttcgttttttcgtagg

SEQ ID NO: 96 - DNA, 5033 bp, Artificial Sequence
  chemically treated genomic DNA (Homo sapiens)
tttgcggggaggcgggcgtttagagggggtcgcgttcggtttaggcggaagttcgttcgttcggttcgttcgtcgtttcggttacgtgttttaggagttcgttattcggtcgggatcgtagttttagttttatcgcgcgcgggcggcgtcggggttttcggttcgttgttgtcgttttttgtttagttagcgcggacgattgttttttttattcgttttttttgcgtttttttagcggtttcgacgcgttttggtttttgcgttatattcggcggttcggtcgagttttttcggagttacggcggcggtcgattttataggtgaaagaaggcggaagcgcgttgcgacgggtgttcgcggcgtataaatttcgtcgtcgggaacgtgagcgacgacggttgtagattggttttggtatttttagttttttttaatttcgcgggtttatttggtggtattttaggggacgcgggtttcggagaggggcgcgcgagagagaggtcgaggcggaggttttgagacggtgtttattggttttttagaaattagagttagtaataattgtatagaggtttttatttttcgtgcgtttatttttttttattttcgttcggtggtttcggaaaaagtagttttatgtgggtatagggagagatttttttgggatttatagtaattagaaataaaaacggaaataaattaagtgatgtggggtaggggagtaaaagggagttatgttttttaaattagtgtatgaagaggggtattagggtttggagttgggtttttacgattttttttattagacggagtgttgggttttcggatatggagttgtgttatttgttatttatatttgagagtttgtttatatgtttttgcgcggttgttaagttttagtatttgcgtatgttacgagttacgggaatgaggtggaggtagtcgttatttagagtttatgggttcgcggttcgattgtgtttgtagtagtggtgttttattttttattttattcgtattagtagggtatagaggagtgtggtttttttttttttagtgatttatttaagttcggttggattgaagtgagggttaggaggttttttaagggtagcggaagggggtttcggggtgtaggagttagggcgtatatatatttggaacgttatttgagtttggtgcgttcgttgggatttggggtttcggaatttgttagataagaaaaaataagggagtgaagtttttcgttttattattttttttttgtaaagtttgttttaattatataagttttgttgtatttaggaaatatttttattttatgggaatttcgttttagttgttttatttgaaatgtttttttttttaaagtttgtttagttatattttttatttttttttttaagtttttgttcgaattttttttatttttttaggatgtttatattaatcgtattgttgttttcgttttattttttttttgtttttatagtttttatttattatttttaaaaatattaaatattggcggggcgcggtggtttacgtttgttttagttttttgggaggtcgaggtgggcggattacgaggttaggagatcgagattattttggttaatatggcgaaatttcgtttttattaaaaatataaaaattattcgggtttggtggtgcgtgtttgtagttttagttatttaggaggttgaggtaggagaatcgtttgaatttaggaggtggaggttgtagtgagattacgttattgtattttagtttgggtgatagagtaggatttcgttttaaaaaaaataaaaataaaaataaataaataaataatatttattacgtatgaatattgtagagagaaaaggtagaagttttataagagtaaggtttttttttttgtttattagaagagtatataagtagtatttgtttaatgaatgaagaaagggttgagttggagattggtagttagtaagacgagatgagaaaaggggggggatttttttaggtagggtttcgtttttagtatatgaagggagggggaaagtagtataggagggggttgtttttttcgaggaggtgtatagttttcgttaggtttttcgaattttattttaggttttttttttaaaggacggtagtttaggatggaggtagtatttgggaggagaattgggttaggatagttttttttatttttttatagttttttaggtttagtttattttgtatgggtttattcgttagtatttgtttttagtttttttcggtttagtatttttcgtatagcggtaatattgttttcgtgatatgttatgtgttattttttggttagtgttttagtttttaggcggggatttattttaggaggtggataagcggggtagatataacgaaggttattgattttttagtggaggagttttacgaggtttttttttagataggaagtttttggtattttttggtttttttttagataggaagttttattattttttttatgtatttttttgggattttcgtttttttagggggaaaatagtaggggaaaggtatgattttgtttatatgtatttgaggttgaatttgtattagttaaagggtagtgtatattttcggggaggtttttttttgcgtttgtgggtttcgttttttcgtagttttcggtaagatttatagtagtataggtttcgttttggcggaggtatgaaataattttttgcgggatagtgagtagtaggtttggtgttgtggtttttattttaattatagtggtattttttagttgttttttaaggttttaggtttggttttgggaatgaagttagttttggcggattgtgggatttatcgggaagtagtaggagtttttggaagcgagagtaaagggtatggtattcgtagttttttagaggattagcggtaggtggtggattttagtatatattttttttgatatttgagggagtagaggggtataggttataggagttgggttagaagggtgagggtgggggagtaggggtaggagttgggtttttttgggttggtatatcgtttattatgtttgttttttttatgtttttttgggttttagtattttttttattggtagtttttggtttagggtttacgattgttatttgtaggggagagggtagttagatagagtttggttagattttagggtttgttgatttttttttggaatagagattttttttgttttggatagcgtagatttttaggtattttttttttttgtttttattgttattaatttgtttatattgtttatagaggtttataagcgtatggtagggttggggtatatttggtatagttattttttggtttattttatttttcgagtagttgggattataggttcgtgttattatgtttggagaatttttgtattttttttgtagagatagagttttattatattgtttaggttggtcgcgaattcgtgagtttaagcgattcgtttgttttggtttttaaaagttttgggattataggtatgagttatcgtattcgggtttagttggttaatttttatatattttttagtttgtagtaaaaaggtatttttttttggaaagttttttttgtttttatatataggattaggtattttttttggatttttttagtttgtttttattgttttttttattaattattaggtagggatttcgtggtaattgattgatgatttttattataggttatgaataaaagtttaggaagtttatttaagtggtttgttttttttttttttatataaaaaggtttttttttaggggggttggttatgggttattgtggagcgagagaagttggggatagggagggagaatttatttgtattagtagttggggtattagaggttggttgatgataacgatgttttgattgtagttggttattcgtgtggtcgtacggtttttattagataaaaggatattttttttatggttttttaggaattcgagggtggtgggtataatatttattttattttggttttggtgtggaggaagggattgagttgtatgggttgttaatgttaggattgatttattttattggagtttgtatagattttgagtgtgagtttttatttaacgattagagaatttagaaaaggtttggtatttaacggtttagtaattgtttatttatgtgtatagtagattatgttgtagttttttatttttaggttatgtttttcgttttcgttatttttttcgtttttattgtcggtgtttgaattgggggaaggaggttgggtgttttttgatttttttagtttcgtggaattgataattgatatatcgcggattggttcgtagagatttaatatagtttatacgttttgggaggtatataagatttagaaaattagagattagtagaagattttaattatttttttagaatttaaggaagcgtttaggtttattttggtaatgttagtggttgtaggttttatattttttttatttattaggatgtgtatcgtgttatttgtttttcgacgaatatttatacggttttttatttaggatcgaggtaggataaggacggacgatgtttagtttatttttttttgttatttttatttttaattttttttttgtttttggagttagttattttatttttagtttttttaggtttcggttatagtttattttttggagttgtttattacgttttattttatagttggatattatttaagtggttttcgttcggagttttggtagggaaggaggtagttttgggttattatcgtttgtttcgggttttatttttttcggtgttagtgtggttagttttagtcgtagggaatttgtttattttttatttagtttttttatttttatttacgagatagagaaaatataagttggttttgtcgtgatgggtttcgtagtttttttgttatattattacggtttattttaaagatttttttagtttttagttttttggtattgaagataaggttatg

SEQ ID NO: 97 - DNA, 5278 bp, Artificial Sequence
  chemically treated genomic DNA (Homo sapiens)
ttattggatattttttgagaaatgatgtagaatgtttgtttaaagtatgaaaaatgggaaaatatgtattttttgtttttggttttttttgcgaaagggatgttatatggtagtaatagagaaatattgggttagtgagtgaaaaatatttgatgtagttgaggtagggagttgttaggtgatatttgtaggtagtagagtgttatagtaatgatagataaataggtttagaaaatatgagtttttagatttgattgttaattatgaaagtttttatagtgattttaggtaaaatggaatttagttattaaagtttttatttttaaaggtttttttatttttttaagaattgttgtttgtatacgtttaaagattgcgtaaaatttcgttatttaatttttgaaaaaaattagtttggaggaatatttgttttaataagataatgaatttgtttatttttttaggttatagtatttttgtgtttataaattttgaattttggtttatgcggattttattgatataagtggtatattaaggaggaaataataataaaaaattttttttattttaatttatttatataaaatgtgattttgatgaaaatttttttgagttaagttttgtttaatttgcggatgtttattgttttttgatatgtttaattcgttttatttttttggtagtttttgtggagttttgttttttttgagcgtttttattgcgttagttttgggttgggttttgagatgattatagtagaaatatttgtgtttttttttagttattagaattagatgagagatttgggtagtatgattaatgatgaaggtaaattatttaattttatgaaatatgatgaagtgtttaaattcggtagtagatattttggatttttatatttgaataaataggtattaaacgaaaatttagttttttttttaaaagttagtagatgaaatacgtatggttatttaattttggtggtattttaaatgaatttagaaagagaaattttttaaaaaataaattattttaaaaaaagaaattaaaaaataaaaaaattattttgaaataattttaagtttataaaagttgtaaagttaatatagtatttgtgtattttttatttatttttttttaaagtgaatattttataatattatggtatattcgttaaagttaagaaattatcgttgatatattatttttaattgaattgtagattttatttgggttttgttagtttttttattaatattttttttttgttttagaatgtaaattaaagtattatattgtagtggattgttatgtttttataattttttttggattgtgatggttttttaatttgtttttattttttatgatattgataattttgaagagtattatttagttatttaagattttttgatttaggtttgaagtatgttttttttatgattagatttgggttattaatttttgaaagagtattaaagaggtatgttgtttttgtgatattatattaagggggtatatgatatgtatatgatattatattgatgacgtaaattttttttatttggtatagggcgagtttattaggtttttttatggtaaagttattattttattttttagaattgtgtattttaggaaaatataataagttattttaatgttataggaaagatatgttgttagtgaaataaaattatggagatgtgtgattattttgttgtgtttttatttaagaatatgtaaatttgaattatttaattagggtaataatagattttttaaaattattttatttttgaaagtattaattatatattatagagtgtttttattatagtataatagttaaatgttattttatttgattttgatttttaggtttaaggatgtatgattttaggtaagtgatttaatttttttgtattatagtttttttatttgtaatttaaaattttatagatataataatatttattgatattgtagttattagtataagtataggtttgtttggaagattgaatgagttaatatttgtaaattgtttagaagagtagaaaataaatgttttgttttttgtttcgggtgtagaggtttagtaatttgtttttggtatgtagtagtataattaaggaagtagtatattttttatttattagaattttgtaagtttttataatttagtttttttgttgaagaaaaaaaagtaaatttttagcgatttgtgaatgtttgttttatagataaagtgaagagatattagagaagaaaaatttttttttgtttttttggtttgtataaattttataaaatgagtatatattataattataattagaaaataaaataatatattttttaagttttaaagaattatttttatgtttttggaaattttagttttttattaaattttagaaaaagagtgataataagaggtgtaattatttaaatttttaattatgtatgagttagttatatatttaataaattttagattatatgttattttttattttttattattaatttgaatttttttttaatttttttgattttttttttagagttatattgataaatattagagttttttaaaaaaatagttatttttttagtatatttttttaataaataagatgaagattattatatttaaagtttttttttatatatatgaagtgattgaaaggtggattataaaataaattaatgatttgtttgaacggtaataaataaaattttatttaagtgtatttcgtggtagagtaaatatttgtttttttttttgaaagtttgatatagaaaattttattttaatttttgtaaatttttagttgagttttttttttaaaaaatttagatttagaagtttgtagtattgattatagtttgaaattgatgaagatatttgggatattgtatttggtttttattgggttaatgtttttttatttattttttttgttaagaaatataagtaattaggaagatgtgaaaagagaaataattgaaaaagattggagtatatatattatttatagtgtttgttttaaagaaataatattttagtatatttttttatttttgattaagattattgtaatgagagtattagtatttttgagtaatcgaaagggtattttggaaattgagtttttggtgtttatatgaatattttgttttttaggatttgttttgatttatttaagatttatattgttgtatatggtgttgtatatattaggggtagttgggtagtagtaattgatatagaaaattttaaatgtaaaaaatattggggagtgaatttttttattatatatatatatatatatatatatatatatatatatatatatatatatatatataaatttatattaggatgagtttttgtttaggtaatgttggaaaacgttatttttattttttttttttaataaatatttaataaatatttataaggtatttaaatttatgttggtttttataaatgttgatttattttttataattattttggggtagaaacggagaggttaaataatttgtaggcgatgttttattattaaatgtaggtggtagttttgtttgtgttttttgtttggttaggaatataggttttatttattgagttgggttgtgtagaattttgttgtggagatatttgtttttggggtagaagtttttgttttttttttttttttttattttattttatgttttagagagttttgaattttatttggagaattatatttaaattttttaaaaatttaatgatgaataaaaataagttttttagaatttttggagaaaaaagtaataaagttattaggttaaatgattgaaatttttgagagaaaataatatgtgtgtgtttttttagaaagggggtttaatattgaatattaggaagttttatagtaaatggaatgtgattttatgtgggattcggcgtttttattttattcgaatgtatgtttgttgttttagtgggaagggtgtttgtatattaggtatttattttttggtgttatgtgttatgtagtttaaagatagaattaggaatggtgagtttatgagtttgttggatttagttttttcgaggttcggagtgataattagtgtcgtatttttagattaaatttgaattttttttatagggaaaagatttttaggggattttgaaagttttaatattttatagggaagaaggaagataagtaggatatgaaagaagagtttatgttatatagttttggtttttattgacgttaatattggatttagtttttgatattgataatttgttgttattaaatggaaaacgtaaataagatattttaagtgtggttagagaatatgtaatataaggaataagtagaatatttttttttggaatttgatataatggattgtatttttatagatagtattgatgttagatgtacgtgaaataggttaaattgaaaataagaaaggttgaggtagagaggataatatagttttagtttattttttagtattttgttaattttttttaatttttagttataaattcgagatataacgttttttttttaaagaggtcgcgttttttttgtggtggtttttagggattcgttttagtttttttttcgtttttagttttatatattgggattattaggtatttaagattttattttttaggtggtatttttagcgtaggttgttatttagtttttttttagggatttggggtagaaggcgaatattttagagttttagagtttataggagttattttgaagggcgaggcgcgggttgtattagtggatttttatattttattcgtattttaagcgttttattttgggggcggggtcgtcgtttttttttcggattcgggatcgatttggaatttcgggaatttttttggttcgggggtttcgggttttttagttttaattatgtataaaaggggttcgcggatttcggagagttatagagttcgggtcgtaggtattttttcgttagttttttcgttttttttatagtcgttagattcgtttgttgagttttatggttcgcgttgtttttttcgtcgtttttagtaattttcggtttttgcgagtggcgttgttgtttttgtttttggtagtcgttggtcggcgcgtagtaggtgggtatcggcgttttggggttttcgggtcggacgcggttggggtaggtatttagcgtcgatagtttcgtttagttagtgagtttttttttttttagg

SEQ ID NO: 98 - DNA, 5278 bp, Artificial Sequence
  chemically treated genomic DNA (Homo sapiens)
tttagggaagaagagatttattgattgagcgaggttgtcggcgttgggtgtttattttagtcgcgttcggttcggggattttagggcgtcggtatttatttgttgcgcgtcggttagcggttattaggagtaggagtagtagcgttattcgtaggagtcggggattgttgggggcggcggagagagtagcgcgggttatggggtttagtaggcgggtttggcggttgtgagaggagcggaagagttggcgaggaggtgtttgcggttcgggttttgtggtttttcgagattcgcgaattttttttatgtatggttggggttggaaagttcggagttttcgggttagggaaattttcggagttttagatcgatttcgagttcggaaggaaggcgacggtttcgtttttagggtggagcgtttggggtgcgggtggggtgtgggggtttattgatgtagttcgcgtttcgttttttagagtaatttttgtggattttgagattttgggatattcgttttttgttttagatttttggaggggggttgagtggtagtttgcgttgaagatattatttgagaggtgggattttgggtgtttggtgattttagtgtgtggggttgggaacggagaaggagttggggcggatttttgagaattattatagagaaggcgcgatttttttggaggaagagcgttgtgtttcggatttgtggttggaggttgagagaaattaataaggtgttgggagataggttggagttatattattttttttgttttagttttttttatttttagtttagtttattttacgtatatttaatattagtgttgtttgtgaaagtatagtttattatgttagattttagagaagaatgttttgtttgttttttgtgttgtatattttttaattatatttagaatattttgtttacgttttttatttggtggtaatagattattagtgttaaaagttgaatttagtgttagcgttagtggaagttagggttgtataatatgaattttttttttatattttgtttatttttttttttttttgtaaaatgttggaatttttaaaattttttggaaattttttttttgtaggaggggtttaggtttgatttagaaatacggtattggttgttatttcggatttcggaggggttgggtttagtaggtttatgggtttattatttttggttttgtttttggattgtatagtatatgatattagggagtgggtatttggtgtgtaagtattttttttattgaagtagtagatatgtattcggatgaaataggaacgtcggattttatatagagttatattttatttattataggattttttggtatttagtattgggttttttttttagagaaatatatatatgttgtttttttttaggaattttagttatttaatttggtagttttattatttttttttttagaagttttagagaatttatttttatttattattaggtttttagagggtttaagtgtgattttttaagtgggatttagagttttttgagatatggagtaagatgggaggagggggaaaaagtagaggtttttgttttaggggtagatgtttttataatagagttttatatagtttagtttaataggtaagatttgtgtttttagttaagtagagaatataggtaaggttgttatttgtatttagtagtgaagtatcgtttgtagattgtttagttttttcgtttttattttaaggtggttatgagaaatgagttaatatttgtaagagttagtatggatttaagtgttttataaatgtttgttaaatatttgttaaaaaaaaaaaatggaaatagcgttttttaatattgtttaaatagaaatttattttgatgtgaatttatatatatatatatatatatatatatatatatatatatatatatatatatatataatggaaaggtttattttttagtgttttttatatttaaaattttttatattagttattgttatttaattatttttaatgtatataatattatatatagtagtatgagttttgaataaattaaggtaggttttggaagatagaatgtttatataaatattaaaagtttagtttttaaaatgttttttcggttatttaggggtattggtgtttttattatagtaattttagttaagggtagaaaggtgtgttagaatgttgtttttttaaaatagatattgtagatagtatatgtattttagttttttttaattatttttttttttatatttttttgattatttatattttttaataggaagaataaatgaaaaagtattgatttaatggagattaaatatagtgttttaaatatttttattagttttaagttgtaattaatgttgtaaatttttaaatttaaattttttaaaaaagaaatttagttgagaatttataaaaattgaaataaaattttttgtattaggtttttagaaaggaagataaatatttattttattacgaggtatatttagatgaaattttatttgttatcgtttagatagattattggtttattttgtagtttattttttaattattttatgtatataaaaagggattttgaatgtaatagtttttattttatttattgaaaagatgtattaaaggaatgattatttttttaaaaaattttagtatttattaatatgattttaagggaaaaattaagaaaattagaggaaggtttaaattagtagtaaggaataggaaatgatatataatttaaagtttattaagtgtgtgattagtttatgtataattgaaagtttgagtgattatattttttattattattttttttttgggatttgatgggaaattgaaatttttagaaatatggaaatgattttttaaaatttgaaaaatgtattgttttgttttttaattgtagttgtaatatatgtttattttataaagtttatataaattaaaaaggtaagaagagattttttttttttaatgtttttttattttgtttatgaaataaatatttataggtcgttgaaaatttgtttttttttttttaataaaggagttaaattataagagtttatagaattttggtaaataaaaaatatgttgtttttttgattatgttgttgtatattaagggtaaattgttaaatttttatattcgaggtaaagggtagagtatttattttttgtttttttaagtagtttataaatattaatttatttagttttttaaataagtttgtgtttgtattgataattatagtattagtagatattgttgtgtttatgagattttaagttgtaaataaagaaattgtggtgtagagaggttaagttatttgtttaaggttatatatttttgagtttggaaattaaagttagataaaatggtatttaattattatattatgataaaaatattttgtgatatataattaatatttttaagagtagaatgattttaaaaaatttgttattgttttagttgaatggtttaaatttatatatttttaaatgaaaatatagtaaaatggttatatatttttataattttgttttattaatagtatattttttttgtggtattgaaatagtttgttatatttttttgaagtatataattttgaaaaataaaatagtaattttgttatgagaaaatttggtaaattcgttttatattaaatgaggaagatttacgttattagtgtgatgttatgtgtatattatgtatttttttgatatgatgttataagaatagtatatttttttggtgtttttttaaaaattaatagtttaagtttaattatgagaaaagtatgttttaaatttaaattaaagaattttaaatggttgagtggtattttttaaaattgttaatgttatgaaaaataagggtagattgaagaattattatagtttagaggaaattatggagatatgataatttattgtagtgtggtattttggtttgtattttgaaatagaaagaggatgttaatggaaaaattggtaaaatttaaataaaatttgtagtttagttaaaagtaatgtgttagcggtggttttttagttttgacgaatatattatgatattgtaaaatgtttattttaaaggaaagtgggtgaaagatatatagatattgtattgattttgtaatttttataaatttaaaattattttaaaataatttttttattttttagtttttttttttaaaatagtttattttttaaaaagtttttttttttgaatttatttagaatgttattaaaattaaatggttatgcgtgttttatttgttagtttttagagaggaaattgaattttcgtttagtgtttgtttgtttaaatatgaaaatttaaaatatttattgtcgagtttggatattttattatgttttataggattaaatagtttgtttttattattaattatgttgtttaaattttttatttagttttggtaattggagaaaaatataagtgtttttgttgtaattattttaggatttaatttaaaattgacgtaatgagagcgtttagggggagtagagttttataggagttgttaagagaatgaagcgaattaagtatgttaagaagtagtgggtattcgtagattagatagaatttgatttaggaaaatttttattaaaattatattttgtgtaaatgaattggaatggaaagaattttttgttgttattttttttttaatatgttatttgtattaatgaaattcgtataaattaaaatttaaaatttataagtataggaatgttgtagtttggaaaaataaataaatttattgttttgttggaataaatgtttttttaagttaattttttttaagagttgaatgacgggattttacgtagtttttaaacgtatgtaagtaataatttttaaagaaatggaggaatttttaaaaatggaagttttggtagttaaattttattttgtttggaattattatggaaatttttataattagtagttaaatttgggagtttatgttttttagatttgtttatttgttattgttgtagtattttgttgtttgtagatgttatttggtagttttttgttttagttgtattaggtattttttatttattagtttaatgtttttttgttgttgttatgtaatatttttttcgtaggagaaattagaggtaaaagatatatgtttttttattttttatgttttgggtagatattttatattattttttagaggatatttagtag

SEQ ID NO: 99 - DNA, 5275 bp, Artificial Sequence
  chemically treated genomic DNA (Homo sapiens)
agataatgtttataaattgggaatttattatatagttatagttttgattaatataataacgttttttgaagggatatttttatttttgggagttttgtttttgtattttgtgtattaaatgtttagttttatatagttatttatttatataagatataaaagtgttataaaataatagttaaattaataatatgtgatgtattatggtatatgtattttaaaattttattttattttatttatatatatatgtgtatgtatatatatattatattttttttaggtggagtttcgttttgttgttaggttggagtgtagaggtgtaattttagtttattgtaattttttttttttaggtttaagttatttttttgttttagttttttaagtagttgggattataggtatttgttattatgttcggttaatttttttttttgtatttttagtagagatagggttttattatgttggttaggatggttttaattttttggttttttgatttgttcgttttggttttttaaagttttgggattataggtatgagttattgtttttttatatttttaaatattggttataatttataaaattgattttatgattttttagtggattatgatttgtagtttatatatattgaaatattgttttagttttttgatgatagattaatttttaatagtttatagtggtatttatttttttattagtgttttttaagatattttaagagttgttagaggtaagatgtttagttagattttttatttacgttattatttgtttttaatttttttttttttataaagatagggttttattattttgtttaggttggttttgaatttttggttttaagtgattttattgttttggttttttagagtgttggaattataggtgtgagatattatttttagtttgtttttaattatattagattttgatatggtgttgggagttgttgggaattttatggaatgaatttgggggttgacggtataataagtaggagattttttgggttgttgggattttggaggttattagttgttattatttttatatgtttgtttggtttttaattaaaattgtattaaatattttaataaatgtattgttttttggtagggttgaaaaataataaaatattttttatagatttaattaagatttttttatatgtttttttttttttttgttatttttttttttgtttagagaaagattggttatgagtttttgagttagatagttttgggtttgaatttaattttatttttaagattttgtattttagtttttttatttataaaataagatttatgatattagttttttaatatttttgaaattattaaaatgatagtatattgaaaaatttaggtattgtatttaattaagaattggaatttaataaataaatattattttttttttttttttttggcgttttatttttagagtatatgtttcgatgagtggtggttataatttttgagttaataagtaatttattaaagaattatagataaggaagaatgtttttttcgtaggattataatttaaagtcggggtgttagagttagtaaggaaaattttagtataatgaatataaattatagtttttaaaaaattataaaagttttatagaatatgttaattgtaatgtttataatattaggaagtatttttaggttttggttattgagagattgttttaattttttagtgaaaaaaataataagaaatatatatagtatgtaattaagttaattatgtatttttttatgtagttagatataataaaggggttgtattattgtttattttgtatgcgtggtagtaaaatttgaaagtaaaggagttattaagtataaatagtgtgaggattaataagttttattatgaattatgttatttgttttttattttgtaattttagagttttatattttaatttttattagatttatttttaaaattagttgtatttttttatttattttttagtttgtttttttagaggagtaagttatatgttggaggttatattagtaaagtttttaaggtaatttacggtaaagtagagttatattatttattttgttgtttaagtaataagaatgttagtggtcggtatggagtagtaagtttatattttgtaggtatattagattgtattagttaaatttgaaaaatataataaaaattaaaggggagaatggaatttaggaaattgtatttttattttagagatagtatttttgagttagtaattgtatgggtttataatttgtgtttgtaatagtggtatttaatttatattaagataagaaggaatttattatggtaagttttataatattggtatttttaaaaattttagaagtttggtttggggttgttataagttaaattatggaaagtggtatattaagaaaagaaaaaggaattttatttttttttttaaagtaaataatttttagtaaataaattttaggaataacgtatataattttataaatgatgggttgatttttgaaattttttatttttttgagggattgttattgtagataatagaaattttattttttttatttatttatattaatattttgggatgagtttggtaattattataagttgatgttttttattgttttttagttttttagtataaaataaagaagtttgggtagttagttgttaatgtttaaggtagagttattttataaattttttttaataaatggatagggtagaattttatttttatttttattttatgtggaaagtgattgaaattaaaattttaaataaataatggattaaaaaattattgtaagattttataaggatagaaatgtatttttttttaaaatttttgatgttgaaaaattttaaaggtaaattagaagatgtttttttgaaaatatttttttttttgtgcgtgtgtgtgtttataaggttttattagagtgtttttgtttagttaagtgttttagttagtttgagttgttataatagaatgttataggttagggggtttaaataataattattttatagttttggaggttggggagtttaagattaagattttggtagattttatgtttggtgagggttttttttttagtttgtagatggtggtttttttgttgtgtttttataatgtagaaagggagagagagttagagatcgaaagtttattgattttttgttgtaatggtatttattttattatgggggttatatttttataattttatttaaatttaattattttttatggttttgttttttaatattagtatataagggagttagggttttattatttgaatttgaaagagatataaatatttagtttatattagtaaggttgtgaaatattatttttattttgttatttaataaatatttatataatattttatatgtattgatggtttatatatattaataattaatatttttaataatttcgtgaggtaggtattattataagtttttttataggggagaaatatgagtaaataaagtataaattattaagggttatgaagtaagttagtggtatggttgaaattttagttttgatatttttattaagtgatttttatagttgtagtatttagggaatattttatttttaaggtagttttatttttttattttcgtgttatttttagttttttttatagtagtggtagaatatttttatatttttgaagtttgtatttattaggaagaattaagatagagtattgtaggtttatagtttaatttttaaagagagggggttattgaaattgatgatgaaaagttagtaatttagtgagaaggtattagttaaataggtttggaaatgttttattgatatttttttagaattaaaattttttcgatagttgtttttttagagggaattaattttaggatgttggtaaatatatatggtatggaaatgtaattatgttagtaatttagtatgtatatattagatatgtttgtttgtgtttagagtagtaaataagcggagttttattttttgttttttttttggtggtgtttatggttttttttgtttagggatagtattagaaaaggtagattttttgagtttaataggtttttcgtagtttttagtgattgttatggatttttatatagatatttatatattataaaatagatgttattggaagtatatagagaggcgagagatattaacgacgattatagagagagagaatgtgggagtgcgatatagtttgtataaatatatatatagtagagattcggcgttgttttgttttcgtatttatatatttgggtttattacgatgagatatatatatatatatatatatatatatatatatatatatatatacgtgatatttgtttttaagattataaaatattaggaaggagataaaagtttttatgcgttatttgagatgatatatgtattgttaaagcgtgcgtttattttaaatattaatgaaatttgtagaatttaaattaaagagagaggatagataagatatgttgtagtttttgttttaatttttaattttaataattgaaatgttttttagagaagtaatttttttcggtaaggatgtagcgcggtttttacgtgggtttaagggatttgatttacgacgtattgtattgggtttacgaagcgttttttcgtaggcggttatttcggtatttttgagagcggcgggttttcgttttcgttttagggattcggggtagaaagagaatattttatagttggcgggagttacgtaagatagttagattcggacgttattcgtgagtgtttcgatttttttttattttagaggcggggttatcgtttttttttcgaattcgggatcgatttggagtttcgggaatttttttggttcgggatttcgggttttttagttttaattatgtataaaaggggttcgtcgttttcggagagttatagagttcgggttataggtagttttttgttagttttttttttcgtatagtcgttcgaatcgtttgttgagttttatggttcgcgttacgtttttcgtcgtttttagtaattttcggtttttgcgggtggcgttgttgtttttgtttttggtggtcgttagtcggcgcgtagtaggtgggtttcggcgttttggggttttcgggtcggacgcggttggggtgggcgtttcgcgtcgatagtttcgtttaattagcgagtttttttttttttagg

SEQ ID NO: 100 - DNA, 5275 bp, Artificial Sequence
  chemically treated genomic DNA (Homo sapiens)
tttagggaagaagagattcgttgattgagcggggttgtcggcgcggggcgtttattttagtcgcgttcggttcggggattttagggcgtcgggatttatttgttgcgcgtcggttggcggttattaggagtaggagtagtagcgttattcgtaggagtcggggattgttgggggcggcggagagcgtggcgcgggttatggggtttagtaggcggttcgagcggttgtgcgaggaggagagttggtaaggagttgtttgtggttcgggttttgtggtttttcgagaacggcgaattttttttatgtatggttggggttggaaagttcggagtttcgggttagggaaattttcggagttttagatcgatttcgagttcggaaggaaggcgatggtttcgtttttggggtggaggggggtcggggtatttacgagtgacgttcgggtttgattgttttgcgtaattttcgttaattgtgggatgttttttttttgtttcgaatttttggagcgggagcgagagttcgtcgtttttagagatatcgagataatcgtttgcgaggaggcgtttcgtgaatttagtgtagtgcgtcgtgggttagattttttagatttacgtagggatcgcgttatatttttatcggggggagttatttttttggaagatattttagttgttgggattgaaagttagggtaagaattgtagtatgttttatttattttttttttttagtttgggttttgtaaattttattaatgtttgaaataaacgtacgttttaatagtatatgtgttattttagatgacgtataagagtttttgttttttttttggtgttttatgattttaaaagtaaatattacgtgtgtgtgtgtgtgtgtgtgtgtgtgtgtgtgtgtgtgtgtgtgttttatcgtagtggatttaggtgtgtgggtgcggaaatagaatagcgtcgggtttttattgtgtgtatatttgtgtagattgtgtcgtatttttatattttttttttttgtgatcgtcgttggtatttttcgtttttttatgtatttttagtagtatttattttgtggtgtatgagtgtttgtgtagagatttatgatagttattgggagttgcgaggggtttgttgggtttaggaggtttgttttttttagtgttgtttttgggtagaaaaggttatagatattattagaaaaggagtagggaatgagatttcgtttgtttattattttaagtataagtagatatgtttgatatatatatattagattgttaatataattgtatttttatgttatatgtatttattagtattttgggattggttttttttagagaaatagttatcgaggaaattttagttttagaggaatgttaataaagtatttttaagtttgtttagttgatgtttttttattggattattgattttttattattaattttaatgattttttttttttaaaaattaagttgtaggtttataatattttgttttaattttttttggtggatgtagattttagggatatggagatattttgttattgttatgagaagggttgggagtggtacgaggatgaagaagtgggattattttaggaatagagtgttttttggatgttgtagttgtagagattatttgataaggatgttagggttgaagttttagttatattattaatttgttttatgatttttggtaatttatgttttatttgtttatgttttttttttgtagaagagtttataatagtgtttgttttacggggttgttagaagtattgattgttaatatgtgtaaattattagtgtatgtaaagtgttatgtaaatatttgttaaataataaaatagaagtggtgttttataattttattgatataggttggatgtttgtgttttttttaaatttagatgatgaagttttgatttttttatgtgttaatattagaagataggattatgggaagtaattaggtttaggtgaggttatgaaggtatggtttttatgatgggataagtgttattatagtaagagattagtgagttttcgatttttggttttttttttttttttgtattgtgaggatatagtaagaaggttattatttgtaaattgagaagagggtttttattaagtatgaaatttgttaggattttaattttggattttttagtttttagaattgtgaaataattgttgtttaagttttttagtttatggtattttgttatagtagtttaaattgattaagatatttaattaaatagaagtattttgataaagttttatgaatatatatacgtataaagaaagaaatatttttaaagaaatattttttaatttatttttaaaattttttagtattagaaattttaaaggagggtgtatttttatttttatgggattttataataattttttgatttattgtttgtttgaaattttagttttaattattttttatataaaatgagaataagagtaaaattttattttatttatttattagaaaagatttatgaaatgattttgttttgggtattaatagttagttgtttaaatttttttattttgtgttaaagaattaaagaataatagaaaatattagtttataatgattgttagatttattttaaagtattgatgtgagtaaatagaaagagtaaaatttttattatttatagtaatagttttttaaaaagatgagaaattttaagaattagtttattatttgtaaaattatgtacgttatttttagaatttgtttattaaaaattatttgttttaggaagggaagtagaatttttttttttttttttaatatattattttttatgatttaatttatgatagttttagattaagtttttgaagtttttaagggtattagtgttatgaaatttattataataaatttttttttgttttaatatgagttgagtgttattgttataggtataagttgtaaatttatgtaattattaatttaaagatgttatttttaaaatggaagtatagttttttaaattttatttttttttttaatttttattgtattttttagatttgattagtataatttaatatatttgtaaaatgtaggtttgttgttttatgtcgattattgatatttttgttatttgggtagtaaaatgagtggtgtggttttgttttatcgtgaattgttttgaagattttgttgatataatttttaatatatagtttgtttttttagaggaatagattagaaaataaataaagaagtataattgattttagagatagatttgatggaggttgagatatggggttttggaattatagaatagaagatagataatatggtttatgataagatttgttagtttttatattgtttatgtttagtgatttttttgtttttaggttttgttgttacgtatataaagtggatagtggtataatttttttgttgtgtttgattgtatgaagaaatatataattgatttagttatatattatgtgtattttttgttattttttttattaaagaattaaggtagttttttaatgattagagtttaggaatattttttagtattataaatattgtaattgatatgttttgtggggtttttgtgattttttgaaaattgtggtttatatttattgtgttaaagttttttttattggttttggtatttcggttttgggttgtggttttgcggaagaaatatttttttttgtttgtggttttttagtggattgtttgttagtttagggattgtggttattatttatcgaaatatgtgttttggagataaagcgttaaaggaaaagaagggaagtaatatttatttattagattttaatttttgattagatgtagtgtttgagttttttagtgtattgttattttaataattttaagaatgttgggaggttggtattatgagttttattttataggtaaggaaattggagtataaggttttagaagtggaattaaatttaaatttaagattgtttgatttagaagtttatagttagtttttttttagataagaaaggaagtgataggagaagaagaggatatgtaaaagaattttaattaagtttatggaggatattttattattttttaattttattagaaaataatgtatttattaaaatatttaatatagttttgattaggaattaaatagatatgtagaagtgatgataattagtagtttttagagttttagtagtttagagaattttttgtttattgtgtcgttagtttttaaatttattttatgaagtttttagtaatttttaatattatattagaatttgatatgattgaaggtaggttgggagtggtgttttatatttgtaattttagtattttgggaagttaagatagtaggattatttgaggttaggagtttaaaattagtttgagtaagatagtgagattttgtttttatggaaaaaaaaaaattgaaggtagatggtagcgtaggtaaaggatttagttaagtattttatttttagtagtttttaaagtattttagaaggtattaataagaaggtagatattattataaattgttaaaggttggtttgttattaagagattagagtaatattttaatatgtataaattataagttatgatttattggagggttataaagttagttttgtgggttgtaattagtatttaaaaatataaaggggtagtggtttatgtttgtaattttagaattttgggaggttaaggcgggtagattaggaggttaagagattgagattattttggttaatatggtaaaattttgtttttattaaaaatataaaaaaaaaaattagtcgggtatagtggtaggtgtttgtagttttagttatttgggaggttgaggtaggagaatagtttgaatttgggaggaagaggttgtagtgagttgagattgtatttttgtattttagtttggtaatagagcgagattttatttaaaaaaaatataatgtatatatatatatatatatatatatgaataaaataggatagaattttaaaatgtatgtgttataatgtattatatattgttagtttaattgttattttatgatatttttgtgttttatatagataggtaattgtgtaaaattaaatatttgatgtataagatgtaaaaatagaatttttaggagtgaaaatatttttttagaagacgttattatattgattaaggttgtgattatataataagtttttagtttgtagatattattt

SEQ ID NO: 101 - DNA, 5276 bp, Artificial Sequence
  chemically treated genomic DNA (Homo sapiens)
agtatttgtatattgattatattacgagattattatattaggaatagaaaaataaatgatttggtattataaaagaaagtagatagattaaatgaagaattttgtgttagaagtcggatttgatttaattttgttttttttattaaatttattattgtgttttatatgtatagattaattttaagtgtatcggaagaaagagaagttgttagataagtagtttttaggaggttaaatagagaggattatgaatttagtacgtattatggttttggattgtggaggtggattgatttaggaatttaatgttatgtttatatatttttatttttttttgttttgagttagagttattatattggaagagatgagtatagggaaatagggatagtaattgtgaggaagaagtttttaaattagtttggggtagagtagggttgttttttttatttgagtatggttattttttaggatggagtagtgtttaagtttaggtttttttaaaatgtagaatttgagttatgagtttgttatgtaggtaatttatttggggatatattattaatgtagaggatttgaaagttgggaagaataaattaggaaaagaggatatgggtaattggagtttaattttattggggattttttgagaaatggtgtagaatttttgtttaaaatatgtaaaagagggaaatatttatttattgattttagttttttttgtgaaagggatgttttttggtagtaatagagaaatattgggttataaagtgaaagatatttgatttagttgaggttaggagtttttaggtgatatttgtaggtagttagtgttgtagtagtgattggagaataggtggtttaggagatgtgagtatcgagatttgatcgtttgttagttttgtaaggttttataatgattatagggtaaatggaatttggttattaaagtttttatttttaaagatttttttatttttttaagaatttttgtttgaataagtttaaagattgtataaaattttggtatttaattgttgaaaagaaaataggtttggagaaatatttgttttaataagataatttatttttgtagttaatagtattataagttttggtttatgaagattttattgatataagcggtatgttagggaaaaatattattattattaataataacgaatttttttttttatattttatttataaaaataagtgattttgatgatattttttttaggagttaagttttgtataatttgtaaatgtttacggttttttgatatgttttatttgtattatttttttggtattttttttgtgttgggtttggagagtatgatagtaaatattttttgattttttttagttataagaattaaatgagagatttggaaaatataatgttgaaggtaaagtatttaatattatgaagtatgatgaattgtttaaattgcggtaatagatattttgaatttttatatttgagtaaatatgtattaaattaaaatttaattttttgtttagaaagttagtaggtaaaatatgtatatgttttgattttattttggtggtattttaaatggatttagaaaaataaatttagaaaaaaatgaatttaattgggataatttttaatttataaatattgtaaagataatatagtgtttgtgtgttttttattttttttttttgatagtgaatattttataatagtacggaacgtttgttaaagttaataaattattaatgatacgttatttttaattaaattttagattaagttgtgttttattagtttttttattaatattatttttttgttttaggattttatttaaattattatattgtaatgagttgttatttttttagttttttttggattgtgatggttttttagttttttattgtttttatgattttgatagttttgaagagtattgattagttttaggagtttttagtatgagtttgaagaatgttttttattataattagatttgggtgatgaatttttggaagtggtattaaagaggtattttgtttatgttatttttatgatattatattaagtgggtatatgatatttatatgatattatattgaagacgtttatttttattatttttttaaagaagtagtttgttagttttttttatggaaaagtgtttattttattttttagaattgggtattttaaggaaagataatgagttatattaatgttataggagagagttatgttgttagtgaaataaaattataaagatatattatcgttttgatgtatttttattttaaaatatgtaaatttaagttatttaattaggttaagaataaatatatttttaaaaattttttttttttttaaagtattaattatatattatagtgtatttttattatagtttaatggttaagagttattttttttgggtttgatttttagttttaaggatgtatgaagttaagtaagtgatttaatttttttgtattttagtttttttgtttgtaattattaagttttataaagataataattaatatttattttatagtattgtttggaagattgaatgagttaatatttgtaaaatgtttagaagagtattaaataaattttttgttttttgtttttggtgtagaggtttaatttgtttatagtatgaagttattaaataaaaaagtagtatgttttatatttatttagaattttgtaagtttttattatttattttatgtttgttgaagaaaaataagtaaatttttaatgattttttatttatgtgtattttttggtaaagtatagatgtgtttttttttttgaaagtttttttaaattaaaaatatttaatttttttgttttttataaatttttaattgaattttattttttatttataagtttgtagtatttattatagtttgaaattgtagaagatatttgggatattattttggtttttattgggttaatgttttttttgtatttatttttttttttaaggaatttaagtagttagggagatgtgagagaggaaattattgaaaaagaatggagtatatatattatttatagtgtttattttaaagtaataggatattttagtatatttttttattttttgtttaagattattgtaatgatattatagatattcgtgagtattagtaattataagattattttggaaattgggattgtggtgtttatatgaatatttttttttttaggatgtgttttgattttttaaggatttatattgttttatattagttagagatagggagagttgggtggtagtaagggatatagaaaattttaaatgtgaaaaatattggggagtaaaattttttattagatttttttttttttttttatagaatttatagtaggttgagtttttgtttaggtaatgtcgggaaagaaatagttttttaaaaatggaaatagtttattttatttatttaataattattaataaggtatttaatttatgttgttttttataaatgttaatttattttttataattattttgggttaggtatagagaggtttaataatttgtaagtgatattttgtaattaaatataggtagtatagttgtacgttttgtgtttggttaggggtaaggatttttattttttgagttgggttgtgtagagttttgtgttttaggtagatgttatttttttttttttttttttattttattttacgttttaaagaggtttgagattaatttgtagaattatatttaaattttttaaaatttaatgataaattaaaatatattatttaaaattagaaaaagggataaaggtgttaggttaaaagattgaaaatttagacgagaaaaaaaagtgttttgttaatgtttttagagaaagattttttagtgttgaatattagaaaattttatagtaaatgaaatgtgattttatgtgtgatttggtgtttaaatgttattagtaggtagttgtttgtttttttagtgggaatggtgtttgtatattaggtatttattttttagtgttattcgtaaagatagaattagaaatattgagtttatgattttgttggatttagtttttttatagttttagagtgatagttagtgttatatttttagattaaatttgaattttttttattgggagaaggtttttaggggatttaggaagttttaatattttagagggaggaaggacgttatgtaggatataaaagaagaggttatgttatatagttttggtttttacggatattaatattgaatttaaattttgatattgataatttgttgttattaaatggaaaacgtaaataaggtattttaagtgtgattagagaatatgtaaaataaggaataagtagaatatttttttttggaattcgagacgatggttgtatttttatagagagtatgatgttagatgtatatgaaataacgttaaatcgaaaatgagagaggtagagatcgggaggttaatatagaggatagattatatagagagaggatagttgagggaaaattcgtttgttttcgggtttttagtaaatttgataattaaggagataaagttttttttttttaaagaagtcgtgttttttttgttttggtttttacgggtttttttagtttttttttttaattttatttcgtacgcggggggttatcggggatttaaggtttttttttataggttgtatttttagcgaggtggatttattgtttttttaggaatttggggtagaaaatgaatattttaaagttttagagtgtacgggggttattttggagggcgaggcgtaggcgttattagtgggttttttttattcgtattcgattttatttcgggggcggggtcgtcgttttttttcgggatttcggatcgatttggagtttcgggaatttttttggttcggtcgtttcgggttttttagttttaattatgtataaaaagggttcgtcgattttggggagttatatagttcgggtcgtaggtattttttcgttagttttttcgtttttcgtatagtttttcgacgcgtttgttgagttttatggtttacgttacgtttttcgtcgtttttagtaattttcggtttttgcgggtggcgttgttgtttttgtttttggtggtcgttagtcggcgcgtagtaggtgggtttcggcgttttggggttttcgggtcggacgcggttggggtgggcgtttcgcgtcgatagtttcgtttaattagcgagtttatttttttttagg

SEQ ID NO: 102 - DNA, 5276 bp, Artificial Sequence
  chemically treated genomic DNA (Homo sapiens)
tttagggaagaatagattcgttgattgagcggggttgtcggcgcggggcgtttattttagtcgcgttcggttcggggattttagggcgtcgggatttatttgttgcgcgtcggttggcggttattaggagtaggagtagtagcgttattcgtaggagtcggggattgttgggggcggcggagagcgtggcgtgggttatggggtttagtagacgcgtcgggaagttgtgcgagaagcgggagagttggcggggaggtgtttgcgattcgggttgtgtggttttttaagatcggcgaattttttttatgtatggttgagattggaaagttcggagcggtcgggttagggaaattttcggagttttagatcgattcggagtttcgaaggaaggcgacggtttcgttttcggggtggagtcggatacgggtagggggagtttattggtgacgtttacgtttcgttttttagagtaattttcgtgtattttgggattttgggatatttattttttgttttaaatttttggagaggtagtgagtttatttcgttgaagatatagtttgtgaggggggattttaggttttcgatgatttttcgcgtacggggtagggttggaggaaagagttggggggattcgtgagaattaggataggaaaggtacgatttttttagaggaagagagttttgtttttttagttattagatttgttggggattcggagataggcgagtttttttttagttattttttttttatatagtttattttttatgttaatttttcggtttttgttttttttattttcggtttagcgttattttatgtatatttaatattatgttttttgtgaaagtatagttatcgtttcggattttagagaagaatgttttatttgttttttgttttgtatattttttaattatatttagaatattttgtttacgttttttatttggtggtaatagattattagtgttaaaatttgaatttagtgttagtgttcgtggaagttagggttgtataatatgatttttttttttgtattttgtataacgttttttttttttttgaaatgttggaattttttaaattttttggagatttttttttagtgggagggatttagatttgatttagaaatatgatattggttgttattttgaagttgtggaggggttgggtttagtaggattatgggtttaatgtttttggttttgtttttgcgaatgatattagagagtaggtatttggtgtgtaaatattatttttattgaaggagtaaatagttgtttgttgatgatatttaaatattagattatatataaaattatattttatttattatagaattttttggtatttagtattgggggatttttttttggaaatattaatagggtatttttttttttcgtttggatttttagttttttaatttgatatttttgtttttttttttagttttagataatgtattttgatttgttattaggttttagagggtttaagtgtgattttataagttggttttagatttttttgagacgtggagtaggatggaggagaggagaaaggaatggtatttgtttgaagtatagggttttatataatttagtttaagggataagagtttttgtttttaattaaatatagagcgtgtaattgtgttgtttgtatttagttgtagagtattatttgtaagttgttaagtttttttgtgtttagtttaaggtggttatgagaaatgagttaatatttgtaagagataatatggattaagtgttttattaatggttgttaaataaataaaatggattatttttatttttaaaaggttatttttttttcgatattgtttgaataaaaatttagtttgttatgaattttgtaaaggaaaaaagaagaatttaatggaaagttttattttttagtgttttttatatttaaaattttttgtattttttattgttatttaattttttttgtttttaattgatataaagtagtgtgagtttttaagaaattaaagtatattttagaaagaagaatgtttatataaatattataattttagtttttaaaatggttttgtagttattggtgtttacgggtatttgtgatgttattataataattttggataagggatagaaaggtgtgttagaatgttttgttattttaaaatagatattataggtaatatatatgttttatttttttttaataatttttttttttatatttttttgattatttaaattttttgaaagaaaggatagatatagaaaaaatattgatttaatggaggttaaaatagtgttttaaatgttttttgtagttttaagttgtaataaatgttgtaaatttataaatgaaaaataaagtttaattgggaatttataaaaaataaaaaagttaaatgtttttaatttaggaaggtttttagaaaggaagatatatttgtattttattaggagatgtatatagatgggaggttattaaaaatttgtttgtttttttttagtaaatataaggtaaatgataagagtttataagattttgggtaaatgtggaatatgttgtttttttatttaataattttatgttatgggtaagttaaatttttgtattagagataaggggtagagaatttatttaatgtttttttaagtattttataaatattgatttatttaattttttaaataatattgtgaagtagatattaattgttatttttatgggatttaatggttataaataaaggaattgaggtatagagagattaagttatttgtttaattttatatatttttgaggttggaaattaaatttagagaaaatggtttttaattattaaattatggtaaaaatgtattgtgatatataattagtattttaaggggaggaaggatttttaaaaatgtatttgtttttgatttagttgaatagtttaaatttatatattttaaaatgaaaatatattaaaacgataatatatttttgtagttttgttttattaatagtataatttttttttgtggtattgatgtagtttattatttttttttaaggtgtttaattttgaagaataaaataggtatttttttatggagaaagttgataaattatttttttaaaaaaatggtgaagataaacgtttttagtgtgatgttatatggatattatgtatttatttgatatgatgttataagaatggtataagtaggatgtttttttggtattatttttaaaaatttattatttaaatttagttatgataaaaaatattttttaaatttatattgaagatttttaaagttaattagtattttttaaaattgttaaggttatgaaaataataaaagattgaaaaattattatagtttagaggaaattggagaagtgataatttattgtagtgtggtagtttggataggattttgggatagaaagatgatattaatggaaaagttggtgaaatataatttagtttggagtttagttaaaagtaacgtgttattggtggtttattagttttaatagacgtttcgtgttgttgtaaaatgtttattgttagggaaaaaggatgaagggtatatagatattgtattatttttgtaatgtttgtaaattgaaaattgttttaattaagtttatttttttttaagtttatttttttaaatttatttagaatattattaaaatgaaattagggtatgtgtatgttttatttgttagttttttagataggaaattgaattttgatttagtatatatttgtttaaatatgaaaatttaaaatatttgttgtcgtagtttgggtagtttattatgttttatagtgttaaatattttgtttttagtattatgttttttagattttttatttagtttttataattgaagaaaattagaaagtgtttgttattatgttttttagatttaatataaggagagtgttaagagaataatgtaaatgaaatatgttaagaggtcgtggatatttgtaggttatgtagaatttgatttttgaggaaaatgttattagaattatttgtttttgtaaatgaagtataaaggagaggattcgttgttgttggtggtggtggtgtttttttttaatatgtcgtttgtattaatgagatttttataagttaaagtttataatgttgttgattataaaaataaattgttttgttagagtaagtgtttttttaagtttattttttttttaatagttgaatgttagaattttatgtagtttttaaatttatttaagtaaaaatttttaaagaaatggaagaatttttaaaaatggaagttttggtggttaaattttatttgttttgtaattattatggaattttataaaattggtagacggttaaatttcggtgtttatattttttaggttatttgttttttagttattgttataatattagttgtttgtagatgttatttggaaatttttggttttagttgaattaggtattttttattttgtggtttagtgtttttttgttgttgttaggaaatattttttttataagaggaattggggttaatggataaatgttttttttttttgtatgttttgggtagaaattttatattattttttagagggtttttagtagaattgaattttagttgtttatgttttttttttttagtttgttttttttagtttttaagttttttgtattggtaatatgtttttaaataaattatttgtatggtaggtttatgatttaaattttgtattttggaggagtttaaatttaggtattgttttattttgagaaataattatgtttaaataaggagggtaattttgttttgttttagattgatttaggaattttttttttataattgttatttttatttttttatatttattttttttaatgtaatgattttggtttagagtagagaagaatgaagatgtgtgaatatgatattagatttttgaattagtttatttttatagtttaaggttatggtgcgtgttgaatttatggttttttttatttagttttttggagattgtttgtttggtagtttttttttttttcggtatatttaaaattaatttatgtatataaggtatagtgataggtttagtagaagagataaagttggattaaattcgatttttaatataaaattttttatttaatttgtttatttttttttgtaatgttagattatttatttttttgtttttggtataataatttcgtgatatgattaatatgtaagtatt

SEQ ID NO: 103 - DNA, 7118 bp, Artificial Sequence
  chemically treated genomic DNA (Homo sapiens)
aagagaagatagattaatgaatattgttgttaataagttttgttttgaataatatattttaatagttttatttttgtttttttaaaagttttgtaattgggtattattgtttttgtttatagatgagtgatttgaggtttagagagggaaggtaatttgttttgttttatatagtttagatttgaattttagcgttttatcgtgaaatttgtaacgtttttttcgtattattatatatcgaaggtaggcgtttgtgtagaaaataggttgtttagaaagaagagtgtttatttttggcgagtttttgtgcgttatattttgggtttttttattgttttatgttttaggtattatttttttttttttagagatgaggaaattgaggtttggattgtagaagttgagtttagattcgtaaatttgtttatagggtttgtcggaatttttttaggttttgtttagttttattgggttttataattggtttttttgtttattgattattgttttaattagtaaaatttttggttagaagggcgggtgtttttaggaggatttagagaatagtagtgagttaaaaagtaaatagattttaagagagggttttttatgagtggttggttgtttggaaaattaagaataatagtgtttggagtgaagagaaaagaatagggtggtgttttttaggtttagttaaggtttttttgtatattgtggttggggatggaaggggcgggggaggttattttttttggtttttggtagggggtttcgtagatatatagagattaaggttatagaggaaaggagggtttagagttggttgtgttgtggaggttttgggttaattataggggagggaggggttttttagggggatatgggttgtatagtttttattttgtggtagatatagagaatttgtttattgtgtgtttggagttgggtaggatttaggaatagtcgagattagaggttaaggagattttcgaggtgtatagaagtagagattaggatatgtttatgtattgagttggtagtagaagggttgtttttaaattaaagaaattatgttagatttgagtgttatgtggtttagagggtaggtgttatagttagttttgtattaaatggttatagtttggggattttttaggtttttggtttgggtagttatattaggtgtgtgaaaggttagagggttttttcggtgttattttttgttttggtttgggaagtgtcgtggggatagttgtttcggagatttttggttgttaggtttgatttgggtttgattgatttagtttgttatttggaaagggtattgttgttttttgtttaggttaggtggtgttaggagtttttgtttggttttcgtagatagagtttgggttttgaagttagttagatttgtgtttgaattttggtaatatttttttttagttgagtgatttgaatttttttgagttttagttttttaggttgggtttagaggtgaggtggtatgttgttattagtgattgtagtgtttttttttttaagttaggggttgtggattgtttgatttagaacggtttgtagaggtgatttggtcgaatgtatttattttatagatggaattttgaagtttagagatttgtaggttttggatttggttgtataattagtatttggtattgtttgggttaggaaagaggttttaagttagagtattaggttttattttgtattttgtatatgaagatattgaaatttagaaaggtatagtgatttgtttaaggttattaggaagttagtgttagagttagttttagtattcgggtttttttttttttatttaggggtttttttttttgtatttgaatttttttatttttttgaatttatatatttttttttaggttggaagtagagtaagataatgttgttcgtattatggtttttatttattagtgttttgtagtaagggttttagggtttgtagtgagggtttttagagggtaagggtggggtttgtttattagtttttttgtgttaagggtttgggttttagagttatatggtaggtaaagttgtaggttttttgtgattattaacgtggtttttgggttgatggttagtggtttttggggttaaggttaagttatagtagtttttttattaattattaattatgtaggttagagttatattgttttggaaggggttttttagttgggtagttgttggtttaggtttagtttgggggttgggtagttaagaaaatttttttttatttgtttgaattttttaaattgtttaatgagtaggtattattataagtatattttaaaagggattgtttttggatttgtgttttataaaagaataaaattatattggatatatatttgtaaagttttaaatgttacggtaatgtttttataattttttcggttagtatattaaggtataatttatatattatagtgatttatatattaagtatatttatagttttatgaattttagtagatttaattggttatataatttttattataatttagtattagaatatttttattatttcgaaaagtttttttatgttaattgtagtgatttaggtattttttttagttttaggtagttacggtaatgtttgaggatgaaattttttttttttttttttttttagtaaacggttttaatagtttggtgtttattttttgattttttaagggtatatgtaaaaataggtattattgtaaaaaggagaagaggagatatattatagttattgttgtgtaattgttttttgtatttggagatttttttgtgtttattgagtgtttattatatgttaggtataattagacgtagtttattttttttttatagttgtatagtgtttattgtaatggtggttttattatttatttaattaggatttttgggttttttttagttttttttaaataatgttttagtgaatatttttgtatatatatttttgtgtttgttggtaagtaattttgtagaaagtggaattgttgttgcgttgtgtgttttgagtttggataaattttttatttagagaggtgaaattggtttatgtttttattaagagtttatgggagttgtggggttttttataatattattttttaaatggttagggggaagggagagttttttgaatttaggttagagttggtttattgtaggttgggtaggtttaggtttggatttggagttcggagaatttaggtatttttttggggttttttatagatatcgagataaagtttagattttttagtgtggtatataggtttcggtgatttttgttgttttttgtagttttttttgtttttgttttttgtgttttatattggatttttggtaatttattggatatggttatgtttgtttgttttttgtttatgcgttttttttttttggaatgttttttttttttaattttcgttttttttgttttttaaggtttgggttataagtttttttttttacgaagtttttttataatttttttagtttgaattgttttttttgtgtttttttagttttttatttgaattatatttttttttaggtgggagtaagttgtgggtgggagagggtaaattttagttttattagatagaggttggattttcggaagagttgggaagggggattatagtttttggggaggggtggagaatttatatttatttagttgttggttaggttatttttatatttatagatcgatttaatttttaattattgtatttatttagtagatgagaagaatgagatattgaaaatatgtatagtggaggtgggaatgaaagttagttttttaattttttagtttttttttttgttattgtattaggttgtagggtgaaggggaggtttgggatataaagagaatttagaggtggagtagttggattttgtgtagtgttaggagggaggagaggggttggagtaggtgggaagtaggttttttttagtttggatagtattttttttaatttaatgattttagtgggagggtggagggatggggatgggaagggagtttgggagtgaggaggaaaggtaaattttgtttttttttaggggagttaatgaatagtatttaaaatggaaattaaataaaataattttaggaagtaataagggtttgtttagagatatgacggtaaattttgaattattagttaaaagaggtagatagtagtggttgtttttggggagaggtaaatgtgatggagagggaataattgtgtataaatatgtgattttacgttttgattaaaataagatttttaaaaaataaatattttttaaaaagaaggaaagaaaagtaggaggggttattttaggagttgagcgttttgtttcgtttttatgagttttgtcggtttcgcgtgtttacgggagtcgggttttttgttttgttgcggcgtatgatgtttggtgggggttttgtttaggttttttcggttagatataattcgtagtattattataagttgtgtgtaagttgtttattattttgcgttgtttttttttttgtaaaatgggttggtcgttgtattttttttgaaaaggatgtgttgatgtttcggtgaaaagtttttaaaaatgttagtttatgttatttttttgttggaggtgttaggtgcggagaggcgagggggttcgcgtgcgtcgtaggaggtttagttgggttcgtcgtcgttcgtgtttgcgtttatttagtgtgtatatagttagcgttcgtcgtatgttaggtttggtgttgggttttcgtttcggagttggggtgtaggggttgtcgcgttttgtcgggtcgattcgggtgggaatttagatgtttttaagattcgagatagattttcgtttcgcgttttttttggggggcggttttcggtttgggcgggatgggcgggcggttatttaaggtcggcgattcgaggtcgcggttgtcgattgggttttttgtcgttgtcgttattatggtttcgtatcgtttcgcgttcgcgttgttttgcgcgttgtttttggcgttgtgcgcgttgtcgttgttcgttcgcgcggttattgcgtcgcggggggcgttttaggcgggggcgttttaggggcgggtgttcgaggcgcgggtgagtgttcggggggtttcggggttttcggagtaattttttattgtaagtttttgtagatatagcgttaggaaaaggggagtaatttaggtttagaatggaaaaattgttttgttgttttgtaagtattttttgttgttttcggggttttggttcgtagacgagggtgggagtttcggggttttggttgtttttttttaggaagttaattttattttggtcggatttttttttttttgtttttttttaatattttattttttgttttttgaattttttttttttttttttgatttttttttttttttgttttattttttttttttttttttttgatgtttttttttatttacgattttttgtttttatttgatttttttttttttttaatattttttttttttttgtatgatttcgtttgtttgtttatggttattattattatttttttttttttttttgttgttttttttgttttgtttggtttcgtgtttttttatttttttgtttgagttttttttattttgtttttttgattttttttttttgatttttatttttattagatttttttttcggttagaggtgatttgtatttgttgatttttgttttcgattttagtttaatttttttgtatttttttcggttttagttttagtgtatgtgtaatagtttttttatttttaattattttatttttaatagttttttgtagattttggtgtatttttttttttttttttaagaaatgaaatttgggggtggtgtgttgtggggtacgagggaggaggtagatagcgtaggaggttatttggatttagttatttggattttttttgggggtatgatggggatgggtatagagaggagagggggtttttgtggattataggaggtttaggtgggtttatttcgatttgcgagtgtatttatttagcgtgtatagagttagcgtttgttgtttgttaggtttcgtgttggaaatttttttattttttaaagagtaaaagtaaataggttgtgtgattttcggttagtttttttttttttttgagttttagtttttttgtttgtagattggggttggataatgagtttttagagggttttttggttttaagagttattgaagatgttggaaggaagtaagttgaggttttggggatttttagatttattattgttatttgaggggtttatttattattttagagtttgtgattttggagtttggggtaatttttgttatattgttttttagttggaggtttttggtagagtttttttatttttttgtgtttcggttattatatttaattggtaataagaaaagaagggaggttgggcgcggtggtttacgtttgtaattttaatattttgggaggttaaggtaggtggattatttgaggttaggagttttagattagtttgattaatatggcgaaattttgtttgtattaaaaatataaaattagttaggtatagtatcgtatgtttgtaattttagttatttaggaggttgaggtaggagaatcgtttgaatttaggaggtagaggttatagtgagtcgagattgtattattgtattttagattggataatagtgcgagattttgttttaaaaaaaaaaaaaaaaaaagaaaaaaagaaagaaagaaaagaaaggagtagggaggtagagttttttgtattttttattattagaaaaagttgaagaggggttgagtaggagggatagatgttggttagggtataggttttgaagtataaaatttttgttttgtttgttgattcgttgagatagggtgtttagaaggggatagatttttttggggcgtggggagagtaggaggtttaagtgagatgtttttggtgttagaaatcgtttttttttatgtttggggtttttttttgttaggattttgtttcgtttaggttttgttttgttttattttagt

SEQ ID NO: 104 - DNA, 7118 bp, Artificial Sequence
  chemically treated genomic DNA (Homo sapiens)
gttgggatgagatagggtagagtttaagcggggtagggttttggtagggagagattttaggtatgagggagggcggtttttagtattaagagtattttatttgagttttttgttttttttacgttttagggaagtttatttttttttgggtattttgttttaacgagttagtaaatagggtaagagttttatgttttaaaatttgtgttttggttagtatttgttttttttatttagtttttttttagttttttttggtgatggagggtatagagggttttatttttttgttttttttttttttttttttttttttttttttttttttttttttttttgagatagagtttcgtattgttgtttagtttggagtgtaatggtgtaatttcgatttattgtaatttttgttttttgggtttaagcgatttttttgttttagttttttgagtagttgggattataggtatgcgatattatgtttggttaattttgtatttttagtatagatagggtttcgttatgttggttaggttggtttggaatttttgattttaggtgatttatttgttttggttttttaaagtgttgggattataggcgtgagttatcgcgtttagttttttttttttttttattgttaattggatgtgataatcgaggtatagagagatgaagggattttgttagggatttttagttaggaaatagtgtagtaggggttgttttaggttttaagattataagttttgggatgatgggtagattttttagatggtaatagtaaatttaagggtttttagggttttagtttgtttttttttagtatttttaatggtttttgaaattaaagggttttttgagagtttattatttaattttaatttgtagatagagaaattgaggtttaaagaggggaggggattgatcgaaggttatatagtttgtttgtttttgttttttgggaagtggaaagatttttagtacggggtttggtagatagtaggcgttagttttgtgtacgttaagtgggtgtattcgtaaatcgaggtgagtttatttgagttttttgtgatttataggagtttttttttttttttgtatttatttttattatatttttaagaagggtttaaatggttgagtttaagtggttttttgcgttgtttgttttttttttcgtgttttataatatattatttttaaattttattttttggaagaggagaagaggatgtattagggtttgtaggaggttgttggagatgaagtggttaaaaatggggaggttattatatatgtattggggttggggtcggggagggtgtaggagggttaggttggagtcgaggataaaaattagtaggtgtaggttatttttggtcggagaagagatttggtgggagtaaaaattagaggagagaagttagagaaataaggtggggagaatttaggtagaagggtggaaaaatacgaaattagatagggtagggaagatagtagaaaggagagaagaaatgataataatgattataagtagataggcgaggttatataagaaagaaggaaatattggagaaggagagagattaaatgagaataaggaatcgtaaatggaagaagatattagaagagagaaggagagaagtgaggtagaggggagaaaaaattagagaaggaaaaggagaatttaggagataggaggtaagatgttagaggaggataggggaaaagaaattcggttaaggtgaggttagttttttgggaaggaatagttagggtttcgaggtttttattttcgtttgcgagttagagtttcggaagtagtaagagatatttataaagtaataaaatagtttttttattttagatttgaattatttttttttttttagcgttgtatttgtaagaatttataatagagagttatttcgggagtttcggggtttttcgggtatttattcgcgtttcgggtattcgtttttggggcgttttcgtttgggacgtttttcgcgacgtagtggtcgcgcggacgggtagcgatagcgcgtatagcgttagggatagcgcgtaaagtagcgcgggcgcggggcggtgcggagttatggtggcgatagcggtaggggatttagtcggtagtcgcggtttcgggtcgtcgattttaagtagtcgttcgtttatttcgtttaagtcggggatcgttttttagggagggcgcggggcggggatttgtttcggattttggagatatttgggtttttattcggatcgattcgatagggcgcggtagtttttgtattttagtttcggggcggagatttagtattaggtttgatatacggcgggcgttagttgtgtgtatattaaatgggcgtaggtacgagcggcggcgagtttagttgagttttttgcgacgtacgcgagttttttcgttttttcgtatttaatatttttagtaaaaaaataatatgaattaatatttttgaaagttttttatcgaggtattagtatattttttttagagagggtataacggttaatttattttatagaggggggaatagcgtagagtggtgaataatttgtatatagtttgtaatggtgttgcggattgtatttagtcggaggggtttgggtagaatttttattaggtattatgcgtcgtagtagggtaggggattcggttttcgtgggtacgcgaagtcggtaggatttataggggcggggtagaacgtttagtttttgggatagttttttttatttttttttttttttttttaaaaagtgtttgttttttaaaagttttattttgattaaaacgtaaagttatatgtttgtatatagttgttttttttttattatatttatttttttttaggggtaattattgttatttattttttttagttgatggtttagggtttatcgttatgtttttaagtaagtttttgttattttttgaagttgttttgtttggtttttattttaggtattatttattgatttttttgggggaagatagagtttgttttttttttttatttttaggttttttttttatttttatttttttatttttttattagagttattgggttaagggaagtgttatttaaattgaaggaggtttattttttatttattttaatttttttttttttttttagtattgtatagaatttaattgttttatttttaagttttttttgtattttagattttttttttattttgtagtttgatgtagtgataggaaagaggattggagagttggagagttggtttttatttttatttttattgtgtatgtttttaatgttttattttttttatttattaaatgagtatagtagttgagaattaaatcggtttgtgggtatgaaaatagtttggttagtagttaggtaaatgtgagttttttatttttttttagaaattatggtttttttttttagttttttcggaagtttagtttttatttaatgaggttgaagtttgtttttttttatttataatttgtttttatttaaggggggatatggtttagataaaagattaaaggaatatagagaagataatttaggttggagagattataagaaggtttcgtggagaaagggatttgtgatttaggttttgaaggatagggaggacggagattaagaagaaaagatattttagggggaggggacgtataggtaaagggtaggtaaatataattatatttagtgaattattaggggtttagtatgaaatatagggagtaagagtagaggaggttgtagagggtagtaggggttatcgaggtttgtgtgttatattgaagagtttgaattttgtttcggtgtttgtggggggttttagagggatatttgagtttttcgggttttaagtttaggtttgggtttgtttagtttgtagtgggttagttttggtttaaatttagagagtttttttttttttttagttatttggaggatgatattataaaaaattttatagtttttataggtttttaatggaagtataaattagttttatttttttagataaaaaatttatttaaatttaaaatatataacgtaataatagttttattttttatagaattatttattaataaatataaaaatatatgtgtaaggatgtttattgaagtattgtttgaagaaaattggaaaggatttaaaagttttggttaaataaatgatggagttattattataatagatattatgtagttgtgaaaaaagaatgagttacgtttgattgtgtttggtatatagtaggtatttaataaatatagggagatttttaagtgtagaaagtaattgtataataatggttatagtatattttttttttttttttttataatggtgtttgtttttgtatatatttttaaaaaattagagggtaagtattaaattgttaaggtcgtttgttggaaagggaagaaggaggagaattttatttttaaatattgtcgtggttgtttgaggttggaggaagtgtttagattattgtagttggtatgagggaatttttcggggtgataaaaatattttaatattagattatggtgaagattatataattaattaaatttattaaaatttatagaattataggtatatttagtgtgtgaattattatgatatgtaaattatattttaatatattagtcgaaaaaattgtaaaagtattgtcgtagtatttgaaattttataagtgtatatttaatatagttttgtttttttataaaatataaatttagaaataattttttttaaaatatgtttatagtgatgtttgtttattagataatttggaaaatttaaataagtaggaagaaatttttttagttgtttagtttttagattgaatttgggttagtaattgtttagttgaggggttttttttagagtagtgtgattttgatttgtatagttggtgattaatagaggggttgttgtggtttgattttggttttagaggttattggttattaatttagggattacgttaatgattataaagggtttgtagttttgtttgttatatagttttggagtttaggtttttggtataggagagttggtgaatagattttatttttgttttttgggagtttttattatagattttggagtttttgttatagggtattgatgagtggagattatgatgcgggtaatattgttttattttgtttttagtttggaagaagatgtatgagtttaagggaatgggggaatttaggtataagagaagggatttttaggtggaaaggaagaggttcgagtgttagggttggttttgatattgattttttggtgattttgggtaagttattgtatttttttgggttttagtgtttttatatgtaaaatatagggtagggtttgatgttttgatttgaagttttttttttagtttaagtagtattagatattggttgtataattaaatttaggatttataagtttttgagttttagggttttatttgtaaaatgggtatattcggttaggttatttttgtaggtcgttttggattagatagtttatagtttttgatttgaggaaggaggtattgtagttattgatagtagtatgttattttatttttgggtttagtttgggaaattgagatttagggaggtttaagttatttaattggaaagaggtgttgttaagatttaaatataagtttgattggttttagagtttaggttttgtttgcggagattaagtaggagtttttagtattatttgatttgggtagggagtagtagtgttttttttaggtaataggttaaattaattaagtttaagttaagtttggtagttaggagttttcggagtagttgtttttacgatattttttaggttagggtaggaggtgatatcgggaaagttttttagttttttatatatttgatgtgattgtttaggttaaaggtttggaagatttttaggttgtggttatttagtgtaggattggttgtggtatttgttttttgagttatatggtatttaggtttggtatggtttttttgatttggaggtagtttttttgttattaatttagtatatgagtatgttttggtttttgtttttgtgtatttcggagatttttttgatttttgatttcggttatttttggattttgtttagttttaggtatatagtaggtagattttttgtgtttgttataggatgggggttgtatagtttatgtttttttgggggattttttttttttttgtagttgatttaggatttttataatataattagttttgggttttttttttttttgtaattttggtttttgtatgtttgcgggattttttattagagattagaggaggtggtttttttcgttttttttatttttagttatagtgtataaaaaggttttggttgggtttggaagatattattttgtttttttttttttattttaaatattgttgtttttgattttttaggtagttagttatttatggaaagtttttttttggagtttatttattttttggtttattgttgttttttgggtttttttaggagtattcgtttttttgattagggattttgttaattgggataatggttagtaaatagagaagttagttatgaaatttagtggaattgaatagggtttggaaaagtttcggtaagttttgtggataggtttgcgaatttggatttagtttttgtaatttagattttagtttttttatttttaaaagggggagaatggtatttagagtatggagtagtgaggaagtttaggatgtgacgtataggagttcgttaaaagtaagtatttttttttttgagtagtttgttttttgtatagacgtttgttttcggtatgtgatggtgcgggagaaacgttatagattttacggtgagacgttagagtttaggtttgggttgtgtaaggtagagtaagttattttttttttttgagttttaggttatttatttgtaaatagggatagtgatgtttagttgtaggatttttgggggaatagaagtgagattgttggagtatgttgtttagagtaggatttattagtagtagtgtttattagtttgttttttttt

SEQ ID NO: 105 - DNA, 5649 bp, Artificial Sequence
  chemically treated genomic DNA (Homo sapiens)
cggtggtttatatttgtaattttagtattttgggaggttgaggtaggcggattataaggttaggagatcgagattattttggttaatatagtgaaatttcgtttttattaaaaatataaaaaattagtcgggtgtggtggcgggcgtttgtagttttagttattttggaggttgaggaaggagaatggcgtgaattcgggaggtggagtttgtagtgagttaagatcgtgttattgtattttagtttgggcgatagagttagattttattttaaaaaaaaaaaaagaaaaaagaaaatattttaagttttgaggattatatagtttttgttgtaattatttatttgggttattgtagtataaaaataaatatagataatatatatatgagtgagtatggttggggtttaataaaattttatttatataagtaggtgatgaattacggtttatagtgttttaatttttgatttagatggtgaattattatgagttttcgttgtttttttcggtagaaatatgggagaaattatagagagaaatagagattttaggaaaatagtaaaattaaataaataaagtgagacgtcgttttttttggaggttgtaggttgtgttgaatttgtgtgtgtttgggtgtatagggatgtgagtagatgcgcgtggagatgtgtgtgtgggtggagattgagcgtggttggaggtggttgtggtaggatgttagaaggaaggagtttgtatttagtttttttattagtattttttggagttgttgaggggatgttattgttgaatattgattttggtgtaggttaaatcgaagttagtttttgttattttttgttgggtgaggtattggggagaatagtgggattgaatggggcgggtttttttttttttatattttttttggaaatatttagtattagtatattagaatatggggagttattttttttagcgttgttttttaaggttcggaaggggaaattttgattttaagttttgtttgaagagcgatagtaaaggggagaggttggttgtggtttggtggtgtttattttttttttttgttttgaaattataggttggtatattattcgagagaatgattagtgttattaagggaagggtataagtttattggttttaggggagatattttaggggataggaatattttttgacgttgaatgagtgtagtatatagacggagaatatatataagagaaattatgaggatatgagagaaggtattggtaataggaagttataaaaagtaataaaaagaaagagtagatataaaaataataatcgaagaaagttaataatagatgggatgaattatacgaggtatgcgatttatggatgaagaggtgagtgatgagattagttggggaatttttttttaggaaagataaattagaagaaatataaatgatatcgaagtggttaggcgtagtggtttacgtttgtaattttagtattttgggagttcgaggtaggtggattatttgaggttaggagtttgagattagtttggttaatatgatgaaattttgtttttattaaaaatataaaaattagttaggtgtggtggtaggtatttgtgattttagttatttaggaggttgaggtaggagaattatttgaattaggaagtagagattgtagtgagttgagatggtgttagtgtattttagtttgggtagtagagtgatagtttgtttaaaaaaaaaaaaaggtagtaaagtgataggaggatagattagaagggttattttttagatagtgtaaggaagaaagaagaagaagaagaggaggaggaggaggaagaggaagaagacggagaagagggtattttagaagaaataatggagatatattttttaaaattgaagaaagatgattaattttagatcgaaggttaagaggtaaattagagagatagtttggtaagttaggaagagtattaaagttagataattagagtgaaattaaagaaaatttaaggtgataaaaatttaaaaagtttttttgtgattttagtttattggtgaaaatttaaaaaaaaaaaaaaaaaaaaaaggatagtttgggtaatatggtgaaattttatttttataaaaaatataaaaattagttgggtgtggtggtatatgtttgtagttttagttattcgagaggttaagtaaggtaggaggattatttggggttaagagttttagattagttgcggtaatatatatgttgtgggaagttaggtatttcgaacggagggattggttgaagttatggtagaagaatataaattgtgaagattttatggatatttattatttttttaattaatatttttgtgattttttatgtttgtttttaattttttaattttgttattttcgtaaattgaggatgtatgtcgttttaggattttgtgatgattgcgttaattgtataaattgtttgtagaggataattgttgtgtgtttgagtaatgtgaaatttgggtattttaagaataggataatagtaatttttagggaataagggagataattttaaagtttggttgtttgtgggttgggtaggatagagttatattttttttattatcgtaaataggtaagagaaatatcgttgaattttttttttagtaaggaatattaataattaatagttttgagaaaagaatgtatttttagggtcgggttattgaaatggtttttttgagagtgtttgtttttatttagaagtagaaagggatgaaatacgttttagttttttgtagtatttttagatttgataggattaggaaattttagtttggtaaattttagttagatcggttttttgtttttgaattttgatagtgcgtgttagtgggatttggaagtttattagtgattttagtttcgtcgtgattttttgttttgtgattttttgtcgtttttgaagtatgtgatttttgtgatttatattttgttcgtgtatttttttttttttgaaaattgttaataaaaattcgttggttttacggtttagggggtattacggaatttgcggatatgtgatgttttttttggatattcggttttaaaatgttttttttttgtattttttttttttattttttaggttagtcgatatttagggaaaataggaaaggatttacgtgaaatattgggggttgaatttttttcgataataagttttttaaaaaagatttttaaatgaaatttttttgttttttaatttttatttttgttttgggggtatatgtgaaggtttgttatataagtaaattcgtgttttcggtgtttgttgtatagaatattttattatttaggtattatgtcgagtatttaatagtttttttttttgtttttttttttttttttattttgtattttggagttaattatagtgtttgttgtttttttgtttgtgttataagtttttattatttagtttttatttataagtgagaatatttagtatttggatttttgtttttgtattagtttgttaaggataatagtttttagttttatttatgttttataaaagatatgatttagttttttttaatggttgtattaaatgaagttttaaagatataatataaatattaattttttttttattataaaaattttttgttgaatttgattatatttaaattaacgagttttgttttatgaaagattttttggataaatttgatagttgatggaataggagaagttgtttgttatgtttaaagttaataagagattaatatttagaataaatggagatttgtaaattaatagaaagtaggtagtaaagttaaagaaaatagtttaaggtatagttattaaaaggaacgtgattatgttttttgtagggatatgggtggagttggaagtcgttagttttagtaaatttatataggaatagaaaattagcgagatcgtatggttttatttataagtgggagttgaataatgagaatatatggttatatggcggcgattaatatatattggtgtttgttgagcggggtgttggggagggagagtattaggaagaatagttaagggatattgggtttaatatttgggtgatgggatgatttgtatagtaaattattatggcgtatatatttatgtaataaatttgtatattttttatatgtattttagaattttaaataaaagttggacggttaggcgtggtggtttacgtttgtaattttagtatttttgggaagtcgaggcgtgtagattatttaaggttaggagttcgagattagttcggttaatatggtgaaatttcgtttttattaaaaatataaaaattagttagatgtggtacgttatttataattttatttattcgggaggttgaagtagaattgtttgaattcgagagcggaggttgtagtgagtcgtcgagatcgcgttattgtattttagtttgggttatagcgtgagattacgttataaaataaaataaaataatataaaataaaataaaataaaataaaataaaataaaataaaataaaataaaataaaaaaataaaataaaataaaataaaataaaataaagtaatttttttttttttaagcggtttttattttttttttttgttttgtgaagcgggtgtgtaagtttcgggatcgtagcggttttagggaattttttttcgcgatgtttcggcgcgttagttcgttgcgtatatttcgttgcggttttttttttgttgtttgtttattttttaggtttcgttgggatttgggaaagagggaaaggttttttcggttagttgcgcggcgatttcggggattttagggcgtttttttgcggtcgacgttcggggtgtagcggtcgtcggggttggggtcggcgggagttcgcgggattttttagaagagcggtcggcgtcgtgatttagtattggggcggagcggggcgggattatttttataaggttcggaggtcgcgaggtttcgttggagtttcgtcgtcgtagttttcgttattagtgagtacgcgcggttcgcgttttcggggatggggtttagagtttttagtatggggttaattcgtagtattaggttcgggttttcggtaggtttttcgtttatttcgagattcgggacgggggtttaggggatttaggacgtttttagtgtcgttagcggtttttagggggttcggagcgtttcggggagggatgggatttcgggggcggggagggggggtagattgcgtttatcgcgttttggtattttttttcgggttttagtaaatttttttttgttcgttgtagtgtcgttttatatcgtggtttattttttagttcgaggtaggagtatgtgtttggtagggaagggaggtaggggttggggttgtagtttatagtttttcgtttattcggagagattcgaatttttttattttttcgtcgtgtggtttttatttcgggttttttttttgtttttcgtttttttcgttatgtttgtttttcgttttagtgttgtgtgaaattttcggaggaatttgtttttttgttttttttttgtatttttgattttttttcgggttgttgcgaggcggagtcggttcggtttttatatttcgtattttttttttttcgtagt

SEQ ID NO: 106 - DNA, 5649 bp, Artificial Sequence
  chemically treated genomic DNA (Homo sapiens)
gttgcggggagggagaagtacgagatgtggggatcgggtcgatttcgtttcgtagtaattcggggaggggttaggagtgtagggagggaatagggaaataggttttttcgaagattttatataatattggggcggggagtaggtatggcgggagaggcggggaataggaaggaggttcggggtaaaagttatacgacggagggataagggggttcggattttttcgggtgggcgaggggttgtgggttgtagttttagtttttgttttttttttttgttagatatatgtttttatttcgaattgggaaatagattacggtgtagggcggtattgtagcgaataaagaaaagtttgttggagttcgggggaggatgttaaggcgcggtgagcgtagtttgtttttttttttcgttttcggggttttattttttttcgaggcgtttcgggttttttgaaagtcgttaacggtattggggacgttttgggttttttaggttttcgtttcgggtttcgaggtgggcgaggagtttgtcgggagttcgggtttgatgttgcgggttggttttatgttgggagttttgagttttattttcggggacgcgggtcgcgcgtatttattggtggcgaagattgcggcggcgaaattttagcgaagtttcgcggttttcgagttttataagggtggtttcgtttcgtttcgttttagtgttgagttacggcgtcggtcgtttttttggagggtttcgcggattttcgtcggttttagtttcggcggtcgttgtatttcgggcgtcggtcgtagaggggcgttttggagttttcggagtcgtcgcgtagttggtcggggaagttttttttttttttttaggttttagcggggtttagggagtaaatagatagtaggaagaggatcgtagcgaagtgtgcgtagcgaattggcgcgtcgggatatcgcggggggaaattttttaagatcgttgcgatttcggagtttgtatattcgttttatagggtaggggagaggggtggaggtcgtttagaggaaaggaaattgttttattttattttattttattttattttatttttttattttattttattttattttattttattttattttattttattttattttgtgttattttattttattttatgacgtagttttacgttgtggtttaggttggagtgtagtggcgcgatttcggcggtttattgtaattttcgttttcgggtttaagtaattttgttttagtttttcgagtaggtggaattataggtggcgtgttatatttggttgatttttgtatttttagtagagacggggttttattatgttggtcgggttggtttcgaatttttgattttaggtgatttgtacgtttcggttttttaagagtgttgggattataggcgtgagttattacgtttggtcgtttaatttttatttgaagttttggggtatatgtagaggatgtgtaggtttgttatataggtgtgtgcgttatgatggtttgttgtatagattattttattatttaggtattaagtttagtattttttagttattttttttggtattttttttttttagtatttcgtttaataggtattagtgtgtgttgatcgtcgttatgtgattatgtgtttttattgtttagtttttatttataagtgagattatgcggtttcgttggttttttgtttttgtgtgagtttgttgaggttaacggtttttagttttatttatgtttttgtaaaggatatgattacgttttttttagtggttgtgttttaggttattttttttggttttgttgtttattttttgttgatttgtagatttttatttattttagatattgattttttgttggttttagatatgatagatagttttttttattttattaattgttaagtttgtttaaggagttttttatgaaataaaattcgttaatttaagtgtaattaaatttagtaagggatttttgtggtggggaagaggttggtgtttatgttgtatttttaaaattttatttaatgtagttattaaaaagaattagattatgttttttgtgggatatggatggagttagaggttattatttttagtaaattaatgtaggaatagaaatttaaatattggatgtttttatttgtaagtgggagttaaatgatgagaatttataatataaataaggaaataatagatattgtggttgattttagggtgtaggatgggaggaaggagaggagtagaaaagagaattattgggtattcggtataatatttgggtgatgaaatattttgtataataaatatcgaagatacgagtttatttatgtaataaatttttatatgtatttttaaaatagaaataaaagttaaaaaataaagaaattttatttaaaagttttttttaagagatttattatcgggggaaatttagtttttaatattttacgtgggtttttttttattttttttaagtgtcggttggtttgagaaataaagggaaagagtataaaagagagatattttaaagtcgggtgtttaggggagatattatatgttcgtaggtttcgtgatgttttttgagtcgtaaaattagcgagtttttattagtaatttttaaagaggagggagtgtacgaatagggtgtgggttatagagattatatattttaagggcgataaaagattatagggtagaaggttacggcgaaattagaattattaatgaatttttaggttttattggtacgtattgttagggtttaagagtagagaatcggtttgattagaatttgttaggttggaattttttaattttattaagtttgggggtgttgtaggagattagggcgtgttttatttttttttatttttgaataaaggtaggtatttttagggaggttattttagtggttcggttttgggaatgtattttttttttagggttgttaattattaatattttttattggggaaagaatttagcgatattttttttatttgtttgcggtaataagagaagtatggttttgttttgtttagtttataggtagttagattttaaggttattttttttgttttttgaaaattgttgttattttgtttttaagatgtttagattttatattgtttaaatatataataattgttttttataaataatttgtgtagttaacgtagttattatagggttttaaggcgatatatatttttagtttacgaagatgataggattaagagattaaagataggtataggaaattataagagtattgattggggaagtgataaatgtttatgaaatttttataatttatgtttttttgttatggttttagttagttttttcgttcggggtgtttgattttttataatatgtatgttgtcgtagttggtttggaatttttggttttaagtgatttttttgttttatttagtttttcgaatagttgggattataggtatgtgttattatatttagttaatttttgtattttttgtagagatggggttttattatgttgtttaggttgtttttttttttttttttttttttttaaatttttattaatggattgaggttataaggaagttttttaaatttttgttattttgggttttttttaattttattttaattgtttagttttggtgttttttttggtttgttaagttgtttttttggtttgttttttggttttcggtttgaggttggttatttttttttagttttgagaaatgtatttttattgttttttttgagatgttttttttttcgtttttttttttttttttttttttttttttttttttttttttttttttttttgtattatttggaaaatggtttttttaatttatttttttattattttattgtttttttttttttttagataggttgttattttattgtttaggttggagtgtattggtattattttagtttattgtaatttttgttttttggtttaagtgatttttttgttttagttttttgagtagttgggattataggtgtttgttattatatttggttaatttttgtatttttagtagagatagggttttattatgttggttaggttggttttaaatttttgattttaagtgatttatttgtttcgggtttttaaagtgttgggattataggcgtgagttattgcgtttggttatttcgatgttatttgtgttttttttggtttgttttttttgggagagagttttttagttgattttattatttatttttttatttatgagtcgtatatttcgtatgatttattttatttgttgttggtttttttcgattattgtttttatatttattttttttttttgttgttttttgtaattttttattgttagtgtttttttttatgtttttatgattttttttgtgtgtatttttcgtttgtgtgttgtatttatttagcgttaggggatgtttttgttttttgagatgttttttttggaattagtgagtttgtgttttttttttggtggtattggttattttttcgggtagtatgttagtttgtggttttaaagtaaaggaaggagataagtattattaaattatagttaattttttttttttgttatcgttttttaaatagagtttgaggttagagttttttttttcgaattttgggaagtagcgttggggaaggtggttttttatgttttaatgtgttggtgttgggtgtttttaggggaagtgtgggagggagaaagttcgttttatttagttttattgttttttttagtgttttatttagtagagggtagtagaggttaatttcggtttagtttgtattagggttagtgtttagtagtgatatttttttaataattttagagagtattaataaaggaattgaatgtaaattttttttttttggtattttattatagttatttttagttacgtttagtttttatttatatatatatttttacgcgtatttatttatatttttgtatatttagatatatataggtttaatatagtttgtagtttttaggaggggcgacgttttattttatttgtttaattttattgtttttttgaaatttttgtttttttttgtggttttttttatatttttatcggagagggtaacgaaagtttatgatagtttattatttaaattaaggattgggatattatggatcgtggtttattatttgtttgtgtaaataaagttttattgggttttagttatgtttatttatgtgtgtgttatttatgtttgtttttgtgttatagtggtttaaatgagtgattgtaatagagattatgtggtttttaaagtttaagatatttttttttttttttttttttttttgagatggagtttggttttgtcgtttaggttggagtgtagtggtacgattttggtttattgtaagttttatttttcgggtttacgttattttttttttttagtttttagagtagttgggattataggcgttcgttattatattcggttaattttttgtatttttagtagagacggggttttattgtgttagttaggatggtttcgattttttgattttgtgattcgtttgttttagttttttaaagtgttgggattataggtgtgagttatcg

SEQ ID NO: 107 - DNA, 12781 bp, Artificial Sequence
  chemically treated genomic DNA (Homo sapiens)
tattatgttgttagttggttttgaatttttggttttaagttatttttttgttttggttttttaaagtgttgggattgtaagtgtgagttattgtttttggttagttggtgatttatttgtataattgtttaatttattgaatacgtatggcgtgttaagtattgggttgagggttttataatgtttttttatttaatgtttagtataatttatgaagaaggtagtgttaatattatttttgttttatagatgtagaaattgaggtataggttaaataatttgtttaataagttcgtgtagtttagtaagtagtttagttgggatgtgaatataaattttgaatatagagtttttaattagtaggttagaggtttttaaatatttagtatatttattattttagtatttttttgttatattttttaggttaaaataattttattgattgttatgtaatttattaagtgtagttatttgaaaaaaaaatatatataaaagaaaaatatttttatttagtttttaaaataatttatatatagttatggaatgtatgtgttggttgggtattgtagattaaagatagtttagggtcgggtacggtggtttaggtttgtaattttagtattttgggaggttaagtagagagaagggtttgagtttaagagttggagatcggtttgggtaatatagtaagatttagtttttatagaaaataaaattattagggtgtgaggacgtatatttgtagttttagttgtttgggaggttgaggttggaggattagtttgggtaatagagtgagattttgttttagaaaaaaaaaaaaaaaaagatagatttttatttagatatgtatgtaggagtttatagaaaaaaaaagtgagtttaggaggttgttatttggtatttatataatttttttttttttgaatttcgaaatttattttatatatattatttaataggggaagaggagggagaaaaagttttttatgggaagaataaataggtttttgggggaataaaagggagataagaatgtttgtttttgtaggtgtaagtggtttttgtttttttttttggttattaaaatttttttagagaggagatttacggtagttttatttttagaaatttttgttgttagtcgtataagggaagttttgaaacggtatttttttgtatttgttggtttttaaatgtttttagttttaagtaatatttatgttaattttgggggtttgagtgtttttatataatatatgtgtttttttgttttttaatgaagtttgtgggaggtatttaattgtagtttttaaaatttggtttataggtattattgtttttattaaagacgaggaaataagtttagaaaagtattaattgtttcgagttatttgtttggttagttaggattagagtttagttttttatttaatttaaagtttaggtttttaattttttataattggcgtattttttttgaatttttattttttttttgtaaaagaataatatcggtcgggcgtagtggtttatatttataattttagtattttgggaggtagagatgggcggattacgaggttaggagtttgagattagtttggttaatatggtgaaattttatttttattaaaaatataaaatttagttgggtgtgttggtgtttgtaattttagttatttaggagattgaggtaggagaattgttttaatttgggaggcggaggttgtggtgagttaagatcgtgttattgtattttagtttcggtgatagagtaagattttatttttaaaaaaataaataataataataaaaagagaataacgttatatttagttgaattaaaatgaattaaatattaatatttgtattttaaaaacggtttagtttggttgggcgtagtggttttcgtttgtaattttaatattttgggaggtcgaggtaggaggattatttgaggttaggagtttgagattagtttggttaatatggtgaaattttgtttttattaaaaatataaaaattagttgggtagtagtagcgcgtgtcggtaattttagttatttaggaggttgaggaaggagaattgtttgagtttgggaggtgaaagttgtggtgagttgagattgtattattgtatattagtttgggagatagagtaagattttgttttaaaataaaataattaaaaaattaaaaaggtttagtttgggtaatatagtgaaatttcgtttttatagaaaatttttaaaatattagtagggtatcgggtatagtggtttatatttgtaattttagtattttgggaggttgaggtaggcgggttatttgtggttaggagtttgggattaggtaggttaatatggtgaaatcgtgtttttattaaaaaataaaaattagttgggtatggtggtaggtattagtaattttagtatttaggaggttgaggtatgagaattgtttgaattcgtaaagtaggggttgtagtgaattaagatggcgttattgtattttagtttgggtgatagaataagattttttaattaaaaaaaaaaaaaattagttgggtatggtgttgcgggtttgtggttttaggtatttaggaggttgaggtgagaggattatttaagtttgggaggttgaggttatagtaagttaagattacgttattatattttagtttttgtgatagagttagattttgttttaaaaaaattttaaaaagggtaaattttggtaattttatatagtttaatttagtataaggtggttgtaataattaaatgagataaaatggtgttaaattggaagtattatagtatttttgttaataatatagggttttagaattagtttttttgagtttaaatttaggttttattattttttagttatgtagttatgggtaagttatttgatttaattgtgttttagttttatttatgatatggagatataggataattagttttttacgtgtaattttgaaatttaaaaagttttgtaaattaaaagtttgggggtaaatttatttggtagtaaattttgatttgaggttatttatagtttatattttgtattttttttatttagtatgaataagtatgtaagttttattgtatgtttgattttagtatgtttttttagattttttgggggtgtttacgtatgtcggtgggggaaagagattaatttttaaatattattttaaatagttggttttattgtgtttgtttgggtagtatatatattaaaattggaatgatttttgtatagggatgaaatgtaaattcgtgaagtatattgtattttttttagtatatattatttttggtaatattttttttttttttttgagagggagttttgttttgtcgtttaggttggagtgtagaggcgcgatttcggtttattgtaagtttcgtttttcgggtttatattatttttttattttagtttttttagtagttgggattataggcgtgtgttattacgttaggttaattttttgtatttttagtagaggcggggttttattgtgttagttaggatggtttcgattttttgatttcgtgattcgtttattttcgtttttttttcgaagtgtcgagtgttgggattataggcgtgagttattgcgttcggttttcgttttttttttttagattgattttattatttgtttagtaaaggagaattttttggtagaatagtttttaagaataaggtaaataattaattttatataggtttttattaatgtatagttgttgattgtgattggttttcggtaatttggattttataatttggataaggggataaataattgtttgttttttattattttttttgaatttgaatagaatttttttatttttatagttttttagtttttttttttttttttttgagacggagtttcgtttttgtcgtttaggttggagtgtagtggcgcgattttggtttattgtaaacgttgttttttaggtttaagttatttttttgttttagttttttaagtagttgggattataggcgtatgttattacgttcggttaatttttggatttttagtagagacgggggttttattatgttgattaggttggtttttaacgtttgattttaggtgattcgttcgtttcggtattttaaagtgttgggattataggcgtgagttattgcgttcggttttttatagttttttagttttttaaaatttgaaaaattttgtaaagatatatttgggttaaagggtttagataacggattgtggtttttaagtatttacgttataggttattgagaggatcgatttagttattagatgtaaaatgttgggattagtgtttggtaaaggaaaattttgtatagttgtaggtttttattatatataatagtatcgttaacgaatgttattataatatttatttagcgtttattaagtgtttattttatataaattttgagaatataacgtgaaggtgaattgttgattaaagtttggtttttttcgtttcgtttttttgcgaaaatgttttaacggtaggaggttacgcgagcgttggacgcgttttttttcgcgagttttttttcgaggtttttcgggttttttcggttattttcgttcgggcggtgcgcgttttcgttgttttcgttttcgttttagagaggtagggtttttcgagtttgttagtttcgcggtcgtaattaatttcgggtcggagtgtttcggttcggttagtttcgcggcgtgagggaaggggagtttagtagtttttcgcgcggggtttaggcgtcggcggtagggcgggttttttatcgttagcgtgttagtttcgtttttatttattagtgtgttagtttcgtttttttttacgtcgtcgcgcgttcgggggcggggtttggcgcgtatcgttcgcgtacggcgaggcgtttgttgattggttattggggttcgggttttttcggcggagcgcgtttttttttagatttttcgttagtaggagtcgcgcggtagatgcggtgtttttaggagtttcgttcgatagaacggttgggttttgtcggttgtcggtatgtcgcgatagagtattttgtatagttttttttttaagttttcggcgttgagtgatgttaataaggtttcggttagggttttacgcgaaggcggtcgtgtcgtcgttgttttcggggtttttttttttttaggcggggatgcggtttggagcgaggttgggtttgggtttaggtttttggcgcgtttcgcgttatcgtttaaggcgaagaattttaacggagggttgcggagatcggtagcgtttgttgtttttattaggtagcggggtgggggtggggtcgaaggcgggggtatagcggcggggcgtttggaattcggcgaggggaggttcgtatagggggttgggggggtgtacggtttggttttgggttcggaggaggcggggtcgtagagttggtttgaatgagtgtaggggtcgagtttggagtatttgggggtgtagtttgtaaatagggtcggaggagagaggttgtgtaggaagagggttgtaggggagacgcggagagttcgggttttttggagggaggagacgcgtttcgttaggtgggggtgttgggttaaggaaggggcgacgcgcgtagtttcgggtggggagggggtttgggaggtgggagtattgggggtggggcgagaaggggaaggcgttcggtttatttggtgggcggggcggggggcggggtggcgggaaggaggaatgtttgcgggaggtcgaacggggagagttcggtggtgtggggtgcgaaaggaggtttttcggtcggcgcggagatagtgagttggggttttagtagtcgatcgaggtagatatttagaggtagttaagagtcgcggtcgtcgagacgttttggggacggtgggttttcggtttaggtgaggggtcgtcgagggggtgggttacgagttgcgagcgcgggggggtgtgttattatggggatcgcggggtttaattgggcggggcggggtcgtggggagtcgaagtgttgggattcggttgggtttttcggtaggtaggttgtacgtgtatcgagacgaagatagaatattttgacgtatgtggaaattcgtgtcgagtggaaaatattttattttatgaaatagtgtaatttttatggggtattattgggtttttagaggttttaatcgggcgttggataaagatgtgtggacgtgagtgatttcggggaagtttgtcgggagttgtttttattttatgggtagttaagtgttttttttttttttttttttttgagagagagtttcgtttaagtttaggttggagtgtaatggcgcgattttagtttatcgtaattttcgcgtttcggttttaagcgattttttagttttagtttttcgagtagtcgggattataggaatgcgtttttatatttcgttaattttgtatttttagtagagacggggtttttttatgttggttaggttagtttcggaattttcgattttaggtgatttattcgtttcggttttaaagtgttgggattataggcgttagttatcgcgttcggtttgtttagggttttttattcgggtagttggcgatattttgaaaagtttgtttttgttgtttgttagatatatatatatgtattttgagatagagttttgtttttttgtttaggttagagtgtagtggcgcgtttttggtttattataatttttgtttttggattaagagattattttgttttagttttttaagtagttgggattataggtgcgttttattacgtttggttaatttttgtatttttagtagagacgggttttattatgttggttaggttggtatcgaatttttgattttttgatcggttcgtattggtttattaaagtgttgggattataggtatgaattatcgagttcggtcgtttgttagatattaaatataaagtttaatggtcgttatttgaataaacgaagaaataaaggtttagaaaaaataatttatttaagataagagttagttcgtgttttttgtttggttttgttttgaaatggagtttcgttttgtcgtttaggttggagtgttgtggcgttttttcggtttattgtaatttttgttcgtcgggtttaagtgatttttttgttttagtttttcgagtagttgggattacgggtgtgtttatcgcggttcggttgattttttattatggagttttattatgttggttaggttggttttgaaattgttgattttaagtggtttatttattttagttttttaaagtgttgggattataggtgtgagttatcgtgttcggtcgttagttagtggttttgagtaatggattttaaatttatttaaatttagtttaaagtgttttaaaggaattttgagatttttttaagtgtaattatagtgttatttttgtttaagcgattttttttcgtagtttaaatatatatagttgtgtattagtagaatatgtttgtggggaatagagttagtattcgtaataataaatttttggttagaaaagtatgacgtattgtttatttgagtatgaattgattgttgaatttaaattaaacgggtgtatttattgtaaggatgtattttatatttatattgaatagcgtatgttatttgttttttgaggttgagtttaagagatttgtaaaaataaaacgtatatattttatttttcgttatggagaggattttagggtatttaagaaagatgggtatttgatattaggtttttaaagaaattgtagtgtttagattattttgtcgagtatagtattaggtattatggattttggatataattatgaataggataaagtaaagaggtaattgtagattttaagtggaaaggggacggagaggatgcgggttaggttaggtttttagttttgtaaatcgaaattagaaggataaataagtttagatagattatagtgagagtgggaagttggtttaggaagaggaaggtttgtaaattgtgggtaggatgaaaggaggaggagggagtattggagaagttaagtagagatttaattatgaatagtttgatgagttatagagatattcggatttattttatgaattatttaagttttaaaatatgttgagcgtattttttttttttttgagacggaattttatttttgttgtttaagttggagtgtagtggtgtggttttagtttattgtaattttcgttttttgggttttagcgatttttttgttttatttttttaagtatttggtattataggtgtttgttattacgtttagttaatttttgtgtttatagtagagacgggttttattatgttggttaggttagtcgtgaatttttgattttaggtgatttatttattttagttttttaaagtgttgggattataggcgtgaattatcgtatttggtcgtgagttatcgtgtttgttcgagtattttttaatgtttgttatttagatttttttttgtgttgaagtgtttgttttttgttgtttttttttttttttttagttttttgttatttgtgtgtgatataaatgtttttttttataatgagtttttttatttagtttatggttttgttgttgttgttgaataatagaggttttattttgttgtttaggttggtgttgaatttttgtttttaagcgatttttttattttagttttttaatttgttgggattataagtgtgagttattatatttagttttatggtatttttcgatgaataaattattgattataatgtggaatttgtttttttattttttttgtggttagtgtttttataggttttatttaagaaatttatagggaggttgggtgtagtggtttatgtttgtaaatttaatattttgggaggttaaggtaggttaatatggttagattttgtttttttaaaaaataagaaaattagttaggtatggtggcgtgtgtttgtagttttagttttttgggagattgagatgggaggatcgtttgagtttaggaggttgaggttgtagtaagttaagagattatgttatgtattttagtttgggtggtagagttagattttgtttgttaaaaaataaaataaaagttggtgaaaatgttgattatatattttaggaataattagtaattgatattaaaattatgggttaaagagaaagtaaaaataatgtgattttaaattagaatttaaaagatttgtttagcgtatgtttagataaagttattatttattatattaaagttttaatatttattttgtgagttgttagtttttttttttaatatttttttttatcgttttaaaaaattttaagaatatcggatatttaagatttatttaaagttttaaaagtatttgtaaaattttaaaattataatttaaggtgtttttggagggtaggagtaatggtggtaggtagtgttttgttttgttgtttaggttgaagtatagtggtagatttcggtttattgtattttcgatttattcggtttaagtgatttttttattttagttttttgagtagttgggattttaagtgtatattattttatgtttggttaatttttaaatttttttgtagaaataaggttttattgtgtagtttagatggtttcgaatttttgggtttttaagagatttttttaaagtgttgggattataggtgtgagttattatatttggtttattttggtatttttgaaaatcgtaggattattacggataaaattttaaaattatttttaaagaatttaggtttatatataaaaaaaatttggtttgttagtagtgagtgaagaaaaattttgagaaatgtttaaaatttttagttttgttatataatatattttattatttgtttaattattttttttgatttagaaattagttttttgggtttaggatgtttagtggtattttttttttttaagttttttagtattggaggaattgtatattagtaaaatttttagttttagtattttatagtttattgttatttttttttttttatttttttttttttttttttttttttttttttttttttgagatggagtttcgttttgttatttaggttggagtgtagtggtacgatttcggtttattgtaatttttgttttttaggtttaaatgatttttttgttttagtttttcgagtagttgggattatagatgttcgttattatgtttagttaatttttatttttttagtagagatggggttttattatgttggttaggttagtttcgaatttttgatttcgtgattaattcgttttggttttttaaagtgttgggattataggcgtgagttatcgtgtttagtttttttttttttttttttttttttttttttttttttgagacggagttttgttttgttatttaggttggagtgtagtggtatgatttgggtttattgtaatttttatttttcgggtttaagggagttttttgttttagtttttcgagtagttgggattataggcgtttgttattatgtttagttaatttttgtatttttttagtagagatggggtttcgttatgttggttaggttggttttgaatttttgattttaggtgatttgtttgtttcgtttttttaaaatgttgggattataggagtgagttattgcgttcggtttagtatattgttatttttttttttttttttttttttttttttttttttttgtttttttttttttttttttttttttgtgagacggagtttgtcgtttaggttggaatgtagtggcgtttttttggtttattgtaatttttgttgttcgggtttaagtgatttttttgttttaggtttttaagtagttgggattataggtttttgttattgtatttggttaatttttgtatttttggtagagacggggttttattattttggttaggttggttttgaatttttgatttcgtgatttatttgttttggttttttaaagtgttgggattatagatttgagttatcgtattcggtttatattgttattttttaatagtagagaaattatgtgttagattttgtaagtgtaatggtatataaaggataaaatgatgttgaaaaataaaattttttgtttaaatgtttatgtttttaatattttattttagaaaggaatttattttaaaattgataatggttggatttagttttttatataaattttttttttttagtgaggatgtatatttattttgtaaataaatggaagatattatttttttaattgtttgtttagaaatgaaataatttttttttaatgattttttaaagtatgagattttatatattatttaaaataatttatattgtattttatatatgataaagttttaaggtaatagtttttttttaagattaaagttatagttttttttttgtatttgagggggattggttgtaggatttttttgtgaatatttaaatttttggatgtttaagttttttatgagatgtagtatttgtatataatttatatatatttttttttgtattttatttttagattacgtataatatttaatagaatgtaaatgttttgaaattagttgtttagttgtattttaaattttgtatttttttttttttttttttgagatagagttttgttttgttgtttaggttggagtatagtatagtgattatagtttattgtatttttaattttttaggtttaagttgttttgtttcggtttttttaagtgttgggattataggtgtgagttattatatttggttattgttttttattggttttaaatttttgatttaaaatttttaatttaggttggttgaatttggattggaatttaaggatatgtttgttgagtatattgtatttattttggaatataattagaatgtttaatttgtatgttaaaaatattttatttggttaggcgcggtggtttacgtttgtaattttagtattttgagaggttaaggcgggtgaattatttgaggttaggagtttaagacgagtttggttaatatggtaaaattttgattttataaaaaaaaggtaaaaataagttaggtgtgatggcgtgtgtttgtagttttggttatttaggaggttgagatataagaatcgtttgaatcggggaggtacgttacgtttttagttgttgatttgagttttttcgtagtttgtagggggagggtaatagagtattaggtagtttttggaatatataggagtgtaattggaaaaagattttaagtaagtttaatgaattagataatttatttaattagtaaattatgtaattagtatgttttataataatattgtgagttagattttgtttttgatatgtatatattatattgtataggtgttattaatttggagagtatatatagtgagtttatgttttttttttgttattagtattatattaaaattttgttatggtttttaaattttgattttgagaaagttttttattttaataatataattatatttgtgtttgtttttatagttaaatatgtattatgatattagtttgtatatattttttaaatgatttgaatatttgattttaaaaattattttagaatttttgtgttttaatattaatgttagaagatttggaattgtttatttgtaggtaattgtttttaaggaaatttgattaaatattaattaagttatgtatttttttttggtaatagt

SEQ ID NO: 108 - DNA, 12781 bp, Artificial Sequence
  chemically treated genomic DNA (Homo sapiens)
attgttgttaaaaggaaatatataatttagttaatatttggttaagtttttttaaaggtagttatttataaataaataattttaagttttttggtattaatattgaagtatagaaattttagaataatttttaaagttagatatttaagttatttaaaaaatgtatgtaagttgatattataatgtatatttaattatgaagataaatataaatatagttatgttattagggtgagaaatttttttagaattaaagtttaaaaattatggtagaattttggtataatgttgatggtaggaaaaaggtatggatttattgtatatgttttttaaattagtagtatttatataatatggtatgtatatattagaaataggatttaatttataatattattataaagtatattgattatataatttattaattaggtaaattatttaatttattagatttgtttggaatttttttttagttatatttttatgtattttaaaagttatttaatattttattattttttttttataaattacggaaaaatttaagttaataattgagggcgtaacgtgttttttcggtttaagcgatttttgtgttttagttttttgaatagttaagattataggtatacgttattatatttggtttatttttattttttttttgtagagttagggttttgttatgttggttaggttcgttttaaatttttgattttaaatgatttattcgttttggttttttaaagtgttgggattataggcgtgagttatcgcgtttggttaaataaagtatttttaatatataagttaagtattttagttgtattttaaagtaaatatagtatgtttaataaatatatttttgggttttagtttagatttaattaatttagattaaaaattttaaattaaaaatttaaaattaataaaaaatagtgattaggtatgatggtttatatttgtaattttaatatttggggaggtcgaggtaggatagtttgagtttgggaggttaaaggtgtagtgagttgtgattattgtattgtattttagtttgggtaatagagtaagattttgttttaaaaaaaaaggaaaaaaaatataaaatttaaaatatagttgaataattaattttaaagtatttatattttattaggtattgtacgtaatttagagataaagtataggggaagatgtgtataggttatatgtaaatattatattttataagggatttggatatttaaggatttgggtatttataggggggttttgtaattaattttttttagatataaagggaggattgtaattttagttttagaaaagggttgttattttagaattttgttatgtgtaaaatatagtataaattgttttaaatgatgtatgaggttttatgttttaaaagattattagaaaagaattattttatttttaagtaagtaattaaaaaaataatgttttttatttgtttataggataaatgtgtatttttattaggaaaaaaaagtttgtgtgaaaagttggatttaattattattagttttgaaataaatttttttttgaaataaaatattagaaatataagtatttaaataaaaaattttgttttttaatattattttattttttatatattattatatttatagaatttgatatataatttttttgttgttaagaaatagtagtatgggtcgggtgcggtggtttaggtttgtaattttagtattttgggaggttaaggtaggtggattacgaggttaggagtttaagattagtttggttaagatggtgaaatttcgtttttattaaaaatataaaaattagttaagtgtagtggtagaggtttataattttagttatttgggagtttgaagtaggagaattatttgaattcgggtagtagaggttgtagtgagttaagaaaacgttattgtattttagtttggacgatagatttcgttttataaaaaaaaaaaaaaaaaaaaaaaaataaaaaaaaaaaaaaggaagaagaaagaaagaaagaaatagtagtatgttgggtcgggcgtagtggtttatttttataattttagtattttgggaggacgaggtaggtagattatttgaggttaggagtttaagattagtttggttaatatggcgaaattttatttttattaaaaaaatataaaaattagttgggtatggtggtaggcgtttgtaattttagttattcgggaggttgaagtaggagatttttttgaattcgggaggtggaggttgtagtgagtttagattatgttattatattttagtttgggtaatagagtaagatttcgttttaaaaaaaaaaaaaaaaagaaaaagaaaaagaaaaaggttgggtacggtggtttacgtttgtaattttagtattttgaaaggttaaggcgggttgattacgaggttaggagttcgagattggtttggttaatatggtgaaattttatttttattaaaaaaataaaaattagttgggtatggtggcgggtatttgtaattttagttattcgggaggttgaagtaggagaattatttgaatttggaaggtagaggttgtagtaagtcgagatcgtgttattgtattttagtttgggtgatagggcgagattttattttaaaaaaaaaaaaaaaaaaaaaaaaaagaaagaaagaatgaaagaaaagaaatagtagtaagttataaaatgttaagattaaaaattttattaatatgtagtttttttaatgttaaaaagtttgaagaaaaagagtattattaaatattttggatttaggaaattggtttttgagttaaaaaagataattaaataggtagtaaaatgtattgtgtaataaaattaaaaattttaaatattttttaaaatttttttttatttattgttaataaattaaattttttttgtgtgtaaatttgaattttttaaaggtaattttaaaattttattcgtggtaattttgcggtttttaagaatgttaaaataggttaggtgtggtggtttatatttatgattttagtattttgggaggattttttaagagtttaggaattcgagattatttgggttatatagtgagattttgtttttataaaaaaatttaaaaattagttaggtatggggtggtgtgtatttggggttttagttatttagaaagttgaggtgggaggattatttgagtcgaataggtcgagggtgtagtgaatcgagatttgttattgtattttagtttgggtaataaagtaaaatattgtttgttattattgtttttgttttttaaaaatattttaaattatgattttaggattttgtaagtgtttttaaagttttaagtgagttttaaatgttcggtatttttggggttttttaagacggtggggaaaaatgttaagaggaaaagttgatagtttataaaataaatgttaaaattttgatataataagtaatggttttgtttaaatatacgttaaatagattttttgaattttggtttaaaattatattatttttgttttttttttagtttataattttgatgttaattattagttgtttttaaaatatataattaatatttttattaatttttattttattttttggtagatagggtttgattttgttatttaggttggagtgtatggtatgattttttggtttattgtagttttaattttttggatttaagcgatttttttattttagttttttaagaagttgggattataggtatacgttattatgtttggttaatttttttattttttggagagatagggtttagttatgttggtttgttttggttttttaaagtgttgggtttataggtatgagttattgtatttagtttttttgtggattttttaaataaaatttatagaaatattaattatagagaaaataaaaggataaattttatattataattaataatttgtttatcgaaagatgttataaggttgggtgtggtggtttatatttgtaattttaataggttgggaggttgaagtgggaggatcgtttgagagtaagagtttaatattagtttgggtaataaagtgagatttttattatttaataataataataaagttataaattaaatgaaagaatttattgtgaaagaagatatttatattatatataaatgataaagaattaggaaaaaaaaaagaaatagtaaaagataaatattttagtataagaagaaatttaaatgataaatattaaaagatgttcggatagatacggtggtttacggttaggtgcggtggtttacgtttgtaattttaatattttgggaggttgaggtgggtggattatttgaggttaggagtttacgattggtttgattaatatggtgaaattcgtttttattataaatataaaaattagttgggcgtggtggtaggtatttgtaatattaggtatttgagaggatgaggtaggagaatcgttggaatttaggaggcggaggttgtagtgagttgagattatattattgtattttagtttgggtaataagagtgaaatttcgttttaaaaaaaaaaaaaatacgtttaatatgttttaaggtttaaatgatttatggagtaagttcgaatgtttttgtagtttattagattgtttatgattggatttttgtttaatttttttaatgttttttttttttttttttattttatttataatttgtagatttttttttttttgaattagttttttatttttattataatttgtttaagtttatttgtttttttggtttcggtttatagagttgagagtttagtttgattcgtatttttttcgttttttttttatttggagtttataattgtttttttgttttgttttgtttatggttgtatttaggatttataatgtttaatgttgtgttcggtagagtgatttagatattgtagtttttttagaaatttagtattaaatgtttattttttttgaatattttggaattttttttataacgggaggtgaaatgtatacgttttatttttataagttttttaaatttaattttaagaaataaataatatacgttatttaatatgaatgtaaagtatatttttataataaatatattcgtttggtttggatttaataattaatttatgtttaagtaaataatacgttatgtttttttaattaggagtttgttattgcggatgttggttttgttttttataagtatattttattaatgtataattatatatatttaaattgcgggaaagggtcgtttaaataagggtaatattataattatatttagaaaaattttagaatttttttaggatattttaaattggatttaaatggatttgaaatttattatttaaaattattaattagcggtcgggtacggtggtttatatttgtaattttagtattttgggaggttgaagtgggtggattatttgaggttagtagttttaagattagtttggttaatatggtgaaattttatggtgaaaaattagtcggatcgcggtgggtatattcgtaattttagttattcgggaagttgaggtaggagaattatttgaattcggcgggtagaggttgtagtgagtcgagaaagcgttatagtattttagtttgggcgatagagcgagattttattttaaaataaaattaaataaaaaatacgaattggtttttattttgaatgagttattttttttgagtttttattttttcgtttgtttaaatagcgattattaaattttgtgtttagtatttgataaacggtcgggttcggtggtttatgtttgtaattttagtattttggtaggttaatgcgggtcgattaagaggttaggagttcgatattagtttggttaatatagtgaaattcgtttttattaaaaatataaaaattagttaggcgtggtggggcgtatttgtagttttagttatttgggaggttgaggtaggataattttttgatttagagatagaggttgtggtgagttaagaacgcgttattgtattttagtttggataaaagagtaagattttgttttaaaatatatatatatgtatttggtaaatagtaaaagtaagttttttaaaatgtcgttagttgttcggataaaaagttttaaatagatcgggcgcggtggttagcgtttgtaattttagtattttgaggtcgaggcgggtggattatttgaggtcgggaatttcgagattagtttgattaatatggagaaatttcgtttttattaaaaatataaaattggcggggtgtgggggcgtatttttgtaatttcgattattcgggaggttgaagttggggaatcgtttgaagtcgggacgcggagattgcggtgagttgagatcgcgttattgtattttagtttggatttgagcgaaatttttttttaaaaaggaaaaaaaaaaaaaagtatttaattgtttataaagtgaggataattttcgataggttttttcggagttatttacgtttatatatttttgtttagcgttcgattaaggtttttaaaagtttagtggtgttttataaaaattatattattttataaaataaaatattttttattcgatacgaatttttatatacgttaaaatattttattttcgtttcggtgtacgtgtagtttatttatcgaaggatttagtcggattttagtatttcggttttttacggtttcgtttcgtttaattaggtttcgcggtttttatggtgatatattttttcgcgttcgtagttcgtggtttattttttcggcggttttttatttaggtcgaaggtttatcgtttttaaggcgtttcggcgatcgcggtttttaattatttttaagtgtttatttcgatcgattattggagttttaatttattattttcgcgtcggtcgaggaattttttttcgtattttatattatcggatttttttcgttcggtttttcgtaggtatttttttttttcgttatttcgtttttcgtttcgtttattaagtgggtcgggcgttttttttttttcgttttatttttagtgtttttattttttaggttttttttttattcggagttgcgcgcgtcgttttttttttagtttagtatttttatttggcgggacgcgttttttttttttaaaaggttcgaatttttcgcgttttttttgtagttttttttttgtatagtttttttttttcgattttgtttataagttatatttttaaatgttttagattcgatttttgtatttatttaagttaattttgcggtttcgtttttttcgagtttagggttaggtcgtgtatttttttaattttttgtgcgagttttttttcgtcgggttttaagcgtttcgtcgttatgttttcgttttcgattttatttttatttcgttatttggtgggggtagtaggcgttatcgattttcgtagtttttcgttgaggtttttcgttttgggcggtgacgcggagcgcgttaagggtttgggtttaggtttagtttcgttttaggtcgtattttcgtttggggaaggagaggtttcgggggtagcggcggtacggtcgttttcgcgtgaggttttggtcgaggttttgttggtattatttagcgtcggagatttggggaagaagttgtatagggtgttttgtcgcgatatatcgatagtcggtaaggtttaatcgttttgtcggacggagtttttaaaagtatcgtatttatcgcgcggtttttgttggcgggaaatttggggggaggcgcgtttcgtcggaggaattcgggttttagtggttaattaataggcgtttcgtcgtgcgcgggcggtgcgcgttaggtttcgttttcgggcgcgcggcgacgtggggaagggcggggttggtatattggtgggtaggggcggggttggtacgttggcggtgaggggttcgttttgtcgtcgacgtttgggtttcgcgcggggaattgttgagtttttttttttttacgtcgcggggttggtcgggtcggaatatttcgattcggggttagttgcggtcgcggggttagtaggttcggaaagttttgtttttttggagcggaagcgggaatagcgggggcgcgtatcgttcgggcggggataatcggggggattcgaaaggtttcggaaaggggttcgcggggagaaacgcgtttagcgttcgcgtgattttttgtcgttagagtattttcgtaaggagacggagcgaaagggattaaattttagttagtagtttatttttacgttgtatttttaagatttgtatagagtaggtatttggtaaacgttaaatgaatattgtaatagtattcgttagcgatgttgttgtgtatggtgaaagtttgtagttgtataaagtttttttttgttaggtattgattttagtattttatatttggtaattaaatcgatttttttaataatttgtgacgtaagtatttaagggttatagttcgttatttgagttttttgatttaggtgtgtttttataggattttttaaattttagaaagttaagagattatgagaggtcgggcgtagtggtttacgtttgtaattttagtattttgggatgtcgaggcgggcggattatttgaggttaggcgttgaagattagtttagttaatatggtgaaattttcgtttttattaaaaatttaaaaattagtcgggcgtggtggtatgcgtttgtaattttagttatttgggaggttgaggtaggagaataatttgaatttgggaggtagcgtttgtagtgagttaaggtcgcgttattgtattttagtttgggcgataagagcgaaatttcgttttaaaaaaaaaagaaagaaagttaagaggttatgagaataaaaaggttttatttaaatttaagaaagatagtggaagatagataattgtttgtttttttatttagattgtgaaatttagattgtcggaaattagttataattaatagttgtatattggtaaaaatttatgtaaaattagttgtttgttttgtttttggagattgttttgttagaaggtttttttttgttaggtaagtaataaaattaatttaaaaaaaaaaggcgggggtcgggcgtagtggtttacgtttgtagttttagtattcggtatttcggggggggggcggaggtgggcggattacgaggttaggagatcgagattattttggttaatatagtgaaatttcgtttttattaaaaatataaaaaattagtttggcgtggtagtatacgtttgtagttttagttattggggaggttgaggtaggagaatggtgtgaattcgggaggcggagtttgtagtgagtcgagatcgcgtttttgtattttagtttgggcgatagagtaagatttttttttaaaaaaaaaaaaagaatattgttaaaggtggtatgtgttaagaaaaatatagtatgttttacgaatttgtattttatttttgtgtaggggttattttaattttggtatatgtgttatttaagtaagtatagtgaaattaattgtttgagataatatttgagagttggttttttttttttatcggtatacgtaaatatttttagagagtttgggggaatatgttgaaattaaatatgtagtaaaatttatatgtttatttatattaagtagaaagaatatagaatatagattataaatagttttaggttaaaatttgttattaaatgagtttatttttaaatttttggtttatagagttttttggattttagaattgtacgtaagaggttggttattttgtatttttatattatggatgaagttgaggtatagttgggttaagtaatttgtttatgattgtatagttaggaagtggtggagtttggatttaaatttaaggaagttggttttggagttttatgttgttaatagaaatattataatatttttaatttaatattattttattttatttagttattataattattttatattaggttgaattatgtgaaattgttaaaatttgttttttttaaaatttttttgagatagggtttggttttgttatagaggttggagtatagtggcgtgattttggtttattgtagttttaattttttaggtttaagtaatttttttattttagttttttgagtatttgggattataggttcgtaatattatgtttagttaattttttttttttttaattgaggagttttattttgttatttaggttggagtatagtgacgttattttggtttattgtaatttttgttttgcgggtttaggtaatttttatgttttagttttttgagtgttaggattattggtgtttattattatgtttagttaatttttgttttttagtagagatacggttttattatgttggtttgtttgattttaaatttttgattataagtgattcgtttgttttagttttttaaagtgttgggattataggtatgagttattgtgttcggtgttttgttagtattttaaaaattttttgtagagacgaagttttattatgttgtttaagttggatttttttggttttttggttgttttgttttgagatagggttttattttgttttttagattggtgtgtagtagtgtagttttagtttattataatttttattttttaagtttaagtaattttttttttttagttttttgaatagttgggattatcggtacgcgttattattgtttagttaatttttgtatttttagtagagataggattttattatgttggttaggttggttttaaatttttgattttaaatgatttttttgtttcggttttttaaaatgttgggattataggcgggagttattgcgtttagttaagttggatcgtttttgaagtataaatattaatatttaatttattttggtttaattgaatataacgttattttttttttgttgttgttgtttgtttttttggggatggagttttgttttgttatcgaggttggagtgtaatggtacgattttggtttattataattttcgttttttaggttaaggtaatttttttgttttagttttttgagtagttggggttataggtattaatatatttagttaagttttgtatttttagtagagatggggttttattatgttggttaggttggttttaaatttttgatttcgtgattcgtttatttttgttttttaaagtgttgggattatagatgtgagttattgcgttcggtcgatgttatttttttatagggaggaaatggaggtttagaggggatgcgttagttgtaagaggttaagagtttgggttttgggttaaatggagaattgagttttgattttagttagttaagtagataattcggagtaattaatatttttttgaatttgttttttcgtttttgataaggatagtagtatttatgggttaaattttggaggttatagttagatgttttttataaattttattaaaagataagagaatatatgtattatgtggggatatttagatttttagaattggtatgaatgttatttggaattgaagatatttgagagttaatagatgtagaaagatgtcgttttaaagttttttttatgcgattaatagtagaaatttttgggagtgaagttgtcgtaaattttttttttaggggagttttagtggttagaaaaaaagataaagattatttgtatttgtaaaaataaatatttttattttttttttgtttttttagaaatttatttgttttttttatggaaggtttttttttttttttttttttttattaaatggtatatataaagtagatttcgagatttaagaaaaaaaaagttgtataaatgttaaataatagttttttggatttattttttttttttgtgaatttttgtatgtatatttgaataaaagtttgtttttttttttttttttttttgagatagggttttattttgttgtttaggttgattttttagttttagttttttaagtagttaagattgtaggtgtgcgtttttatattttgataattttattttttgtagagattgggttttgttatgttgtttaggtcggtttttaatttttgggtttaagtttttttttttatttggttttttaaagtgttaggattataggtttgagttatcgtgttcggttttaaattgtttttagtttgtagtgtttaattaatatatatattttatgattatatatgggttattttgaaaattgaataaaaatattttttttttatatgtattttttttttaaatggttatatttagtaaattgtataataattaatggagttgttttggtttaggagatgtggtaggaaagtattaaggtagtaaatatattaggtgtttgggaatttttggtttattggttaagagttttgtatttaaagtttgtgtttatattttagttgagttgtttattaaattgtacgagtttgttgggtaagttatttagtttgtgttttagtttttatatttgtaaaatagggatgatattaatattattttttttatgggttgtgttaagtattgagtgaaagggtattatgaagtttttagtttagtgtttggtacgttatacgtatttaataaattggatagttatataaataaattattaattggttagggatagtggtttatatttataattttaatattttgggaggttaagatagaaggatgatttgaggttaggagtttaagattagttagtaatatagtg

SEQ ID NO: 109 - DNA, 7133 bp, Artificial Sequence
  chemically treated genomic DNA (Homo sapiens)
tagaggttttttttttcggtcgagaatgtattttttttttagggttgttaattattaatattttttattggggaaagaatttagtaatattttttttattcgtttttggtaataagagaaatatggttttgttttgtttggtttttaggtagttagatttaatggttattttttttgttttttgaatatcgttgttattttgtttgtttttttttttaaggtatttagattttatattgtttaaatatatatgttttacgaatagtttgtgtagttaacgtaattattatagggtttcgaggtgatatatatttttattttacgaagatgatgggattaagagattaaaataaagataggtataggaaattataagattgttgattggggaagtgataaatgttcgtgaaatttttacgatttatgtttagagattgtagtaaagataggcgtaagaaattataaaagtattaatttggagaattaataaatgtttatgaaatttttataatttatgtttttttgttatggttttagttagtttttcggttcggggtttttgatttttcgtaatatatatttgtgattattgatgtaaaaaatttttaataaaaatattagtaaattaaatttaataataattaaaaatattatttattatgattaagtgggatttattttaggaatgtagatagtttaatatgtgtaaaggtgatatattatattaagagaatgaaggagaaaaaatatattaattgatttttaaaaagtatgttataaaattaaatatttttttataataaaaatttttaaaattgggtatagaaggaatattttttaaaatagtaaaagttatgtatgatagatttatagttgttattatattgaatgaggaaaaattgaaagttttttttttaagatttgaaatatagtaaggatgtttatttttattatagttatttaacgtagtattggaagttttagtcggagtagttagataggagaaagaaagaaagtatttaaattggaaaggaaggagttaaattatttttgtttgtagattatatgattttatgtttggataaatttaaagaatttattaaaaaatgattagaagtgatagatttagtaaagttgtaggatataaaattagtatataaaaattagtattatttatatatgttaatattgaataatgtgaaaaagaaattaagaaagtaataatagttagatttataatagttagaaataaaatatttgggagttaattaaaaaagtgaaaagtttttatagtgaaagttataaaatgttggtttaagaaattgaaggtaaatatatatataaaggaaagatattttgtgtttatggattggaagaattaatattgttaaaatgtttatattaattaaagtaatttatagatttagtgtattttttattaaaatattaattaaattttttagagaaatagaaaaaataattttgaaatttatatagaattataaaagatttggaataaataaagttattttatgtaaaaaaaagaaaattggaagaatcgtatgatgtgattttaaattatataacgtattggtatataattagatatatagaatagtggaattaagtagagaatttagaaataaatttatttatttatagtgattttatttttaataaaggataattttggggaaaaggatagtttttttaataaattgtgttgggaaaattagatatttatggatagaataatgaaattggattttatttcgttatatataaaaataaaatggatgtaagatttaaatttaagattttaaattatgaaataacgaaaagaaagttttggggaaaatgtttaggttattgaagtgagtaaggattttttgaataaatattttataagtataggtaattaaagtaaaaatgaataaatggaattatattaagttataaagtttttgtatagtaaaggaaataataaagtgaggagatattttatagaatgggaggaaaatatttgtaaattatttatttgataagggattaataataagaatatatagggagtttaaataattttatagataaaaatttaatatgttgattaaaagatgggtaaaatatttgaatagatattatttaagagaaaatatgtaaatggtatatgggtgtatttattattagaggaatgtaaattagaagtataatgagttattttattttagttaaaatggtatttatttaaaagataggtattaagaagtgtttgcgaagatgtggagaatagggaatttttatacggttagtggtaatgtaaattagtataattatcgtggagagtagtttggaggtttttcgaaaaattgaaaacggagttgtatgatttagtatttttatttttaagaatatataataaatgaaattagtatattgaagagatatttatatttattgtagtagtatttataatagtttcgatttggaatagttgaaatgtttattaatagacgaatgagtaaagaaaatgtggtatatatatataatagagaattatttagttatagaaaaggatgagattttgttatttgtaatagatggatggaagtggaggttattatgtaagttaggtatagaatgagaaattttatatgtttttttttatttgtgggagttaaaaatgaaaataattgaaattcgagtgatggttattagaggtttggaaggataagtgtgggggaagggggtttggaggagaaggtagtggtggttaataggtatagaaaaatagaaagaatgaataagatttagtatttgtttgtttaatagggtgattagagtaaaaagttatttttattgtatattttaaaataattaaaagtataatttgatagtaatataaaggataaatatttattgtgtatttataaaaattgaaaaagttttaaaaatgttttttgttgttttatttgattaatgagaaagttaatatggttaattttaaatgtagaattgtttttattatttagtatagtgtttttgtgttgtatagtgttttttattttttagataagtatgtgtattattttttagataaagatatatgtttattttttttaaatatgtgtaaatttttatatagaaataattatatatttaatgtgtgtggatataaatgatagaggttttttaaagatttttaatttttttaaaatagtatttttattatagaatttttgttattaaatttttgatgtttttttattgtatagagaattaattataatttaattatattgtgtgtgtgtgtgtgtgtgtgtgtgtgtgtgtgtgtgtataatttgttatttttttttagtgtaaatattttatttaggttagtttttattatagttagttttttagttttatgattgattatttagtgtttattattttttgtttatgttattgtaggttttttgtttaagtattttgaggaagttgtttatttttgtgtatttttaaagtagtttgttttttattgttttagtgaatggtatatttggttatgttttttttgttttgaaagtattgagatagatatatatttttagttttttagtaaattagagggaagttagaatagatgaattatttgttatgggtttttgttttatatttttgttttttattttttatttattgtttgtttgtttgagacggggttttattatgttgtttaggttggagtatagtggcgtgatttgggtttattgtaatttttgttttttaggtttaagtaatttttttattttagttttttgagtaattggattataggtatgtattattacgtttagttaatttttgtaatttttatagatacgaggttttattatgtcgtttaggttggttttgaattttaggatttaagtaattcgtttgttttggttttttaaagtgttgagatttataagtatgagttattgtgttagtttttgttttttattttttatttttatttatttttttgttagattttttaatttggttttttgttttgttttgtttttttagatttgttaaattttatattttttttgggtttttttatttttttttgttttgagagaatttagattaggtgatttttaaatattttagtagtaaaataatgtatgttttttagtgtttagttttaatattgttttatttataaagttttatttgattttgtagtttgtattatgttgttttgttttataaattattttagtatttattttaaaatgtagatataggttaatttgtgttttgtttatatatatttgttttaattatttaatatagttgtaagttttttgaagaatgatattttttttttaaagaatttaattattatttattttttaattattatattattatgtagtagttatattatagtaataattataatgatagtaatttttgaatattaattttgaggtagatattattttaaatgttttatttattatgtttatttttataattggtaataggatgttgatgagataagatttcgttttatttttattttattgatgaggaaagatagatatataaaggttaagtaaatttttttattattagtgagtaaatatagatggatttaagtagggatattttaaaatttatgtatttatttgttttgttataatgtataattattgtgtatttgttgaatgaatagagtgtttttaatttttaatatatgttgggtataattttggtattttttgtattttgaataaaatattaagggtgttttatttttttaaaaatggggataaataattattttagtaaattaaatattgtgattaatttttttaattaagagtaaatatttaaattgtttattttgaggtattttgaaaaatttttttgtttttgaaagaaaatttgtgatatgtataatatttggattttgatttgcggtgttttaattagtattttttatttatttttagttgagtggtgattttatgtaatggttttaagttatagttttttattagtgttttaaggaagtagtagtgatgttttttttaaaatagaggtagattcgttaaaatatattcgatttgtgttattattgttagatgtgtgttttaaggaatttataggtaatgttttttttttttgtaggatttttattgatgatttttattatttttaaatgagtagttaggttttatatattaacgttagaagagtaaattttatgatgttaaaaattatttgggggggtcgggtacggtggtttacgtttgtaattttagtattttgggaggttgaggtgggcggtttacgaggttaggagatcgagattattttggttaatatggtgaaattttgtttttattaaaattataaaaaattagtcgggtgtggtggtaggcgtttgtagttttagttattttggaggttgaggtaggagaatgttgtgaatttaggaggtggagtatgtagtgagttgagatcgggttattgtattttagtttgggtgatagatagattttattttaaaaaaaaaaaaaaaaaattatttggggttcggcgtggtggtttacgtttgtaattttagtattttgggaggttaaggtaggtagattatttgaggttaggagggagtttaatattagtttggttaatatggtgaaattttatttttattaaaaatataaaaaattagttgggtgtggtggcgtgtgtttgtaattttagttgtttgggaggttgaggtaggagaattatttgaatttgggaggtggaggttgtagtgtattttagtttgggtgatagaacgagattgttttttaaaaaaaaaaaaaaattatttggaaatgattgggaaattgaaatttttttttaatgtattttatgtattatttatataaattgaaaaagtgttgaaaatgaaggtatagattgaaagttgtttagttaaaatatggtatagttagtttttattatttgtatattgtgtatttgtaaatttttttgattttttaatatttatttataatttttaaattattatttgcggtatatttgtggtaatttgtagttatgtgtagagtagtgaaagatttgagatatttgatatatgtatttttagttgaagttgaataagataaagttttgtttttttgttttagtttttatattataaattaatgttttttttgtggtttgtttttatttggtgttatatgtttggagttttttgttggtgattttgttgtttaaattgtttttaagcgtagtgttaaaatgttatttggagtttttaagtgtaagaaggttatgatgttttttatggagaaaatatatgtgttgtgtaagttttatttaggtataaattatagtattgttagttataagttcggtgttagtgaattaatgatgtatattgaataaggcgtttttaaatatataaaataaggttatgtattgattagttgatgaaattattgtgattaaaggttcgtaggaatttaattttttagtttttttataagtagtggtttaatatttgttaatttaatatttataataattttatagaataaatatattattaataatgagaatagagtaaaatttttttttttgtatggttaatgttatagtaatatttatgttatttaattataagttaaaggatattttatttaggagattttgttatgatataatagaaaagaggtttatttttaaaaaatagtggggtattaaaggatagaaaatatataatagaaagtagtatagttttgatgttgaaaaaaaaagatagagtaattgtatattaaggaaaggagtttatgaaagattttttttattatttattttattttgtaatcgtagtttttaaattttgtatattttttatttcgtgtatattttttaaagttttagtaattgatgttgttagttgaaggttatttaattagattgatttttattaaattatttattgtggaagattagttggtttgcgtaagatggaatttgtgtatttttagttttttagtgtgtatttttaaatatagaattaattttatagtatttatagagtttttttgtttattttttgtagg

SEQ ID NO: 110 - DNA, 7133 bp, Artificial Sequence
  chemically treated genomic DNA (Homo sapiens)
tttgtaaaaagtaaataagagaattttgtaaatgttgtaaaattggttttatgtttgaaagtatatattagaaaattaaaaatgtatagattttattttacgtaaattaattaattttttatagtaaatgatttaataaaaattaatttgattgaataatttttagttggtagtattaattattaaggttttgaaaaatatgtacgagataaaagatatgtaaaatttgagaattacgattgtagggtggagtgaatagtaaagaaagttttttatgaatttttttttttaatgtataattattttattttttttttttaatattagaattatgttgttttttattatgtattttttattttttaatattttattgttttttagaggtaggttttttttttattatattatggtaggattttttagataaaatattttttggtttataattaggtgatataaatgttgttgtggtattaattatataagaaggaaaattttattttatttttattattagtagtgtatttgttttataaagttattgtgaatattgaattagtaaatattgaattattgtttgtagggaaattaaagagttaggtttttgcgagtttttggttataatagttttattaattgattaatatataattttgttttgtgtgtttaaagacgttttatttagtatatattattgatttattaatatcgaatttgtggttaatagtattataatttatgtttgaatgaagtttatataatatatgtattttttttataagggatattatagtttttttgtatttaggaattttagatagtattttagtattgcgtttaggggtaatttaaatagtaaaattattaataaaaagttttaaatatgtggtattaagtaaaaatagattataaaaagaatattagtttatagtatgagagttgaaataaaaaggtagagttttgttttgtttaattttagttgggaatgtatgtgttaggtattttaaattttttattgttttgtatatgattgtaaattattataaatgtgtcgtaagtagtgatttggggattatgaataaatattaaggagttaggagaatttgtaaatatataatatgtaaatgatgagggttgattgtattatgttttaattaagtagtttttaatttgtatttttatttttaatatttttttagtttatataagtaatgtatgaaatatattaaaaaaaaattttaattttttaattatttttaaatgatttttttttttttttgagaaatagtttcgttttgttatttaggttggagtgtattgtaatttttattttttaggtttaagtgatttttttgttttagttttttaagtagttgggattataggtatacgttattatatttagttaattttttatatttttggtagagatggggttttattatgttggttaggttgatgttgaatttttttttgattttaagtgatttgtttgttttggttttttaaagtgttgggattataggcgtgagttattacgtcgggttttaaatgattttttttttttttttttgagatggagtttgtttgttatttaggttggagtgtagtggttcgattttagtttattgtatgttttattttttgagtttatagtatttttttgttttagtttttagagtagttgagattataggcgtttgttattatattcggttaattttttgtagttttagtagagatagggttttattatgttagttaggatgatttcgattttttgatttcgtgaatcgtttattttagttttttaaagtgttgggattataggcgtgagttatcgtgttcggtttttttaaatgatttttaatattataaaatttatttttttaacgttggtatataaaatttgattatttatttaaagataatagaaattattagtaaaaattttataaaaaaaaaaagtattatttgtgggttttttgggatatatatttggtagtgatggtataggtcgaatgtgttttgacggatttatttttattttaaagaaaatattattgttgtttttttgaggtattggtgaagaattgtggtttgaagttattgtataaaattattatttaattgaaaatgagtaagaaatattaattaagatatcgtaaattaaaatttaagtattatatatgttataaatttttttttaaaagtaaaagaattttttaaaatattttaaagtaggtaatttgaatatttgtttttaattgggaaaattgattataatatttagtttattaagatagttatttgtttttatttttaaaaaagtgaaatatttttaatattttatttaaagtataaaaaatattaaggttgtatttaatatatattaaagattaaaaatattttatttatttagtaagtatatagtagttatgtattatagtaaaatagataagtgtatgggttttgaagtatttttgtttaggtttatttatgtttatttattagtggtgaggaaatttatttaatttttatgtatttgtttttttttattagtgaaatggagatgaaacgagattttattttattaatattttgttattaattatgagaatggatataataagtaaagtatttaaaataatgtttgttttagagttagtatttagaggttattgttattgtaattattattatgatgtgattgttatatagtaatataatgattaaaaaataaatagtaattaaattttttaaaaaggaagtgttattttttaaagagtttgtaattgtattaagtaattaaaataaatatatgtaagtaaaatataagttaatttatgtttatattttaaagtaaatattgaaataatttgtggagtaagataatataatataggttatagggttaggtaagattttataaatgaagtaatattgaaattggatattaaagaatatgtattgttttattattgaaatgtttagagattatttagtttaagtttttttaaaatagagaagaatagaaaggtttagaaagaatatgaggtttaataagtttaaaaaaataaaataaaataaaaagttaagttagaaaatttggtaaaaagataaataagagtaggaaatggggagtagaggttggtatagtggtttatgtttgtaaattttagtattttgggaggttaaagtaggcggattatttgagttttggagtttaaggttagtttgaacgatatgatgaaatttcgtatttataaaaattataaaaattagttgggcgtggtggtgtatgtttgtagtttagttatttagaaggttgaggtgagaggattgtttgagtttaggaggtagaggttgtagtgagtttagattacgttattatattttagtttgggtaatatggtgagatttcgttttaaataaataaataataaataaaaaataaggagtagagatatgaggtaagaatttatgataaatagtttatttgttttaatttttttttagtttgttggaaaattaaaaatatgtatttgttttagtatttttaaagtaaaggaaatataattaaatatattatttattgaaatagtaagaaataagttgttttaaaaatatataaagataaataatttttttaaggtgtttaaatagaaagtttataataatatgaataaaagataatgaatattgaataattaattataagattaaggaattgattatagtggaaattgatttaagtgaaatgtttatattgggaagaagtgataaattatatatatatatatatatatatatatatatatatatatatagtatagttaaattgtagttggttttttatgtaataaggagatattagaggtttggtggtaaaagttttgtgatgaaaatgttattttgggaaaattaagagtttttgaaaggtttttgttatttatatttatatatattaagtgtatggttgtttttgtataaaagtttatatatatttaagagagataaatatgtatttttatttaaaggataatatatatatttatttaaagggtaagaaatattgtataatatagaaatattgtattaagtgataaagataattttatatttaagattgattatgttaatttttttattaattaaataaaatagtaaaaaatatttttgaaatttttttaatttttgtgagtatatagtaggtatttattttttgtgttattattaaattatatttttagttattttaaaatgtataataaaaatgattttttattttaattattttgttaggtaagtaaatattaggttttatttattttttttatttttttgtatttattaattattattatttttttttttaggttttttttttttatatttatttttttaggtttttggtaattattattcgagttttaattatttttatttttagtttttataaataagggagaatatgtgaagttttttattttgtgtttggtttatatagtgatttttatttttatttatttgttgtaaatgataagattttatttttttttatggttgaatagttttttattgtgtatatgtattatattttttttatttattcgtttgttgatggatattttagttgttttaaatcgaggttattgtgaatattgttgtaataaatatggatatttttttaatatattgattttatttattgtatatttttaggagtgggaatgttggattatatagtttcgtttttagtttttcgagggatttttaaattgttttttacggtgattgtattaatttatattattattaatcgtatgagggttttttattttttatattttcgtaagtattttttaatgtttgttttttggataaatgttattttaattggggtgagatagtttattgtatttttgatttgtatttttttgatgataaatatatttatgtgttatttgtatgtttttttttgagtaatatttatttagatattttgtttattttttaattaatatattggatttttatttataaggttgtttgagttttttatatatttttgttattaattttttgttagatgggtagtttgtaaatattttttttttattttgtgggatgtttttttattttgttgttttttttgttgtgtagaagttttgtaatttgatgtgattttatttgtttatttttgttttggttgtttgtgtttgtggggtatttatttaagaaatttttgtttattttaatgatttggatattttttttaaggtttttttttcgttgttttatagtttgaagttttagatttaagttttgtatttattttatttttgtatatggcgaaatagggtttagttttattgttttatttatggatatttagtttttttagtataatttattgaagagattgtttttttttttaagattgttttttgttaagaatgagattattgtagatgaatggatttatttttgggttttttatttggttttattgttttatgtgtttggttatatgttaatacgttgtataatttgaaattatattatgcggtttttttaatttttttttttttgtataggatagttttgtttattttaagttttttgtggttttatataaattttaagattgttttttttatttttttgaagaatttaattggtattttgatagggaatatattgaatttgtagattgttttggttagtatggatattttaataatattgatttttttaatttatgaatatagaatattttttttttgtgtgtgtgtttgtttttaattttttgaattaatattttatagtttttattgtagagattttttatttttttggttaatttttaggtattttatttttagttgttgtaaatttagttgttgttatttttttgattttttttttatattgtttagtgttggtatatgtaaatgatattgatttttgtatgttgattttgtattttgtaattttattgaatttattatttttaattattttttgatgaattttttaggtttatttaaatataagattatataatttataaataaggataatttgatttttttttttttaatttggatgtttttttttttttttttgtttgattgtttcggttaggatttttaatattacgttgaataattgtagtgaaagtgggtatttttgttgtgttttagattttagaagaagggtttttagtttttttttatttagtgtgataatagttatgggtttgttatatatggtttttattgttttgaggaatgttttttttatatttagttttgagggtttttattatgaaaggatgtttaattttatgatatgttttttaagaattaattgatatgtttttttttttttatttttttgatatgatgtattatttttgtatatgttgaattatttatatttttgaaataaattttatttggttatgatgaataatatttttaattgttgttgaatttggtttgttagtatttttattgaagattttttgtattaatagttatagatatgtgttgcgggaagttagggatttcgaatcgagggattggttgaagttatggtagaagaatataaattgtgaaaattttatggatatttgttagttttttaaattaatatttttataattttttacgtttgtttttattgtaatttttgaatataaatcgtgaagattttacggatatttattatttttttaattaataattttatgattttttatgtttgtttttattttaattttttaattttattattttcgtaaaatgaggatgtatgttatttcgggattttgtgatgattgcgttaattgtatagattgttcgtaaagtatgtatgtttgaataatatgaaatttgggtattttgaaaaaaagaataggtaggataatagcgatgtttagggaataagggagataattattaggtttgattgtttggaagttaggtaggatagagttatattttttttattgttaaaaacgagtaagagaaatattgttgagttttttttttagtaaggaatattaataattaatagttttgggaaaagaatgtattttcggtcgggaaggggggttttta

SEQ ID NO: 111 - DNA, 5491 bp, Artificial Sequence
  chemically treated genomic DNA (Homo sapiens)
aggtatattattggggtgttcgggatttagcgtattgggatggtgttgggcgtggttatttagaagagggttgtttttggtttgaaggcgtttgaagaagtttatgttcgggtagataagaaggtttttaggttttgttataagggtttttggtgtagtagtaattagttttgtagagaatgttaagtttttatggtatatacgatgtttaagtttaaagttttttttatgagttttgtttataacgtatatcgggttgtgtatgcggtggtttatggtttttattagtttttgggttgtgtttttggagtttgttttaggggtcgagtttatttttggtaggtaagagagtttattttagtattttttgttagggagaatagttaattttgagatgagtagagtgggtatttttcggttattttaaatgttaagggggataaatgttattaatttgaggttttttgttttgttttgttttgttttttgagatagtttggttttgttatttaggttgtagtgtagtgatgcgatttcggttttttgtaatttttattttttgggtttaagtgatttttttgtttcggttttttgagtagttgggattataggtatttattattatgtttggataatttttttttttttttttttttttttgagatagagtttcgttttgttgtttaggttggaatgtagtggtgcgattttggtttattgtgagtttcgttttttaggtttattttatttttttgttttagttttttaagtaggtgggattacgggcgttcgttattacgtttagttaattttttttgtattttgagtagagacggggttttattatgttagttaggatggttttaattttttgattttgttattcgtttatttcgtttttttaaagtgttgggattataggcgtgagttatcgtattcggtttaatttttgtatttttagtagagatggggttttattatgttggttaggttggtttcgaatttttggtattaagtgatttttttgtttcggttttttaaagtgttgggattataggtattagttttttttttttagatagatttttttttttgatttttgtttttttttatttattgtgttttggaagtgttaagtgataagatttagggttaaaattgtttgtaaaggagtgtttgttagaggtttttttttaggaggttggtggggaagattgaggggttttttaagaaggaagggacgagatttttttgatgggttgaaattattaggacggaaatttaggaaggttttaggtttttgtttttgggattatgtgggtttgtgttgtttgtggtggttttatgatacgcgttttttttagtttttggagtagatttataaggtgtatttttttttatataaggatattgtggcgtttaatgataatagagatttttttagtagttataatataattgtttgggattggaatggatttaagtggatttttacggttttcggtttttttatatggtttttagtttagttaaatataaatgagattaaaatttagtggtacggaaaggataattaggtaatggggatgtggttatttattatgtaattggtttatgggtaatttagagtttgggggtgatgttgatatagtgtatagggagtaggaggggggttttaggggtttagttgttattattttatttattttggttagggaagtagggaagatatttcgtaggcgagtgtgtagatgttttggggcggaagtttatacgattaggggttttgttttgggagtgagttttgagggtagatgtatagagattttgttttttgttttatatgtgagttgttttttgatttgggtttttacgtgtggtttttttggttttttataggtgtttaagtttgtgtgttttagcgattgttttgaagggtattagcgagtggttacgggtttttattattgttgttttgagtgtgtgttttgtggggttgggattttttttaataagagtggtgagtgggtaatggagtaggcgagttatttagtattttcgggggttgtacggtggagggagggttttttttgggttttatgtgttttgttttagaattaaggtttagttattgggttgttagttagttttaggttggaggatatttgttattagatagaattttgattaagagaattagttattgggtgcggtggtttatgtttgtaattttagtattttgggaggttgaggcgggtggattatttgaggtcgggagttcgagattagtttggttaatatggtgaaattttatttttattaaaaatataaaaaattagttgggtgtggtggcgcgtgtttgtaattttagttattcgggaggttgaggtaggagaattatttgaatttaggaggcggaggttgtagtgagttaagatgtattttagtttggattataaagcgagaattcgtttttttaaaaaaagaaaggaggtcgggcgcggtggtttatatttgtaattttagtattttgggaggtcgaggtgggtggattatttgaggttaggagttcgagattagtttgattaatatggtgaaattttatttttattaaaaatataaaaaaagttagtcgggcgttgtggcgtgtgtttgtaattttagttattcgggaggttgaggtaggagaattgtttgaattcgggaggcggaggttgtagtgagttaagattgtattattgtattttagtttgggcgataagagaaaaattttgttttaaaaaaaaagaaagaaagaaagaattagttaattgaaagttttagattgaggtgtgttttttgttagagagttgttattataatttttataaaagtagtcgtattttgaatttaatttttttttttaaatgaatatagttattgttttttttgtgtttttttgttttattgttttttttgttgtttatgttaaagatagttagttttttgaatagtttggtttgaatatagatattagcgtgtttgtagtagagaaaaaaatagtattttttatttagaaatgtaaggttaagaatagagagtaaattaggtagttaaggatttaggtttttagttggtgtttaggggttatattttttttttttattatttttgtagggataggaatattttttttttgtttttagagggttaggatttagagaaattatagagtagtagtttaggaaagtggtttatggaaatgttggtaagagagaggggttataatgtttttttttgggagtaggttgtttttattagatcgtaatttttttggtatgtgggtagagttattaggttaaggttttttttagggtttgtaaaatttttatgggattatgagttatatagaatcgatttgtgtgtttttagagtttgtaattaatataggtattttgaggaaatgcgtggttttaggttttattttcggttatttttattttattatgtttagtatagtttagttgttttggtataatttttttagtattttgtaggtttttattttttatttttattttgtttatttggtttttaggaatttttttggtttttttttttagatttttatagatgttagttttgtgggaaagaagagtgggtatttgagggaagttagatttgtttttcgcgtattgtggtgtttttggttttgcgtgagtatattttttgggtgttgttggtagttaatacgttgttgttgttgttgttgtttgggattgttggtttgtttgtttggtatttagatatttttgtggtgaggttagtagggggtcgtttgtgtttttttatgttgggttttttggtagtaggtagtggtagtttttatggtttttttggggaatttataaggtttgcgtgtttgttacgttaggttttttttgtttttggttttattatttttttgttttgtttgatagttcgtttattttaattaattattatttttaagttttttattaaggtatttatattttattacgtttgggtttaaaattacggtgttggtttgtttgtgatgattagtttagcggtttagttgtttatttgtttaatttggttggtggtgtggattttattgtttgttagggaatattagcgttttttttatttggtgatgtttgagtgtatagagattaattttttgggttttatattggtttttttttataatggttttttttttattagtgtttttgtttgtagttatttgggtaaggatttgttagagaattataacgaggttaaatgtgttatttttagtttgttttttaatttcgtgttttggatcgttttttttattacggttagcgtttacgacggtaagtatttgtttgcggttaatatgatggttgggttgagtagtttgagtagcggtttcggtgggtattttttgtttaagtgttacgtgattttttgtcgtttagattttaatagtatagagtatttttaggtttttatttaggattatacgaggcgttgcggttttatttgattagtgggttagtaggtacggttggtagttttttttgttttgagggtcgaaggtcgagtaggtcgggggtgttcgggaggtttttgggtatcgcggtttggggttgggacgtgtaagcgtttgggagagtttagattaggtttcgggttgttaataaagaagtgaaatgcgtatttggttttttgtcgtgggagagtgtgaggtgtaacggatttaagtttgaatttagagtttggaaaaggttgatcgtttagattgacgttgttaggtaatttcggaggcgggtttagcgttaaaagaatagggcgaggcgtcgttttcgtattttattggtcgttttttgcggggtttcgttttcgggggtcggagttagaagttttacgttttcgaggcgtattttttggtttgtacgttttgacgttacgttcggcgcggagacggtggagttttcgtattgtcggcggggtacgtatagtcgggtattaggttcgtgggttgtggaggcgacggagtagggggttagtggggttagtttagggaggatttgtttgggtgaggagggcgcggggtgagggagggaggggttgcgggtcgtcgtggttgtttttcgttcggtcgttcgggatttgtgggcgcggcgtgggtttcgtttatttgttttcggttgtcgtttttcgtcgttcgggatttttttattgtgtcgggttagttcgttcgtttttattttatgttttttttttttaaatttggattttttttattaggtttttttttacgattttggttttttatttagtattttttttggttaatttaatatggttttcggttttcgggaggttgttagtgtgttttagtttttcgcgtgtattttttattttgatttaagttttcgtgttgataaatatgattatttgagtagaggttaatttttcgttttttttttttgattttagg

SEQ ID NO: 112 - DNA, 5491 bp, Artificial Sequence
  chemically treated genomic DNA (Homo sapiens)
tttggagttaagagagagaaacgggaagttggtttttatttaaataattatatttattagtacgagggtttgggttagggtgaggggtgtacgcggagggttggaatatattgatagtttttcgggggtcgggggttatattggattggttaggggggatgttggatggggggttagggtcgtgaagaagggtttggtgagaaaaatttaagtttggggaaaggagatatgggatgagagcgaacggattggttcggtatagtgagaggatttcggacggcggagggcggtagtcggggataggtgagcgaagtttacgtcgcgtttataggtttcgagcggtcgagcggaaggtagttacggcggttcgtagttttttttttttttatttcgcgttttttttatttaggtaggttttttttgagttggttttattggttttttgtttcgtcgtttttatagtttacgaatttagtgttcggttatgcgtatttcgtcgatagtgcggagattttatcgttttcgcgtcggacgtgacgttaaagcgtgtaggttaggaggtgcgtttcggaagcgtagagtttttagtttcggttttcgagggcggggtttcgtagagaacggttaatgggatgcggggacgacgtttcgttttgtttttttggcgttgggttcgttttcggagttgtttagtaacgttaatttgggcggttagttttttttaggttttgggtttagatttgaattcgttatattttatatttttttacgataggagattagatacgtattttatttttttattggtagttcggagtttggtttaggtttttttaggcgtttatacgttttaattttagatcgcgatgtttaaagatttttcggatattttcggtttgttcgattttcgatttttagggtagagaaggttgttagtcgtgtttgttgatttattggttaggtggagtcgtagcgtttcgtgtagttttgaatggaggtttggaagtgttttgtgttgttgaggtttgggcggtagaggattacgtagtatttaggtagaaaatatttatcgaagtcgttgtttaggttgtttagtttagttattatgttggtcgtaggtaggtatttgtcgtcgtagacgttggtcgtggtgaagaaggcgatttaggatacgaagttgaagagtaggttgaaggtgatatatttggtttcgttgtagttttttggtaagtttttatttaggtagttgtaggtaaaggtattgatggagaggaggttattgtagaggaaggttagtatgaagtttagggagttggtttttgtgtatttaagtattattagatgggggaagcgttggtattttttagtaggtagtggggtttatattattagttaagttagatagataagtagttgggtcgttgagttgattattataaataggttagtatcgtggttttggatttaggcgtggtagaatgtaggtattttggtggaaaatttgaagatgatgattagttggaatgagcgaattgttaggtaggataggaagatggtgaaattaagggtaaagagggtttggcgtagtaagtacgtaggttttgtgggttttttaaagaagttatagaggttgttattatttgttgttagggagtttagtataagaaagtataggcggttttttgttgattttattataggggtgtttaggtgttaggtaaataggttagtagttttaagtagtagtagtagtagtagcgtgttagttgttagtagtatttaagaggtgtgtttacgtaaagttaaaaatattatagtgcgcgggaagtaggtttggttttttttaggtgtttattttttttttttataaggttggtatttgtagaggtttgaaagggaaggttaagaaggtttttgagagttagatgagtagagtaggaataggaaataggggtttgtaagatattgggagaattgtattagggtagttagattatattaggtatagtgggatgggggtagtcgggagtggggtttgaggttacgtatttttttaaaatgtttgtgttaattatagattttggagatatataggtcggttttgtatggtttatgattttatgagggttttgtaaattttagggaggattttaatttggtagttttgtttatatattagagaggttacgatttgatgggagtagtttgtttttaagggagggtattgtaattttttttttttgttagtatttttatgaattatttttttgagttgttgttttgtggtttttttgagttttgattttttgaggatagaagggaagtatttttgtttttatagagatggtgaaaggaaagaatgtggtttttggatattaattaaggatttgagtttttagttatttaatttgttttttgtttttgattttgtatttttggatggggaatgttgtttttttttttgttgtagatacgttagtatttgtatttaggttaagttgtttaaggagttagttgtttttggtatgggtaatagaagggatagtaggataagagggtataaagggaataatagttatatttatttagagaaagaggttgaatttaggatacgattgtttttgtaggagttgtgatgatagttttttaatagaggatatattttagtttaaggtttttagttggttaattttttttttttttttttttttttgagatagagttttttttttgtcgtttaggttggagtgtaatggtgtaattttggtttattgtaattttcgtttttcgggtttaagtaatttttttgttttagtttttcgagtagttggaattataggtatacgttataacgttcggttaattttttttgtatttttagtagagatggggttttattatgttggttaggttggtttcgaatttttgattttaggtgatttatttatttcggttttttaaagtgttgggattataggtgtgagttatcgcgttcggttttttttttttttttggggggacgaattttcgttttgtggtttaggttggaatgtattttggtttattgtaattttcgttttttgggtttaagtgatttttttgttttagtttttcgagtagttgggattataggtacgcgttattatatttagttaattttttatatttttggtagagatggggttttattatgttggttaggttggtttcgaattttcgattttaagtgatttattcgttttagttttttaaagtgttgggattataggtatgagttatcgtatttagtggttgatttttttgattagaattttgtttggtagtaggtgttttttaatttgaagttaattggtagtttagtgattgggttttggttttggggtagggtatatggggtttaagggaggttttttttttatcgtgtagttttcgggagtgttgggtagttcgtttgttttattgtttatttattatttttgttgaggaaggttttagttttatagggtatatatttaaagtagtagtgatggaaattcgtaattattcgttggtgttttttaagatagtcgttggaatatatagatttaggtatttgtaagaagttagaggggttatacgtaggggtttaagttaaaggatagtttatatgtggaatagaaaatagaatttttgtgtatttgtttttagggtttatttttagggtagggtttttggtcgtgtgaattttcgttttagggtatttgtatattcgtttacggagtgttttttttgtttttttggttaggatgggtagagtggtggtagttggatttttggggttttttttttgttttttgtatattgtgttagtattatttttaggttttaggttgtttataagttagttatatggtgagtagttatatttttattatttggttgtttttttcgtgttattggattttggttttatttatgtttagttgaattggagattatgtggaggaatcgaggatcgtgaaggtttatttgggtttattttagttttaggtaattatgttatagttattgaggggatttttgttgttattaaacgttatagtgtttttgtgtagaaggaaatgtattttgtggatttgttttaaaagttgaaagaaacgcgtattatgaagttattatagatagtatagatttatatggttttagaagtaagggtttggggtttttttgggttttcgttttggtggttttagtttattaggaaggtttcgtttttttttttttaggaagttttttaattttttttattaattttttgagaggaggtttttaataaatatttttttatagatagttttagttttggattttattatttgatatttttaagatatagtgggtgagagaaggtaaggattagagagaaagatttgtttaagagaagagagttaatgtttgtaattttagtattttgggaggtcgaagtaggaggattatttgatgttaggagttcgagattagtttggttaatatggtgaaattttatttttattaaaaatataaaaattaggtcgggtgcggtggtttacgtttgtaattttagtattttgggaggacgaggtgggcggatgataaggttaggagattgagattattttggttaatatggtgaaatttcgtttttatttaaaatataaaaaaaattagttgggcgtggtggcgggcgttcgtagttttatttatttgggaggttgaggtaggggaatggagtgaatttgggaggcggagtttatagtgagttaagatcgtattattgtattttagtttgggtaatagagcgagattttattttaaaaaaaaaaaaaagaaaagaaaaattatttaggtatggtggtgggtgtttgtaattttagttatttaggaggtcgaggtaagagaattatttgaatttaggaggtggaagttgtagagagtcgagatcgtattattatattgtagtttgggtgatagagttagattgttttaaaaaataaaataaaataaaataaaaaattttaagttagtggtatttattttttttggtatttagagtgatcggagagtgtttattttgtttattttaggattggttgttttttttgataggaggtgttggggtgggtttttttatttgttaggggtagattcggtttttggaataagttttagaggtatagtttaggagttggtggaggttatgggttatcgtatatatagttcggtatgcgttgtaggtagaatttatggagaaggttttgagtttgggtatcgtgtgtgttatgaaagtttggtattttttgtagagttgattgttgttgtattaggagtttttgtggtaaggtttaggggtttttttgtttgttcgggtataggtttttttaaacgtttttaggttagggatagtttttttttggatggttacgtttagtattattttaatgcgttggatttcgggtattttagtgatgtgttt

SEQ ID NO: 113 - DNA, 9254 bp, Artificial Sequence
  chemically treated genomic DNA (Homo sapiens)
tgggggaaattgattttatgatttaattatttttatttgattttatttttgatatgtgaggattattataatttaaggtgagatttgagtggggatataattaaattatatgagtggatatgtaatatgagtgagaaataattttgtgattgtaatttagtaagatttttggatggttaatatagtataatttagagtatatggaggtgtgtatttttagttttttgattttcgggtatttagtaggattgtatttttttgtattttttaagtaaggtatggttatgtgattaattttagttaataatatgtaaatataataaaaagtgttatttttaggagggagtttttaaagttaatgtgagtttattatgtttttttttttttgttaaattgatgcgatgattgttgaagtatgtattaagatgaaattttttttagattaggtttttaaatgagtatattaagtagagtttcgtgaagttgaatatgtagtatgagtaaaatataaaatttatttttaagttattgaaattttaggattgtttgttatggtagtataatttaaattattttgatttatataaaaattggtttttagatatgggttagtgtaataataataataagtataataataataaaattaaataattatttagagggcgataattaagaatattgttattagaagttgaagggatggtgatttgtttggtaaatatattatttgtgataatgtagaaggtagattatgaatttgatgaattaaagaaaaggattgtaaaatagagagtgagtagtgtgtgttggtggttgttggatgtattttgaaagttattataagttatttaaagatgaatttagaaaaatttggtttgtttgtaattaggaatgaaatggaatagagaaaatttataaatttagggatttatatcgttagaagaggtaattgttttttagtttcgattggtaaaatataaaattaagaaatatttttagtaagaaaggatttggaagaaattaagttttgaagtaaggattaagttataaagtatgaatttattattaaaattttaggataggaggtcgaggaggacggattatttgaggtcgggagttcgagataagtttgattaatatggagaaattttgtcgtttttaaaaatataaaattagtcgggcgtggtggcgtatgtttgtaattttagttatttaggaggttgaggtaggagaatcgtttgaattcgggaggtagaggttgtagtgagtcgagattgtgttattgtattttaattagggtaataagagtgaaatttcgttttagaaaaaaaaaaaaaaggattaattaagattttatttagtatatatttttaattggataaaatggttttgggaaaaggaagaaaggtttaatttttttattaaaatttaataagtttaaagtgtttaaaattaagtgaagagtaagagagtgagacggtaaaagagagatagaggagttaataggtaggagagtaggaaagtaaagagatatggtaaattaaagaagtatgtttggaaaagaattttgtggttattgttatatggaatattttatattagatagataagaagtttatttatatatatttaagatttaatgttattttgtatttttttaatttttaaaagtttatttaaaagtatattttttaatgtttgttttagttgtggaaaaggaagatttttcgagggtaaatttaggagttatggaaaataatgggtagggtagtttggtgttgtgattggatgggtttttaaggttgttttttttgaataaagaatgagggaattttattaggggaaggagagtagattaaatatttggtgaatagaaagggagatagagtttttagtgttattttttaaatatttttggagagttttttgagatatttggtaggattatagtgatttaaagaggtatggttatgtgattgttttggttaatgatgtatgggtagaagtgatgtgtgttataagtggatgttttgatagttatgatgtttcgagttttttttttatagttaggatagttgtgaaaaggggtattaatacgaggttttttttagtttgagttttttagtgattataatgagtagagttattttgttaatttataacggttatgtagtagaaatgattaatttttattggaataagttattgatatgttagggttgtttgttagggtagtataatattgttttttttgatagaattgggagtgagagataaggttggagagagaaggagttggattgtgaaaagttttttttttaaggtataggaatcggaatttttttgattgtaaggaaaagttaatgaaggtttttaagtaggggcgttaatatgaatagatttgttatttttttggatgaaatatgttattttttaatataaggagaagattagtttattaaattatatgaggtagagaggaatatatagaattttaggtaaaagatatatatttatgtaaagttttaagttttgaaatttttaaatataagagttttgaacggagttatagttagaggattaggtaagaaaattttttttatgttataagcgttattttttttgtagataattaatattttataagaaagtttgttagagtagagaaaatataaaggaatgtaatatagatttgaggttaatttttagttgtttgtgtgattttaataaagatatttaatttttttgggtttatttttttatatgttaaatttggataataatatatgttttttaagatagttgtggggagaaaatagcgtatttaaattgtttaggagaatgtttggtagataataagtgtttaatatatgaaattgatttttattattgttattaaaaaatatttagaatattaattttttgaatataatagaaaatgatttagggtaatagatagaggagaatgttttttttttgaggaagtaattggattttgttattattgtatatttatttattttattttttttttagtttagtgtttggtttatagtaggtttttagttattttttgtagattagtgaaagttaggtgagtgttcggagtgaagaaaagttggtaggttttttattgatattagttgttgttggtttttgaatatttaaagtcgtaaatattttagggttgggggtaatgaatttaaggttgaattttaagtttagaagtagcgaagtttgaatttagaatttaggaatttaaattgttgtaggtttaattttaagttttagttttagatagaggtttgggaaagatttgatttttaattcggtttttttttttttttttttttcgatgttttttataggaaagtatatttggttttgttaaatcgtatttttatattttggtattttatttaggttttgcgaggatggaaattgcgaggtaggggagggaagcgggttgtttggttattatttttttagtgttgtaggcgattttgttatattaatttttggtagtttagtgaggtggacggtatcggttttatttgtagatgagggaaatgaagttcggaggagtttcgtgatttgtttgttttatattgtggtagtttggttacgaaagaattaggattttcgatttcgggattttttttattatatattttcgtttttaaggggtggggggcggggggagaataaaataatcgcggaaaaggaattatttatatgtgtttagcgttttttagaggttatttaggatatgcgtttattattcggtcgggagtgtagagatttgaagtttaggttttatttcgggtttcgagtattattgcgtgattttatgcgagtgttcgtcgttttttgggtttgttttttcggaagtaattcggcgcggatggagtgtgtgtgtgcgcgcgcgcgcgcgttatgttgtgcgtgttgtgttaagcgtgtgcgtgttgttcgggggcgggagggggagtagattaatatcggggtttttcgagtttcggatcgtttatacgtttgtttttatttggattttgttatttattaattgcgtttattataaaaattgttttttcgaggtaaagttgtgaattttcgcgtttttttttttacggtttcggaggatgaagtggggtgtaacggagatttagttgagcgtttagtttcgggtaatataaatttttcggtttttacgagtagttagacgatttcgcggatcgtcgtttttgaatttgatcgagatgtaaatttcggagtgtttttaacgtggggggtcgattttcgggagatcgtttttaaatttaagtttttttaggttcgtttttatttgggattttatagagttattttaagggcggtattttcgttttttcggaagtgcgggggggtggtagcgtatttggatttttagtttttagtttcgcgcggtggcggtcgtcggtggatgatttcgggttttataagtggggaaataataattatttttcgttcgtatttttggtttaaaataattggttaggttttttggtttttcgggtttttgtatttttcgtattttcgttcgtagtcgtgaatttgagtttttttttattagaggttgcgagcgttcgttcgttcgcggtagttatcgttattagatagttaaattttaagacgttagtttataatgtatcgggcgggtcgggaaaaacggttcggggaggggatcggggaagagagggtcgagaggcgtgcggtaggggggagggtaggagaaagaagggttcgattgtaggagggtagcggagtattattttatttcgtgagttttcgcgggtttagagaagaattttttagggtggagtttttatggtgacgggcgggttcgtttttttgagagcgacgcgagttaatgggaaggttttggggtgatattatgggttatttttaggggttgattggtagtagataagtgttgagttcgggttggataagggtttagagttgtattgagtgtggttgaagtagcgaggcgggagtggaggtgcgcggagttaggtagatagatagatatagttagttagttaggtcggtagtatagttcgaattgtaaattttattttttttttattttttttttaattgtttagagttagcgtttgtggttttcgggttggtgtttcgggagtgtttagagagtttggtttttagtcgttttcgggaggagagttttgttgtttaggcgttgttgatagcggcggaaagtagcggtatttacgcgttcgtcgggggaagtcggcgagcggttgtagtagtaaagaattttttcggttgggaggatcggagataagtggtagagtttcggagttaatttttgtaagttttttttgcgttttaggtttttttacggcggtaaagattagaaggcggcggagagttacgtaagagaagaaggacgtgcgtttagtttcgttcgtatcggttgttgaatttgggcgagcgcgagtcgcggttgtcgggcgttttttttttttagtagcggaggaggggataagtcgtcggagttcgggcggttaagattcgtcgtcggtcggttattgtagggttcgtattgattcgtttcgcggggagagtcgttgttttgggaagtgagttcgtttgcggatttcgaggaatcgttgcgtacgaagagcgtttagtgagtgatcgcgattttttaaagtcgggtagcgcgcgcgagtcgataagtaagagtgcgggaggtattttaattaattttgcgttttttggagcgagttggtgaggagggcgtagcggggacgatagttagcgggtgcgtgcgtttttagagaaattttttttgttaaaggtttcggggggcgcgggtgtttttcgtttgttatagttttgttgcggtttcgaaatttgtgcgcgtagtttaaattaattttacgtgaagtgacggattgttttatgattgtaaagatggaaacgattttttatgacgatgtttttaacgtttcgtttttttcgttcgagagcggattttatggttatagtaattttaagattttgaaatagagtatgattttgaatttggtcgatttagtggggagtttgaagtcgtattttcgcgttaagaattcggatttttttatttcgttcgacgtggggttgtttaagttggcgtcgttcgagttggagcgtttgataatttagtttagtaacgggtatattattattacgtcgatttttatttagtttttgtgttttaagaacgtgatagatgagtaggagggtttcgtcgagggtttcgtgcgcgttttggtcgaattgtatagttagaatacgttgtttagcgttacgtcggcggcgtagtcggttaacggggtaggtatggtggttttcgcggtagtttcggtggtagggggtagcggtagcggcggttttagcgttagtttgtatagcgagtcgtcggtttacgtaaattttagtaattttaatttaggcgcgttgagtagcggcggcggggcgtttttttacggcgcggtcggtttggtttttttcgcgtaattttagtagtagtagtagtcgtcgtattatttgttttagtagatgttcgtgtagtattcgcggttgtaggttttgaaggaggagttttagatagtgttcgagatgttcggcgagatatcgtttttgttttttatcgatatggagttttaggagcggattaaggcggagaggaagcgtatgaggaatcgtatcgttgtttttaagtgtcgaaaaaggaagttggagagaatcgttcggttggaggaaaaagtgaaaattttgaaagtttagaattcggagttggcgtttacggttaatatgtttagggaataggtggtatagtttaaatagaaagttatgaattacgttaatagtgggtgttaatttatgttaacgtagtagttgtaaatattttgaagagagatcgtcgggggttgaggggtaacgaagaaaaaaaataatatagagagatagatttgagaatttgataagttgcgacggagagaaaaaagaagtgttcgagaattaaagttaagggtatttaagttggattgggttgcgttttgacggcgtttttagtgtgtacgagtgggaaggatttggcgcgtttttttttggcgtggagttagggagcggtcgtttgcgggttgtttcgttttgcggacgggttgttttcgcgcgaacggaacgttggatttttcgttaatattgattaagaattgtatggatttaatattcgattttatttagtattaaaggggggagggggagggggttataaattgtaatagagattgtagattgtttttgtagtattttttaagaatataaagcggggggagggttggggaggggcggtaggagggaggtttgtgagagcgaggttgagtttatagatgaattttttttggtttgttttcgttaattgtgtatgtatatatatatattttttaatttgatgaaagttgattattgttaataaatagttttatgtttttgtaagttattttttgtttgtttgtttgggtattttgtttagtgttgtttgtaaataagagatttggagtattttgagtttattatttgtaataaagtatataatttttttatgttttgtttttgaaaattttagaaaggatatttaagaaaatataataaattattggaaagtatttttttaattttttttttgtattatttgtagatattagttatttaggtggagttgaaagagttaagaatgtcgattaaaattatttttagtgttttttattattaagtagtaaaaattgttttttattagattttagaaataaatgtatttgatgtatttgatgttatggttaggttatatttttttttttttagttatttatatggaattgtttattaaaggatagtgcgatgttttaggaggttggaggaaggggggttgtagtggagagggatagtttattgagaagttaaatattttaaagtttggattgtattaagtggtatgtgttgtgattatttataatgttagtagaaattttataataggtgtttatttttaaagtaggaattggtggtagattttataaaagatgtatttttttaatttggaattttttttttgataatttttagataaaaagatggtttttgtttatgaatatttataatagtatttttgttataataaatgtatttaaatattaataatagattttgaattgtttttttttattatttttttttttttaagttatatattgaagtttttatttttagttgttgaggttaatattgttgtaatttgaagtgatttgaaaattaagaagtaaagaatttaggaagagttaaattagaagttgtgatttgaatgaaatagttttttaattttattaattttttttttttttttttatttttatttttttttttattattttatttttaaataaatttttatgtttatggaaattaatagtttagtattttgggtttgtttgtagtttattttttaatttgtttttaaaataattaattttgtttaaatatagaataagttttaaaagatagtaatttaatattatggaaaagatttataagagaaaatatgaattagtattaatttaatgattatatgcgtaaattaaattttagttttggggaaatgggaaatttgaattttatttatagatataatttaggagattaataaggtagtgtttaataagggaataattttttgtttggttgttttttatattaagagttagtgtgattattaggtagtaaaagtaatttgatatttaggaatattttataaattattaattgagttagggttgtttgtttattagtagtgttttagtatttagtaggtttgggagtgttaatattttgtttgtggttgtaaatttaaatatataaagagtttttttttaggagtatatttaggagtggaagagattggataggtttgttagtttcggattttttgtaataatattttttgaataaagggttattgggagtagagtttagtttgttaaattgaatttgtcgatgttagtaattcggaaggtgagatgattttgattatatgtagaaatagtagagggataataaagtattttggggtggggttttgtggaagttaaataagagttaattagaaaaaataagtaggttggggaattaattatttgtaaagg

SEQ ID NO: 114 - DNA, 9254 bp, Artificial Sequence
  chemically treated genomic DNA (Homo sapiens)
tttttgtaggtaattaattttttagtttgtttattttttttagttggtttttgtttagtttttatagagttttattttaaaatgttttattgtttttttgttatttttatatatggttaaaattattttatttttcgggttgttgatatcggtaaatttagtttggtaaattgggttttgtttttagtaattttttgtttaagaagtgttattataaaggattcgaagttaataagtttgtttaattttttttatttttagatatatttttaaggagaaattttttgtgtatttggatttatagttataggtaggatattagtatttttagatttattgggtattagaatattgttaatgagtaaatagttttgatttaattagtggtttgtgaaatatttttggatattaaattgtttttgttgtttgataattatattggtttttggtatgaaaagtaattaagtaaaaaattgtttttttgttaagtattgttttgttgattttttaagttatatttgtaggtagaatttaagttttttatttttttagagttgaggtttgatttacgtatgtaattattgagttagtattagtttatgtttttttttgtgaattttttttatagtattagattattattttttgagatttattttatatttaaataaggttgattattttagaaataaattaagaaataagttatagatagatttaaaatgttaaattgttagtttttataggtataggggtttatttgggggtgaggtagtagagagagagatagagatggagaaagagggaaagaattaatgaaattgggagattgttttatttagattataatttttagtttgattttttttaaattttttgttttttaatttttaaattattttagattgtagtaatgttaattttagtaattaaaaataaaaattttagtatataatttgggaagaaaaaagtagtaaagggaagtaatttaagatttgttattggtatttgaatatatttattgtgataagaatgttgttataaatatttataagtaaaggttatttttttatttaggaattgttaaagagaagattttaaattggaaggatatattttttgtaaaatttgttattaatttttgttttgagaataagtatttattgtaaaatttttattaatattataaatggttatagtatatgttatttgatataatttaaattttgaaatgtttgattttttagtgggttgtttttttttattgtaatttttttttttttagttttttgaaatatcgtattattttttggtaagtaattttatatagatagttgggggaggaggagtataatttgattatagtattaggtatattaggtatatttatttttaaagtttaatagagaatagtttttattgtttaatagtaagaagtattgagagtgattttaatcgatatttttaatttttttaattttatttagatagttagtatttatagatgatgtagaaaagaggttaggggagtattttttaatagtttattgtatttttttaaatattttttttggaatttttagaaataaaatataaaaaaattatatattttattataaatggtaaatttagagtgttttaaattttttatttataaataatattgggtaggatatttaaataaataaataagaaataatttataaaggtatgaagttgtttattgatagtaattagtttttattaaattaaaaaatatatatatgtatatatatagttaacgaaggtaggttagaaagagtttatttgtaggtttagtttcgtttttataaattttttttttgtcgtttttttttaatttttttttcgttttgtgtttttaaggagtattatagaagtaatttatagtttttattgtagtttgtaatttttttttttttttttttttaatattgaatgagatcgaatgttaggtttatgtagtttttggttaatgttaacgaaaagtttaacgtttcgttcgcgcggggatagttcgttcgtaaagcggggtagttcgtaggcggtcgttttttggttttacgttaagggagggcgcgttaagttttttttattcgtgtatattgggggcgtcgttaggacgtaatttagtttaatttggatatttttggttttagttttcggatatttttttttttttttcgtcgtaatttgttaagtttttaagtttgtttttttgtgttatttttttttttcgttgttttttagttttcgacggtttttttttaaaatgtttgtaattgttgcgttagtatgagttggtatttattgttaacgtggtttatgattttttgtttaagttgtgttatttgttttttgagtatgttggtcgtggacgttagtttcgagttttgagtttttaaggtttttatttttttttttagtcgggcgattttttttagttttttttttcggtatttggaggtagcgatgcggttttttatgcgtttttttttcgttttgattcgtttttgggattttatgtcgatgggggataggggcggtgtttcgtcgggtatttcgggtattgtttgaggttttttttttagggtttgtagtcgcgggtgttgtacgggtatttgttggggtaggtggtgcggcggttgttgttgttgttggggttgcgcgggaaaggttaggtcggtcgcgtcgtaggagggcgtttcgtcgtcgttgtttagcgcgtttgggttgaagttgttgaggtttgcgtagatcggcggttcgttgtgtaggttggcgttgaagtcgtcgttgtcgttgttttttgttatcgaggttatcgcgggagttattatgtttgtttcgttgatcggttgcgtcgtcgacgtgacgttgggtagcgtgttttggttgtgtagttcggttagggcgcgtacgaagttttcggcgaagtttttttgtttatttgttacgtttttggggtataggaattgggtgggggtcggcgtggtggtgatgtgttcgttgttggattggattattaggcgttttagttcgggcgacgttagtttgagtagttttacgtcgggcgaggtgaggaggttcgagtttttggcgcggaggtgcggttttaggttttttattgggtcggttaggtttagggttatgttttgttttaggattttggggttattgtagttataaggttcgttttcggacgggaggaacgaggcgttgagggtatcgttatagaaggtcgtttttatttttgtagttatagaatagttcgttattttacgtgaggttagtttgggttgcgcgtataagtttcggggtcgtaatagggttgtggtaagcgggggatattcgcgtttttcggagtttttgatagggaaagtttttttaagagcgtacgtattcgttggttgtcgttttcgttgcgttttttttattagttcgttttagggagcgtagggttaattaagatgtttttcgtatttttatttgtcgattcgcgcgcgttattcggttttgaaaagtcgcggttatttattgagcgtttttcgtgcgtagcggtttttcggagttcgtaggcgaatttattttttagagtagcggtttttttcgcggagcggattagtgcggattttgtagtggtcggtcggcggcgggttttggtcgttcggatttcgacgatttgttttttttttcgttgttagggggagggggcgttcggtagtcgcggttcgcgttcgtttaagtttaataatcggtgcgagcgaagttgagcgtacgtttttttttttttgcgtggtttttcgtcgttttttggtttttatcgtcgtggagaagtttaagacgtaggaaaggtttgtaaaagttggtttcgggattttgttatttgttttcggtttttttagtcgggaaagttttttgttgttgtagtcgttcgtcgatttttttcggcgggcgcgtgggtatcgttgtttttcgtcgttgttaatagcgtttgggtagtagggtttttttttcgggggcggttggagattaggttttttggatattttcgaaatattagttcgggagttataggcgttagttttgggtagttagagagaaggtgaaaagaaaataagatttgtagttcggattatattgtcgatttggttggttggttgtgtttgtttgtttgtttgatttcgcgtatttttattttcgtttcgttgttttagttatatttagtgtaattttgagtttttatttagttcgagtttaatatttatttgttattagttaatttttaaaaatagtttatgatgttattttaaggtttttttattggttcgcgtcgtttttaggggggcgggttcgttcgttattatggagattttattttagaagatttttttttgggttcgcggaggtttacgggatgaggtaatgtttcgttgtttttttatagtcgggttttttttttttttatttttttttttgtcgtacgtttttcggttttttttttttcggtttttttttcgggtcgtttttttcggttcgttcggtgtattgtgggttgacgttttggggtttgattgtttagtgacggtggttgtcgcgagcgggcggacgttcgtaatttttgatggaggggggtttaagtttacggttgcggacggggatgcgggggatgtagggattcgggaggttagggaatttggttagttgttttgggttaggggtgcgggcgaggggtggttgttgtttttttatttgtggggttcgaagttatttatcggcggtcgttatcgcgcggggttggaggttgagaatttaagtacgttgttattttttcgtattttcgggggggcgggaatatcgtttttaaggtggttttgtgaagttttaggtgggggcgagtttaaggggatttaagtttaggggcggtttttcgagagtcggttttttacgttgagaatatttcgaagtttgtatttcggttaagtttaggagcgacggttcgcggggtcgtttggttgttcgtagaagtcgagagatttgtattgttcgaaattggacgtttagttgagttttcgttgtattttattttatttttcgggatcgtgggggaaagggcgcgggggtttatagttttgtttcggaggggtagtttttatagtgggcgtaattggtgggtaatagggtttagatgggaataagcgtgtaggcgattcgaaattcggggaatttcggtgttagtttattttttttttcgttttcggataatacgtatacgtttaatataatacgtataatataacgcgcgcgcgcgcgtatatatatattttattcgcgtcgagttgttttcgggaaaataagtttagaaggcggcggatattcgtataaagttacgtagtagtattcggagttcggggtagaatttggattttaaatttttgtattttcggtcgggtggtgggcgtatattttgggtagtttttaggaagcgttagatatatgtaagtggtttttttttcgcggttattttatttttttttcgttttttattttttagggacgaaagtgtgtggtggaaagaatttcgaagtcgggaattttggttttttcgtggttaggttattatagtgtgaagtaagtaaattacggaattttttcgagttttattttttttatttgtaggtggggtcggtgtcgtttattttattgggttgttaggagttagtgtgatagggtcgtttgtagtattagggaggtggtggttaaatagttcgttttttttttttgtttcgtagtttttattttcgtagagtttggataggatgttaggatataagagtgcgatttggtaggattaggtgtatttttttgtgagaagtatcgaggggaggaggggagggggaatcgggttagaagttagattttttttaagtttttgtttaaaattggggtttgaagttggatttgtagtagtttaagtttttaggttttaaatttagatttcgttgtttttgaatttggaatttagttttgggtttattgtttttagttttaaggtatttgcggttttgagtgtttagaaattaatagtagttggtattagtgggaaatttgttaatttttttttatttcgggtatttatttagtttttattgatttgtagagggtaattgaaagtttattgtgagttaggtattgagttggggagggggtggggtaggtaggtatatagtgatgataagatttagttgtttttttaaggagagaatatttttttttgtttgttgttttgaattattttttgttgtatttagggagttggtgttttaaatattttttaataatagtaataaaaattagttttatgtattaaatatttattatttgttaggtatttttttaagtaatttaaatacgttgttttttttttataattgttttgagagatatatattattatttagatttaatatgtgaggaaataggtttagagaggttaagtatttttgttgaggttatataggtagttggaaattgattttaggtttgtgttatatttttttgtattttttttattttggtaaatttttttgtggagtattagttatttgtagaggaaatagcgtttgtggtatagaagaaatttttttgtttgattttttgattgtaatttcgtttagagtttttgtatttagaaattttaagatttaggattttgtataaatatatattttttgtttaaggttttgtgtgtttttttttgttttatgtggtttagtaggttgattttttttttatgttgagaaatagtatattttatttaaaaaaataataaatttgtttatgttaacgtttttgtttggaagtttttattggtttttttttataattaggagagtttcgatttttatgttttggagaaggggttttttataatttaattttttttttttttagttttattttttatttttagttttgttaggaaaggtagtgttatgttgttttaataaataattttaatatattagtggtttattttagtgaaagttggttatttttgttatatgatcgttgtaggttggtagggtagttttgtttattgtagttattaaagggtttaggttgaaggaggtttcgtgttgatatttttttttatagttattttgattgtggggaaggaattcggaatattatggttgttagagtatttatttatggtatatattatttttgtttatatattattggttaaagtagttatatggttatgtttttttagattattataattttattaggtgttttaaagggttttttaggaatatttggggaataatattaaagattttgtttttttttttgtttattaaatgtttggtttatttttttttttttggtggaatttttttattttttatttaagggaaataattttaaagatttatttagttatagtattaagttgttttgtttattgttttttatgatttttggatttgttttcggagagttttttttttttatagttaaagtaggtattggaaaatatgtttttaaataagtttttaaaagttggggagatgtagagtgatattaagttttgaatatgtgtaggtaggttttttatttatttgatatgaggtgttttatgtgataatagttataaagtttttttttagatatatttttttggtttgttatatttttttgtttttttgtttttttgtttgttgatttttttgttttttttttgtcgttttatttttttgttttttatttgattttgagtattttgggtttattgggttttgatgggagagttagatttttttttttttttttagagttattttgtttagttgaaagtatatattgggtaagattttaattgatttttttttttttttttttgagacggagttttatttttgttgttttggttggagtgtaatggtatagtttcggtttattgtaatttttatttttcgggtttaagcgatttttttgttttagttttttgagtagttgggattataggtatgcgttattacgttcggttaattttgtatttttaggagcgataggatttttttatattggttaggtttgtttcgaattttcgattttaggtgattcgtttttttcggttttttattttgaggttttaatagtaggtttatattttgtgatttgatttttattttaaagtttagttttttttaggtttttttttgttaaaagtattttttgattttatattttattagtcgggattgggaaataattgttttttttaacgatgtaaatttttggatttataggttttttttattttattttatttttgattgtaaataggttaaatttttttgagtttatttttgaatagtttgtagtaatttttagaatgtatttaatagttattaatatatattatttattttttgttttataatttttttttttagtttattaggtttatgatttgttttttatattattataggtgatatgtttattaaatagattattatttttttagtttttgatagtagtgtttttagttatcgttttttaaatgattgtttagttttattgttgttatgtttattgttgttattatattaatttatatttaggagttaatttttatatgagttaggatggtttaggttatgttgttataataaataattttaaaattttagtggtttaaaaataaattttatattttgtttatattatatgtttaattttacggggttttgtttaatgtgtttatttagaaatttagtttgaagaaggttttattttgatatatgttttaataattatcgtattagtttggtaggggaaagaaagtatggtgaatttatattggttttaaaagtttttttttaggaatgatattttttattgtatttatatattattggttaaaattagttatatggttatgttttatttaaagggtgtaggaaagtgtaattttattaggtattcggaagttaaagagttggaaatgtatatttttatatattttaggttatgttgtgttagttatttaaaaattttattgggttataattatagaattgttttttatttatattgtatgtttatttatatggtttggttgtgtttttatttaaattttattttgaattgtaataatttttatatgttaaaggtggggttaggtggagataattgaattatggggttagtttttttta

SEQ ID NO: 115 - DNA, 9110 bp, Artificial Sequence
  chemically treated genomic DNA (Homo sapiens)
tgtagttttgattttttgggtttaagggatttttttgttttagttttttgtgtatttgagattataggtatttattattatatttggttaattatttaatttttaattttttttttttttgtagagattgggattttgttatgttgtttaggttgtttttaatttttggttttaaatgatttttttattttagttttttaaagtattgggatttaagatatgagttattgtattcggttaattttattttttttttttaatgtgattatttgaaaattttaaattatatatgtggtttatattatatttgtattgaatattgttgttttagagattttaatgtatgtattggattaagttatggggttaattattatatgttttagtaatttatggggttaattaatatatgtttttagtaatttgcggtagattttttttataaaattttgtagttaaatatatttaggaattgtaataggttgaataaagttatatagatttttttataagagattttttaggtttttaatatgtaaatgtttattataaattttaaatatttttattttaaaggaaattaaggtatagagggattaagtaatttgtttaaggttatttggttagtaagcgatgaagttaagatttaaattttagtaatttggtttttagaggaaggtttttagaaggaaatgaagagtttgagattttagtgaattgtattattgttttatataaagataaagttaagagtttagttagtggagtttgtattttaaattattttttaaattgtggagattaatttgtgtagatttatttgtatgttttttatttagtggttttataattaagagtttgtttttgaaaaagtggaaaggataagaaatataaatttaagttatgaaatagagatttaagatattttttagtttgttagggaaatttatgaattgataattagataataaaaaatattattaaatttaataatggtattatgattatatataaaaatgtttataatttttagagatgtataatgatatatataggggtgaaatggtagtatttgtagttttgttttcgttattttatagagaggtgtagagaagttaataaaaggataaggaggttaggtgcggtggtttacgtttgtaattttagtattttgggaggttgaggtaggtagattacgaggttaggagatcgagattattttggttaatacggtgaaatttcgtttttattaaaaatataaaaaattagttgggtatggtggcgggtatttgtagttttagttattcgggaggttgaggtagaagaatggcgtgaatttgggaggcggagtttgtagtgagtcgagatggtattattatattttagtttgggcgatagagtgagattttgttttaaaaaaaaaaaaaaaagaaagaaaaggataaggaagatagatgaagtaaatatattaattttgttaattgttgaatgtggggtgataggtagtgtatgatattattttttatatgtttatgtttgaaattttttattaaaaaatgttaagttgtatgttgaaaattattttttttttatattttttttaataattataatttttaatggttaggtagaaaattaaagttacggttttaaagtaggttattattattataatatttaaagtaaaaattgttttgaatttgtttttattaagatatattttatttttattatttttattatttattttattttgattttagttatagaattattttttgggttttatagggagtattaaattaataattaagaataagtaggttaggcgcggtggtttatatttataattttagtattttgggagatcgaggtagatagagtttaggagtttaagattagtttggggtgaaattttatttttattaaaaatataaaaattagttgggtatgtagttttgtgatttgggaagttgaggtggaagaattatttgaatttaggaggtggaggttgtaattgagttaagatggtattattgtattttaatttgtgtaatagagatttcgttttaaaaaaaaaaaaaatagaaagaaaattgatataattatattagttaataataattttggtttaataagtgtttattatttttttttatataagattttttttaatttttagaatggttggaattaattataaaagtagatttttagttaaattttagttattttattgggaaaagatagtttttttataattttttttttaagtaggaataatatattttaaatttaagagatgattgttttttttttttagtttttaaagagtttattaggaattaaattgttattatgtagatattttattttttaataaataataagtttttaaaaggtaaagagaggttttagatttattttttttgtatgtttattgtattttaagtaaaagtgcgaagggataaggaaaatattatttattgaggatgtatatgtgttaagttttatattattattttatttttatttttatttatttatttatttatttgagatagagtttttttttgttatttaggttggagtatagtggtgtgatttcggtttacggtaattttcgttttttaggtttaagtaatttttatgtttcggttttttaagtagttgagattataggtatgtgttattatgtttagttaattttttgtatttttagtagagatagggttttattatgttgtttaggttggttttgaatttttgagtttaggtaatcgtttattttggttttttaaagtgttaggattataggtgtgggggtttatattattattttaaataagtttttggataaggtgttatttttatattgtagaaacgaaggtttagtgatgtagtaatttgtttaaaagttacgtggttagaagatagtttagttagaaatttaagaatgatttaaaatagtatgtttgtaattattatgtatgtgtataattaatatttaataaattaaatagttaataattaatattaatagttaatatatttatggttgttaaaattatatagttaaatgaaaggaaaagttaatatttaattaataaatttatggttgttaaaattatatagttttatgaaggaaaaaaaattggaatttggggttaaagtttaagtttaatttttgattttttggttatataattttaaaatatgtaatatttttgatataattttattttttgaaagattgaagataattatatttattttatagagttgttaagattaaaaagtgaagtgagttgggtatggtggtttacgttaatattttgggaggttaaagtgggagaatcgtttgagtttaggagtttgagattagtttgggtaatatagtgggattttgtttttattaaaaaaaaatttttttttaattagttagttgtggtggtgtgtatttgtagttttagttatttaagaggttatattgtgaggattatttgagtttataggtggaggttgtagtgagtaaggattgtattattgttttttagtttggataattgagtaagattttgtttttaaaaaaaaaaaaaaagtgaaggtttttttggaagtgtaaagtattaataaatgtatgatattattattattttttaaattattatatattatttcggttagggtagggggtagttttttttatttttttattatttatttatttattttgagacggagttttatttttgttatttagattggagtgcgatggcgtgatttttgtttattgtaatttttgtttttcgggtttaagtgatttttttgttttatttttttaagtagttgggtttataggttttcgtttttatgttcggttattttttttttttttttgtatttttagtagagatggggtttcgttatgttggttaggttggtttcgaatttttggttttaagtgattcgttcgttttagttttttaaagtgttgggattataagcgtgagttattacggtcggtcgtgagggtggatttttttaaagttagaaatatttgttttttaaagttttaaaagtaaaattgatttttatggattttggtgtttaattgtagaggtggggaggtagtatgtgtgatggttatgattataggtttcggaattagatcgatattaggtttgtattttttagttttattatttttaagttgtgtgatttttggtatgttataatttttaattttgggatttttatttgtagaatgtgtaaaataatgtttttaatttgatattattgataggaatgagtaaatgtatgtaaatagttttgtatagtgttaagtgagtatttttttggagtttttagttagttattaataatttttcgagttattatggttattaataatgggatttgaagtattgcggatgttataaatgttttagtagatttagtgtttgattttaggaattttagacgaagggcgatacgtttttagttggagatggaggaagaaggggtagggtttagtagggttgagaggagagaatttcgaagaaaaatttttttttagttttgggaaaggaaaggaacgaaggattggttaaggagggtttttagagcgttcgtcgttcgtttcggttggggtggttgagtagtttatttatagttttaagttttgtggtatcgtttttcgagtgtatttggagattattttttttttttttttttttttttttttttttagtcgcggtcggggtaggtacgttagggtgggggttttcgggtttggttttttcgtcggattcggttcggtttttttcgttatttatcggtttcgtttcgtttcgttatttatatttcgagtagttatttttttagggtttttatttttttattttttttatttttttgttttgtcgcgggggcggaagtgacgaacgttttcggatattcgtaaaatgttttcgtcgacgtatagtagtgacgatatataaggtttcggggattgagtgggttttatatttttttttaggattttcgttggttttaggtttcggttaggcgtcggtatagagtttgatttaggtttcggcggtcggtggtagttttcgattagttttcgtagtcggagaggcggttaaggaaaggtgttatagtagagacgcgaaggagaggttttagaatcgtaagagaaattggttttattttgttagatggtaggagggagtttagattggggaaagagtattagattttaagttaagtttttgttgtttggtcgtttttttttttgtattttgggtttttttatatgtatagtgaggtattagtttgagtgattatagagttttttttagttttgatattaaattttgtatgatgacgtgtgtttggcgttatggggtggatgggtaaaattattgtttgtttttttgggttgaaaggtaaaatgatgatttggttagattgtggtgagtgggtgtttggataagaagaagtaggttttttacgagttttttagaaagttgagtaagattggaattatggagttagggtggtttatttatcgttatttttttttttattaagtattatttggtagtaagaataaattagtatttttatttaggaaaatttttagaaaattaagagataaggaaaatttttagaaaattaagaggtattaatgtaatttttattaaaatattagtgatattttttatagttatagaaaaaagattttaaaatttatatggaattataaaagagttagaatagttaaagttattttgagtaaaaagaataaaattggaagtattatattattcgattttagattatataatagagttatagtaattaaaatagtatggtattggtataaaaataggaatagaatagagaatttagaaataaatttatatgtttgtagtgaatttatttttagtaaaggtattaaaaatatatattggggaaaagatagtttttttaataaatgatattgggaaaattgatattcgtatgtagaagaatgaaattagatttattattttttattatatataaaaattaagttaaaatggattagagatttaaatttaagtttttaaattatgaaattattaaaaggaaatattggggaaattttttaggatattagagtgggtaaagattttttgagtaatattttataaatagaggtagttaaaataaaaatggataaatgggagtatattaagttaaaaagtttttgtatagtaaaggaaataattaataaagtggagagagaatttatagaatgggagaaaatatttgtaaattatttatttgataagggattaataattaaaatatataaggagtttaaataattttttaggaagtagtttaataattgattaagaattggataaaaattttgaatagatattttttaaagaagatataaaaatggtaaataggtttatgaaaaggtgtttaatattattgattattagagaaatgtaaattaaaattataataagatagtattttattttagttaaaatggttgttatttataagataggtaataataaatgttggtaaggatttggataaaatattgttggtgagaatgtaaattagtgtagttattatggagaatagttttggagattttttaagaaattaaaaatagagttattatatgatttagtagttttattgttgggtatttatttaaaagaaaggaaattagtatattaaagagatatttgtatttttatgtttatcgtagtattatttttagtagttaagatttggaagtaatttaagtgtttattaatagataatgaagaaaatgtggtatatatatataatggagtgttttttagttataaaaaaaaaaatgagattttgttatttgtaataatatggatggaattgaagattaagtggaattggatggaagtgaaataaggatggtatagaaagataaattttaaatgtttttattaatttgtaggagttaaaaattaaaatagttgaatttatggagatagtaagtagaaggatggtttattagaagttgggaagggttgtagagggtttgtgggggagtatggttaaagggtataaaaaaaatagagtgaatgaaaattagtatttggtagtataatagggtgattatagtaaataataatttaattgtatatttaaaaataacgaagtttagatgagagtatgttttggttataaaaatttttttaataaaaataattaaaagagtataattagagtgtttgtaatataaaggataaatgtttaaggtaatggatattttatttattttgaggtgtttattatgtattgtatatttgtattaaaatattttatgtattttataaatatatatatttattatttatttttaaaaattaaaaaaaaaaaatagtattttgggaggtcgaggtaggtggattatgaggttaggagtttgagattagtttggttaatatggtaaaatttcgtttttattaaaaatataaaaattagttaggtgtggtggcgtgcgtttatagttttagttattcgggaggttgaggtaaaagaatcgtttgaatttgggaggtagaggttgtagtgagttgcgattattttattgtattttagtttgggcgatagagcgagattttattttaaaaaaaaaagaaaagaaaaagaaaagaaaaaaagaaaagaaagatatatttattattttatgagatttgaaaaaggggtaaatttaggatagaggtaaaatgataggatatgaatgttttgtagttttgaatttttttacgttatataatgtttataaaagagagagatgtatattttgtagagtaagatagattgtattttagagtttaaataataaaattttaaagtagggagagattttagagatggtagataatttattttaaattaaagaaaaaaatttagaaagagaaagtgaaatgtttatagtggtataattaattagtggtagaattggggtttttgatagtatgtaaatagtaggtgttagtgtagtgtttttcgaaatatattatatatattattgttagtataagggtaaatattaaaaattttattttttatttttaaaataggaaaaatataaaaagtaaagattttatttttatatatttattaattggggaatgtgatattagatttttatttattgtattatattaaggtttttttttaacgtaattttaaagataaagttttaagtgtaaagggttattaaaaataatattaggttagatgtttataattttagtattttgggagattaaggtggaagaattgtttgagtttagaagttttaggttagtttgggtaatatggtaaaattttgtttttattaaaaatataaaaaaagttagttgggtatggtggtatgtatttgtggttttagttatttgggaggttgaggtgggaggatggtttgagtttaagaggtggaggttgtaatgagttgtgattatgtcgttgtattttagtttgggtaataagagtgaaattttattttaaataaataaataaagtttaaaaaaattaaataaatattattgtaggtggtgtatggttaaggttaaaattatggtgatggtatgtgattaaattttatttttttattttttatttttatttatttttttttttagttggagttttgttttgttatttaagttggagtgtagtggtatgatttcggtttattgtaatttttgttttttaggtttaagtgatttttttgttttagttttttaagtagttaggattataggtgtatgttattatatttagttaatttttgtatttttagtattttgtatttttagtagagacggggttttattatgttggttaggttggttttaaatttttgatttttagtgatttgtttgtttcggttttttaaagtgataggattatatgtatgaattattgtgttcggtttaattaaattttagaaaatagtgtttatagaattatttaaaagagtttagatgttatttttgtattgttttatgtggtttatattttggaattttaaatatagt

SEQ ID NO: 116 - DNA, 9110 bp, Artificial Sequence
  chemically treated genomic DNA (Homo sapiens)
attatgtttaaagttttaaaatataaattatatagaataatgtagaagtaatatttgaatttttttagatggttttatgaatattgttttttaaaatttagttaggtcgggtatagtggtttatgtatgtaattttattattttgggaggtcgagataggtagattattggaggttaggagtttgagattagtttggttaatatggtgaaatttcgtttttattaaaaatataaaatattaaaaatataaaaattagttgggtgtggtggtatgtatttgtgattttagttatttgggaggttaaagtaggagaattatttgaatttaggaggtagaggttgtaatgagtcgagattatgttattgtattttagtttgggtgatagagtaagattttaattaaaaaaaaaaataaataaaaataaaaaataaaaaaataaaatttagttatatattattattatggttttggttttaattatatattatttatagtaatatttatttaatttttttaaattttatttatttatttgagatggagttttatttttgttgtttaggttggagtgtagcggtatgattatagtttattgtaatttttattttttgggtttaagttatttttttattttagttttttaagtagttgggattataggtgtatgttattatgtttagttaattttttttgtatttttagtagaggtaaggttttgttatattgtttaggttggtttagaatttttgagtttaagtagtttttttattttggttttttaaagtgttggggttataggtatttggtttaatattatttttaatgattttttatatttaaaattttatttttaaaattacgttaaaaggaaattttgatataatatagtgaatagaaatttagtattatattttttaattagtaagtatgtaagaataaaatttttattttttatattttttttattttggaagtgaagaatgaaatttttaatgtttgtttttgtattagtagtggtatgtgtaatatatttcgagaaatattgtattaatatttattgtttatatattattaaaaattttagttttgttattaattagttgtgttattatggatattttattttttttttttgggtttttttttttaatttaggataagttatttattatttttaaaatttttttttgttttaaaattttgttatttaaattttaaagtataatttgttttgttttatagaatgtatattttttttttttatgaatattgtatggcgtagaggaatttagaattataaaatatttatgttttgttattttatttttgttttaaatttgttttttttttaagttttatgggatggtaggtatatttttttttttttttttttttttttttttttttttttttttttttgagatggagtttcgttttgtcgtttaggttggagtgtagtggagtgatcgtagtttattgtaatttttgttttttaggtttaagcgatttttttgttttagtttttcgagtagttgggattataggcgtacgttattatatttggttaatttttgtatttttagtagagacggggttttattatattggttaggttggttttaaatttttgattttatgatttatttgtttcggttttttaaagtgttgttttttttttttaatttttaagggtaaatagtaggtgtatatatttatggggtatatgagatattttgatataggtatataatgtataataagtattttagggtaaatgagatatttattgttttaagtatttattttttgtgttataaatattttaattatatttttttagttatttttattaaaaaaatttttatagttaggatatgtttttatttgaatttcgttatttttaaatgtataattaaattattatttattatagttattttgttgtgttattaaatattagtttttatttattttattttttttgtattttttaattatatttttttataaattttttgtaattttttttagtttttggtaaattatttttttatttgttatttttatgagtttaattgttttaatttttagtttttataaattagtgagaatatttgaagtttatttttttgtgttatttttattttatttttatttagttttatttgatttttagttttatttatgttgttataaataatagaattttatttttttttttatggttgaaaagtattttattgtgtgtatgtgttatattttttttattatttgttgatggatatttaggttgtttttaaattttggttattgagaatagtgttgcgataaatatgggagtgtagatatttttttgatatattgatttttttttttttgggtaaatatttaatagtgggattgttggattatatagtagttttatttttagttttttgaggaatttttaaaattgttttttatagtgattgtattaatttatatttttattaatagtgttttatttaaatttttgttagtatttgttattgtttgttttatggataatagttattttaattggggtgagatgttattttattgtagttttgatttgtatttttttgataattaatgatattgagtatttttttataaatttgtttgttatttttatgttttttttgagaaatgtttatttagagtttttatttaatttttaattaattattagattgttttttagagagttgtttgaattttttatatattttggttattaattttttgttagatgggtagtttgtaaatatttttttttattttgtgggttttttttttattttgttgattgttttttttgttgtgtagaagttttttaatttgatgtgtttttatttgtttatttttgttttggttgtttttgtttgtgaggtattatttaggaaatttttgtttattttaatgttttagagagtttttttaatatttttttttagtagttttatagtttgagggtttagatttaagtttttaatttattttgatttgatttttgtatatggtgggaggtagtgggtttggttttatttttttgtatacgggtattagtttttttagtattatttattgaagagattgttttttttttaatgtatgtttttggtatttttgttgaaaatgaatttattgtagatatatggatttgtttttgggttttttattttgtttttgtttttatgttagtgttatgttgttttggttattataattttgttgtataatttgaagtcgggtaatgtgatgtttttagttttgttttttttgtttaggatagttttggttattttggtttttttgtggttttatataaattttaggattttttttttatgattgtgaagaatgttattggtattttgatggaggttgtattgatattttttaattttttaagggttttttttattttttaattttttaagggtttttttaaataagagtattagtttatttttgttgttaggtgatgtttggtaaagaaagaaatggcggtggatggattattttaattttatgattttaattttatttagttttttaagagattcgtaaggaatttgtttttttttatttagatatttatttattatagtttaattaaattattattttgttttttaatttagagggatagatagtaattttatttatttattttataacgttaaatatacgttattatgtagaatttggtgttagaattggaagggattttatgattatttaggttaatattttattgtatatatgagaaaatttagagtatagaaaaagaagcgattaagtagtaggggtttgatttggagtttagtgttttttttttagtttaggtttttttttgttatttaataaaatgaagttaattttttttacggttttagggtttttttttcgcgtttttgttgtggtatttttttttagtcgttttttcgattgcgagagttgatcgagagttgttatcggtcgtcgaagtttggattaggttttgtgtcgacgtttgatcggaatttgaagttagcggaaattttgagagaaagtgtgaaatttatttagttttcgaaattttgtgtgtcgttattgttgtgcgtcggcgggagtattttgcgagtgttcgggggcgttcgttattttcgttttcgcggtaaagtagggaggtaggaggagtagagaggtggggattttggggaggtggttgttcggagtataggtgacggggcgagacggggtcggtaggtggcgggaggggtcgggtcggattcggcgggagggttaggttcggaggtttttattttggcgtgtttgtttcggtcgcggttgaggaggaggaggaggaggaggaggaggaggatgatttttagatatattcggaaggcggtgttatagagtttggagttgtgagtggattgtttagttattttagtcggggcgggcggcgggcgttttggggattttttttgattagtttttcgtttttttttttttttagggttggggagagattttttttcggaattttttttttttagttttgttggattttgttttttttttttttatttttagttgagggcgtgtcgtttttcgtttgaaatttttgaaattaagtattgggtttgttgaagtatttgtagtattcgtagtgttttaggttttattgttaatggttatggtagttcgagaagttattaatagttaattgagggttttaggaaagtgtttatttgatattgtgtaaagttatttatatatatttgtttatttttattaatgatattagattgggaatattattttgtatattttatagataaagattttagaattaaagattgtagtatgttaaagattatatagtttgaaggtggtagagttgagaggtataaatttgatgtcgatttgatttcgaagtttgtggttataattattatatatattgtttttttatttttgtaattaagtattagaatttataaagattagttttgtttttgagattttaaagagtaaatatttttggttttaaaaagatttatttttacggtcggtcgtggtggtttacgtttgtaattttagtattttgggaggttgaggcgggcggattatttgaggttaggagttcgagattagtttggttaatatggcgaaattttatttttattaaaaatgtaaaaaaaaaaaaaaaatggtcgggtatggaggcgggggtttgtaaatttagttatttgggaggatgaggtaggagaattatttgaattcgggaggtagaggttgtagtgagtagaggttacgttatcgtattttagtttgggtgataagagtgaaatttcgttttaaaataaataaataaataataaaaaaataaaaagagttgttttttattttgatcgaagtggtgtataataatttagaaagtaataatagtgttatatatttattaatgttttatatttttaaaagggtttttattttttttttttttttggagatagggttttgtttagttgtttaggttggagggtagtagtgtaatttttgtttattgtagtttttatttatgggtttaggtgatttttataatgtagttttttgagtagttgagattataggtgtatattattataattggttaattaaaaaaaaatttttttttggtagagatagggttttattatgttgtttaggttggttttaaatttttggatttaagcggtttttttattttggttttttaaagtgttggcgtgagttattatgtttagtttattttattttttgattttaataattttgtaaagtgggtatgattatttttagttttttagaagatgaaattatattagaaatgttatatattttaagattatatagttaaaaagttaggagttgagtttgggttttaattttaaattttaatttttttttttttatggagttatataattttagtaattataaatttattaattaaatattaatttttttttttatttagttatgtaattttagtaattataaatatattaattattaatattaattattaattatttaatttattaaatattaattatgtatatatatgataattgtaagtatgttattttgaattatttttgggtttttggttaggttgttttttagttacgtgatttttaggtaaattattatattattgagttttcgtttttgtaatataggagtaatattttatttaaaagtttatttaaaatgatggtgtggatttttatatttgtaattttagtattttgggaggttaaggtgggcgattgtttgagtttaggagtttaaaattagtttgggtaatatggtgaaattttgtttttattaaaaatgtaaaaaattagttgggtatggtggtatatgtttgtaattttagttatttgggaggtcgaggtatgagaattgtttgaatttgggaggcggaggttgtcgtgagtcgagattatattattgtattttagtttgggtgatagaggaagattttgttttaaataaataaataaataaataaaaataagaataaagtgatggtgtggagtttgatatatatatatttttaataaatggtattttttttgttttttcgtatttttatttgggatataataggtatataaagaaaataagtttaaaatttttttttgttttttagaagtttattatttattaaggaataagatatttatatggtagtagtttagtttttagtaaattttttgggaattaggaagaagaaatagttattttttagatttgggatgtgttgtttttatttaaaaaaaaaattgtgaggaaattgtttttttttaataaagtgattgaggtttagttaaaaatttgtttttatgattaattttaattattttgaaagttaaaaaaaattttgtatggaaaaaaatgataggtatttgttgggttagaattattattaattagtatagttgtattagttttttttttattttttttttttttgagacggagtttttgttgtataggttggagtgtagtggtgttattttggtttagttgtaatttttattttttaggtttaagtgatttttttattttagttttttaagttataggattatatgtttagttaatttttgtatttttagtagagatggggttttattttaggttggttttgaatttttggattttgtttgtttcggttttttaaagtgttgggattatagatgtgagttatcgcgtttggtttatttgtttttgattgttgatttgatattttttataaggtttaaaagatgattttgtagttggagttaggatgaagtgaataatgaagataatgaagataaaatgtattttaatgggagtaaatttaaagtaatttttattttagatgttataataatgataatttgttttgaagtcgtaattttagttttttatttagttattaaaaattataattgttgaaaagagtatgggaaaggaatgatttttaatatatagtttaatattttttaatgaaaaattttaaatataaatatatagagaatagtattatgtattatttgttattttatatttaatagttaataaagttaatatatttgttttatttattttttttattttttttttttttttttttttttttttgagatagagttttattttgtcgtttaggttggagtgtagtagtgttatttcggtttattgtaagtttcgttttttaggtttacgttatttttttgttttagtttttcgagtagttgggattataggtgttcgttattatgtttagttaattttttgtatttttagtagagacggggttttatcgtgttaattaggatggtttcgattttttgatttcgtgatttgtttgttttagttttttaaagtgttgggattataggcgtgagttatcgtatttggtttttttatttttttattaatttttttgtatttttttgtgaaataacgaaagtaaaattgtagatattgttattttatttttatatatgttattatgtatttttaaaaattatggatatttttgtatgtagttatagtgttattattaaatttaatgatattttttgttatttaattgttaatttatagatttttttggtagattaaaaaatgttttaagtttttattttatagtttgaatttgtattttttattttttttatttttttaaagataagtttttggttgtaggattattgaatgagagatatataggtaagtttgtataaattgatttttataatttgagaaataatttaaagtgtaagttttattgattgggtttttagttttatttttatatagaataatggtataatttattaaaattttaaattttttatttttttttagaggtttttttttgagagttagattattaggatttgaattttggttttatcgtttattaattaaatgattttaagtaggttatttaatttttttgtgttttagttttttttgaaatgagagtatttgagatttatgataaatatttgtatattaaagatttggaagattttttgtaaagaaatttgtgtaattttgtttaatttattatagtttttgaatgtatttgattatagagttttgtgaggaaagtttatcgtagattattaggaatatatattgattgattttatagattattggaatatataatgattgattttatagtttaatttagtgtatatattggagtttttagagtagtaatatttaatataaatatgatataagttatatatgtaatttaaaatttttaggtggttatattaaaaaagaaaggtgaaattggtcgagtgtagtggtttatgttttgaattttagtattttgggaggttgaggtaggaggattatttgaggttaggagttagagatagtttgagtaatataataagattttaatttttataaaaaaaaaaaaaattaaagattaaataattagttaagtgtggtggtgagtatttgtagttttagatatataggaggttgagatagaagaattttttgagtttaggaggttaaggttgta

SEQ ID NO: 117 - DNA, 8244 bp, Artificial Sequence
  chemically treated genomic DNA (Homo sapiens)
ttttaaatatatttattatttcgacgggttataataatttttttggacgttaattttcggggacgttaaaatatattagtttcggcgggtttttttagatttatattatgtggtttggggttttagatgtgtttttttttaggttttggatagttttatatattttttttaggttttatagatttataggttattaattcgggttttttaattttaaagacgaagtttttggttcgtggtggtcgcgttgattaatttgtttggttttttaggatgtggatagtgttttttttatatttaggtattgtttttaaaataagtggaattttttcgtataattttgaatattaattttagggttttttaagtttattgtttttcgtatacgttcgttttatttcgcgtttttttattttattttcgcgttttttttcgtttattttagtatgggatatttgttgttgggtttcgtaaatttatttatattaatttgggttttttaaattttatacgttgaattttaagttttttatgatatttagtagggttggaaggttggaatttttagagtatgaaaattgttttttatatttttttttaaattcggttattatatttagagtatgttgaatttttttttgaattataaacgatttgttttttgattgtttgagttttataaaatggagggatttttttagtgattttttaaagttattgagaatgttgtgggtgtgtgagttataaagttttggggtattaacgtttatggttttatatgttgtttggttacgaattaggttttttaagatgtagatagtgttatttaggtttttggagtatattgagtagttattaggaggtgtttaagtgtgatttaggattttttaggtttttttaaattatatagggtttttcgggtttttttgggttatattaagtataaaaggattttttgggtagagtttatttttatttttgttatgttaggtgttgttaacggttttagtttttaaatatttcgagtattttttttgtattataatatattgattattaaataattttttgggttttaggagttttataataagaattttgtttttttaaaatttaggtattggtttgaaattttaacggttaggattatattggattttttttttggttttttatatttggatgttttggacgttgttttttaggttttttaggaatatttagtattgttttcggattataggatagtattgattttttgggttttaaataatttattgagttattttaaagttaagtaatattttttttaaatatattgtatattttttattataaaatttgaaaatttttaagttttaagatttaggaattttgaattttttttttttaaaatgtatatatggatttttaagttttttaaggattttgagtaatttttttagatttttagatttaaaaacgatttttttggagtttttaaattgcggtattgttttttagttttttaaagtaaattgagatttttttttttttataaaataattgaggttttttttttttttaatattgatttatgagttttttgattttatggtttttgttttgggtttttttatatttagaaaatgttttatggatttttaaagtatattaaaaaatgtttttgggttttaagaaattttaggtatggaaaaatttgcgatttataagttttttagttattaattaggtttttagaaatttagatattaaatttttattgggtaatttttatgtgttttaaaaatttgaaatgtgttttattggggtttttttaaatgtagacgatatttaggaaaatatatagttttttttttatttattaaaaataagttaatggaaattatttaaaaattagtatagaaaaataatattgattttatatttttttattttttattttgttttttttaaatgtattgattatattttaggtttttttaaaatttagatagtgtttttttttatttttgaagggtgttaaaatttttttttgaagttatagtaattatgaaggttatttttttttcggttgttgttagcgtttaggttattaatttatatttttaagatgtgaaaattaattttagtttttttttaatatattaagaatgtgtttggatttttaaaatgtgttttttgtttttatttgttaattttacgtaatatggttttacggtaaaatttttaattttatatggagaattttttttaattatttttttttataaattggttttttaagttagttggtttttatttgagatttttttttttatgtttttaattgtatggagtaattttttttattttttaaatttgtaatttatttttttggagtttcgagtttagttattaattacggtttttatattaacggagttttcggggtttttttttttaggatatttattcgttaagttcgtaaggtagaaagaattttgttttgcgttttttaaaatttgggtattgttttcggttcgtcggttatttattgtagtttttttaatttcgcgtatagcgggtattggtttcgggtttttttgttttttacgaagtttttagagtaattcggatttgggaaatttttttttagcgttgtttaaatatatttgggtcggtcgcgcgtttttaggacgtggatagggagggttttttcgtgtttaggaaagcgatcgggtattgtttttagttttttttaaatttgggtattgttttcgggttttttaacggattgggcgttgttttcggatattgaggattggtttcggggtttcgtttatttttagtagcgtttatcgtttgttatagagcgttcgatcgttcgttgtttgagtttttggtgcgttcgcggacgtagtttttagtttcgcggtgagtttttcgtcgcgtcgatttttttcgtttttgcgtttttgatcggttttcggttcgtatttgttgttgtttcgtcggtgttggcgttcgttttcggttgtcgtcggggaggtcggcgtggggcgcgggatacggttgcggatttgcggttggcggttgcgttcgtttttgttgggcgtttcgaaattcgcgttattttcgtttgtttattgtaaagattttattcgtggggaaagcggttggagggttttaaagtggggcgggtagggggttggggcgagggacgcggaggagaggcgttttcgtcgggcggtaaagtgtttttagttcgcgggtttaggatttcgtcgggaggcgcgcgcggagcgcgggcgaagtgattgatggcggagcgaggggggcgaggggggttaggggggcgcgagatttcgtcggcggttttttttttttggttaggtttaggcggcggggggttggcggggtgcgggattttgtgcgtggtttttgatttggtaaaaattatagtgtttttttatatcgtttaaattttttaggagatggtttttttagatttttaaattatcgtggtggttttcgagatcgaattcgcgtttatgtaagtttaacgtattgaggacggggtaattattatttagatattttgggtgggtcgtaaaggcgagttatttagacgtatttcggtgagttcggttatgtaggtaggatttgagttgtgtttttcgttttgatttttttttttttggcggtcggagttttcgtaggttttaagtttggtttagattcggttcggcgtagtcggtttttcgcgcgtttcgtatttggcgggggtttcggggtttcggcgcggtatcggggggcgttcgggatttggttgaggttttaagcgtcgcgtggtcggttttttttgttggggtaggtggcggttgcgcgtttcgttcgagtttaggggtttttttagtcgtaataattagtaaggatttttcgatttagttttaagttatttgtatttgtatttagacggggcgtattcgtagtgtagttttttggtggggcgttgggagttcgtttgtttttgtttgttcggagattttagtttacgagtataggtcgttcgggtattttagaaattcgggatggggtttttgaattttttagaacgggtatttagtatggttttggcgttttgcggttttttgttttttatttagtttcgttttcgcgtattttttagtttttgcgatcgtcgttttttttttcggggttttagggtttttagttcgtatttttcgtttcgtttttggttcgggttgcgggggcgggtcgggggcggggcgagggtttcgcgggcgtttattggcgcgggcgcgaggttagcgaggttcgcgcgggttttgggtcgcgggttggcgcgattataagagtcgggcgtgggcgttcgtagttcgtttgtttttcggcggagttgcgtgaggttcggtcggtttcggtttttttttttcggtcgttttcgttttttggtttacgtttgttcgcgttttgtttattagcgtttttatcgggtaaggcggtttcgcgtcgacgtcgttcgttgtttcgttgttgattttcgtttcgggcgtcgttcgcggggtcgcgtttcgtcgggtttgcggatttttcgtcgttttttttttatttattttaattttttttattttcgtttcgttcgaggaggcggtttttttcgtaggtagttcggttcgtaggtcgtcggcgttgttatttttttcgcgttttttttttagtttttttttcggcgcgtagtttcgggtcgttttttttttcgcgttgcgtttcggagcggtttcggtgtcgttatcgtttgtttttttttcgaggttcgggttcgcgacggtagagggtttcgtcggtttaaatcgagttgggcgttcgcggttcgggtgtagtttttatttcgttttttagttatcgtttttttcggtttttcgacgtggcgttttttttttcgtttttttgtgtttttcgcgttttttttggcgtttggtttcggttttcgttttttttttcgtaatttttttttcgttttttttcgttttttttagtttttagttttcgatttttttttttttttacgttcgttttttcgttttcgtcgaattaaagtggattaattatacgttttttgttttttttcgtgttgttttttttcgttgtgcgtttgttcgtttttcgttgttttttttttttttcgtttttttttcggttttttttttttacgtttattttgttttttttattatttttgtttttttttatttttgatataatagttgattttatttttcgatattttttttttttcgaaaagtataatatttggttcgttttagttcgaagatagttcgttttttttggataattagacgaattttttttttttttttaaaaaaaagttattttttcgttttgtttcgtcgtatattcggttttcgcgattcggttagagcggcgttggtagaggagtgttcggtaggagggttaacgttcgttgttcggtttgcgatacgtagtagggaggtgggcggtagcgtcgtcggtttttaggtaagcggcgtgtgcgggtcgggtcggggtcggggttggggcggcgcgggtttgcgtcggacgttcggtttttttttcgttcgttttcggttcggggtttgcggggttcggcggggcggttgagttcgggggggaggaggaggaggaggaggaggacggacggttgcgggtttcgttttttgcgcggagtttcgcgtttattttggcggcggagttgggggtggggtgggggcgtcgggaagggtcgagggaggtgtgaggtgtttgtaggggcgatttttcggtcggtttgtgggtgtagggggtgtcgttttatatgtgtgattcgtgttttgcgggttttggttttcggggtgttgggtaacgaggaggggcgcggagtcgtagaagtttattttggtatgttgacgcggtgttagcgagatcgcgagaggaagacgggggtgggcggggttaggatggagaggggtcgagttggtaggagttatggtagacgttatattcgcgatattttttttatattttttttggttttgttcgtaatatttttaaataggagtttcgggagagggggagaggggttgttggtttgaggttaagaagggtagagttttcgattcggagagaggtcgcggtttttgtttagtgggtagcgtggaagtttttatataaggaggtgggaaggagattttttttttttttattgttttgtgtagagatgagtcgggggtgtaggatgggagtttatggtatttcgttacgggatggtttagggttttcggttgggggtgtaggagagaagagattggttgggaggagggagagggcgggagtaaaggcgcgggggagtggttagtagggagaggggtggggggtagggtggagttcgggttgggaggagtcggtttatatataaaagttgaggtattgattagtttgtaaattggatattagttttttttgtgaaagagatttttagtttttttttttttttttttttttttttttttttgttttagcgagttttttgttgagttgtaggtaattagggttgtggagtgaggattttcgttgttattttattttagtttgaggtagggtagtagggggtacggtttacgtttgggtttcgggttttgtagtcgttagttcgttgtttttcggatagtattttttttttttttttttttttgtttttgtttttatttggtttttgtttttttatttgttttttttttttttgtttttttttttcggttttttttttgtttagtttagggttttttttgggtttttatttgtttcgtatcgttgtatgttttttgttttgttttttgtcggttttttgattcggatttttaagtttagagtggtggggtttgttgcggaagcgcggcgagggttagagtggttagttggcggagtgtgtttttagaatttggaagggggtggtagagggggcggtgagaggattggttagggtttagttaaggagatgattaaggaggtttttagattttcggcgtagttgtttattagtttttagagagggtatgtaaagttgtgtttttgttttattgtttgtttagtcgtttatataatttattgtattaaaaatttttttgggtttgcggagcgaaggttggggttgttcgtttggagggttttattttttgtaggggtagggttaatttgttgtggtggttttcggttttttattttcgagtgggttaattcggttttgtggttttgtagtttgtggagggggtgtgttttaagattggtttttttttttagattgtagtttggggaatttggtgtcggattttttaggtggtttgagttggtttttttagtttttacggggagagtttggtagcgtaaatagggagatgttttggaggtttttggttttattggttcgatttgaggtttggaaaggaggttttgggcgtgtgtgtgtgtgtttgggggtatttaaggtagattggagttggagaattgggtgattgggaaaataaggtttttagagtatgggtggcgtggttgtgttaattattggagtttttgatttaggtttggtttagttgtagattggaaaggtggaaaagttagggggaggggcggggttggtttagtaggattggtttgttgttttgagggcgatggtttttttggattttttttgtttagttgggggttgtggggaggaagggattggtttttttggatgtatatgttttgtaggggtggggttgtttgttattttggttggcgttggaggtttgagaagtggcgatgtgacgttgggttggttttgtttttatggtgttataggacggaggttaggtcgggtgtttagtttgggtttttgtagttgtggatgtcgttgagtttttgtaataatgatcgtggagatggttatttttcgtgtaaaattattagtgttttttgtaaatggaaggaattgggttttttttgtgtgtttttggacgttttattttgtatatggttttgcgtttttatttcggtattatgatttgtgtgttatttttgtaataaaaataatgtttataggaaagtcgtgtttttaatttttaattgaatttgtaggttggtaaatttggtttgggaggggtatttttggtttggggtttggtttggttgtttcgtttacgttatttttttttcgtttttaga

SEQ ID NO: 118 - DNA, 8244 bp, Artificial Sequence
  chemically treated genomic DNA (Homo sapiens)
tttgggggcgggagagaagtggcgtgagcggggtagttaggttaagttttaggttagaggtgttttttttaaattaaatttgttaatttataaatttagttgaaaattgaaagtacggtttttttataaatattatttttattataaaagtaatatataggttataatgtcgaggtgagggcgtagggttatgtgtagaatgaagcgtttagaagtatatagaaaaggtttagttttttttatttgtaagaagtattagtaattttatacgaggggtgattatttttacggttattattgtaggagtttagcggtatttatagttgtaggggtttaggttggatattcgatttggttttcgttttatgatattatgggggtagggttagtttagcgttatatcgttattttttaggtttttagcgttagttaagatggtagatagttttatttttatagagtatgtgtatttaggaggattagtttttttttttttataatttttagttgagtagggggggtttaggaggattatcgtttttaaagtagtaggttagttttgttgggttagtttcgtttttttttttggtttttttatttttttagtttgtagttgagttaggtttgggttaaggattttaatggttaatataattacgttatttatgttttagaaattttgtttttttagttatttagttttttaattttagtttgttttgggtatttttaaatatatatatatacgtttagagttttttttttaggttttaaatcgaattagtaaggttaggggtttttagaatatttttttatttgcgttattaaatttttttcgtgggagttggagagattagtttaggttatttgggaagttcgatattaggttttttagattataatttggaaggggaggttagttttaggatatattttttttataggttgtagggttatagggtcgggttaatttattcgggggtgggaggtcgggagttattatagtaagttggttttgtttttgtagaaggtggaattttttaggcgggtagttttagttttcgtttcgtagatttaggggagtttttgatgtaataaattatgtgagcgattgagtaggtagtgggatagaagtataattttgtatgttttttttaaagattagtgggtagttgcgtcgaggatttgaaagtttttttggttatttttttgattggattttggttagtttttttatcgttttttttgttatttttttttaaattttaagagtatatttcgttagttggttattttagttttcgtcgcgttttcgtaataagttttattattttgaatttggaggttcgggttaggggatcggtagaaagtaggataggaagtatgtagcggtgcggagtaggtgagggtttaggaaaagttttgagttgggtaaggagggggtcgaagggaaggaatagaaagggaaggagtaggtgagggagtagagattaggtgggggtaggggtagaggaaaagaggggaggggggtgttgttcgagaggtagcgggttggcggttgtagggttcgaggtttaggcgtgggtcgtgttttttgttgttttgttttaggttggagtgggatggtagcgggggtttttattttatagttttggttatttatagtttagtagaaggttcgttggggtaggaggaggaggaggaagaggaggaggaggaagttggaagttttttttataggagaagttaatgtttagtttgtaggttggttagtgttttagtttttatgtgtgagtcgattttttttagttcgggttttattttattttttatttttttttttgttgattattttttcgcgtttttgttttcgttttttttttttttttagttagtttttttttttttgtatttttaatcgggagttttggattatttcgtagcgaagtgttatgggtttttattttgtattttcggtttatttttgtatagggtagtgaagggggggggggttttttttttatttttttgtatggaaatttttacgttgtttattgggtaggggtcgcggttttttttcgggtcgaaggttttgttttttttagttttagattagtagtttttttttttttttttcgggatttttgtttggaaatgttgcggatagagttagagggggtgtgggggagatgtcgcgaatgtggcgtttgttatgatttttgttaattcggtttttttttattttggtttcgtttattttcgtttttttttcgcggtttcgttggtatcgcgttaatatattagggtgggtttttgcggtttcgcgttttttttcgttatttagtatttcggaggttagggttcgtaaggtacgaattatatatgtgaggcggtattttttgtatttatagatcgatcgggaagtcgtttttgtagatattttatatttttttcggtttttttcgacgtttttattttatttttagtttcgtcgttagggtgagcgcggggtttcgcgtagggaacgggattcgtagtcgttcgttttttttttttttttttttttttttttcgggtttagtcgtttcgtcgagtttcgtaggtttcgggtcgggagcgggcggaggaagggtcgggcgttcggcgtaagttcgcgtcgttttagtttcggtttcggttcggttcgtatacgtcgtttatttggaagtcggcgacgttgtcgtttatttttttgttgcgtgtcgtaaatcgaatagcgggcgttggtttttttgtcggatatttttttgttagcgtcgttttggtcgagtcgcgggggtcgaatgtgcgacggggtagagcggggggatggtttttttttggggggggggggagaattcgtttgattgtttagggaggacgggttgttttcgggttggggcgggttagatgttgtatttttcgggggggaaaaggtatcgggaaatgaggttagttgttgtattaaggatagaggggggtagagatagtgggagagatagagtgaacgtgaaaggggggggtcgaagagagggcgagggggagagaggatagcgagaggcgggtaggcgtatagcgggagagaatagtacggagagaaatagaaagcgtgtaattaatttattttggttcggcgaaggcgagagggcgggcgtgagggggggagggagtcggaggttaggagttgggggggacgggagggagcgaagggaaggttgcgggagaaagagcgggggtcggggttagacgttaagaggggcgcggggagtatagagaagcggagggaagggcgttacgtcgaggggtcgggggaggcggtgattggggggcggagtggaggttgtattcggatcgcgggcgtttagttcggtttgggtcgacggagttttttgtcgtcgcgagttcgggtttcgggagggggataggcggtggcggtatcggggtcgtttcgggacgtagcgcggaaaggggagcggttcgaggttgcgcgtcggggggagggttggagggggagcgcggggggggtgataacgtcggcggtttgcgagtcggattgtttgcggggggaatcgttttttcgggcgaagcggggatggggggagttgaggtagatgaagaggaggcggcggggaattcgtaggttcggcggagcgcgatttcgcggacggcgttcgggacgggagttagtagcgaggtagcgggcggcgtcgacgcggggtcgttttgttcgatggaggcgttggtgggtagagcgcgggtaggcgtgggttaggaggcgggggcggtcggaaggggggggtcggggtcggtcgggttttacgtagtttcgtcggagagtaggcgaattgcgggcgtttacgttcggtttttatagtcgcgttagttcgcggtttagggttcgcgcgggtttcgttggtttcgcgttcgcgttaatgggcgttcgcggagttttcgtttcgttttcggttcgttttcgtaattcgagttaagagcggggcggggggtgcgggttgggggttttggggtttcgggggggggggcggcggtcgtaggggttggggggtgcgcgggggcgaggttgggtggggggtagggagtcgtagagcgttaaggttatgttgaatgttcgttttagagaatttaggggttttatttcgggtttttggggtgttcgggcggtttgtgttcgtgagttggggttttcgggtaggtaggggtaggcgggtttttagcgttttattaggaggttgtattgcgggtgcgtttcgtttgagtgtagatgtaggtggtttggggttgagtcggggggtttttgttggttgttgcggttgagggggtttttgggttcgggcggggcgcgtagtcgttatttgttttagtagaaggagtcggttacgcggcgtttggagttttagttagatttcgagcgtttttcggtgtcgcgtcggagtttcggagttttcgttaggtgcgggacgcgcggaaggtcggttgcgtcgggtcgaatttgggttaggtttggagtttacggaggtttcggtcgttagaggagagaggattagggcgggaaatatagtttaaattttatttgtatggtcgagtttatcggggtgcgtttaagtagttcgtttttgcggtttatttaaaatatttggataatggttatttcgtttttagtgcgttggatttgtatagacgcgagttcggtttcgggggttattacgataatttgggggtttggggaaattattttttggagagtttgaacgatgtaagaaagtattgtgatttttattaagttaaaaattacgtataaaatttcgtatttcgttagtttttcgtcgtttaagtttagttaaggggaaggggtcgtcggcggaatttcgcgtttttttggtttttttcgtttttttcgtttcgttattaattatttcgttcgcgtttcgcgcgcgtttttcggcggagttttaggttcgcgggttagaggtattttatcgttcggcgggagcgtttttttttcgcgtttttcgttttagttttttgttcgttttattttgggattttttagtcgttttttttacgaatgagatttttgtaatgagtaaacgaaagtggcgcggatttcggggcgtttagtaggagcgagcgtagtcgttagtcgtaagttcgtagtcgtgtttcgcgttttacgtcggttttttcggcggtagtcggagacgagcgttagtatcggcgggatagtagtagatgcgggtcgagagtcggttaggggcgtagaggcggaggggatcggcgcggcggggagtttatcgcgaagttggaggttgcgttcgcgggcgtattaggagtttaggtagcgagcgatcgaacgttttgtggtaggcggtggacgttgttgaaggtgagcgagatttcggggttagtttttagtgttcgggagtaacgtttagttcgttggaagattcggggataatgtttaaatttgggggagattgggggtaatgttcggtcgtttttttggatacggggaagttttttttgtttacgttttgagggcgcgcggtcgatttaagtgtgtttgggtaacgttagagagaaattttttaaattcgagttgttttggggatttcgtaggagatagagaggttcgaaattagtgttcgttgtgcgcggggttggggaagttgtagtgggtggtcggcgagtcgggaataatgtttaaattttggggaacgtaaggtagagttttttttgttttgcgggtttagcgaatgggtgttttggaggaggggatttcggggatttcgttaatgtgggaatcgtgattaatgattaaattcgagattttagaaaaatagattataggtttgggggatgagagaagttgttttatgtaattgggaatatagagaaagaggttttaaataggggttagttagtttgggggattaatttgtgaggaggggtagttaaagaaaattttttatatgaaattgggaattttgtcgtagagttatattacgtaaaattggtagatgaaagtaaggaatatattttggggatttaaatatatttttggtgtgttagggggaagttgagattaatttttatattttaagaatataagttagtggtttggacgttggtagtagtcggggaaaaaataatttttataattattgtggttttagggaaaggttttaatattttttagagatggaagaaagtattgtttagattttgggggagtttggagtgtgattagtatatttggggaaagtaaaataaaaaataaaaaaatataaaattagtattatttttttatgttaatttttaaatgatttttattagtttatttttggtaaataagaaaaagattatatatttttttggatgtcgtttgtatttgggggagttttagtgaaatatattttaagtttttgggatatatggaaattatttaatggagatttgatatttaaatttttggaaatttagttagtagttaggaaatttataggtcgtaggtttttttatgtttgggattttttgggatttagggatattttttagtgtgttttgggggtttatggaatattttttaaatgtagggggatttagggtagggattataaagttaggagatttataaattagtattaaaaaaaaaaaaaattttaattgttttgtgaagggaaaaaaattttaatttgttttggaaggttgggagataatatcgtaatttgggggttttaggaaaatcgtttttgaatttaaagatttagggaagttgtttagagtttttggaggatttgggggtttatatgtatattttaaagaaaggggatttagaatttttaggttttaggatttaggaatttttagattttgtgatagggagtgtgtagtgtgtttgaaggaaatattgtttaattttgagatgatttagtgggttgtttggagtttaagaaattagtgttgttttgtgattcgagggtaatgttgaatgtttttagagggtttggagggtagcgtttagaatatttaagtatgggggattaggaaaagggtttagtgtgattttggtcgttggggttttagattaatgtttgaattttagaaaagtaagatttttgttatgaagtttttgggatttagagaattgtttaatagttaatatgttgtgatgtagagaaagtgttcggaatgtttgggaattggggtcgttagtaatatttggtataatagaaataaaagtaggttttgtttaaggggtttttttgtgtttggtgtagtttagagggattcgggagattttgtgtgatttggggggatttggagaattttgggttatatttgagtattttttggtaattgtttagtgtgttttagggatttgggtggtattgtttatattttaagggatttgattcgtggttaggtagtatatagagttatagacgttaatgttttaaagttttgtgatttatatatttataatatttttaatagttttggggaattattggggaaatttttttattttatgaaatttagataattagagggtaggtcgtttatgatttagaaaaggatttaatatgttttgggtgtaatgatcgaatttgggggaaggtatgggaagtaatttttatattttgagggttttaattttttagttttgttgagtgttatgagggatttgggatttaacgtgtaaagtttagggaatttaggttagtgtgaatagatttgcgggatttaatagtaaatgttttatgttgaggtgaacgggaaggggcgcgggggtggggtgggggggcgcggaatggggcggacgtgtgcgggaaatagtaagtttaggagattttggagttaatatttaaaattatgcgggaaagttttatttgttttggaaataatgtttaaatgtggaaaaggtattgtttatattttggggagttaggtaaattggttagcgcgattattacggattaagggtttcgtttttaaaattagggaattcgggttagtggtttgtaaatttgtgggatttggagggggtgtataaaattgtttagagtttgggagaaagtatatttggggttttaggttatatagtgtaagtttggaaaagttcgtcgggattgatgtgttttgacgttttcggaaattaacgtttaagaaaattattgtgattcgtcgaaatggtgaatatatttagaa

SEQ ID NO: 119 - DNA, 6022 bp, Artificial Sequence
  chemically treated genomic DNA (Homo sapiens)
attttttagtaatttttgatttttcgatcgttttattttttgtcgagtacgtttatttagttttataattgtttgttttttttttttttgttatttatgtatttgttcgtttgagagttttttattttatttcgaggttttttcggttttttggttattgttttttttcgggcggtatttatattatggttagataattttttttttattgtagtttttattttattacgggggaatatgagttaaagttatgtaattcgttgtcgggtaggaattaatagagttagtatatgtttttttcgtatttttttttttattaggtggttaggaatgtttcggattttcgtggttttgttatggatattttatttgaataagaagtaattttttttttagaattttagggggtttcgttattatagtataatttaatttttttagaaagatatatttttttatttagtatgtttagagttttatgtgtgataagtgacggtatgttgttttataaaatttcgttgaaagagtcgttgatgaattttagaataatttaatattaggcgttgttataaatgggtggaattagataaagtcgtttgttttttattttttgttttagtttttagaaaattgtttaaaggtattgtaaattatttgcgtttttattggtttggttaaggagttggtagtgttaattggttttgtgtaaagttacgttattgtttttgtagagagtatgatacgttagagaggtgggaagtgttgttaggattttttttagaatgttggtaagaagagtaggcgaaaagggaagagttgtttataaatagggaaaggagatattatttcgtatttttggttttttattacgttatcgattataattataagttttattttttataagtttgaaagcgggtttttttttgtatgtaggaaaaagtttcgtttattaattttgtttttaaagagattataagttggttttgaacgttttgtgttttgggaatgtttattgtcgaagttttgtaaatttttttattgaaggtatttagggtattttgttaattaaattaggaaaatgtgtatagttttatttgaaaaaatttaggtttatgttttgtattttattattaaagaatttattattttttaaataatatttaattattttaaattgagtgtgtagtgagagtatttataatataattttatttttagagtgttttattttaatttttttttggtataagtagtttagaaggttagattttttttttttagaggattaaatattcgagaagagtggttaagaggtagtattaggttttttttatttttttaaagagaatttagttttgtgaagaagaataaagtgaaggttaatggttagatttatggtttaaaaataaaatgtagttttttttattttgaatttattataattaaaaaggttacgaggtagttattaatgattttaagttgtaatagaaagaaaaaaatatttatttagggttaaacgaggatttagtggttatttgtcgtcggtttttattttataggggcggaggatgaggttagggaagatttttttatttatattgatttgattagagatgaaatttttttttttatgatagtttgtatttagaggttgattttgaaatagttatgttaaatgtagttaatttttgtgtataaggagaaaaaatagttttttagagttgtgtttttgggttagttatttggattttttataatttttttcgttttttttatatttgggttgaatttcgttttttttgtttgttaggtttggtttgggggttaaatgagtgaaagttcgtgagatatttttaagtattgaagtgcgtagtaaatgataatagttttgatttgttgaatatgatgatgtgttaggtattgcgtaaagtattattttattattataataaatattgttgggaggtagggatatttttattttttttgtatatttagaagtaggattttggttaaatggtttttttaaggttttatagttttaaaaatttaagtatttatttaatttttaatgatattattttttggttatgtaatgtgttatggttagtaattagatttgtaaatatatataattaaagaggattagaagagatatatattttatataaattatatgaaaatagtatttttagtatttttttgattttttttggtaattaaaaatgattgttttttatatttttttatggatatagttgtattgtttttagttaattgtagtttttttttttaaagagtgaattagtgggaaaatagtgttatttaagattttaagaatttagtgtgtgtgtttgtgtgtgtaggatgggtttttttgaaatattttatttgtatgtgaatgtataattttaaagattggtttttaaaatattgaattgaggtaaatttagttttttttgtagattttttacgataaatgtgaaattgaaaatggaaatgttttatttagatggtgtgtcgattataattttaatatacggataatttattaaataagtaattttttcgtggaatattacggttagtttttgttttgggtatatatttaatgaattggttttttattagtttttgtttgttaataagttgtgttatttattgataaatatttagttttttattaaggaatatcgatttttttaagttttagtgtgtggagggggtgggagtttggtggggaagttttttaatttgagaatttttgtcgttttttgttttaatcgtgattaagatataaaagtttttggttattattgttagttgttatttgtttattgtttttttgacgggtaatgaggttattcggagttttagtgattaaaatgttttattatttgtatttatattattattaagaaaaataatttttagtggattaatatggtaaatgagtaaattagaagatggcgttgaagattagtaattatatttaaaaataaggtagtggtgtgaaggtttagagttttatataacgattgttgttttgaattaaaagtagaggatgtggatgagtgaggggagggtatgttgaaaatgattaaattcggtgtagaggatacgtatacgaaagtgtaaaaagtttttatttgttattttttgtttttagtaaatttttttttggtatgtttgtgaacgtttgagggaaaggtaatattgattaaaatataatgtaataagaaggtaacgatttttgttttgtttattgatgtgttttaagtgtttaggacggtttttgataagtagtaggtgtttaaaatatatttgttaagtgaataaatttgtgaaaggaaaggaagaaaaataggttgtgattagaattttttgtgaataaaattttgttgtttattatatagattttggtaatggaaaatttatttgggtgaaataaaaaatggtattttgttaatttttgagaacgtttgttggttttaggaaaagtatatttatttatattttattatttgttttgttttagtttaaatatagatttttttttggttaggagatattgatttaatatataagattaaaataaaaattgagaaataagtgaaattaaaagttttttaaaagttgtaggttgatttacggtggtggtggtttaaaattatatagaaattagagatttgatggtttatttgaaaatgcgaagtaaatgtatatatttagtattttagacgatcgaaagtttaacgggtgaaagtttagggggttaattttgcgattaaggatattttggaaaagtatgtaaaatttttggtttatttaagtattatttttattttgggtttttatttatttattttgagatggagttttgttttgtcgtttatttcggtttattgtaattttagtttttcgggtttaagcgattttcgtggttcgtttttttaagtagttggggttacgttcggttaatttttgtatttttagtagagatggggttttatcgtgttggttaggttggtttcgaatttttgattttaggcgatttatcgtttcggttttttaaagtgttgggattataggtttgagttatagcgtttggtttattttgggtttttatattttattggtaaattgtttttttttaggttgaggttaaaacgatattattttaaggtgaattgaagtttggaagtgattaagtatttggatttttagggagttttttttcgtttttattttttttatgttaagataattaaaatttcggggtcggggtattgtttgagttattttaatttattagtttaatagatgtaaaaggatgtaagtatgttagatacgtagagatagtatttgaattaagtttaatagtttaagggagttgggttattttttattttttttttagtgagtgcgatgttttttaaatatcgcggagaggtagggttttcggtgatggttttgtcgagggtgttttcgtaatttttatttttagttttttttggattattttttcgtttttcgttatacgttttgtaaagcgaagtttttttcgtattagattttcgttattatacgttttttatttttcgttttggttatatcgttgtagtttagtgattgattggttttttgaggttttggcgtaaaggcgagattcgtatttcgtatttcgtttttcgcgggaaacggttttagtgatagttttcgaagcggcgcgcgttcggttggaggtgcgtttttcgggcgcggcgcgcggagggtcgttaagggcgcgggaattttatttcggtcgcggtagtttttagtttttacgtcggttttgaggttcgttcgttcggtcggtttcggttttcggtttgtaaagtttttttttttagtttaattttcggtttttataggtttcggcgtttcgtttcgttttaggtttcgttttagagagttttataaagttttttttttttatttcgtatttttagttttatcgttcgattttgggatttatcgttgtttttagtttcgagtttagggcgaggtaagggttggagtcgggtaggaggaggggtgtgaggttgatattagagaggattcggagcgcgaattagaggttcgatttttagggtagcgtagggtatttcggtttcggagcgggaagggagcgcgtttcgttttggagtttcgatttttattttatttgcgttgagtcggaggcgcgggtttgggttttaaggttcgtttttttggttttgttcgagttttttcgtttgtttttcgcgtttttgcgacggggtcgttataagttggacgggatgagttaatcggattgtcggggtttttcggggttcggcggacgttttgcgcgcggaatttttcgtattggggttgtagttttcgcgtttgcgttatttgtcgtttgtagagtttatttagtgcgcgttagttgggtagggataggggttttattcggggcgaagggtttggatgcgagtagagaaagcggagggtggaggaattcggggttgcgtttttggaacgttcggtcgtaggcgaggtttttcgcgcgtggaggtcgttaggggagtggaaattgatagagtcgcgggaaggggcgagaagcgggttgggagtgagcgaaggtaagcgagagttgcgagtgagtgcggaaggagggttaggaggggtggcggttgggtggggagagagggtgtaagacgagcggcgcgtgtcgggagtttttgggttgcgggtgcgttataggagagtaggcgggtaggagttttcgcgggggtcgagttcggaaggcggacggttgtgttcgtttaggggatgcgttcgggtcggtcgcgaaggtgttttttttcgggggttcggacgattttgatacggtacgcgcgcgtttcgtagttttaaagatttcggggtttcgtggttattggcgtaggggatcggggcggggtgttcggagtgcggtgtttcgtggttgaagggtagttttttttttcgtagt

SEQ ID NO: 120 - DNA, 6022 bp, Artificial Sequence
  chemically treated genomic DNA (Homo sapiens)
attgcggggagaagagttgttttttagttacgaggtatcgtatttcgggtatttcgtttcgattttttgcgttagtgattacgaggtttcggagtttttgaggttgcgaagcgcgcgcgtgtcgtgttagggtcgttcgggttttcggaagaaggtattttcgcggtcggttcgggcgtattttttgggcgggtatagtcgttcgtttttcgagttcggttttcgcgaaggtttttattcgtttgtttttttgtaacgtattcgtagtttaaaggttttcgatacgcgtcgttcgttttgtattttttttttttatttagtcgttattttttttggtttttttttcgtatttattcgtagttttcgtttgttttcgtttatttttaattcgtttttcgttttttttcgcgattttgttagtttttatttttttggcggtttttacgcgcggaggatttcgtttgcggtcgggcgttttaggggcgtagtttcgggtttttttatttttcgttttttttgttcgtatttagatttttcgtttcgaataggatttttatttttgtttagttagcgcgtattaagtgggttttgtaaacgataagtggcgtagacgcgggggttgtagttttagtacgggggatttcgcgcgtagagcgttcgtcggatttcggagggtttcgatagttcggttagtttatttcgtttagtttgtggcgatttcgtcgtaggagcgcggagggtaggcggggaggttcgggtagagttaaggaggcgggttttggagtttaaattcgcgttttcggtttagcgtagatggggtgggagtcggagttttaggacggggcgcgtttttttttcgtttcgaagtcggggtattttgcgttgttttggaggtcgaatttttggttcgcgtttcgggttttttttggtattagttttatatttttttttttgttcgattttagtttttatttcgttttggattcggagttgagggtagcggtgggttttaagatcgagcggtgaaattgagagtgcgaggtgggaaagaggaattttatagaattttttggggcggggtttggggcggggcggggcgtcgaggtttgtgggggtcgggggttggattggggagagggattttgtaagtcgagagtcggggtcggtcgggcgggcgagttttagggtcggcgtgaaggttgggggttgtcgcggtcggggtggggttttcgcgtttttggcgatttttcgcgcgtcgcgttcggagagcgtatttttagtcgggcgcgcgtcgtttcggggattgttattggggtcgtttttcgcgaagggcgaggtgcgaaatgcgaatttcgtttttgcgttaggattttaggaggttagttaattattaaattgtagcgatgtggttagggcgggaaatggggggcgtgtagtagcgggaatttggtgcgaaggggatttcgttttgtagagcgtgtaacggaagacggaggaatggtttaaagagaattggaggtggaggttgcgggagtattttcggtaaggttattatcgggaattttgttttttcgcggtgtttagagaatatcgtatttattaaaaagaaaataggaaatggtttagtttttttgagttattaagtttgatttaaatattgtttttgcgtgtttgatatgtttatatttttttgtatttattaggttggtgaattgaagtgatttagataatgtttcggtttcgaagttttaattattttagtatgaaagagatgggggcggggagaggttttttaaggatttaagtgtttaattatttttagattttagtttattttaaaatgatgtcgttttaattttaatttggaggaaagtagtttattagtggggtataaaagtttaaaataggttaggcgttgtggtttaagtttgtaattttagtattttgggaggtcgaggcggtggatcgtttgaggttaggagttcgagattagtttggttaatacggtgaaattttatttttattaaaaatataaaaattagtcgggcgtggttttagttatttgagaggacgagttacgagaatcgtttgaattcgggaggttgaagttgtagtgagtcgagatgggcgatagagtaagattttattttaaaataaataaataaaagtttaaaataggaataatatttaagtggattagggattttatatatttttttaagatgtttttaatcgtaaaattaattttttgagtttttattcgttgagttttcgatcgtttgagatgttgagtatgtgtatttatttcgtatttttaggtaaattattagatttttggtttttatatgattttagattattattatcgtaggttaatttgtaatttttgaaaagtttttgattttatttattttttagtttttgttttaattttatatattgggttaatgttttttaattaaagaagaatttatgtttaggttagagtaaaataggtagtgaggtatggataggtatgttttttttaaaattaatagacgtttttagaaattaataggatgttattttttattttatttaagtaagttttttattattaaagtttatgtaataaataatagggttttgtttataaaaagttttggttataatttgtttttttttttttttttttatagatttatttatttgataaatgtattttgagtatttgttatttgttaggaatcgttttaggtatttggaatatattagtgaataaagtaaagatcgttgtttttttgttgtattatattttaattagtgttattttttttttaaacgtttataaatatattagagaggagtttgttgaggataaaaaatggtaaatgagagttttttgtattttcgtatacgtgttttttgtatcgggtttagttatttttaatatattttttttttatttatttatattttttgtttttagtttagaataatagtcgttgtgtgaaattttgagtttttatattattattttgtttttaaatgtaattgttaatttttaacgttattttttggtttatttatttgttatattgatttattagaagttattttttttaatgatgatgtgaatataagtaataaaatattttaattattaaaatttcggatggttttattattcgttagggaggtagtgaataggtagtagttggtagtggtgattaaggatttttatattttagttacgattgaaataaaaaacggtaaaggtttttaaattgaaaagtttttttattaaatttttattttttttatatattgagatttgagaaaatcggtattttttagtaaaaggttggatatttattagtaaatgatataatttgttgataagtagaaattaataggaaattagtttattgaatgtgtatttaaaataaaggttgatcgtgatattttacgaggaagttatttatttagtgaattattcgtatgttgaggttgtagtcggtatattatttgaatggagtatttttatttttaattttatatttatcgtaaagagtttgtaagaaaagttgaatttattttaatttagtattttaaaagttaatttttaaaattatatatttatatgtaagtaaaatattttagaaaaatttattttatatatataaatatatatattagatttttaaaattttggataatattatttttttattaatttattttttaaaggggggggttataattggttaaaaataatgtaattgtatttataaagaaatataaagggtaattatttttaattattagaaaaaattaggaaaatattgaaagtgttatttttatgtaatttatatagaatatatgttttttttaattttttttggttatatgtgtttgtaaatttaattattggttatgatatattgtatggttaaaaggtagtattattggggattaaataagtgtttgagtttttaaggttgtgaggttttgggagagttatttaattaaagttttatttttgggtgtataaggagggtgggggtgtttttgttttttagtagtgtttgttgtgatgatgaaatgatgttttgcgtaatgtttggtatattattatgtttaataaattagggttattattatttattacgtattttaatatttaggggtattttacggatttttatttatttggtttttaaattaaatttggtaggtaaggaaggcgggatttagtttaagtgtagggagaacgaaagagattgtgagaggtttagatggttggtttaaggatatagttttgaggaattattttttttttttgtatatagggattggttgtatttggtatgattattttagaattagtttttgagtgtaggttgttataggagggggagttttatttttggttaggttagtgtgggtaagaaagttttttttggttttatttttcgtttttgtgaagtggaggtcggcggtaagtgattattgaattttcgtttaattttaagtaggtgtttttttttttttgttgtaatttaggattattaatggttgtttcgtggtttttttggttatggtaaatttagagtaaggaaagttgtattttatttttaagttatggatttaattattgatttttattttatttttttttataaggttaaattttttttgaggaaatgagagaaatttggtgttgttttttagttatttttttcgaatgtttaattttttggaaaaaaaaaatttaattttttaagttatttatattagagaggagttgggatggaatattttggaaatgagattatattataaatgtttttattgtatatttagtttaaaataattgaatgttatttgaaaagtgataaattttttggtaatagaatatagagtataaatttggatttttttaagtagagttgtatatatttttttaatttaattagtagaatgttttgagtgtttttaatgagaaaatttgtagagtttcgatagtaagtatttttagggtatagggcgtttaggattagtttgtgatttttttgagggtagagttagtaagcggggtttttttttatatgtagagaagaattcgtttttaggtttgtagaaaatgagatttgtgattgtaatcgatgacgtaatgagaagttaaggatacgaggtgatgttttttttttttgtttataaatagttttttttttttcgtttgttttttttgttagtattttaagaagagttttggtaatattttttatttttttgacgtgttatgttttttatagaaatagtgacgtggttttatatagggttagttgatattgttaattttttaattaagttaatgaaaacgtaaatggtttgtaatatttttgggtaattttttgaaaattgaagtaagaggtgaaaggtaaacggttttgtttaattttatttatttgtaatagcgtttaatgttgggttattttaaagtttattaacggtttttttagcgaaattttgtgaaatagtatatcgttatttgttatatataagattttaggtatgttggatagaggagtgtatttttttagaaaggttaggttatgttgtggtaacgagattttttgagattttggggggggggttattttttgtttaaatgagatatttatggtaaagttacggggattcggaatatttttggttatttgatggagagaagggtacgggagaagtatgtgttggttttgttagtttttgttcggtagcgagttatatggttttggtttatattttttcgtaataaggtaagaattatagtaaaggaggaattatttggttatagtgtgggtatcgttcgagagagaataatggttaggaggtcggggaggtttcggggtgaggtagagagtttttagacgggtaggtgtatgggtggtagaggagggaaggataagtagttatggggttgagtagacgtgttcggtagggggtggggcggtcggggagttaggggttgttggagggt

SEQ ID NO: 121 - DNA, 7696 bp, Artificial Sequence
  chemically treated genomic DNA (Homo sapiens)
gtcggtttggcgttagtggggcggtttgagggggtggtgtttaggttataagggtgatattggtagaggtttggaatcggttgtattagtttggttgggttttcgttttttttgtttggtttaatttttatttcgtgtttaaatatttatgtagagtgtttggaggaattttatttttatatgttggtttgtttatagagattcgtgtttttttgtttgtgttttattatattttttttttaattaaaggagatttttagtggggtgcggtggtttatatttgtaattttagtattttgggaggtttaggtgggaggattttttagggttaggatttttagattagtttaggtaatagaatgagattttgttttaataaaatataaaaaaataaaatttagtagttgtggtgtgtttgtagttttagttattttggaggttgaggtaggaggatcgtttttatttaggagtttagggttgtagcgagttatgattgtgtagttgaattttagtttgagtaatagagtgagatggttttgttttgttgtttaggttggagtttagtgttaagattatggtttatgtgatttttttgttttagttttcggagtagttggaattataggtatatttttttgattttagttaatttttaaatttttttgtagagatgggggttttgttgtgttttttaggttggttttaaaaatttttgggttagggttgggcgaggtagattatgtttgtaattttagtattttgggaggttgaggcgggtagataattttaggttaggagttcgagatcggtttggttaatatggtgaaattttatttttattaaaaatataaaaaattagtttggcgtggtggtatgcgtttgtaattttaattattcgggaggttgaggtagaagaatagtttgaatttgggaggtggaggttgtagtgagttgatattgtgttattgtattttattttgggcgatagagtgatattttgttttaaaaaaataaaataaaataaataataaaaaaaaatttttgggtttaagtgattttttttttcggttttttaaagtgttgagattatagacgtgagttattgtgtttggttaaagtgaggttttttttaaaaaaataaaaaaagggtcgggtatggtggtttacgtttgtaattttagtattttgggagatttaggcgggttgattataaggttaggagttcgagattagtttgattaatatggtgaaatttcgtttgtattaaaaatataaaaattagttgggtatggtggtatgcgtttgtaattttagttatttaggaggttgaggtaggagaatcgtttgaatttaggaggcggaggttgtagtgagttaatattatgttattgtattttagtttgggcgatagagtaagattttattttaaaaaataaataaataaataaataaataaaatattaaaaaaagaggttttttatgagacggtttgtagttggtattgtatatatgtttttttggttgttattatttataatatagtggttaatgttttgaagttagatagtttggattatattttaattttagtgtttttagttgttggatattagataagttttttaattttttgtggtttagttttttatttgttatatggggatataaataatatgtattttgttggattgttggaagtagtcgatgatttattttatgttaattatttagaagagtgtttagtttatagtaagagttatgtaagtgttggttattaaaataataattattattttttagtttatttattttaagtgtttttgagttttattgtttgcgtgatattaattttgaatttatttgtttttttgggtatttttttttgttttgcgtttttgtttttatatatttattgttttttgttttttttttgggatggattttgtttgggatggttttatttttttttaggattttttttggtatggttagttttagttttggttagggttgaattattgtggttttttggtttttgggatttgtaagttagttttttaaggtgttgttttttggtttgttttgttttggttaaatttttaacgttgttcgttgcgttttcgcggggtttagttagatgttagttgtagttattagtttgggcgggagatataggtttggtagtgtgtttgttagatttataggttttcggaatatttttttgagatttgcggtaggggagtaggggagtttaattatagtataggggaaagaagggagggggtatttaggggttatagggattttttaaggacgggacgtttttagtttttgttgggatttttttttagtaaggttattgtattgttggatttttttttgtttttatatagtttagtttttttttcgtttttttcgtttttttttttttttttatatttggtgagatttaggttgtttcggaatggttgtttaatttttattttttagtttttttttattttaaagaagagagaggttttttttattttttagaagatagaggtttgggaagttgagagagagagagagagataaagagagagagagagagatagagatagagatagagatattaggttttttattttttggtttagtgggtttatatattaattgttcggaagttttattttaagtttaattggaagtttgatcgtttgtatttcgtcgtagtttttttcgggaaggggttttgggtttttttatattttttttttagatttttaggttttttttgattcggggagggaagtttttagatgatagagttattttagggaaggaggggggttttttttaggtattttggatgatagtaggatgggatttgtagattaaaacgagagtggggtttttgatttatatgagtgagtggggggtgttggggacggagttttagattttttggtagaagggaagggtattttattcgagggaggaggtagtcgtcgttttagttcgtttaggcgtcgggggcgtttcgaggtatcggttcgtttttttcgcgtttcgtcgggtcgggggcgaagttcgatttaggttcgcgggtaggcggggatttgtcgggttgggttgggttaggtcgggtttggtaggacgtagttttaaagcggcggggtggggcggggtcgggttaggcggtcgtgggggtttcgggggcggcggtcggggttggtcgggattagtagtttgggggtttaggcgcgttttgggatttggtagatagtcgggtttttcgtttttggttcggggttttaggatagcgttggttttatttttttttgtgttttaatatgggcggcggggagagatttcgggggtcggttcgcgtttagttttgttcgcggattttcgtttgttgttatggcgattaggtttcgtttttcggttgcgtttttcgtcgtcgggttaatggaatattttttaagtcgtttgttttcgcggttttttgtaggtatcgcgggcggaattattgtttgaggggagaggatggtggttggaggttgtcgcggttgggcgggttttaagtattcgggttttcgcgggggttcgtacgtttaggtttttttttcgaggcgtaggatgcggcgggatttagggcggggcgtacggtttcgtaggattcgagtgacggagatagggtcgggttttttttttcggggttgttgttatattttttgtttttgcgttttttttttagtttgtttttaaggaagggagtggggttgggcgatcgcgttttagtcgtcgggttgggtttaggttttaggagtcgatacggtgttgggtaaagtttagggttaataggggagggttttaggatgggggatagagaatatagatgattaagaggttattatcgagggggagtagtagtcgtggaagatttagtagttttggtgcgcgggatttttaaggttttttttttatatgttaattgagtatttttttattgttttttttgtttcgaagatgtgttcggttttttttaatttttttttttattcgggttagtagatgattttagtggtttttaatttttggtagatatgtttttattttttatttggtatattttatttgttttagtgtattttaggtcgtttattagttttttgtatatttagattttttttaatgtttttttttcgtttacgggagagttttagattttggatttagtttttatgagtttttggatttttatttattttttgtaatttaatgggttatgtagttttatttatttattttttttgattttttttttttttcgttttgtgaaaattttagtttcgtatttttttgagttcgggatttttagttaatttttgggttaggtgtttttttaattttttcgatttatagtgtttaatttttatttttgttttttggggttttttaatggattgttagtttttttatttttttcgtattttgggtattttaggggttttttcgtatatattgggatttttattttatttgttgcgtattaggttttggtatttgttttagtggattttagggaaattatttttttttttgaaattttttatttatgtgtttgggttttttagtatttttttttatgcgtatttcgaggttttttgagtttttttttttgtagtttcgtcgagttattcggttcgtggtcgttgtttataaggatacgcgttttttgatagtgacgcgagtcgttttttttttttttttacgttcgaggaggggggcgcgggggttcggtttcggcgacggttaatcggagcgtattttcgtggttgattagcgcggtataaaggcgtgtggtttaggttgagcggttgggattttgagagcggttaggttagtttcggagttagtagggagttgggagttgggggaaacgacgttaggaaagttatcgcgttagagagggcgacgggggttcgggaagtttgatagggtttttgcgtatagttgtcggttggttgttattcgttcgcgttagttttcgagaacgcgcgattaggtatttagttcggttatcgtagcggagagttcgtcgttcgttgtagcgaggttcggagcggtttcgtagggattttttttagatcgtttgggtcgttcggatgtgtattaaaatggaatagtttttttattacgacgatttatatatagttacgggatacggtcgggtttttggtggtttttttttatacgattataaatttttgaaatcgagtttggcggttaatttggtcgatttttatcggagttttaaagcgtttggggttcgcggattcggtttagagggcggcggtggcggtagttatttttttggttagggttcggatatcggcgcgttttttaagttcgttttttcggagttggaacgtttgattgtttttaatagtaacggcgtgattacgacgacgtttatattttcgggatagtatttttattttcgcgggggtggtagcggtggaggtgtagggggcgtagggggcggcgttatcgaggagtaggagggtttcgtcgacggttttgttaaagttttggacgatttgtataagatgaattacgtgatattttttaacgtgtttttgggcgttatcggggggttttcggttgggttcgggggcgtttacgtcggttcggagttatttttcgtttatattaattttagtagttattttttagtttttgcgttttcgggaggcgtcggggttgtcgtcgggatcgggagttcgtattcgacgattattattagttattttttatacgcgtcgtttttcgtcggtggttattcggcgtagttgggtttgggtcgcggcgtttttatttttaaggaggaatcgtagatcgtgtcggaggcgcgtagtcgggacgttacgtcgtcggtgttttttattaatatggaagattaagagcgtattaaagtggagcgtaagcggttgcggaatcggttggcggttattaagtgtcggaagcggaagttggagcgtatcgcgcgtttggaggataaggtgaagacgtttaaggtcgagaacgcggggttgtcgagtatcgtcggtttttttcgggagtaggtggtttagtttaaatagaaggttatgatttacgttagtaacggttgttagttgttgtttggggttaagggatacgttttttgaacgttttttgtttttttacgatattttttcgtttggacggttgggtatacgttttttattggggtttagggagtaggcggtgggtatttattttgggattagggggcgtcgtaaattatattggatttcggtttttttattttgcgtttagtttttttatttcgacgtttataagtttttttttttatttttttttgtatgttttttttttgttggaaatagattcgatttatattgaatataatatatttgtgtatttaatagggaggggaagagggggcgatcgcggcggagttggtttcgtcgtttggtatttaagttcgcggggatattgggaaggggattttcgttttttgtttttttttttttgtatcgtattgtggaaaagaaatacgtatttagtttttaaagagtttattttaagacgtgtttgtgtttgtgtgtgtttgttttttttattgaatttatttaagtaaaaaaaaaattggttttttattaatttttgttgtttttttttttaagttgggagggcggggggaaaaaaaaaagtattggtttgtttttagtttagtgttgttggtggttcggttttgtatgtgtttttttcgtcggttcggcgtaggtattttgtggttttagtttaggagttttatttttttcgcgtttttagatttttagggttggatggttggggcgcgggacgcggtttagggatttaggagttgaaggtagggtgtttcggtcgagatttggagtgcgtaggcgcgttttcgtttagtcgcgcgcgtcggggtttttttcgttgacgtagcggaagcgttgtttatataaggatcgattttgtttagtgacgcgatcgcggtttttgggtagatttcgggaattttttttttcgttttgtcgggtagggtcgcggcgtcgggaagggggtcgggattttttcgggtaggcggttgttcgggtacggaaagttttaggtttgggtttagagcgttcgcggtgggcgggtagcgtttttgggtttcgggagttatttttgtgttatttttaagatattggcgtttaggtttcgtcgcgtttacgtttttttcgtttgatttgatcggggcggagggttgttgttgttttcgttgttttgtcgacgtcgttttttttatttttattttttttaggaagggcggcgttcgtttgttagtttttttttacgggtgttaggttaggagcggggcgattgttaggtttggttttgtcggggcggttgttcgggtcgttgggcgtcgttatcgttttcgcgttgggttttttttcgcgtagttgggatacgtggaggtgggggtgggggtgttggtgttgttggttcgtttagaggagtttggtcggtttcgggggttggaagtttttagagtagtggagaaaaataggtagagaaattagataggtagttagcggtgagtggaatagagtatttcgattaatttattttgtataaacgttagaga

SEQ ID NO: 122 - DNA, 7696 bp, Artificial Sequence
  chemically treated genomic DNA (Homo sapiens)
tttttagcgtttgtataaagtgaattgatcgaagtgttttgttttatttatcgttagttgtttgtttggtttttttatttgtttttttttattgttttgggggtttttaattttcgaagtcggttagatttttttaggcgggttagtagtattagtatttttatttttatttttacgtgttttagttgcgcgggagggagtttagcgcgagggcggtggcggcgtttagcggttcgagtagtcgtttcggtaggattagatttggtagtcgtttcgtttttggtttggtattcgtgaggggaaattggtaggcgggcgtcgttttttttggagggggtgggggtagaggggacggcgtcggtaaagtagcggaggtagtagtaatttttcgtttcggttaggttagacggagggggcgtgggcgcggcggggtttaggcgttagtgttttgaaggtggtataggggtggttttcggagtttaggagcgttgttcgtttatcgcgggcgttttggatttaggtttggggtttttcgtgttcgggtagtcgtttgttcgggaaaatttcggtttttttttcggcgtcgcggttttgttcggtagagcgggggaggggattttcggaatttgtttagagatcgcggtcgcgttattgggtagaatcggtttttgtatgggtagcgttttcgttgcgttagcggggaaagtttcggcgcgcgcggttgggcggggacgcgtttgcgtattttaagtttcggtcggagtattttgtttttagtttttgggtttttggatcgcgtttcgcgttttaattatttaattttggagatttggggacgcgggaagggtgggatttttgggttgggattataagatgtttgcgtcgaatcgacgagggggatatatataggatcgagttattaatagtattgagttgggggtaaattagtgttttttttttttttttcgtttttttagtttggaaaaaaagataatagaaattaataaagaattaattttttttttatttaaatagatttaataaaaagaataaatatatataaatataaatacgttttaaaataaattttttagagattaagtgcgtgttttttttttatagtacggtgtagagaggggagggtagggggcgggggttttttttttaatgttttcgcgggtttgagtattaggcggcggggttagtttcgtcgcgatcgttttttttttttttttttgttaaatatataaatatattatatttaatatgaatcgagtttgtttttagtagaaaaaaaatatataaaaaaaagtggaagggggggtttgtaaacgtcgaggtggaaggattgggcgtagggtaggagggtcggagtttagtgtggtttgcggcgttttttggttttagggtgggtgtttatcgtttgttttttggattttagtgggaggcgtgtgtttagtcgtttaagcgagggggtgtcgtaaaggggtaggggacgtttagaaggcgtgttttttgattttaagtagtagttgatagtcgttgttgacgtgggttatgattttttgtttgagttgggttatttgttttcggaggaggtcggcggtattcgatagtttcgcgttttcggttttgagcgtttttattttgttttttaggcgcgcgatgcgttttagttttcgttttcggtatttggtggtcgttagtcggtttcgtagtcgtttgcgttttattttgatgcgtttttggttttttatgttgatgggggatatcggcggcgtggcgtttcggttgcgcgttttcggtacggtttgcggtttttttttgaaggtggaggcgtcgcggtttaagtttagttgcgtcgggtggttatcggcgaagggcggcgcgtgtgggaggtagttgatggtggtcgtcgggtacgagttttcggtttcgacggtagtttcggcgtttttcgaggacgtagaggttggggagtagttgttgaggttggtgtaaacgggaggtggtttcgggtcggcgtagacgttttcgggtttagtcgggggtttttcggtagcgtttagggatacgttggggggtgttacgtggtttattttgtgtagatcgtttagggttttgataaagtcgtcggcgaagtttttttgtttttcggtgacgtcgttttttgcgttttttgtatttttatcgttgttattttcgcgggggtaaaagtattgtttcgggggtgtaggcgtcgtcgtgattacgtcgttgttgttggggataattaggcgttttagtttcgaagaggcgagtttgagagacgcgtcggtgttcgagttttgattagaaaagtagttgtcgttatcgtcgttttttgggtcgggttcgcgagttttaggcgttttgagatttcggtaggggtcggttaggttgatcgttaggttcggttttaggagtttgtagtcgtgtagagagaggttattaggggttcggtcgtatttcgtagttgtgtatgagtcgtcgtggtagaagggttgttttattttagtgtatattcgggcggtttaggcggtttggggagggtttttgcggggtcgtttcgggtttcgttgtagcgagcggcgagtttttcgttgcggtgatcggattgggtgtttggtcgcgcgttttcgggggttggcgcgggcgggtagtagttagtcggtagttgtgcgtaaaagttttgttaggtttttcgagttttcgtcgttttttttggcgcgatagtttttttggcgtcgttttttttagtttttagttttttgttggtttcgaggttggtttggtcgtttttaaggttttagtcgtttagtttgagttatacgtttttatatcgcgttagttagttacggaagtgcgtttcgattggtcgtcgtcggagtcgggttttcgcgttttttttttcgagcgtggggaaggggaggaggcggttcgcgttattgttaggaagcgcgtgtttttgtaaatagcggttacgggtcgggtggttcggcggggttgtagggggaggggtttaaaggatttcggggtacgtatggaaggaggtgttggggggtttaggtatatgagtgaggggttttagggaggaggatgatttttttggagtttattgggataaatattaggatttggtacgtagtaagtggggtgagggttttagtatgtgcgaagaaatttttgaggtatttagaatacgagaggggtaggaggattgataatttattgggagattttaaaaagtagaaatgagggttaagtattgtaaatcgggagggttaaggagatatttgatttaggaattgattgggggtttcgggtttagaaggatgcgggattggaatttttataggacggaggaggggagagattaaaaggggtgagtgggtggagttgtatgatttattaaattgtaagaaatgagtaggggtttaggagtttatgggagttgagtttagagtttgaggttttttcgtaagcgggaaggaggtattaggggaagtttagatatgtagaaagttagtaagcggtttggggtatattgaggtaggtaaaatatgttaggtagaagatggagatatgtttgttagaaattggggattattggggttatttgttagttcggatgaaggagagagttagaaggggtcggatatattttcggagtagagaagataataagagggtatttagttgatatgtgaggagggggttttgagggtttcgcgtattaggattgttggattttttacgattgttgttttttttcgatggtaattttttagttatttgtattttttgttttttattttaaaatttttttttattgattttgggttttgtttaatatcgtgtcggtttttagagtttggatttagttcgacggttggggcgcggtcgtttaattttatttttttttttagaaataggttggggaaagagcgtagaggtaggaagtgtggtaatagtttcgggggaaggagttcggttttgttttcgttattcggattttacgggatcgtgcgtttcgttttgggtttcgtcgtattttgcgtttcggaagaggaatttgggcgtgcgagttttcgcggaggttcgggtgtttggagttcgtttagtcgcggtagtttttagttattattttttttttttaagtaatggtttcgttcgcggtgtttgtaggggatcgcggaggtaggcggtttggggagtgttttattggttcgacggcgggggacgtagtcgaggagcggggtttggtcgttatggtaataggcgggagttcgcgggtaggattgagcgcgggtcggttttcgaagttttttttcgtcgtttatattagggtataggaagaggtgggattagcgttgttttggggtttcgagttagaagcggggaattcgattatttgttaggttttagggcgcgtttgggtttttagattgttagtttcgattagtttcgatcgtcgttttcggggtttttacggtcgtttggttcggtttcgttttatttcgtcgttttggggttgcgttttgttaggttcggtttggtttaatttagttcggtaggttttcgtttgttcgcgggtttgggtcggatttcgttttcggttcgacggggcgcggagagggcgggtcgatgtttcgaggcgttttcggcgtttgggcgggttggaacggcggttgttttttttttcgggtggggtgttttttttttttgttaggagatttggagtttcgtttttaatattttttatttatttatgtgagttaggggttttattttcgttttagtttgtaggttttattttattattatttagaatatttagagggagtttttttttttttttagagtagttttgttatttgagagttttttttttcgagttagagaagatttgaaaatttaaggggagaatatgagggaatttagagttttttttcgggaagggttgcggcgaggtgtagacggttaggtttttagttagatttaaggtgggattttcgagtagttagtgtgtgaatttattagattaagaggtgagaagtttagtgtttttgtttttgtttttgtttttttttttttttttttgttttttttttttttttttagttttttaggtttttgttttttggaggatgaagagagttttttttttttttagggtagaaagaggttaagggataggggttaaatagttatttcggggtagtttagattttattaagtgtgggaaagagaaggaaaacgaaagaggcgaaaaagaaattgagttatgtgggggtagggggaagtttagtagtgtagtggttttgttggaggaaggttttagtagaagttgggggcgtttcgtttttggagggtttttgtgatttttaaatgttttttttttttttttttttgtgttgtgattgggtttttttgtttttttgtcgtaggttttaagggagtatttcggaggtttgtgagtttggtaggtatattgttaggtttgtgtttttcgtttaggttaataattgtagttgatatttggttgggtttcgcgggggcgtagcgggtagcgttgggggtttggttagggtagggtaggttagagggtagtattttgggaagttaatttgtaggttttaaaagttaggaggttatagtaatttagttttggttagggttgaggttggttatgttagagggagttttagagagaggtgaggttattttagatagagtttattttaggaggagggtaaggaatagtgggtgtatgggggtaggggcgtagggtagggagagatgtttagagagataaatgggtttaaggttagtgttacgtagatagtgagatttagaaatatttaagatagataggttgagaaataataattattattttaatagttaatatttatatggtttttattgtgggttaggtatttttttaagtggttaatataaaataagttatcgattgtttttaataatttagtaaaatgtatgttatttgtatttttatgtaatagatgagaaattgagttataggagattaaggaatttgtttggtgtttaatagttagaagtattagagttgagatataatttaagttgtttggttttagagtattagttattgtgttgtgaataatgataattagagaagtatgtatgtagtattagttgtaggtcgttttatgaagggtttttttttttggtgttttgtttgtttgtttgtttgtttgttttttgagatggagttttgttttgtcgtttaggttggagtgtaatggtatgatgttggtttattgtaattttcgttttttgggtttaagcgatttttttgttttagttttttgagtagttgggattataggcgtatgttattatgtttagttaatttttgtatttttagtatagacggggttttattatattggttaggttggtttcgaatttttgattttgtgattagttcgtttgagttttttaaagtattgagattataggcgtgggttattatgttcggttttttttttgtttttttaaagagaattttattttggttaaatatagtggtttacgtttataattttagtattttgggaggtcgagggggaggattatttgagtttaggagtttttttttattgtttgttttgttttgtttttttgagataaaatattattttgtcgtttagggtggagtgtagtggtataatattagtttattataatttttattttttaggtttaagttatttttttgttttagtttttcgaatagttgggattataggcgtatgttattacgttaggttaattttttgtatttttagtagagatggggttttattatgttggttaagtcggtttcgaatttttgatttgaagttatttgttcgttttagttttttaaagtgttgggattataggtatgatttatttcgtttagttttagtttagaaatttttgagattagtttggggaatatagtaagatttttatttttataaaaaaatttaaaaattagttgaggttaggagggtgtgtttgtagttttagttatttcgaaggttgaggtaggaggattatatgagttatgattttgatattggattttagtttgggtaataaaataagattattttattttgttgtttaggttagagtttagttatataattatagttcgttgtagttttgaatttttgggtaaaagcgatttttttgttttagtttttagagtaattgggattataagtatattataattgttaagttttatttttttatattttattgagatagggttttattttgttgtttaggttggtttggaagttttggttttaagggatttttttatttgggttttttaaagtgttgggattataggtgtgagttatcgtattttattgagggttttttttaattgggggagaaatgtggtggggtatagatagaggggtacgggtttttgtggataggttagtatgtgggagtagggtttttttaaatattttgtatgggtgtttgagtacggggtggagattgggttagatagggagggcgggggtttagttaagttggtatagtcggttttaggtttttgttagtgttatttttgtggtttgggtattatttttttaagtcgttttattggcgttaggtcggt

SEQ ID NO: 123 - DNA, 5928 bp, Artificial Sequence
  chemically treated genomic DNA (Homo sapiens)
gttgggataaatggaaggataggaatggggtgttttagagggttttttggttgggaggaggaaggagagggtaggaaagggtattgaggtggagtaatagaaaatgcgaagagaaagaaaaagggaggttaggcgtagtgatttaagtttgtaattttagtattttgggaggttgaggcgggtagattatgaggttaggtttaaggttagtttgattaatatcgtgaaatttcgtttttattaaaaatataaaaaattagtcgggcgtgttggtatatgtttgtaattttagttatttagggaggttgaggtaggagaatcgtttgaatttaggaggggaaggttgtagtgagttaagattaagttattgtattttagtttgggcgatagagcgagattttattttaaaaaaaagaagaaaggagtttttgggggtggtaaaggtagttttttatatttaggggttaggagaggttttttttatttagttttgaagattttttttttttttttatggaggagatagaataagatatagataagggatagataggttttagttagatggagaggattgacgacggttttaggggatatggttaggaagggttttttggagaaggtggtgggttttgaaggatgagtaggagttcgttaagagtgtaagggtattttaagttgagagaatttaaaattaaagaattgtagttatatttgggtaaataatataattatagaaagtatttattgattttttattatttgtttttttttttttttttttttttttttgagttggagttttattttgttgtttaggttggagtgtagtggcgcgatttcggtttattgtaattttttttttttgggtttaagtgatttttttgttttagttttttaagtagttgggattaaaggcgtgcgttattatatcgggagaatttttgtatttttagtagagataaggttttattatgttggttaggttggtttcgaacgtttgatttcgtgatttatttgttttagttttttaaagtgttgagattataggcgtgcgttattatatttagtttgattttttattatttttttaaatttaataaaaatcgtaatgttttttttttttgtattatcgtggtgtgtttttgattttatttttcgttatatttttttataagatttttaggattaagcgatttttggataagaaataaaagtaaaatcgttttattttttagtggatttggatgaaaattggaaataaaattaggtataattttaaaaggatattggagaagaattaagttgggtttataaggaattgtatatgagatggtatatatatttatgttgtttgaaggttacgattacgttagtatattaaattgaaagtgttattattatttggagagttcgacgtgtttttttttttgaatttgttatgaacgtgtgggttggttgggtttagtaataaatatgtgaggttttttattttaaaaaaaaaaatcgcgatattttataaagtaggtaggtttatttgtttaatttttatgaaggaaaagttgaggtttagagaggttgataggtttttgtattttatttgtttgtttgtaggaaagtgttttatttagtttaggttgttttagtttattatttattagattatttttttagttgttaaggttgaggtttaagtttagggtagggtttttgtaggtcgtttatttattttttgttttagggagaggtatgatttcgttttttttattttggttttattgtacgggatttagagaggggtttttagggtagggttggttataggtttgcgggttggattttgttttattagggatttttttgtttaggatagaatttgggttagagagtatagagatttatggatttgagtatgtatttgtgtgtatttgcgtttgtttatataatacgaatatagatagatataggtgtatatatagatatatattttaataggtagatagatatttttttaattaatttagagataaaataaatttatatttttagttttttgttttggtaatttgaattttaggtttgttaggttaggtttttattattattattattattattattattattattattattatttttaagatggagttttgttttgttgtttaggttggagtgtagtggtatgattttagtttattgtaatttttattttttgggtttaagtgatttttttttttttagagtagttgggattatcggtgcgttttttatgtttggttaatttttgtatttttagtagagatagggttttgttatattggttaggttggtttcgaatttttgattttagatgatttgttcgttttagttttttaaagtgtttattataggtgtgagttatttcgtttagtttattttttttttttttttttttttttttgagatagtgttttattttgtagtttaggttggagtgtaatggcgtaatttcggtttattgtaatttttatttttcgggtttaagcgatttttttgttttagtttttcgattagttgggattataggtatttgttattatatttggttaattttttttttttttttttttttttttttttttttgagacggagtttcgttttgttgtttaggttggagtgtagtggtgtgatttcggtttattgtaagttttgtttttcgggtttatgttatttttttgttttagtttttcgagtagttggggattataggcgttcgttattatgttcggttaatttttttttttattttttagtagagatagggttttatcgtgttaattaggatggttttgattttttgatttcgtgattagtttgttttggttttttaaagtgttgggatgataggcgtgagtttttgcgtttagtttaatttttatttttaatagagatggggttttattatgatggttaggttggttttaaatttttgattttaaatgtttgttttagatttttaaagtgttgggattataggtaggagttatcgcgtgtggtcgataggttattttttttggtgatgaggatagttttttttatggtttttatgttttagttgggggtagagttaggtgagtaaggaggatagaaaaggagtaacgtatgtttattggttaggtagataaattgaggttagagattatttatataagtaattttttgttgtatttatttttattttttatttttttttgagattggagttttattttgttttttaggttggagtgtagtggtataattttagtttattgtaatttttgtttttcgggtttaagcgatttttatgttttagttttttgagtagttgggattataggtgtatattattatattcggttaattttcgtatttttttttttttttgtatttttgtatttcggttagtttggttttgaattgttgattttaagtgatttgtttgtttcggttttttaaagtgttgggattataggtatgagttattatatttagtttcgtatttatttttaatattgagtatttattttatgcgaggttttgttagtaggtttagtataggtaatgtttttgatttttagggattatggtttattttattattttggtagatttagaggttataataaaggagtaaagtttgagggtggggtattttttgaagatatatttttgtattgggggaagggagtattaagtagagagtatagtacgtgtaaaggtttagaggtacgattagttttgtaattgggaggttaaggattagagagagtgaggggaaggaggttagggaaaggagggtgtgggttttatttagatagaggtggggagttggaggggtgtatgtagaggttgtaggttagatttagatgttttaaggattttttgtgagtattggtggggtgggtttatttttttttttttatattttttttttagttagttttaatagtggtttattaagttttaatagttatgatagtggtaataagtatgtaataattatattcggtatttttgttttattagtttagtttttggagttgggtattttcgtttaggatattatagttttggtagatttggggttaaaacgtgggcggcggaaggaaggggttgcgtaggggtttggatttttaggttttagggttttaagggtggataagagtttaggtttagttatagttcgggttttgttgtgatttttagttaattttcgggggatggttattttatttttttgagtttagttttttatttgtaaaggtaggaagtaggatttttggttttagaacgtatttagtgaaaatgattaggatttaagcgtttttagtaatttttggcgattttttttttttttttcgtttttttttgagtaattatacgcggggtggagggagggagggaaggaaggagggagggtgaggaacgtagatttttttatattttcggcgagttttcggatatagttttattaggtttttagtttcgtattcgtataaagtttttttagaaggcgcgttaggggaggttttggcggtatagtagagtaggaggcgttaaggagttatttagttatgcgggattttatttttttttagttttcggaggtcggtatcgttttcgttttcgttttcgttcggacggggttttacgcgcggatacggggcggggtttcggggcgggcgggcgtttggtggttcgggtttattacgttattcgggacgtgttttggcggaggcggcgtcggggagatcggtcgtatatagcggtttcggggcggggtgattcggttcgggcgcgcggtcgtttttatgacgttaatttataaggtagcgcgttgttgtggcgtttatcgcgcgtcgtcggggtaacggcggtcgggcgggcgtcggcggtttggtttcgtttttttatgtaaatgagcgacgttattcgtatttaatggcgaacggggcggtgagtttatcgcgtcgagtcgaggttataagagggcgtataagtggcgagtttcggcgagagtattatcgttgtcgtttatcgatatggataacgtaggagcgtattaaggcggagcgtaagcggttgcgtaatcgtatcgtacgtattataagtgtcgtaagcgtaagttggagcgtatttcgcgtttggaagagaaagtgaagatttttaagagttagaatacggagttggcgtttacggcgagtttgttgcgcgagtaggtggcgtagtttaagtagaaagtttttagttacgttaatagcggttgttagttgttgttttagtattaggtgttcgcgtattgagtttcgcgcgcggggcgtatgcgcggttattttttttaaggggcgggttcgcgggggggtgtcgtgggcgtttcggatttggagagggtgcggttttggggatttttttttttcgagtgtgtttaggaatttagagaggggcgcggttttcggggatttttttttttcgagggtgtttaggattcgataagttggattttttgttttcgggggggcgagcgtatgattttttcgttttcgcgttgtttttttttttcgcgcggtcgtttcgtgttgtataaattcgcgcgtttcggttgtttttttgtatatcgcgtcgcggaagggggtttcgagggggcgtagttttaaattttgttttttttttatttttattttttttttttttttttggaagagagaagaatagagtgttcgattttgttttatttatgtttttattcgggaataaacgttggttgtgtgtgtgtgtgtttttttgtgttggttttttaaagaaatgggaagaagaaaaaaaaatttttcgttttttttttcgatttcgttttttttttcggttttttcgatcggtttttttttttttttttgttttgttttgtt

SEQ ID NO: 124 - DNA, 5928 bp, Artificial Sequence
  chemically treated genomic DNA (Homo sapiens)
aataaaatagaataaaaaagggaggggggatcggtcgaaagaatcgaaggggggagcgagatcgaggaaaggggcggagaattttttttttttttttttatttttttaaaaaattaatataagaaaatatatatatatataattaacgtttgttttcgagtagaaatataaatagggtagaatcgaatattttgttttttttttttttaaagaaaaaaaaaaaaagtaaaagtaaaggaaaggtagggtttgaggttgcgttttttcggagttttttttcgcggcgcggtgtataaaggggtagtcgagacgcgcgggtttgtgtaatacggggcggtcgcgcgggggaaagaggtagcgcgagggcgggggggttatgcgttcgttttttcgggagtagggggtttagtttgtcgagttttgggtattttcggggggggggaattttcgggggtcgcgtttttttttgagtttttgggtatattcggggagggggggtttttagggtcgtattttttttaagttcggggcgtttacgatattttttcgcgagttcgttttttggggagggtggtcgcgtatgcgtttcgcgcgcgggatttagtacgcgggtatttggtgttggggtagtagttggtagtcgttgttgacgtggttgaggattttttgtttgagttgcgttatttgttcgcgtagtaggttcgtcgtggacgttagtttcgtgttttgatttttgagggtttttatttttttttttaggcgcgagatgcgttttagtttgcgtttgcggtatttgtgatgcgtgcgatgcggttgcgtagtcgtttgcgtttcgttttgatgcgtttttgcgttgtttatgtcgatgggcgataacggtggtgttttcgtcgaagttcgttatttgtgcgtttttttatagtttcggttcggcgcgatgagtttatcgtttcgttcgttattgggtgcgggtgacgtcgtttatttgtatggaggggcggggttaagtcgtcgacgttcgttcggtcgtcgttgtttcggcgacgcgcggtaaacgttataatagcgcgttgttttgtgggttgacgttatgggggcggtcgcgcgttcgggtcgggttatttcgtttcgggatcgttgtgtacgatcgattttttcggcgtcgttttcgttaaggtacgtttcgggtggcgtgatgggttcgggttattaggcgttcgttcgtttcgaggtttcgtttcgtgttcgcgcgtggggtttcgttcgggcgggggcgggggcgggggcggtgtcggttttcggggattggagggggatggggtttcgtatggttaaataattttttggcgttttttgttttgttgtgtcgttagggttttttttagcgcgttttttggagaggttttgtgcggatacggggttggaggtttggtggggttgtgttcgggggttcgtcgggggtgtggggaggtttgcgttttttattttttttttttttttttttttttttttttatttcgcgtgtgattgtttaggaagagacgggaggggagaggagggtcgttagaagttgttgaaagcgtttggattttgattatttttattgagtgcgttttagaattaggagttttattttttgtttttatagatgggaaattgggtttagagaggtggagtgattatttttcgagagttagttaggagttatagtagggttcgggttgtgattaggtttgagtttttgtttatttttagaattttagaatttgggagtttaggtttttgcgtagtttttttttttcgtcgtttacgttttaattttaggtttgttagggttgtgatgttttgggcgagggtgtttaattttaggggttgggttgatgaggtaggaatgtcgggtataattattatatgtttgttattattattatggttgttagggtttaatgagttattattaagattggttgggaagggggtgtgagggaggagagatggatttattttattaatatttataagggatttttaggatatttggatttgatttatagtttttgtatgtatttttttagttttttatttttgtttgaatggagtttatatttttttttttttgatttttttttttttattttttttgatttttggttttttagttgtaggattaatcgtatttttgggtttttgtacgtgttatgttttttgtttggtattttttttttttagtgtaaagatgtgtttttaggaagtgttttatttttagattttatttttttattgtagtttttgaatttgttagaatgatggagtggattatagtttttgaaggttagggatattgtttatgttgagtttgttgatagggtttcgtatagaatggatgtttagtattaaaggtgaatgcggggttgggtgtggtggtttatgtttgtaattttagtattttgggaggtcgaggtaggtagattatttgaggttagtagtttaagattagattggtcgaaatataaaaatataaaaaaaaaaaaaaatacgaaaattaatcgggtgtggtggtgtgtatttgtaattttagttatttaggaggttgagatatgagaatcgtttgaattcgggaggtagaggttgtagtgagttgagattgtgttattgtattttagtttgggagatagagtgagattttagttttaaaaaaaaataaaaaataaaggtgaatgtaataaaaggttgtttgtgtgggtggtttttagttttagtttgtttgtttggttagtgggtatgcgttattttttttttattttttttatttatttggttttgtttttaattggggtatgaaggttataagggaggttgtttttattattaagagaggtggtttgtcggttatacgcggtgatttttgtttgtaattttagtattttggaagtttgaggtaggtatttgaggttaggagtttgagattagtttgattattatggtgaaattttatttttattgaaaataaaaattaggttgggcgtagaggtttacgtttgttattttagtattttaggaggttaaggtaggttgattacgaggttaggagattaagattattttggttaatacggtgaaattttgtttttattgaaaaataaaaaaaaaaattagtcgggtatggtggcgggcgtttgtagtttttagttattcgggaggttgaggtaggagaatggtatgaattcgggaggtagagtttgtagtgagtcgagattatattattatattttagtttgggtaatagagcgagatttcgttttaaaaaaaaaaaagaaaaaagaaaagaaaaaaaaattagttaggtgtggtggtaggtgtttgtaattttagttagtcgggaggttgaggtaggagaatcgtttgaattcgggaggtggaggttgtagtgagtcgagattgcgttattgtattttagtttgggttatagagtgagatattgttttaaaaaaaaaaaagaagaaaaaaaaaataggttgggcgaggtggtttatatttgtaataagtattttgggaggttgaggcgggtaagttatttgaggttaggagttcgagattagtttggttaatatggtaaaattttgtttttattaaaaatataaaaattagttaggtatggggagcgtatcggtaattttagttgttttggagaaaggagaattatttgaatttaggagatggaggttgtagtgagttgaaattatgttattatattttagtttgggtaatagggtaagattttattttaaaaataataataataataataataataataataataataataataaagatttggtttggtaggtttgggatttaaattgttagggtagggaattggaggtgtgggtttgttttgtttttagattggttaggaaggtgtttgtttgtttattggagtgtgtgtttgtgtgtgtatttgtgtttgtttgtattcgtgttgtatagatagacgtaggtatatatagatatatatttagatttatgggtttttgtgttttttagtttaggttttattttggataaagagatttttagtgggataagatttagttcgtagatttgtagttagttttgttttgggaatttttttttgggtttcgtgtagtggggttagagtggaggagacggggttatgtttttttttgaggtaggaggtgagtgggcggtttatagaggttttgttttgaatttgggttttagttttggtagttggggagatggtttggtgaatggtaggttgagatagtttgagttgagtggagtatttttttgtaggtaggtaggtgagatatagaggtttgttaatttttttgagttttagttttttttttatgaaaattgagtaaataaatttatttattttgtggagtatcgcgatttttttttttgaaatgaaaggttttatatatttattattgaatttagttaatttatacgtttataatagatttagagaggaaaatacgtcgaattttttagatagtggtgatatttttagtttgatatgttaacgtgatcgtgatttttagatagtataaatatgtgtgttattttatgtgtaattttttatagatttagtttggtttttttttagtgtttttttggagttgtatttgattttatttttagtttttatttaaatttattggggaatgggacgattttgtttttgttttttgtttaggaatcgtttaattttgaaagttttgtaggaagatatggcgagaagtggagttaagaatatattacgatggtgtagaaaggaaaagtattgcgatttttattggatttgaagaaatagtaaggggttaggttgggtgtggtggcgtacgtttgtaattttagtattttgggaggttgaggtaggtggattacgaggttaggcgttcgagattagtttggttaatatagtgaaattttgtttttattaaaaatataaaaattttttcggtgtggtggcgtacgtttttagttttagttatttgggaggttgaggtaggagaattatttgaatttaggaggaggaggttgtagtgagtcgagatcgcgttattgtattttagtttgggtaatagagtgagattttaatttaaaaaaaaaaaaaaaagaaagaaaaaataaatagtaaggggttaataaatgttttttatgattgtattatttgtttaaatgtaattgtagttttttggttttgagtttttttagtttggaatatttttatatttttggcgaatttttatttattttttaaaatttattattttttttaagaaattttttttgattatgttttttaggatcgtcgttaattttttttatttggttaagatttgtttgttttttatttgtgttttgttttgttttttttatagaaggggaggggaggtttttaggattggatggggaaggttttttttggtttttaagtgtgggaagttgtttttgttatttttaagggtttttttttttttttttttgagatggagtttcgttttgtcgtttaggttggagtgtagtggtttgattttggtttattgtaattttttttttttgggtttaagcgatttttttgttttagtttttttaaatagttgggattataggtatgtgttaatacgttcggttaattttttgtatttttagtagagacggggttttacgatgttggttaggttggttttgagtttgattttatgatttgttcgttttagttttttaaagtgttgggattataggtttgagttattgcgtttggttttttttttttttttttttcgtattttttgttgttttattttaatgtttttttttatttttttttttttttttttagttagagagttttttgggatattttatttttgtttttttatttattttagt

SEQ ID NO: 125 - DNA, 5954 bp, Artificial Sequence
  chemically treated genomic DNA (Homo sapiens)
gtttttattaataggatgtaaaggaagtgattttatatgatttttaaggttaggttataaaatgttatgtatttttaagtgagtttttgttttttaaaatcggtagttaaattatgaagaagtttaagtaatttgtggagtagttttatggagaggattaaaggtttttatagttttggttgattttttagttggtagtaagtgttaatttgttaggtgtgtgagtatattattttgaaaatggatttttaatttttaattgaattatttgatattgcgtagagtagagataagtcgttgttgttgagtttattttaaattgtagatttatgggtaaaataaatgagtgggatggtttgttatataatagtaggaaatagatattcgtatttattttttttatttttttttattagagatgtgtaaaagttttggggttttaatttaggtttagatattaatagggaattggtttttatgtttttgtttataagttttttgaagttttttgtttagttgtttattttttatttttggggtgggggaattttttgagagtttggtaattttatagttatatttttttgaggttttgttatattatcgttttttttatttttaagttggttatggatatttttttttaaggttttttagggtggttttttttatttttttttttatttttagaatttttggttttatttttagaatggattagaggtagagttttattagaagtgtttgcgttttttgtttggtaaaatgtttaaggtgagttatgataaagtttgttttttgttggaagagaggggatagggataatgttgagggagttaatttaatgtgatattttagtgaatgattttgttatggtttgaatgtattggaaattgaatttttaaatttatatgttgatggtatttgggggtagggtttttgggaggattagataaggttattaggatggggtttttatatgaggattggtagttttataataggatgaagagagatttgcggtggtatgtttttgtttttttattatgtgatgagttagtaagaaggtttttattagatgtagttttttaattttggaatttttaggttgtagaattatataaaataaaatttttttatcgattatttagtttatggtattgtgttatagtaatagaaaatggattaagttagatttagatgtatatttatttaataattgttttttaagtttttaggtatgtgttagaagttggggagataaggttaaatggtaatgttattatagatttggataagagggtatttgtggttatttagagtttatatttgattttgattatgttttgggtgtttaaaaatttagattgtttatttagtttaagttagtttttttgttttgttttgttttgttttgttttgttttgttttgttttttgagatagggttttgttttgttgtttagttggagtgtagtggtgtaattttagtttatcgtaattttcgtttttttggtttaagcgatttttttattttagtttttcgagtagttgggattataggtatacgttattatatttagttaatttttgtagtttttgtagagatagggttttattttgttgtttaggttggttttgagtttttgagttttttaatttttttgttttagttttttaaagggttgggattttaggtgtgagttattgtgtttagttttttagttagttttaaggtttataaagttgtttgtttaggtttatttttttgagggtatattttgtttttggaatgtgtatttatagagaggtgacgaagaggtggttgtaggtaaggcgtgtgggtaaagtttgggtgtgtgggttggagtatttatatgtttgagttttaggttatttgtgatataagatagagatggagtgtgaagagaagtggagtgggtgggttgagggttagggttaggttattttttcgtattgttatgtttttgtataaaattttaaagagtttaagaatgttaaatttgaatatggtttttttggttattagaaagaatatttgttaaggtaggagaatatatattttattttatagttagttaaatgtttagatataaggtatttggtttttgatttgtatttttaatttgggttttttatgttcgggtaggttagtataataggattagtgtttaggttttgtatttttatagggagatatttttttgtgggatttagataatgatagggagtatggtagagattttagaagttgtttgaagattgtttttaatgttattatagttgtttttatttttaattaggagtggtagggtagtaagggatagtagatgggattaatatgagagaatgtttttatggggggaggggatagtgaggggatttagttgttttgttaatggttagtttttatttgtttgttggagttttattaattttagtagggatggtattaggtttaagaggttgaaggagagattagagttagtaattgggatatggggttttattgggaaatttatatatagggacggtcggtggtagtgggttggataggagaattgtatagttttatggtaggttgggtaggagagttataatcgtttataaaaagtatgtagtttatatattatttttatttagtattttttttttaataatttttatttgataatttttatttggttttaaataaagagttttgaatttttgtatattttgtattttataggatgggtcggggtttaaatgttttttatagataaggaatgaatttttaggttggttattttcggattttttagtttaaaattttaaatatatattggggtgtatttgttatataggattatttttagggtatgtttaagttaagttattgttgttaggagtatttgttatatattattataaatatttttagttcggagggagcggggtgtggagtagggtggaataggaggaattttatgtttattttgtatgggttgggtagggtagggatttgaaatttagtttaagatagaatggtatagtggtttttaaagtgtggttttcggattagtatttatattatttaggagtttgttaggattttaattatttgtaggatagagggtgtttttttgcgggtatgatatattgttgggtttaaaggattttttagttttatttttttgatttggtgtgggaatgttatgaaggagattttttgttgaaaagagaatattttttgagtatgtacggtatttaagcggtgggttaaatattttatgaatgttgttatatgtaatttttaatagttattattaagatcggtatgattgttatggtttattttattattattttttgtttaagggtttattttagaggttaagtattttgttttgttttgggtttaaaacgtaattaggaagttatttaggtttgtgtgatttttagattattttgatttttttatagtttgtttaatagtggtttatgtttgaatgtgatttagaattatttggaggttttattaaaattaattgttttatagttttttatttagtaagttgggatggggttttaaaatacgtatttttaataagtttttagatgatgttgtttttggtttaaggattacgttgtgagaattatagtgttgggttgggatttagttttcgtttttattttattcgtataaagcgtttataattatatttttttataacggtgtgttgtgagaggatattgtgataatggaagtgaaagagttttgttagttgtataggtgaatgtttttggttattaattaggtaatttgtttgaggttagttttttggagtttgggagggtagagggttgggacgtagggtgggtatcgtagttatttagagagtttttgtagtttattttaattttgggttattttttttttagggagaaagttagttttgagggtttaggtttatagttttttttgttattatttttattaatttatatttttttttttattttaggtagttgttgggtattgttttagtattggttgttttgggttatttttttaggggttagtttaggtaagttggggtagtttaagtttgtgatttaggatttgaggttggatttcgtttacgttcgtttttatgagatttagagttttcgattttttttttttgagttttaaattgcgtattagtaaaataggcgtaacgagagtatttatgagttgtgggaatttaagggttagaattgtatttagcgtttggtatagagtttggtttttggtaaggatttaattaatggtagttagtatttttaaaaagtttttgggtttaggtcgttttttgatagaggtttcgatttaggatataaatcgtttttacgtcgtttttcggcggtattcggatatattcgttttggaatgttagcgtgggggttttagggttattcgttcgagatgagaggggtagggtagggtaggattaggaaggcgttgagtttaggttggtgcggggaggggcgtggttttattttattagggtcgggggatggggtgggttcgaaggagaaagtgaaggaggcgggggcgttgggagggttcgggaggagatcgggaggacgaggtaggcgggagttgggcgggatcgttaggtagcgtcgtgagtggatagggttggagcggggcgggtttaatttttagtgtaatttgggggcggggttgtcgggatagaggagagatttcgtagcggggcggggttttagttttagttgggttcgggggcgaggttggttggggtacggttatagtgggcggggtttggtcggcgggagcgtatcgtttttttaaagggttcgggggcggggtcggcggagggggcgtgttttttgggggcggggtttgtcgagttcgcggcgtttttcggttgtagtcgggagggggtcgaggagtgattgagtttcgggttgtgtagttcgacgtcgattgaggtacgagcgggtgacgttgggtttgtagcgcggagtagaaagtagaattcgtaggtgagtaagggggtagcgggtcggggtagtttgtcggataattataggtaaagttagttttagttttcgtttttgcggttcggttcggataatttttttcggaattagtgataggtcggggtagttggtgggtgaaaaggagttttagttattagttttgaatttttagtttttatattcggtcgtgtatagttgcgtgattttgggttcgtttttttatttggttttggatttttcgggttttagtaggaggaagtgaattaggtgaattttacgttttcgttgtttttttttatttaaaacgtcggaaggtgagagttggtaggtgagagtaggttgtaggtcgttataggtgtttttatcgcgttgttttttgtagtttttttttttgtaaaatgggattgagagaagcgaattgttttaaagagtgtattgttttttcggttggggttcgaatttattaattttggggaagaggaggttaaagtagggaggttttatttttcgttttatttgttttttattaattttaatagtttaattgagtcggattttttaagattttaagttggaaatttagtggggtttttttaggtgagttggtttgagtaggaggttggaaattggggaatagtttttatattggtgagtggggaagagaagggaaaattttattaatttttgggtttagggttaagtttagggttttaggggtttttgaagtatattcggggttaattttttggttgacgggttttgtttttggaggtggtgggtgttttgtgttgggtcggtgggtaggtgatgggtttgttttttatggggaatgagttttttttttttttggagagatgggtttggttatagttttttttgattttgtgaaagttagaaattgtt

SEQ ID NO: 126 - DNA, 5954 bp, Artificial Sequence
  chemically treated genomic DNA (Homo sapiens)
ggtaatttttggtttttataaggttaggaggggttgtagttaaatttatttttttaagaaaaaaaaaggtttattttttataggaagtaagtttattatttgtttatcggtttagtatagagtatttattatttttaggaatagaattcgttagttaagaaattaatttcgggtatgttttaagggtttttggggttttgggtttgattttgggtttaaggattggtggggttttttttttttttttttatttattagtgtaagaattgttttttagtttttaattttttgtttaggttagtttatttggaaaagttttattgagtttttaatttgaagttttagggggttcggtttagttgaattgttagaattggtgggaagtaggtgaggcgggaaatggaatttttttgttttggtttttttttttttagggttggtgggttcgagttttaatcgaggaaatagtgtattttttaaagtaattcgttttttttagttttattttgtagggagagaaattgtagagggtaacgcgatgggaatatttgtggcgatttgtagtttgtttttatttgttagtttttatttttcggcgttttaagtgagaaagggtaacgggagcgtggaatttatttggtttatttttttttgttggaattcgggaggtttagagttaggtagagggacggatttaggattacgtagttgtgtacggtcgagtgtgagaattgggggtttaggattggtggttaaagtttttttttatttattagttgtttcgatttgttattagtttcgaggaaagttgttcgagtcggatcgtagaagcgggggttaaaattaattttgtttatggttgttcggtaggttatttcggttcgttgtttttttgtttatttgcgggttttgttttttgtttcgcgttgtaggtttagcgttattcgttcgtgttttagtcggcgtcggattgtatagttcggggtttagttatttttcggttttttttcggttgtagtcggggaacgtcgcggattcggtaggtttcgtttttagaagatacgtttttttcgtcggtttcgttttcgagttttttgggaaggcggtgcgttttcgtcggttaggtttcgtttattatggtcgtattttaattagtttcgttttcgggtttagttggagttgaggtttcgtttcgttacggagttttttttttatttcggtagtttcgtttttaggttatattggggattaagttcgtttcgttttagttttgtttatttacggcgttgtttaacggtttcgtttagttttcgtttatttcgttttttcggttttttttcgggtttttttagcgttttcgttttttttattttttttttcgagtttattttatttttcggttttagtagggtgaggttacgttttttttcgtattagtttgggtttagcgtttttttaattttgttttgttttgttttttttatttcgggcgggtagttttggggtttttacgttggtattttagggcgggtgtattcgggtgtcgtcggggaacggcgtgggagcggtttgtgttttaagtcggggtttttattaggaggcggtttgggtttaggaattttttgaaaatattgattattattgattgaatttttgttaggggttaggttttatgttaagcgttgaatatagttttagtttttgaatttttataatttatgggtattttcgttgcgtttattttattaatgcgtagtttaaggtttagagaagggaagtcgagggttttgaattttatggaggcgggcgtgagcgggatttagttttaggttttgagttataggtttgagttgttttagtttgtttggattggtttttggggaagtagtttagaataattagtgttggggtagtgtttagtagttgtttgaggtgagggaggaggtgtgggttgatgagaatagtggtaggaggggttgtgggtttaagtttttaaagttggttttttttttgaagaaaaagtggtttaaaattgaggtgggttgtaagagttttttaggtggttgcggtgtttattttgcgttttagttttttgtttttttaggttttagaggattagttttaggtagattatttggttaatgattaggggtatttatttgtgtagttgataaagtttttttatttttattattataatgtttttttataatatatcgttgtgggagggtatgattatgagcgttttgtacgagtggagtaagggcgggagttggattttagtttagtattgtagtttttatagcgtggtttttgaattaggagtaatattatttgggaatttgttaggagtgcgtattttgaagttttattttaatttattgaatggaaaattgtgggataattggttttaataaggtttttaggtgattttgaattatatttaagtatgaattattgttgagtaaattgtaaagaagttagggtggtttgagaattatatagatttaggtagttttttggttgcgttttaaatttaggataaggtaagatatttaatttttgggatgagtttttaaatagggaataataataaaatgagttataataattatatcgattttgatggtagttgttgaagattatatgtgatagtatttataaagtatttggtttatcgtttgaatgtcgtatatgtttagaaaatgttttttttttagtaaaaagttttttttatagtatttttatattaagttagaaaagtgaggttggagaattttttaaatttagtagtgtgttatattcgtagagagatattttttattttgtaagtggttaagattttaataagtttttagatgatgtggatgttggttcggggattatattttgagaattattgtgttattttgttttgggttgggttttagatttttattttatttagtttatgtaaaatgggtataaaattttttttattttattttattttatatttcgtttttttcgagttgggggtgtttgtgatggtgtatggtagatgtttttgatagtaataatttgatttaagtatattttgagaatggttttgtatggtagatgtattttaatgtgtgtttggagttttgagttaaggaattcgggaatgattaatttggagatttattttttatttgtgaggaatatttgaatttcggtttattttgtggaatgtagggtgtataggggtttaaagttttttgtttggggttaaatgaaggttattaggtgggggttgttagggggagggtgttaagtgagagtgatgtataaattgtatgttttttgtaagcggttgtggtttttttgtttagtttgttatgggattgtatagtttttttgtttagtttattgttatcggtcgtttttgtgtgtaagttttttaataaaattttatgttttagttgttggttttggttttttttttagttttttgaatttagtattatttttattgaagttaatagggttttagtagatagatgggaattggttattggtaaaatagttggatttttttattgttttttttttttatgaagatatttttttatattagttttatttgttattttttgttgttttgttatttttgattagagatagaggtagttgtggtgatattgagagtagtttttaggtagtttttagaatttttgttatattttttgttattgtttgagttttatagaagagtgtttttttgtaggagtgtagggtttgggtattggttttgttatgttgatttgttcgaatatggagagtttaagttaagagtgtaaattaaggattagatattttgtatttaaatatttaattgattgtgaaataaaatgtgtatttttttgttttgataaatgttttttttaatgattaggaagattatgtttaaatttagtatttttggattttttagaattttatgtaagaatatggtagtgcgggaggatagtttggttttagtttttagtttatttattttatttttttttatattttatttttgttttgtgttataagtggtttaggatttaggtatgtggatattttagtttatatatttaaattttgtttatacgttttgtttatagttattttttcgttatttttttatgaatgtatattttagggataggatgtatttttaggaggatggatttgggtaggtagttttgtaaattttaaaattggttggggggttgagtatagtggtttatatttgaaattttagttttttgggaggttgaggtaggaggattaaagagtttaggggtttaagattagtttgggtaataggatgaaattttgtttttataaaaattataaaaattagttgggtgtggtggcgtgtgtttgtggttttagttattcgggaggttgaggtgggaggatcgtttgagttagggaggcggaggttgcggtaagttgagattgtattattgtattttagttgggtaatagagtaagattttgttttaaaaaataaaataaaataaaataaaataaaataaaataaaataaaaaaattggtttgggttggataggtagtttaggtttttaaatatttaaagtatgattaaggttaggtgtgggttttgggtggttataggtgtttttttgtttaggtttatggtgatattgttatttggttttgtttttttagtttttagtatatgtttggaagtttaagggatagttgttgagtagatgtgtatttgagtttaatttagtttattttttgttgttataatataatattataggttgggtaatcgataaaagaattttattttgtatagttttgtagtttgggaattttaaggttgagaggttatatttggtgaaagtttttttattgatttattatatggtgagagggtaagggtatgttatcgtaggtttttttttattttattataaagttattagtttttatatgagggttttattttgatgattttatttaatttttttaaaggttttatttttaaatattattaatatatgaatttggggatttagtttttaatatatttaaattatagtagagttatttattgaaatattatattgggttggtttttttagtattgtttttatttttttttttttagtagaaggtaagttttgttatgatttattttgggtattttgttaggtagaaagcgtagatatttttagtgagattttatttttagtttattttagaggtggagttaggagttttggaggtgggaaaaggggtgagaagaattattttagaaagttttgagagaagatatttatggttaatttggagatggggaagacggtggtgtggtaagattttagagaggtatggttataggattgttaggtttttagaagatttttttattttaaaggtggaagatgaatagttgagtaggagattttaaagaatttgtaggtaagaatatgggggttagttttttgttagtgtttgggtttaggttaaggttttaagatttttgtatatttttggtggaggaaggtaaagagaatgagtgcgggtatttgttttttattgttatgtaataaattattttatttatttattttgtttataaatttgtagtttggggtgggtttagtagtaacggtttatttttgttttacgtaatgttaggtggtttaattggaggttggggatttatttttaagatggtgtatttatatatttagtaagttggtatttgttgttagttgggaggttagttagagttgtggaggtttttggttttttttatgaggttgttttataggttgtttgagtttttttataatttggttgtcggttttgaagaataaagatttatttagaagtgtatggtattttgtgatttagttttagaagttatataggattattttttttgtattttattagtagaagt

SEQ ID NO: 127 - DNA, 6078 bp, Artificial Sequence
  chemically treated genomic DNA (Homo sapiens)
aaaaagtcggtcggatatagtggtttatgtttgtaattttagtatttcgggaggttgaagttaggagattgagattattttggttaatatggtgaaattttatttttattaaaaatataaaaataaaattagttaggtatggtggcgggcgtttgtagttttagttattcgggaagttgaggtagaggaatggcgtgaattcgggaggcggagtttgtagtgagttgagattgtattattgtattttagttttggcgatagagtgagatttcgttttaaaaaaaaaaaaaaaaaaaagtttacgagtatttcgaaataaataggtttaattttaaattttttattgtttattaataagtatttttatgttttgttggatgggagtatatgtagttttataatatttttggttatataggtttattgaattttaatttttttatttatttttttttattatttttatttttgtggatttaatttagttttttgttttttttgtggattattgtattaggttttttattattttttttttgttttaatttttgtttttttttaagttattttttattgagtttttttattatttttttaaaaatgtaaattttagtataataggttgtagtttaaagttttttagtgatttttcgtagtttagaggatgaggtttttatttcggagtatttatagtttttgtttatttttgtggtttcgattttttttatttttttttaagttttatttttttgattgggtagtattttttgttttttttattttttatgttgttttttgtttttagtttcgtgcgtttgtattttttattgttggaatatttttttttttttttttttttttcgtttttgattttttagagtttaatatttatttttttgggaggttatatgagtttattggataggtgtttttttgtgtgtaaatattattgtgtatggttttgttagagtattttatgttatgtaatttttgtttttttatttatttttttttttatttgttggaaattttgtgagggtagtatttgtgttttgtttaatttggtatttttgatatttaatatattatatttgatatagagatgtttaattaatattgaatgaaagttggaacgaagattatatattatttttttttagatttataaattgtgaagtggttattgttagtatagaatttaatcgggggattgtattaatttatttatttttttaattttatggataaaagatttttagatgattgttgaaaattaagaaaagttattaaaaagtaaatttgaaaaggattatatttttgttgtagtaattttatttttggttaggaatgtatatttaataattaattagaagtaggtaagttttatttatatagatattaattattaagtaatttatgatagtaaaaaaattggaaaaaaaagagagaaatgattaaatatttagaattatggtatatttataaaattgaatattatattgttattaaatagtgtgtttttaaaggatttttagtgatttgtaataatgtttatgttatttgtgaaaaagttggatagaaaattgaaaatatattaagattttaaattatgtaaagggaaaaaaattttatatataaatagagaaaaaagaaaggaatatattaaaataaattttttagtgattgtattttgagtgttttttttgttttttataatttttggtattttttaaattttttataataagtattttttatagttagaaatataataaaatatttttaagttcgagattttagttgtgttagttgtatttgtgtggtattattatttttttttttgttgatggtgtattagtttttttttggggatgtatttttttttattttaggtttttggtgtgaagtggatttttgatttcggttttaggggtgggtatatgatttagatatggttaattagtatattttatttttttggtttttttttaatgggtatatgatttaagttaggttagtgagattcggttttttttataaatttttataggagatgtttatgggggtaggaaaattttatttcgttggtattagtgagttgtaagtttagagttgttttgagtgtatataaggttggtaaaataatataggaaagtattgaggataaaggtggaggaaagtgtacgtgtatttgtgtatatatgtatttatatatattcgttttttaagttttgataattttgagtttttggatttaggaaagtttgaaatattattgtttttggattttttggttataagagttaatatatttaggtttttttgtttgtttgtttaatttaagttgtttttataagttgtaatcgagagtttttgttaaaagaattatgaaaataatgaaatatataaagtataatttttgaatatgtttaggattattataaaatatagtatagaattaatttatatattttatttgagatataaaatatttttattattgttaatgttttattggatattgttgatttataatatagttttttatatattatagtatatatgtttatttatagtgttttatatatatgttttttttttttatgtaataggtagtgggtattattaaaaatagttaataattttaaaggtataagtattggaggttttttgttgtggttagtattaaaattttaatttttggatttaaggagatttagcgtgttttaaggttgggttgggagatattttagggtatggttttttttgtaattagtatagaaggattttaatattgtgttaattaataaggttaaattggtgtgtattggttgaatataagttttgttagtagatattatagttttttatttgagtatttattttttttgttggattgtgaatttttttagatagagattttgttttatttatttatgtgggttttatgtttatttaggtgtttaaaagatatttgttgaatgaaaaataggaatgacggtttaatatggtataattttttatttagttttttttttttttgatagaagtttcgtgtttagaattaaattgtaatatggtttttttttatttatttttttgaagatgttattttttttaatattagttgattgaagaagaaaattgtaaatttttttttttaggtataatgttgatattttaatttatagtgatttttttttaatataaaatgaattttagaaataaattaagattttagaaatttatgattgttttgagtggtattttttatttgttattttaagaaaaatatgagatttgatggtttagagtatagagatttttggtattttagtttttttatagtcgtatgattcgaattttttgttgggagattgggatgtaggtttttatatttgattataaggattgtgagggtaggggttatatttgtatatttgtttattaataatagtatttttggtatttagtttttttttgttttatagtagatattaaataaatgtttgttgagtgagtaaatatttatatttaaagagaggtaattatatatattgattatttgattattttttagtattgataatttttaagtgattagttttaaaaattattttttttatattaatttgggtttttatattattaaataataggagagtttttaatattaaatgaagtggggtagttgggtaattgtaaattttggatgatattttagagaagagtttaggtgtatttgttttatttttttttttgatgggtatttgttatttatttttttatttttaagtttttaggagggatgttttattagtttattagaatgtatagggaaagtttattttttttggagtaggttttttaataagtgtttaagttttgggtttttttttattataataataaatatatttgttttattttttttataaagttgttatcgtgagtatgaaaagacgagtcgttgtggggaagaattattaatttttatatagatattgttgttgtttttcgtttaaggatttattatgagattgtgggtaaggtattttttgggtagtgaaatcgggtttaagagaattattgtatttttattttgtttttgggatcggtaagggtagttaagagttttagttttaaaattgtcgtttgttatagaggtagagaaattattattggggttggtagcgttggggggaggggggaaaacgtgtatgaaaatttgggtttttagagtaaatttcgttacgcgttttttatcgtttttgtttttatataagtttcggtaggggttttttgggcggaggttacgtcgattaataggaatttattgtgtttttataggttacgaagtaggtggagaaattgagtagaaataattagcgaaatcgggtttagtttttatcgcggtgttaggagtttttaataggtttggaggggaatgtcggggtttaattttttaacgtttttttttttatttttatgttatttttacgagtagcggcgtttagttttttttcgttcgaacgtgttcgaggggcgggtagtcgatttttattgtttggggagtatttggtaggtggcgggttcgtgttttaacgtgtgcgtggtgtttagttttataaagcgagcgggtagtatttttttggttcgggaacggttttagtttggtcgtttatattttaggggtggaaaggtggagagagaaaggggtttcggagttaagagcggggagagagggcgcgcgcgttttttttttttcggcgggtacggtttttcggtattaatacgtcgaaagagtaggggttagacgtcgtcgggaagaagcgagattcgggcgggcgcgagggaggggaggcgaggaggggcgtggtcggcgcgtagagggagggcgttgggaggaggggttgttgttcgtcgttcgcggttttgggggttcggttttgtcgcgttcgttgtatttgggcgagagttggaacgtggattagagttcggattttatcgtagttatcgcgatgagaggcgttcgcggcgtttgggattttttttgcgttttgtttttattgtttcgcgtttagataggtgggatatcgcggttggtatttcgatcgtgcgattattcggcgaagtttgtgtttgggagggtggtattcgttagggtgtattcggagagaggattgcgggtttttagtgttcgtgcgttttagttttcggggagattttaggtggttttcggatttttcggcgttttgtttcgtttatttgcgcgaggagattttagttgttggtggtgggggacgcgaattcggggtttttcgggaatggggatagtaagagggggttaggcgtgagcgaggttgtaggtttcgtgcgagtttggggtggtttttgtgtcgacgttgcgcggggggcggaggcggggggtttaggggtttgtatcgagcgtttttttttgtcgtgcgaggcgcggtcgtagtttttttttgttaaaagttgcgtgtgtgtgatcggcgttcgggaggatttgtttgtaggtttttcgtcgcgttgagggtaaagttagagagttttttttttgttttgcggttattgttttttaatcgtaggcgttttttgtgtttagagttggggatcgattcgttgtcgtttttgttcgcggcgttattcgtggagattaatcgaaggttgcggcgttttttcgttttcgggttaggtttttgcgttgggagtgcgcggcgtggggttgttgtggggtcggattttcgcgagtttggaggtggtggcgatagggataatttgggtagggcgtgtggaaagtagtcgttaggttgtagattttttgttttcgtatatttcgtgttcgtttttttttgtcgcggcgtcgttttatttttgtcgcgcgtttcggggcggttggaggttgtgtttgtcgtttgtttcgggaaggtaagggatagcgtgttgggattttgcgttttttgattttaatcgtttagtacgtcggttagagtgttcggtttgtttggcgggttttgaaagtttttagttttcggtgtttgcgatttgtattcg

SEQ ID NO: 128 - DNA, 6078 bp, Artificial Sequence
  chemically treated genomic DNA (Homo sapiens)
cgaatataggtcgtagatatcgggaattaggggtttttagaattcgttaggtaggtcgggtattttggtcggcgtgttaggcggttggagttagggaacgtagagttttagtacgttgttttttgttttttcggagtaggcggtaaatatagtttttagtcgtttcggggcgcgcggtaggaatgaaacggcgtcgcggtagaaaggggcgagtacgggatgtacgaaagtaaaaagtttgtaatttagcggttgttttttatacgttttgtttaagttgtttttgtcgttattatttttaggttcgcgggagttcggttttataatagttttacgtcgcgtatttttagcgtaaaagtttaattcggaggcggggaaacgtcgtagttttcgattggtttttacgggtggcgtcgcgagtagaggcggtagcgggtcggtttttagttttgggtataaagagcgtttgcggttggaaggtagtagtcgtagagtagagaaagggttttttaattttgtttttagcgcggcggagaatttgtaggtaggttttttcgggcgtcggttatatatacgtaatttttaataaaaggaagttgcggtcgcgtttcgtacggtaagagaaggcgttcggtgtaaatttttgagtttttcgttttcgtttttcgcgtaacgtcggtataaaagttattttaaattcgtacggagtttgtagtttcgtttacgtttaatttttttttgttgtttttattttcgaagaatttcggattcgcgttttttattattagtagttggggttttttcgcgtaggtgagcgaggtagggcgtcggagagttcgagggttatttggagttttttcggaggttggaacgtacgggtattgagggttcgtagtttttttttcggatgtattttggcgggtattatttttttaggtataggtttcgtcgagtagtcgtacggtcggggtgttagtcgcggtgttttatttgtttggacgcgaagtagtaggagtagaacgtagagaaaattttaggcgtcgcgagcgttttttatcgcggtagttgcgatgggattcgagttttggtttacgttttagttttcgtttaagtgtagcgagcgcggtaaagtcgagtttttagagtcgcgagcggcgagtagtagtttttttttttagcgttttttttttgcgcgtcggttacgttttttttcgttttttttttttcgcgttcgttcgggtttcgttttttttcggcggcgtttggtttttgttttttcgacgtgttaatgtcggggggtcgtgttcgtcgggaggaggagggcgcgcgcgtttttttttttcgtttttgatttcggagtttttttttttttttatttttttatttttgggatgtggacggttaggttgaggtcgttttcggattaaggaggtgttgttcgttcgttttgtgaagttgggtattacgtatacgttagggtacgggttcgttatttgttaggtgttttttagataataaaggtcgattgttcgtttttcgagtacgttcgggcgggaggaggttggacgtcgttgttcgtggaggtggtatggggatggggaggggagcgttaggaaattgagtttcgatatttttttttaggtttgttaggagtttttggtatcgcggtaaaggttgagttcggtttcgttaattgtttttgtttaatttttttatttgtttcgtaatttgtaggaatatagtgggtttttattggtcggcgtggttttcgtttaagaagtttttgtcgggatttgtgtggagataggggcgatggagggcgcgtggcgaagtttgttttgggagtttaggtttttatatacgtttttttttttttttttaacgttgttaattttagtaatgatttttttgtttttgtaatagacgatagttttagggttagggtttttaattgtttttgtcggttttaggagtaaaataaaagtataatgatttttttaagttcgattttattgtttagaaagtgttttatttatagttttatggtggatttttgaacggaaagtaataatagtatttgtataggggttaatagtttttttttatagcgattcgtttttttatgtttacgataatagttttgtgaggagggtagagtaggtatgtttattattgtagtgagggaagatttagggtttgaatatttattggaagatttattttaagaaagatgagttttttttatgtattttgataaattaataagatattttttttgagagtttaagaatggaaaaataaatggtagatgtttattagaaaaagggatagaatagatatatttagatttttttttgaagtattatttaaaatttatagttgtttagttgttttattttatttaatattgaaagtttttttgttgtttaatagtgtgaggatttaggttgatgtaagaaaaatgatttttaaagttaattatttaaaaattattagtgttagagggtgattaaatgattaatgtgtataattgtttttttttaaatgtaagtatttatttatttagtaagtatttgtttagtgtttgttgtgaagtaaggaggagttaggtattaggagtattattattaatagatagatatgtagatgtggtttttgtttttatagtttttataattaagtatggggatttatattttaattttttagtaaaaggttcgagttatgcggttgtaggagaattgaaatattaaaggtttttgtgttttgggttattagattttatgttttttttaggatgatagataaaagatattatttaaagtaattataagtttttgggattttgatttatttttaaaatttattttgtattgagaaaaaattattatgagttaaaatattaatattatgtttgagagagaaaatttataatttttttttttaattagttgatattggagaggataatatttttaaaagagtgggtgaaaagagattatattgtaatttaattttaggtacggaatttttattaggaaaaaaaaaaattgaatagggagttatattatgttggatcgttatttttgttttttatttagtaaatattttttgagtatttaggtaggtataagatttatataaatgagtaagataaagtttttgtttaggggaatttatagtttagtagggaaaataggtatttaagtaagaaattataatatttgttaatagagtttatgtttagttagtatatattaatttggttttattggttgatataatattgaaatttttttgtattgattataaaaaaaattatattttaaaatattttttagtttaattttgagatacgttaaatttttttagatttaggaattaaaattttaatgttggttataatagagagtttttagtatttgtatttttagggttgttagttgtttttaataatatttattgtttgttatataaagaaaggaagtatatatataaggtattatgagtggatatatatgttgtaatatataaggaattatattatagattagtagtgtttaatggaatattggtaatgatggaaatgttttatattttaggtaggatgtatggattaattttatattgtattttgtgatagttttgggtatgtttagggattgtgttttatgtattttattgtttttataatttttttagtaaggattttcgattgtaatttatagaagtagtttaaattaagtaagtaaataaagaagtttaaatgtattggtttttataattagaaagtttagggataatagtgttttagatttttttagatttaaggatttaaagttattaggatttgaagggcgagtgtgtgtggatgtatgtgtgtataagtgtacgtatatttttttttatttttatttttaatatttttttgtgttgttttgttaattttgtatatatttagggtagttttaggtttatagtttattagtattaacgaagtagagtttttttgtttttataaatattttttgtaaaagtttatgggagaaatcgagttttattgatttggtttaagttatgtgtttattgggaaggagttagagggatggagtatgttgattggttatgtttgagttatgtgtttatttttgaagtcggggttagggatttattttatattagaggtttgagatggggaagggtgtatttttaaagaaaaattgatgtattattaatagaagaaagagtaataatgttatataaatataattaatatagttaaaatttcgaatttgaaaatattttattatatttttgattgtaaaagatgtttattgtagaaaatttggaaaatattaaaaattataaaaaataaaaaaggtatttaagatataattattgaagagtttgttttaatatgttttttttttttttttttatttatgtgtgaggtttttttttttttatataatttaagattttggtatatttttagttttttatttagtttttttataaataatatgagtattattatagattattaaaaattttttggaaatatattgtttaatggtagtataatgtttaattttatggatgtattataattttgggtgtttaattattttttttttttttttttaatttttttattattataaattatttgatgattaatgtttgtgtgaataaaatttgtttgtttttgattagttattaagtatgtatttttaattaggggtggaattattataataagagtataattttttttaagtttgttttttaatagttttttttggtttttagtaattatttgaaagttttttgtttataaagttgaagaaatgaatagattaatataatttttcggttagattttatattaataataattattttatagtttgtgagtttgaaaggagataatgtatggttttcgttttagtttttatttagtattaattgaatatttttgtgttagatgtagtgtattaggtgttagggatattaagttagataagatatagatgttgtttttataggatttttagtaaatgaggggagagatgaataaaggggtaaaaattatatggtatgaagtattttaatagagttatgtatagtgatgtttgtatatagaggagtatttgtttagtgagtttatgtggttttttagagaggtgggtattagattttgaaggattaggagcggggaaagggaaaggagagaagaatgttttagtagtgggaagtataaacgtacggggttagaggtaggaaatagtataaggaataggaagaataaggagtgttgtttagttaaggaaatggggtttggaggagagtggggagagtcgaggttatagagatagataagaattgtaaatatttcgaaatgagaattttattttttgagttacggggagttattaaaggattttaagttgtagtttgttgtgttaagatttatatttttggaaagatagtgaagaaatttagtgaagggtgatttgaaagggggtaaaagttaaggtaggaagaaaatggtaaggagtttaatgtagtgatttataggagaaatagggaattgaattaagtttatagaggtgagaatagtgagaggggatgaataaggaagttaagatttaataggtttgtgtgattaaaagtattgtggagttatatgtgtttttatttagtaagatatggaggtatttgttagtggatagtgaaggatttggagttgagtttgtttgtttcgagatgttcgtggatttttttttttttttttttttgagacggagttttattttgtcgttaaggttggagtgtagtggtgtaattttagtttattgtaagtttcgtttttcgggtttacgttatttttttgttttagtttttcgagtagttgggattataggcgttcgttattatgtttggttaattttgtttttgtatttttagtagagatggggttttattatgttagttaggatggttttagttttttgattttagtttttcgaagtgttgggattataggtatgagttattgtgttcggtcgatttttt

SEQ ID NO: 129 - DNA, 5572 bp, Artificial Sequence
  chemically treated genomic DNA (Homo sapiens)
tcggttgttgttttggagggtgtaagttgtaagttttggtggtttttatgtggtgttaagtttgcgggtatgtagagggtaaaagttgaggtttgggaatttttgtttagatttagaggatgtatggaaacgtttgaatgtttaggtagaagtttgttgtaggggcggagtttttttggggaatttttattagcgtagtgtagaagggaaatttggggttggagtttttattggggtattgtttagtggagttgtgagaagggggttattatttttaagattttcgaattatagatttattgataattcgtattatatttttggaaaagttgtagatatttaatattagtttaggaaagtagtcgagggggttgtattttgtagagttataggagcggagttgtttaaggttttaggagtttattttttgttttagtgtggtttggatgtaagatatggagttaaaggagattattttggagttttaagaattaatgacgattttttgtttcgttcgtttatagatgtagtttttttcgtacgtgcgtattttttttttttttcgtttgtagggtttatggtttttatggcgttttaggggtagtagtgtttgtggtagttttggtttttgtagcggtggtagtagtattaggttttgtagtggtatttatcggcggtttaagtcgtagtattttttatagtatttagtagtagtattgttgtaatcgataaagatattttcgaattaagtatattcgttgattttagtaaagtattgtattatgatcgagatgagttttttgagtagcgaggtgttggtgggggtttgatgtttttttttgattagttaggtttggggattgaagaaagtttaggttttttagatgattatttggaggtggttaagtattttaaattttatgggttttttagcgataaggttaaggtagattttttcgagtggttggttgtggatgggttggttagtgtttttaacgatggtaaggaggatgttttttttgggatagattggatgttggagaaaattgatttgaaggagttcgattttgatgttttgttgggtatagatgatttggaaattatgttagacgagtttttggttacgttggatgattcgtgtgatttttttgtttttttagtttaggagattattaaggagtttttttagtttaggagattattaaggagttttttttagatggtgaattcgatttgttattttttagaaagtttaattcgattaggttgttttttttatttttttgtaatttttttttttttttttaggggtttagttttttattttagattatttttttagtttagagttgggtagtgaagtggatatttttgaaggagttaggaagttagattttattgtttatatttttaagattttttattgtataaaggaggaagacgtttttttagataatgatagtggtatttgtatgagtttagagttttatttgggttttttttttatttttaggggtttttcgagtaggagttcgttatttttaggtgttttttgtggttttgtttgttttaaattttatgatttttttggagagaagatggtagtagtataagtaaagggtgagaaattggataagaagttgaaaaaaaaatggagtaaaattaaatagtaggaattaggtatcgttagaagaagagggtggagtaggaggtttttattggtgagtgtaaagcggtggaaaagaagaacgaggttttgtaagagagggcggattttttggtcgaggagatttagtatatgaaagattcgatagaagaggtttgtaaggtaagggggaagaaaagggttttttagttgagggtagttaggagcgttaatgtgtttgtatataggagtttcgcgttgtagttgtgtgttcgaataaattattttgtagtggaaaaaaaaaaaaaaaagaattaatgattgttttgttgggttttggatttgtatggggtttgtagtttttttgttttggtcgatgttttttttttggaaagggagtatttatttaatgtttgtattttaattttattttggaagtagttaatttgttttagattttataggtttataggtagaagggatttgttttgttttagttgagattttggattgtggatttttgagttaatgttgaaatgggttaagatttgggggattgttgagaggagattattgtattttgtaatgtgagaagtatatgagatttgggagggggtaggggtggaatgatatgatttggatttgtgtttttatttaaattttatgttgaattgtaatttttagtgttggaggaggggattggtgggaggcgattggattatgggggtcgattttttttttgttattttcgtgatgttgagtttttataagatgtggttgtttaaaagtgtatagtatttttttttttattttttttttttttttttttggttatataagatgtgttttttttttttttgtttttcgttatgattgtaatttttttgaggtttttttagttatgttttttgtagagtttgtagaattgtgagttaattaaattttttttttttataaattatttagttttaggtagttttttatagtaatgcgagaacggattagtatcgttaatattgatgagaatgttgagttatgtgtatgtacgttgatatattatggtggaagcgaaaattggtttaaattatttgggaaaatatggtattatttagtaaatttcgagatatgtattggttgtgatatagtaattttaaaaaaaaatttggatatgtgttttaagagatttgtataagtatgtttatagttaagggttggaaattatttaaatgtttgtttattattagtagaatggataaattagaggattataaaattttgtcgtaatgtaataggtagtttttaagaaatttaattatatataatgtgaaaatgtgttattgtggggttaatgaaatgaatgaggtaagttcgttggattatttaaatttgttttgttttcggttggagtttgatgttatttagtggtagacgttgttttggttgaaatattgatggagattttcggtttagtggttggttgagatttttaggatagtggtagtatttttaggaattttttaattagttaggatttttttttttgatttgatttgaggataataggtcgggaaaataatggggattcggagattttttttttgtttttttgttttttaagatagggttatatgtattttatttttttttttttgatttgttgaaggtaagaattttagtttgtttttgtttgagaatggggagattgagtagaggacgataggaaggatggtaattattaatcgggttatgtttgatttttagttattttaggtgttaataagttgtgttttttggtttttaaaatttattatttaatgaaatatatgtaatgaaatatagtagtgaaaataataaattggaggtatacgtaagagtttgggtgaattttttttttttgtaagtaaaaatatttttaattgatgtatgataattttgtatatttatgggatatatgtgatattttgatatatgtatacgtatatacgatgtaatgattaagtcggggtatttaggatttttattattttaagtatttattatttttttttttggggaatattttttattttttagttattttgaaatatataataaataattatttatagtttttttacggtgttattaaatattagaatttaatttttttatgtaattatatgtttgtttttattaatttttttattttttttattttttttagcgtttggtaattattattttgttttatttttaaaagattaacgtttttagtttttatatgagtgttaatatgttttttttaggtgtagaggttgttgatttttggatttggaaggtgggggagagtggtttggattttagtattttttttttttttagggttaggttttgtttggttattttttgttgttataggtgtgtttggtatagatatttagttttcggggtcgtgtcgtttttatttttgtatgtttttagaggtatttgtttcgtggatttgatttttttttagatatataaatagattattattgagtagatatagggttattttttagttttttattaggtaagagcgattagggtagggattgatattgtcgaatttaggagttaggttcgatttagttttaggtttagtaggtttcgtttgtttatttgggttaggtttagagttcgggagtttttggttggtgggaggttattcgtaatttattttatacgtagttttagtttttttattaggcggggcgattaggatagggatagaattcgttgaatttaggagtgagattcggtttcgggtttcgttgggttttttcgtttattttggttggatttggcgtttgggagattttggttggcgcgaggttacgtttattagatatgtagttttagttattttattagttgggcgattaggatagggacggaggttgttgagtttagttagaggtttgtttttcggggtttgttttgggcgtttttttaaggacggatagggtaggtagggttcgggacgatggtcgtatagtttcggtttcgtgtttttaggttcgttttgtttttcgatgtgagggagattcgggggatgggataggttgggtttcgtagtgtttgattttttgtagggttttcgggataggggttcggcggatagtcggttgtttaggggtgaggggtttaagttggtattgcggttatttttcggttcgggtttttttggggaggggcggggttggtgagaatcggttacgtgtttcggggtttattcggggttttttagggtcggaagtagggtttttgtgcgtaggcgttttgaggatttcgggttgtttattttacgttagggggcggaattttttgtagtttttttgttttcgtattttcgtgggttttgattttttttttgagagtcgggtagaggtttcggagttatgtaggtcgaaggtcggggtatagggggttcgacgggcgatgttgatggtttaggaggttttggtatttttgatggtttagggggtaatgttggcggtttaggagaggcgggtgttacgggcggtagaggttttcggggcgtaggggtagtaagggtttcggggtcgggaggaggcgtttcgcggggttcgtatggcggcgcggttttagggttgaatggatgttgtagatgcggggttagggggtcggagagtcgtttgtttgagttgtattttgttttgttttgttttgttttgatagttttggtggcgaggtgggggtcgggagatggggagggtagggttaggtgggggaggaggcgggggagatgcgagtaagtggttgggtgggggtgggggtgggggttaggacgtggggatattaggggaagttggtttggggtaagtagtaggtcggagttataggttaagttttaggagaggatgttttaattgggtttttattagt

SEQ ID NO: 130 - DNA, 5572 bp, Artificial Sequence
  chemically treated genomic DNA (Homo sapiens)
gttggtgggggtttagttaaggtatttttttttaggatttggtttgtggtttcggtttgttgtttattttaggttagttttttttgatatttttacgttttaatttttatttttatttttatttaattatttattcgtatttttttcgtttttttttttatttggttttgttttttttatttttcggtttttatttcgttattagaattgttagaatagaatagaatagaatagaatataatttaagtaggcggtttttcggttttttggtttcgtatttgtagtatttatttagttttgaagtcgcgtcgttatgcggatttcgcggggcgttttttttcggtttcgaggtttttgttgtttttgcgtttcggggatttttgtcgttcgtggtattcgttttttttgggtcgttagtattgttttttgggttattaggaatgttagggttttttgggttattagtatcgttcgtcgaattttttgtgtttcggttttcggtttgtatggtttcggagtttttgttcggtttttagagagaaggttagggtttacgaggatgcggaggtagagaggttgtaggaagtttcgttttttggcgtgagatgggtagttcgggatttttagggcgtttgcgtataggggttttattttcggttttgggagatttcgagtgagtttcggagtacgtgatcggtttttattaatttcgtttttttttaagagagttcgggtcggaaggtggtcgtaatgttagtttggattttttatttttgagtagtcggttgttcgtcggatttttgtttcgggagttttgtagggagttaggtattgcggggtttagtttgttttatttttcgggttttttttatatcgaggagtaagacgggtttgggaatacggggtcgggattgtgcggttatcgtttcggattttgtttgttttgttcgtttttgggggagcgtttaggatagatttcggggggtaggtttttaattgggtttagtagttttcgtttttgttttggtcgtttagttggtggggtagttggaattgtatgtttggtgggcgtggtttcgcgttagttaaggttttttaggcgttaggtttagttaaggtggacgggagggtttagcgggattcggggtcggattttatttttgggtttaacgggttttgtttttgttttagtcgtttcgtttggtgggggagttggagttgcgtgtggggtgggttgcgggtggttttttattagttaggggttttcgggttttaggtttggtttaggtggataggcgggatttgttggatttgaggttgggtcgggtttggtttttgggttcggtagtattagtttttgttttggtcgtttttgtttggtagggagttgggaggtgattttgtgtttgtttagtggtgatttatttgtgtgtttggaagggggttaaatttacgggataggtatttttagaggtatgtaggggtgagggcggtacggtttcgggagttgaatgtttgtgttaggtatatttgtagtaataggaggtgattagatagggtttagttttgaggaagggggaggtattgaaatttaaattatttttttttattttttaaatttaggaattagtagtttttgtatttgggaaaagtatattggtatttatgtggaaattaaaaacgttgattttttggaggtagagtagaatgatggttattagacgttgggaaaggtggggagggtggggaggttaatggggataaatatatagttgtatagaaggattaagttttagtgtttgatagtatcgtagagggattataggtaattatttattgtatattttaaaatagttaaaagataggaaatgttttttaaaaaaagaaatgataaatgtttgaggtggtggagattttaaatatttcgatttgattattatatcgtgtgtgcgtgtgtatgtattagaatattatatgtattttataaatatgtagagttattatatattagttaaaaatgtttttatttatagaaaagaaaaatttatttaagtttttgcgtgtatttttagtttattatttttattgttgtattttattatatatattttattaaatgatgaattttaaaaattagagaatataatttgttaatatttggaatagttgaaaattagatataattcggttagtgattgttattttttttgtcgttttttgtttagtttttttatttttagatagaggtaggttaaagtttttatttttaataggttagggaagggagagtaaagtgtatgtgattttgttttaggaagtaggaagatagagggagggttttcgggtttttattattttttcggtttattatttttagattaagttaagaaaggaagttttaattgattgagagatttttggagatattgttattgttttggaagttttagttagttattggatcggaaatttttattaatattttagttagagtaacgtttgttattagatggtattaaattttagtcgggagtaggatagatttggatggtttagcgggtttgttttatttattttattaattttatagtaatatatttttatattgtatgtgattggattttttggaaattatttattatattacggtagagttttatagttttttaatttatttattttgttgatgatgggtaggtatttggatagtttttagtttttggttatgaatatgtttgtataggttttttgaagtatatgtttaagtttttttttggaattgttgtattatagttaatatatatttcgaaatttattagataatgttatgtttttttaagtggtttgagttaattttcgtttttattataatgtgttagcgtatatatatatagtttaatatttttattaatattgacggtattaattcgttttcgtattgttataaaggattatttaagattgagtaatttataaagaaaagaggtttaattgatttatagttttgtaggttttataggaagtatggttggggaggttttaggaaagttataattatagcggaaggtaaagaggaaggaggtatattttatatggttagagaaggagaaagagaaagtgaagggggaggtgttatatatttttaaataattatattttgtgagagtttaatattacgagaatagtaagggggaaatcgatttttatgatttaatcgttttttattagtttttttttttaatattagggattataatttaatatgagatttgggtggggatataaatttaaattatattattttatttttgtttttttttaaattttatgtattttttatattgtaaaatataataatttttttttaatagttttttaagttttaatttattttagtattaatttaaaaatttatagtttaaagttttaattgagataaggtaagttttttttgtttatgagtttgtaaaatttaaaataagttagttatttttaagataaaattgaggtataggtattgggtaaatattttttttttaaaagggggatatcggttaaaataaaggggttataggttttatgtaagtttaaaatttaataggatagttattaatttttttttttttttttttttattataaaataatttattcgaatatatagttatagcgcgagatttttatgtataagtatattgacgtttttgattatttttaattagaggatttttttttttttttttgttttgtagattttttttatcgaattttttatgtattggattttttcggttagggaattcgtttttttttgtagagtttcgttttttttttttatcgttttgtatttattagtgaggattttttgttttattttttttttttggcgatatttagtttttgttgtttggttttgttttattttttttttagttttttatttagttttttattttttatttgtgttgttattattttttttttaggagggttataaggtttggggtaggtagagttatagaggatatttggagatggcgggtttttattcggagagtttttggaggtagagggagagtttagataggattttgggtttatatagatgttattattattatttgagggggcgttttttttttttgtgtagtgagggattttggaaatgtaagtagtggagtttggttttttagtttttttaaagatatttattttattgtttagttttagattaaaggaataatttggagtggaggattggatttttggggaaaggggaagaggttgtaagaaggtgaagggggtaatttggtcgggttaaattttttgggagatggtaaatcgggtttattatttggggggggttttttaatagttttttggattgggggggttttttaatagttttttggattaggggggtaaagagattatacgagttatttaacgtggttagaagttcgtttggtatggtttttaggttatttatatttaatagggtattaaagtcgaatttttttagattagttttttttaatatttaatttgttttaaagaaagtattttttttgttatcgttggaggtattgattaatttatttatagttagttattcggaggagtttgttttagttttgtcgttggagaatttatgaggtttgaagtgtttggttatttttaggtagttatttaagagatttaggttttttttagtttttaaatttgattggttaaggggggatattaagtttttattaatatttcgttgtttaggaagtttatttcggttatggtgtagtgttttgttggaattaacgaatgtgtttaattcgaaggtgtttttgtcggttatagtaatgttgttgttgaatgttgtgagaagtgttacggtttaagtcgtcggtggatgttattgtagagtttggtgttgttgttatcgttgtaaaggttaaggttgttataggtattgttgtttttaaaacgttatggaggttatggattttgtaggcggggaggagggaaggtgcgtacgtgcggaggaaattatatttgtgggcgggcggagtagaaaatcgttattaatttttaaagttttaaaataattttttttggttttatgttttatatttaggttatattgaggtaaggggtgggtttttgaggttttgggtagtttcgtttttgtggttttgtagggtatagttttttcggttgtttttttgggttggtattgaatgtttgtagtttttttaggagtataatgcgagttgttagtggatttatgattcgggggttttgaggatggtggttttttttttatagttttattaggtagtgttttagtggggattttaattttagattttttttttgtattacgttagtagaggttttttaggagggtttcgtttttgtagtagatttttgtttggatatttaggcgtttttatatattttttgaatttaggtagaggtttttaagttttaatttttgttttttgtatattcgtaggtttaatattatatggaagttattaaggtttatagtttgtattttttagagtagtagtcgg

SEQ ID NO: 131 - DNA, 6692 bp, Artificial Sequence
  chemically treated genomic DNA (Homo sapiens)
tatgaatgtatatttataagtttgtttgtgtatatatgaagaaatttttggatatataggaaattgattaatagagattatggtgggggagtggttggtagagaatttggaagataaggagggttttttatattttatttttaaattatgtgaatgtgttatttatttaaagtgttatatgagagtttttgattagaggttatattttttagtttgtaagaatggttattttataggttgtaaatttttatgagaaataaagtttttttttttaaatttatgaatagattaattagtttaaggaatattttattgattttaaattggattttttcggtttagcgattgaagattgatatagttcgatcgtttcggaagttttttgggttattatggacgtcgagtttcgggtaatttttatagtggaggataggaatgttaggtttttgagtttaagttaagttattatatttttagtgatttgtacgtatatattaagatggtttgaagtaattgaagatttatagaagtgaaaatagttttaattgatgatattttattattgtgatttgtttttgttttattttaattgattaatgtattttgtaattttttttatttttaagaaggttttttataatgttatttatttttaagaagtttttttgtaattttttttatttttgagaatgtattttgtgagatttattttttgtttttaaaatattgtttttaattttattgtttattttaaaatttataagaattaatgataattttattattttttgttgatttttttttcggatttagttcgtttgtatttaggtgaaataaatagttttgttgtttaaaaaaataaaaataaaaataaaaataaaaaataaagtgttaaatgaattgaatttaattttatgggaagagttaatttagtaattataatttttattaaagggtgaaagtttaatagttatttatttatttaataatttatagtaggttaggtatcgcggtttacgtttgtaatttttgtattttgggaggtcgaggtaggtggattatttgaggttaggagtttgagattagtttgattaacgtgatgaaattttatttttattaaaaatataaaaaattagttgggtatggtggcgtatatttgtaattttagttatttaggaggttgaggcgggagaatcgtttgaatttgggaggcggaggttgtagtgagttgagattgtattattgtattgtagtttgggtaataaaagtaaaatttcgttttaaaaaataaaaataaaataatttatagtaattaggaaatatttttagtaatgatatttaataagtgtatagtattttaaatgtgttaggtattgtgttgtttttatttatattattttatttaatttttattatttttagagtgtaagtgtttaatattatagaagagatagaagattatagaaggatgagagaggttgttttttttttttttttttgtgagacggagttttgttgtgtcgtttaggttggaaggtagtggcgtgaattcggtttattgtaatttttattttttaggtttatgttatttttttgttttagtttcgtgcgtagttgggattataggcgttcgttattatgtttggttaattttttgtatttttagtagagacggggttttatcgtgttagttaggatggtttcgattttttgattttgtgattcgtttgttttagttttttaaagtgttgggattagaggtgtgagttagcgtgttcggttaagaggttgtttttttttaaagttttttgtaaatatttaggcgttattattttgggttaggtttgaggatgggtattgtattagggatattaagataaagatagtattttgttttttaggatttaatggtttagtgagggagatcgatgtgtaaaatagtagatttatagataggttttgaatagagaagggagtgttagagtatagtgtttgaggattaggagataaagggaatagagagatcggggataataagtaaattttttttacgatattttttggtcgaggataggtttcgaaagtagttgtggaatttggaggcgttatgtgggagataaattttgtagttttaagtttaataatgaataaaggttgtcgggttttttggtaggagaggagatttgataacggtttggttcgtcgtttgattagtgtagatattttttttagattttgaagtttgaagtgtttttttttagttgtttatatagattaaataagttggatgattgttttatttttatttcgttgtgtggttttatagttatagttagttttataataatttaattaaattatttgagtagaagtaaaaataatttttatgggtaaagatagatagttttaagatgtgaatattaattttttgttgttattttagaagagagtggattttgaagttcgttttaggaagttttcgagaagggcgattttgtttttttttaaggtgaagtggtaaaattgttgtttttttttatagttgaaagttttttttattttaaggtttatataggatatttataaaagttgataataatgagttgtgatttggtttttgggaaggtagttttattttaaagaataaggattagattgggtgtggtggtttatgtttgtaattttagtattttgggaggttgagataagaggattgtttgaatttaggagttcgaggttaatttgggtaatatagtgagattttgttttaattttttttaagttaaataataataataataataataataataataataataataataataataaaaggataggaattttattttaaaagtatttttttatttaaaggtttattttaggggaaattttaatttagtttttttagtttttaagtagttgtgaggagtttggaatattgttatagattggtagaattaggtattttttaataaatttagaagttaagtggtattgttaaaaaagattaaaaatgaatatgagttttaatatttacgttttttgttatggtttttatggaaatagatatttgttttagggagaaagaaaatgtggggggaagtagtgtaagtgtttttaaattattagtgttttgaaagatttattttttttttttgttataatattaatagttaggaatgtgagatttttgtgtggtaatttattgtatttaaaaaaatgtattaaatgagtgggatttttttttgtgaatttttagattaaatataaagattttaagataaaaagtttgtttagtgggtaaggattttttgggtttgggttttttgtttatttgtgttgtttgtttatttgtcgtttttttgaggggttttatgtttatttttttttaatttttttaatgatgtttgagattttgtttagaaaaatgatagacggaagtatttagttattttgaagttaagtttggtttgagaagaagttttttaaggtttagtatttgaattatttttggttttgtttataggttaagtgaaaattatttcgattggtttgggggggaggtcgattttatataagggcgattgttggaaaaaatgtcgtaataagtatattttaggtaatagcgtattgttaattgtttgttttgtgtagtgtgttgttgtttgtatgatttagtttttattgttttgggtattttttagttgtattttatttttggtatatttttggtgattaattaggtatgagagtttttttaaattaggattgttgttttaggaaggttggttatatttgttttttgatttggggagatgtagtttattaataaaataaagatattttttttgtttagttaagattttaaagtaggtgttttggtgtattgattattaatcgaggatacggttttggttagagaatgggaggaggcggggattatgtttattttatttattttttttttttttttgtgagagaaagggttagttattttaaggtacggttagattaattttttttgtgtttttgttgaggttttgagttatttaggttagggagaatagtgattttgtggtttttttttcgatttttaaaaagaatttagtgttgttttggggagtacgtgttttgagaataaaagtaatatttaattgtaatttgtgtagtttagaacggttattgtttttttttttttattattcgtagaaggtttggaagaatagatggagtttgtatttaagttgagtggttttgttagattaaaggcgattaaattttagagttttacgttttttcgtataggtttttggttatcggttcgggaatttgaggatgttggtaagaacgtatatagtgagggaagggttacgttcgcgatttgtgggttgagtggattagaaattacgatgatgttataatatgggtgatacgtcggtgtcggtgtagggtgtcgggggtagggggttttgtaggggcgtggagtggtattgtgttgttataggggttcgggcgttttaggtatttatgtgggtggcgtattagaaggggtattgttttgttcgagtgttgtttttggggcgaggcgggtatgtggttttataaggtggagtttaggcggttaaagtttggaaaggtagggaaggattttttcgtttttcgtttgtttcgttttgtttttgttttcgagaatggggagttggttcggatttagttcggggtttattgttacgtttttttttacggcgagattatttttttagttttaggtttatatttggggatgttttttaggcgttttgtaattttcggtattgtttttttgtttttcgggataggattatatttttcgaggtgtttcggggtttcggggggcggcgttttacgcgggttgtggggggcgggggcggtacgtgtcgtcgttttcggttaatgcggagtttcgcgcggaggttacgtgtttttgtttggcgtttttgtgcgcgttcgggtttgttggtgtttagagtgtggttaggcggttcggattgagtaggtgggtgcggggttcggaggaggcggcggttggttgaggttagtaagagggacgcggtcggcgggaggggttgggtcgtggtagcgattttttgttgtagggcggcgggcggggttgcgggtttcggaggggttggtgggcgggggtcgtttcgttttgtgtgtggttcgggcggagtttcgtttttgttttcgtttttcgggggcgcggttgttcgtgggtagggggttgggcgattatcgggcgttcgtttcggggtgtcgtcgaggagataatagggggcgtgggttttcgtttattttttttttttttttttttttttgcgggtttcgtcgggttttttattgtttgaagggacggggcggtgttttagggattagcggttttaggattaaattgcgggtagttagggtcgcgattttttttgcgatcgttttttggcgatcgtagttggtgattgaggggcggcgttttcgggttttacgagggtttttttgttttcgcggtcggacgcgcggatagcgtgggtggcggtaggttgggtatggggacggcgggaggcggtggcgagtttatcgcgggattattcgggggtttgttttcggggtttgttttattcgttgaattgtgaagggggtggtggcggcggtttggaggtgtttttggcgggagttggggggggcgttcgcgtagggggagttaggtaggggcggagttattcggattggatcgttagtttcgtttattttttttttttttacgcgcgcgggtttcggggtgttgagttcggggagattcgaaaaggcgcggggaggaagggggcggggttaggggtcggagcgtaaggcgtgttttgattggtcgggggcgatcggttttttttttttcgttcggattagggttacgtttattttgggttcggtgttgcgtttaattttttgttttttttaaattttgtcgttgtttttgattttaatttttagtttttgggaatttgttattttacgtttttggtattagttggcgtttataaaagttataatgttaaaaagattaataagagatatagtattttttatgatataacggtagtaaatataagttaaaatttagaggtttataaatattttgtttgttgttgggtaaggaagtttaaatttgagggataataggagtttaatattattggttattattagtttgggcgtttttttatttattacgttagatatagataaagtaggggtgggtattttatttgtataatgagttgtaggtagtattaagatggtttcgggggtattgttgagttgaatttggaatatttttttatagtttcggtgaaatgttaaagagtttatgggggaaaaattttttatttttgtgattttgtttgattttaaaaatttaagagttttatgatcgagaaagtttagttaatttgattttttggaattaatattatatttaggttatattttttaatgtttatttagtagattttgataatttttttcgtggttaatttagacgtttttattttacgtatttttttgacgatgtatgtagatgtgatgtgagatttttttgggttgatgatatatagaaaggtaaagaaagtgattgtatgtttttgaaaattatttttagg

SEQ ID NO: 132 - DNA, 6692 bp, Artificial Sequence
  chemically treated genomic DNA (Homo sapiens)
tttgaaaatgatttttaaaaatatgtaattattttttttgtttttttatatgttattaatttaaaaaaattttatattatatttatatatatcgttagaaaaatacgtggaataaagacgtttaaattaattacgaaaaaaattattaaaatttattaaataaatattgggaaatatgatttgaatatgatattggttttagaaaattaagttaattgagttttttcggttataaaatttttggatttttaaaattagataaagttataagggtgaagaattttttttttataaattttttaatattttatcgaaattgtaagaagatattttagatttaatttaatagtgttttcggagttattttaatattgtttataatttattgtgtaaatgaaatatttatttttgttttgtttgtgtttgacgtggtggataagaaaacgtttaagttaatagtaattaataatgttgaatttttattgttttttaggtttaagtttttttgtttaatagtaagtaaaatgtttatgaatttttagattttgatttatatttgttgtcgttatgttatgaaaaatgttgtattttttgttgatttttttaatattatgatttttgtagacgttagttagtattaaaaacgtaggatgataggtttttaaaagttaggaattaaaattagaggtagcgataagatttaagaaaagtagagaattagacgtagtatcggatttaggatgggcgtggttttggttcgggcgaggaaaagaggatcggtcgttttcggttaattagagtacgttttgcgtttcggtttttggtttcgtttttttttttttcgcgttttttcgaattttttcgaatttaatatttcggagttcgcgcgcgtgggaaggggaggggtgggcggggttaacggtttaattcgggtaatttcgtttttgtttgattttttttgcgcggacgttttttttaattttcgttaaaaatatttttaggtcgtcgttattattttttttatagtttagcgggtggggtaggtttcgggaataggttttcgggtggtttcgcggtgagttcgttatcgtttttcgtcgtttttatgtttaatttgtcgttatttacgttgttcgcgcgttcggtcgcgaagatagaagaattttcgtggggttcgggagcgtcgttttttaattattagttgcggtcgttaggggacggtcgtagggagggtcgcggttttggttgttcgtagtttggttttaaagtcgttggtttttggggtatcgtttcgtttttttagataatggggaattcggcggggttcgtagggaagggagggagggagggaggtaaacgagggtttacgttttttattgttttttcgacggtatttcggagcggacgttcggtgatcgtttagttttttgtttacgaatagtcgcgttttcggagagcggggataaaggcgaggtttcgttcgagttatatataaagcggagcgattttcgtttattaattttttcgaggttcgtagtttcgttcgtcgttttgtagtagggggtcgttgttacggtttagtttttttcgtcgatcgcgttttttttgttggttttagttagtcgtcgtttttttcgagtttcgtatttatttgtttagttcgagtcgtttgattatattttgagtattaatagattcgggcgcgtataaaagcgttaaatagaggtacgtgattttcgcgcggggtttcgtattggtcgagagcggcggtacgtgtcgttttcgttttttataattcgcgtggagcgtcgtttttcgggatttcgaagtatttcgggaagtgtagttttgtttcggagggtaggaggataatgtcgggggttgtagggcgtttggggagtatttttaggtgtgggtttgggattaggggggtggtttcgtcgtggaagagggcgtggtagtggatttcggattaggttcgaattagttttttattttcgagaataagggtagggcggagtaggcggagggcgggggggtttttttttatttttttaaattttggtcgtttggattttattttgtagagttatatgttcgtttcgttttaagggtagtattcggatagagtagtgttttttttagtgcgttatttatatgggtgtttaagacgttcgagtttttgtgatagtataatgttattttacgtttttgtagggttttttgttttcggtattttatatcgatatcggcgtgttatttatattgtgatattatcgtaatttttaatttatttagtttataggtcgcgggcgtggttttttttttattgtgtgcgtttttgttagtatttttaggttttcgagtcggtgattagggatttgtgcgggaaagcgtggggttttggaatttgatcgtttttggtttaataaagttatttagtttaaatgtagattttatttgtttttttaagttttttgcggatgataggggaggaagagtaatagtcgttttagattatatagattgtagttaagtgttgtttttgtttttagagtacgtgttttttagagtagtattgggttttttttaaaaatcgaaaaaggagttataaggttattgttttttttgatttggatagtttagaattttagtaaaggtataaaggaaattggtttgatcgtgttttagaataattggtttttttttttataaaaaggggaaaaaaataaatgaaatgaatatggttttcgtttttttttattttttgattaagatcgtgttttcggttggtggttaatatattaagatatttgttttgagattttgattaagtagaagagatatttttattttattaatgagttgtatttttttaaattaagaaataaatgtgattaatttttttgaaataatagttttaatttagaaagatttttatgtttagttagttattagggatgtgttagagataaaatataattaaggggtgtttaagataataaaaattggattatataagtagtagtatattatataaagtaaataattagtaatgcgttgttgtttgaaatatgtttgttgcggtattttttttaataatcgtttttgtgtggggtcggttttttttttaagttaatcgaagtggtttttatttagtttgtgagtaggattaggaataatttagatattgagttttgaaaggtttttttttagattaaatttagttttaaaatggttaggtgttttcgtttgttatttttttgaatagaattttagatattattagaaaagttggagaaggatgggtatgagattttttaggaaagcgatagataggtaggtaatataaatgagtaaggaatttaagtttaagaggtttttatttattgaataggttttttattttgaagtttttgtatttgatttggaggtttatagaggaaggttttatttatttaatgtatttttttaagtataataaattgttatataaaagttttatatttttgattattaatgttgtgatagaaaaaagaaataaattttttaaaatattgataatttgaaagtatttatattgtttttttttatattttttttttttttagagtagatgtttatttttatggaaattatagtaaggaacgtagatgttagaatttatgtttatttttaattttttttagtaatgttatttggtttttgggtttgttgggagatgtttggttttgttagtttgtgataatgttttaagttttttatagttgtttgaggattgagagggttgggttaaagttttttttagaatgagtttttgaataaaaaggtgtttttgaggtgggatttttgtttttttattattattattattattattattattattattattattattattatttgatttaaaaaaaattgagatagggttttattatgttgtttaggttggtttcgaatttttgggtttaagtaatttttttgttttagttttttaaagtgttgggattataggtatgagttattatatttagtttgatttttgttttttagggtggggttgtttttttaagagttagattatagtttattattgttagtttttgtgggtgttttatataagttttggaataggaagggtttttaattgtaaggagagataatagttttgttattttattttggagaggggtagaatcgtttttttcgaaagttttttaaaacgaattttaagatttatttttttttgaagtggtagtaaggagttaatgtttatattttggaattgtttatttttgtttataagaattatttttgtttttgtttagatggtttggttggattgttatggagttggttgtgattatggagttatataacgaagtggagatagggtagttatttagtttatttgatttgtgtagatagttaaaggagagtattttaggttttaaagtttagaaggaatgtttatattgattaaacggcgggttaggtcgttgttagatttttttttttgttagagagttcggtagtttttgtttattgttgggtttgaggttgtagggtttgttttttatatggcgtttttaagttttatagttgttttcgaggtttgttttcggttaaagggtgtcgtgggagaggtttgtttgttgttttcggtttttttgttttttttgttttttaatttttaagtattatgttttaatatttttttttttatttaaaatttgtttatgagtttgttgttttatatatcgattttttttattagattattaggttttagagggtagggtgttgtttttgttttggtatttttagtgtagtgtttatttttaggtttggtttaggatgatggcgtttgaatgtttgtagagaattttgggaaagaataattttttggtcgggtacgttggtttatatttttaattttagtattttgggaggttgaggtaggcggattataaggttaggagatcgagattattttggttaatacgatgaaatttcgtttttattaaaaatataaaaaattagttaggtatggtggcgggcgtttgtagttttagttacgtacgaggttgaggtaggagaatggtatgaatttgggaggtggaggttgtagtgagtcgagtttacgttattgttttttagtttgggcgatatagtaagatttcgttttataaaaaaaaaaaaaaagaataattttttttatttttttgtgattttttgttttttttgtgatattagatatttgtattttgggagtggtgaggattaaatgaaataatgtaaatgaaaatagtataatgtttggtatatttaaagtgttgtgtatttgttaggtattattgttagagatgttttttgattgttatagattattttatttttattttttgagacggagttttgtttttgttgtttaggttgtagtgtagtggtgtaattttagtttattgtaattttcgttttttaggtttaagcgattttttcgttttagttttttgagtagttgggattataggtgtgcgttattatgtttagttaattttttgtatttttagtagagatggggttttattacgttgattaggttggttttaaatttttgattttaggtgatttatttgtttcggttttttaaagtgtagggattataggcgtgagtcgcggtgtttggtttgttataggttattgaatgagtgaatgattattagatttttattttttgatggaaattgtagttattgggttaattttttttatggggttaaatttaatttatttaatattttattttttatttttatttttatttttatttttttgagtaataaggttgtttattttatttggatgtaggcgggttgagttcgaaaagagagttagtaaagggtggtgggattattattggtttttataggttttgggataggtagtagagttaagagtaatgttttgggggtaggggatggattttataaagtatatttttaagggtggggagaattataaagaaattttttaagggtgggtgatattataaagaatttttttaagggtgggggagattataaagtatattgattagttaaggtggggtagaaataaattataatggtggaatgttattagttaaggttatttttatttttgtggatttttagttgttttaggttattttgatatatacgtgtaggttattggggatatgatggtttagtttgggtttagaggtttgatatttttgttttttattgtaagagttattcgaagttcggcgtttatgatggtttagggggttttcgaggcgatcgggttgtgttagtttttagtcgttaagtcgagaagatttaatttaaaattagtgagatgttttttgggttggttggtttgtttataaatttggaaaggagagttttattttttataaagatttgtagtttatagggtggttatttttataggttgggaaatgtagtttttggttagaagtttttatgtaatattttaaataggtaatatatttatatggtttaaaaataaagtataagaagttttttttattttttaagttttttattaattatttttttattataatttttgttaattagttttttgtgtatttaggagtttttttatgtgtatataagtaaatttgtaggtatgtatttata

SEQ ID NO: 133 - DNA, 16842 bp, Artificial Sequence
  chemically treated genomic DNA (Homo sapiens)
ttttttaaagtgttgggattataggcgtgagttattgtatttggtttgttatttatgtatttatttttttttgagataagtttttgttatgttgtttaggttggttttaaatttttaggtttaagagatttttttaaagttttgggattataggtgtgagttattgtgtataattttgaagtggttaattttaataatatatttattttagtttaatatatttaaaattatattattttaatatgtaattattattaaaattattaatgagatattttattttatttttatttatttatttttttgagacggagtttcgttttgttttttaggttggagtgcggtggcgcgattttggtttattgtaagtttcgttttttgggtttacgttttttttttgttttagtttttcgagtagttgggattataggtgttcgttattacgtttagttaatttttgtatttttagtagagattaggttttattacgttggttaggatggtttcgaatttttgatttcgtgattagtttattttggttttttaaagtgttgggattataggcgtgagttattgtgtttggttagtgagatattttatttgtgttttttttttttttttttgagatcgagttttattgtgttgtttaggttgtagtgtagtggtataattttggtttattgtaatttttgttttttaggtttaagcgatttttttattttagttttttgagtagttgggattataggcgggcgttacgatatttggttagtttttgtatttttagtagagacgggggttttattatgttgtttaggttggttttgaatttttgattttaggtgattatttgttttggttttttaaagtgttgggattataggtaaaagtcgttatattaggtttatttttttttttttcgagacggagttttattgttgtttaaggtggagtgtaatggtaagattttagttttttgtaatttttgttttttgggtttaagcgatttttttgttttagttttttaagtagttgagattacgggcgttcgttattacgtttggttaatttttgtatttttagtagagatagggttttattacgttggttagattggttttaaatttttgatttcgggtgatttattcgtttcggttttttaaagtgttgggattataggtgtgaattatcgtgtttggtaggtttatttttaatttttttaattttggaaatttagtgtgtagggtaggtatggtgttttatgtttgtaattttagaattttgggaggtcgaggtaggtggattatttgaggttaggagttcgggattagtttgaataatatggtgaaattttgtttttattgaaaatttaaaaattatttagttatggtggtgtatgtttgtagttttagttattttagaggttgagataggagaattgtttgaatttgggaagtagaggttgtagtgaattaagattatgttattgtattttagttcgggtaatagagcgagatttcgttttaaaaaaaaaaaaagagagttagtgtggagggaagtgtttttgttgggttcgggtgttttgtgggattttgaggaaaagttcgtattaggtagatgttgttttgtttttatgggtaaaggatattttaataaatcgaggagtaaaatgttttcgtatgtttttttcgcgtagatttgttaggaagagtataagaagaaatattcggatttttttgttaatttcgtggaattttttaagaagtgtttggagagatggaagattacgtttgtaaaggagaagtgaagtttgaagagaaggtaaaaagtgataaagttcgttgtgatagggagattaaaaattatattttttcgaaatgtaagaaagggtaagaaaggaaagaaaaaggatcgtaatgtttttagaaggttattatttgttttttttttgttttgttttgaatatcgtttaaagattaaaagtggatatttaggtttatttgtcgtggaaattgtaaagaaattgggtgaaatgtggtttgggtagttagttaaagataaataattatatgagtagaaagtagttaagttataggagagatatgaaaagggtattgttgtatatcgtgttaagggtaaaagtgaagtaggaaagaagggtttaaagaagaataaattagaagatgaggaggaggaggaggagaaagaagatgaagatgaggaggaagagggtgaagatgaagaataaatggttattttttaatgatgtttgtgtagtgggtttgttttgttaagaatgtgaattttagtatagtttagtattagttttagtataaaattgtataaattttcgtatagtttataagattttttgtatagaaaatattttttttttttttttttttttttgagatagagtttcgtttttgttgtttaggttggagtgtaatggcgtgatttcggtttatcgtaattttcgtttttcgggttttggtttaagtagtttttttgttttagttttttgagtagttgggattataggtatatgttattacgtttagttaatttttgtatttttagtagagatggggttttattatgttggttaggttgtttttaaatttttgatttcgtgattcgtttgtttcggttttttaaaatattgggattataggtgtgagttatcgtattttgtttaatgtttttaaatatttaatggtttttaaaaaatttattgtgtatggtagtatagtatatttgtaggaattagtattaatagtatattttgcgttttttaagatgttgtattttttaatattttgtaataaaattatgcgtattaaaaaaataaagaaatttcgtgtgtagtttatatttatagtatattttcgtttaggtatttgagagaatgattaggaggggtttttggaggaggtggtttttgaacggagaatttatttttaaggattttgtttgtaatggttattaagtattttttgagttatttttatgtgttttgtagttttttgaaggggcgtgggatttatcgatgttaattatttagtattatttttagattttaagaagttggggtgtgagttagtaattagtatagaaaagagatattaaaataagtttgagttggggagtgtttttttaattttagttttttggaagagattttttttttttttttgagatagagtttcgtttttattgtttaagttggagtgtagtggtacgatttcggtttatcgtaatttttttttttcgggtttaagcgattttttttttttagttttttgagtagttgggattatagatatgtatttgtaatttttattaaaaatataaaaattagtcgggcgtggtggcgtacgtttgtaattttagttattggggaggttgaggtaggagaatcgtttgaaattaggaggcggagattgtattaagatagtttgttttagttaaataatttggcgttagtgtaggaaaaggtggaaggtacggggttagtataggagggtttaatatttttaattttattaagttatattttggtaatttttgttttttacgagaagttttcgttgggtttgttttagcgttgttttgaggttttttttatgagtttcgatagggtagaggtcgttttgagcgttttttttttttttggtttaagagtggtttaaaagaaggatttttgattggaattggttattttgtgttattttttgatttttgatttcgttttaaagggggatgcgggggaggggttttggtaggggtggtttcgttttttttaggttcgtaagtttaggttttcgtttatcgggtttagtttattttgcggtcgtttagggaggtcgttggtattcgtgatttacgatttttttttcgagttttatcgaggttatagtcgtggtttcgtttttttatgtttgtttttcgttttttgttcgtgacgggcgttttcgaggattaatgagcgcgttgtatttatttttcgggcggggttaagcgtcgattaatcgtcgttcgggcgttcggtcgggtttaaacgttttaatcgttagcggcggcggggcgggtagagggtcggggatggtaggtttaattaacgggtgggtacgtcgttttcgcgaggaggcgtgttttgcggtcgggcgtgcggtgttcgcggcggcgtagggagggggagggaggtaaataagatggcggcggcgtgtcgggcgcggaagggggaggcggttcggggcgttcgcgagtgaggcgcggggcggcgaagggagcgcgggtggcggtatttgttgtcgcggttttggatgggttgggtttttttcgtcgtttcgttttttttatacgcgcggcggtcgcggcgagggggacgcgtcgttcggggttcggtattttcgggaatttttcggttcggagtttgcggtttgcgtcgtttcggtcgtcgggagtttcgtggagttttcgtcgtcgcgtcgtttcgcggatcggacgttgagggtattcggggcggggcgcgcgttcgggtagacgtttgcggggaggggggcgtttgtcgggtttcggcgattattttgggggtcgcgggtcggttcggggggcgtttagtgcgggttttcgcgggcgtcgggtagcgattagttttgagcggagttgttggtcgcggcgggaggtttttcggacgtttttagtttttcgaacgttcgttcgggtcggcgggagtcggcgtttttcgggaggttcgttcggtcgttcgcggcggagcgtttgtttttgggataggcggtgggatcggggcgtcgtcggagacgtttttagcgaagttgggttttttaggtgtgggggtttcggggggtagcgacgtcgcggattcggtttgtgggatgggcggttcggagaagattgcgttcggtcgtgtttatatttgttcgtgggtttgaggttttcggaggatgatttagtattgaaaagtttcggtcggtttttttagggttttcgaggacgaagttgattttgatcgggtcgttttttagttttgaggttcgggttttattggaattcgcgtttgagtcgtcgtttcggattttcggtgttcgtcggttcgtagattttgtatcgggtttggattcgtagtcgggattgacgtgtagaataatcgtttttgttggaagaagggttttttttttttttttggggtttttgttgtttttttttttttttttttttttgtaaaattttggagaagggaagtcggaatataaggaaggatcgtttattcgcggatttagggttggcggcgggattttaggattttgggtttagtatggaggtggtggattcgtagtagttgggtatgtttacggagggcgagttgatgtcggtgggtatggatacgtttatttatcgtatcgattttatcgaggttatttattagtcgcgtcgtaagcgggttaagtttatcggtaagtatttgatgggggatttgttgggggaaggtttttacggtaaggtgaaggaggtgttggattcggagacgttgtgtaggagggtcgttaagatttttaagaagaagaagttgcgaaggatttttaacggggaggttaacgtgaagaagtaagtatggtttgttggggtcggggtcgggtcgggttagttacggtgttgatggttttgttttttttttttttttttttttttttttttttatttttttttaatattttgagttggattcgtttggcgtttgtgtttttcgtgttagggagagcgtggttgggggtttgcgttacggatttttatttaggtaaggttagttgtcgtagcggggcgtgcgtttgtatgggtttttggattttagttaaaatgttttggtagcgaaatttttttgagaagggagcggtttttaattttttaagattagttttttggtttttttagttgtttaaggagtagaggcgtttagtggaattagtttgtgtttgtttgggtttcgagagtttgtgtgcggtcgttaatacgttttttgcgtagtgtgtggtcgttatcggggttaggcgaaatgtgatttgtttattttgttagaggggaattttgggttgttaaaaataattgtttgtatcggtttattagttagtaggagggaaacgtagtttttttttatttgttagggatgtgacgttggaagtatttttggttttcggggttggaagttttgttcgagggggattgtgtttttttttcgaattgtattcggaagattttatttttttaattgatttttttaggtacggggttgtcgttgggtatttcggacgtttttgtatttgtgcgcggagaagtttttatttagggtagtattggtcggtttgagttttttttagttggtgggggtggtcgggggtgtttttgttttatcgtagttagatacgttgtatttgtcgtcgtttggcgggttttgtttaggttttgttttttttttagtttttttaatttttaaaattttgttttttgtttttaagaaaggattttatttgttgggttaggtttcgagggattggtaaggatattttgcgtagggtattatgattttggaaggaggttcggggaggggttgttgcggtgtttgtttttattttttttttgtttaggggttttggggtttttgtcgtgtttgtttttattttttttttgtttaggggttttggggtttacgtatatttttttttttttttttttgagacggagtttcgttttgttttttaggttggagtgtagtggcgcgaattgggtttattgtaagtttcgtttttcgggtttatgttatttttttgttttagtttttcgagtagttgggattataggtattcgttattacgttcggttaattttttgtattttttagtagagacggggttttatcgtgttagttaggatggttttaattttttgatttcgtgattcgttcgtttcggttttttaaagtgttggtattataggcgtgagttaacgcgtgcggtttttttttttttttttttttttttttttgagacggagttttatttttgttgtttaggttggagtgtagtggagtggttttggtttattgtaattttcgttttttgggtttaagtgattttcgtgttttagtttttcgagtagttgggattataggtgtttgttatagtgtttagttaattttttttttttttttttagtagagacggggttttattattttggttaggttggttttgaatttttgatttcgtgatttatttgttttagttttttaaagtgttgggattaaaggcgtgagttatcgcgttcggttagtacgttttttaattagtatgtaggttgtgatatgcggaaattaggggtataggttttgaagtttgtattttggagttggagtagttagggttaaatgggagcggttgggaagggtgtgtttttacgaggtttttttgatgttttagtgtttagtttggattcgggtagaaggtgtggttagtgttttgagttagtggagtagttgtttgtgtttggtttttgtgagatgggttggttaggggttaggtagagtttgtgtttggtttttgtgagatgggttggttaggggttaggtagagtttgtgttgggggtagtaggtgttttttaaaggggttagtgatagttttttttttagtagtgagaaatttacgtttaggggtcgggcgcggtggtttacgtttgtaattttagtattttgggaggttgaggtgggtggatcgtttgaggttaggagttcgagattagtttggttaatatggtgaaattttatttttattaaaaatataaaagttagtcgagtgtggtggcgtgtgtttgtaattttagttattcgggaggttgaggtagaatattgttggagtttgggaggcggagtttgcggtgattcgagatcgtattattgcgttttagtttgggcgatatagcgagattttgttttaaaaataaataaataaataaataaataaataaataaataaataaatttggtttgagttttgataaatgtatatgtagggttaatgggaagatagacgttggagggtggaagtttgattgtgagagtgagttttttgtttttttgaatagttagtggaggaggttttgggagtttaggtgagtatttgaacggtagggtagagtttgagggttttggtggagataggtaagaaggttgtaggaatttagtttggtttagtgtttgggagaacgggagggaatacggaggtagggaggtagaggggttggtaggatttggattggattgtgcgtcgtagttatttatagtttgattttattgttttgaagtgagtgatgtatttttattagtgtttagcgtttaattttattttggttttgagtgtgtaacggttttgtttttgcggggttttttgggatgaggggtgagttttgtttttttttggttattgtttgttattaggagttgtttcgtttatagttgtgatttaggagttattgtattttttttagttttttgggtgttgttagggggtttttttattttgggagttggtgtgttttgattggaggttgttatgtgtagagtgttgttaaggagaaggggtgtttattgtttagttttgaggtttaaggttttggttagttttgttgttagcgttgtagggaaaaagttttttttgtgtgtgggaagtttaataaatttcgtttagattgtgtttcgtagcgagtgtttggaattttttagataagttttaggcgttcggttttttagttggtgtggaaagcgtgggcgattattaaggggggtgggttggggtagatggagtcggcgtgagtttcgttttttttttttttttttagaaaggtagttttggagtttatgttttgtttcgtttttatcggtaaaaagtataattttattagaaataggaaagttttaaaaagtattaatgagttaaaaagagggttgggtatgttcggttatgtttgtaattttagtattttgggaggttaaggcgggtggattattcgaggttgggagttagtttgattaatatggtgaaattttgtttttattaaaaatataaaattagttgagtgtggtggcgtacgtttgtaattttagttattttggaggttgaggtaggagaattatttgaattcgggaagtagaggttgcggtgagttaagattatgttattgtattttagtttgggtaataagagtgaaatttcgtttcgaaaaaaaaaagggttggggtcgggcgtggtggtttacgtttgtaattttagtattttgggaggtcgaggcggtttgattataaggttagaagtttgagattagcgtggttaatatggtgaaattttttttttattaaaaatagaaaaattagttaggtgtggtggtatatgttaataattttagttattttatttgaggttaggagtttaagattagtttggttaatatggcgaaatttcgtttttattataaatataaaaattagttaggcgtggtggcgcgcgtttgtagtttagttattggggaagttgaagtaaggagaatcgtttgaatttgggaggcggaggttgcggtgagtcgagatcgtattattgtattttaggttgggtaagtttaggagagaagagcgaaattgtgttttaaaaaaataattaattaaaataaaattagtgttataggttgtttttggtaggtagtgggtttttagggtggagtagggaagggttggaaagggtcgtttgtgtttagttcgatttttcgtgtttttcgggggatagtacggttagttgttgttgcggagtttatagtggggttttgggggggggggtgtaggtagaaggtcgttatgtttttttttttttttttattttagtgagagtgggttcgaaggtagggagtttgttcgttttgtggagttttcgtagaggtatttagggttgtcgtgagcgtatagtttggcggtgttttacggttttgtttttttttgttatttttatttgttgtaaaatattgtgttttcgtattttttttttttatttgtttggaaatgtgaaaattattgttgtcgtaggaaacgggtttagattcgggttgtggtttttttattcgtatcgttttcgcggtgtttagttaggaggtgggaggtgggcggtatttagtgtgtttggttgcggcgatgattggtagatgtttggatttatggtaaagaggattttcgcgagttgggagttagttttggattttgtaggtttttatattttaggcggtttttatggggttttagtatttgttgaggtttttgcgttagttatgtgaggtttgggtgttttcgaggtttttgtttgtgtttttttttgggtagcgggagggagagttttgagatttagagggagtttaggggttgggtagtcgtagaatagcgggggtaatgggtttattgggggttttgggttgtgtatatagtgggttttcggtgtttagttagttggggtaggtttggaatgttggttttttttttaggatttggggcgttgttgtagttgtcggggaattagtgaggcggttggacggttcgtatattttataaacgttatcgtattgtttaaattggatttaatttttttaatatttttttttttttttttttttttttttttggagatagggttttattgtatcgtcgaggttggagtgtagtggcgtaattatagttttgggtttaggtgatttttttgtttttaaggtagttgggattgtagatgtgtattattatattcgattagttttttgtagagatggggtttcgttatgttgtttaggttggttttaaatttttagatttaagttattcgtttgtttgggttttttagagtgttgggattataggtatgagttattgtttcgttacgtttatttttatttatttatttatttatttttgagacggagtttcgttttgttttttaggttggagtgttgtggtacgattttggtttattgtaagtttcgttttagttttttaagtaagttggaattataggtgtttgttattaagtttggttaattttgtttttgtatttttagtagagacggggttttatcgtgttagttagtatggtttcgattttttgattttgtgattcgttcgtttcggttttttaaagttttgggattataggtttgagttattgtgttcggtttatttttttattttttattttatagagataagggtttgttgtgttgtttaggttggttttgaatttttgattttaagtaattttttttggttttttaaagtgttgggattataggtgtaagttatagtattgggtttaaagtttattttttttttttttttttttttttttgagatggagtttcgttttgttatttaggttggagtgtagtggcgtgattttggtttattgtaagttttgtttttcgggtttatattatttttttgttttagtttttcgaatagttgggattataggcgtttgttattatgttcggttaatttttttgtatttttagtagagatggggttttattgtgttagttaggatggtttcgattttttgatttcgtgatttgtttgtttcggttttttaaagtgttggggttataggtgtgagttatcgtattcggtaaagtttatttttttaaagtgtgtaatttagtggtatatagtatattgatagagttgtataattattatttttattagtttttagaatatttttgttattttagaaggaaatttcgtttttgttagttattattttttattttttttttagtttcggtatttacgtattttttttttgtttttggattggtttgttttgaatattttatacgagtggtgttatatatcgcgtggttttttgcgttcggtttgttttacggagtgtgttgtttttaaggggtattcgcgtcgtggtttgggttcgaatttttttgttgtttacggttgcgttattttttagtgtgtggagggttacgttgcgtttgattgtttatttgtggttggatatttgggttgttttcgtttttgtttgtgaattgtggttgttttggtgtacgtgtgtttagtcggcgtttttttagaatttttgagggttttgttttagttatattaggagggatttagggattagggtacgcgggtttggagttgggtgtttttgggtttttatgtgttttttagttttgttttgagtcgtgggaggtcggggcgagggttaggtttattttttttttgtatgatttgtttttaggtagacggaggtttttagttttatttttttgtgagtttgagtggcgtttatgatttttttttttattttttgttttgttaattaataagttagttaaatagtttatgttgtttgggtaagtttagtaggtttttaacgtggtatttcggagcggttggcgatgttttaagagtcgggttttttttttttggaggttttttttgtttttcgttaagtttttaggtttcgttgggtttttttttttgttttttttttggttggagacgttagaggaagtttggcgatttagagaagttgatgtgtatttattatttcggaggtgattgttattaggcgggggtggttttatttttattttttttttggtataaatcgggggacgtacgtgtttgcgtagaatgttttggttttttttaattaaatagataatttagtgttttttggtttatgttgatttgtttaggagtgtttgggtttttttacgttttagttgttgtgtgttttgttgttgtgaagtgttttcgttgaggtggaggtagggtagggcgttttcggtgagggcgagtttttttgtgttcgtttttttatttgtagaatgatggtttatggaggagatatggtgtcggtaggtggtggtcggcgtagggaggtttttaggagggagttttttatttttatttgtttttagggtcgtgtagtttttcgagcggtttttacgaggttttgaggttgtatgtaggttgagtttttggttttattgtttttttttagggttaggattgtgttggagtttgggtgggtgtggggtggtttttgtataggtagtaggaggtgggttagagcggtgttggatttgaaggttcgtggtttttttagttttattgaggaggttggaatagtgttttgggttattttttttgtcggtagtcggtttttgttgagggagggggtgttttcgttttttggtggagtattaggtttttggggtttgtgcgttcgagtatttggtttttgttgtttgaaaatagtatttttttcgtttttcggttatcgtattttttttgaatagaaggtaagttttgttttttaggaatggtttgtgatttttattagcgggggaggttaggggtatatagagttttggggaataaggggatttggggttgagtcgggtttttcgggtttatttcgagtttttttgagtagtttggtaggtaggaaggcgttgggtttcggggtttttgtcgagtttagttttatttttagcgttttttttaatgttttgggtgtttgttaggttgtggatataggttttggttagttttataaataattttgtcgggttttgttgggaattggtgttattattatatagtttagagagaacggaaatatagggttttttagcgagtagattaggtttgcggtgattagtggaagtgggggacgtttttagggttgggtagttcgatagggtatcgggtatagttaggggtcggaattagttgtttattggtttcgtttttgggggattgtgtttttttgtgtttcgtttttattatattttgttttttttttattttgtttttttagtttttttttagattggcggttttttgtttaggtttagttttagtatagtttgtagttttggtagagtttaggttttggttttttgaggttgttttgagggtagtgagtaatgagttttgggattggtgtattgggagggaaaggtgagttaaggttttttgtaagaggtagttttgagttgggggtggggaaggttgggtcgtgggatatttttgatattttaagttttttttttgagatggagttttgttttgttatttaggttggagtgtagtggtgagatttcgattttttgtaattttcgttttttaggtttaagcgatttttttgttttagttttttgagtagttgggattataggcgtttattattacgttcggttaatttttgtatttttagtagagataaggttttattatgttggttaggttggtttcgaatttttgattttaggtgatttatttcggttttttatagtgtcgggattataggcgtgagttatcgcgtttggttttttagttgttttttatgttttatgtttgggttttttgttaagaattaaaaaagaaaaaaaaaattatggagatggaatttatatattgtataatttattcgtttatagtgtataatttagtggtattaagtatatttatacggttgtgtaattattatttttaattttagaacgttcggttattttaaaagtaagttttatttttattgtgttattttttattttttttattagtttttggttattttgaatttattttttggttttggattggtttgttttggatattgtatagaaatgggattttgtcggtcgggcgcggtgatttacgagagtaagagatttagattattttggttaatatggtgaaattttatttttattaaaaatataaaaattagttgggcgtggttgcgggtatttgtagttttagcgatttaggggttgagttaggagaaatcgtttgaattcgggaggtagaggttgtagtgagttgagattatgttattgtattttggtttggcgatagagtgagatttcgtttttaaaaaaaaaaaaataagaaatgggattttgttattttagcgtttttcgaggtcgaggtgggtagatgatttgagtttagtagtttaaacgagattagtttgggtagtacggtgaaattgtttttattaaaatataaaaattagttgggtatggtagtatacgtttgtagttttagttatttgcggggttgagatgggaggatcgtttgagtttgggaggtgtattttagtttgggcgatagggaaattttgttttaaaaaaaaaaaaaaaagtgtattatatattgtgtgttttttagtgttttattgtgatatttttaaggtgtagttaggttgtggttcgagttagagttttattggtttttgtggttgagttttgttgagtgcgtggatgggttgtgttgattttcgtttgtggaagggtttttgggtggttttatatttcggttgttgtgcgttttgttgttgtgagtatttcgtgtttcgtttttgcgtggcgtgtattgttttttagggtgtgtatttgggagtggagttgttggtttatagggtaatagatttttggagaagttgtagacgtttttacgtttatttattgggtgtgaggattttgtttttcgttatttttgtttttgtttaatttttttttttatgagatagggttttattttgttgtttaggttggagtgtagtagtacgattataggtaattataggtttaagtgatttttttatttgagtttttcgagtagttaggatttgaggtacgtatttttatatttggttaatttttgtatttttagtagagatagggtttcgtcgtgttgtttaggttggtttcgaatttttgagtttaggtgatttattcgtttcggttttttatagtgttgggagaaatgaagtgtttgcgatagggcggtagttgtagagggggttgtgttttttggtttgttgtgttttatttttgtgataggtaggtgggcgtggttaattgggcggtagttgtagagggggtagtgataggcgggtgggtgtggtaggattttataatgtttttttttgtggcgttttttttttcgtttgtttttttttatgggttatttttttagtttatttgcggtttattttttaaggagtgggattttcggagttgggagtttttggttgcgtgggattgtattgtgtgacggagttattattagggttttaatttattttggtttttgttatagtttgggttttatttgtgttattattgtagtagtttggtttttaggaagtaaaattgttattgagttataaagtttaattaagagtgttttttgggaggtcgaggcgggcggattataaggttaggagatcgagattattttggttaatatggtgaaattttgtttgtattaaaatataaaaaaattagtcggttgtggtgatacgtgtttgtagttttagttattcgggaggttgaggtagggaaattatttgaatttgggaggtagaggttgtagtgagttgagatcgggttatcgtgttttagtttagggatagagtaagattttgttttagaaaaaaaaaaaagtgttttaattgtgttttttaaagttttcgtcggtcgatgatagattagagggcgttgtgtttttattttttatcgttttgagtttggacgcgtggtttttgtagggtttttttttatagtattgtgaatttatagtttttttttagggaagggaggaggtacgttatttttatagggagatggggaggtcgattttagggatttaggttattattttgacgttgggtcggttgatatatttttgttttttttgttttagg

SEQ ID NO: 134 - DNA, 16842 bp, Artificial Sequence
  chemically treated genomic DNA (Homo sapiens)
tttgggatagagaggataggggtgtattagtcgatttaacgttaggatgatggtttggatttttggagtcggtttttttatttttttgtggaagtggcgtatttttttttttttttagagagaagttgtgagtttatagtgttgtgggaaagggttttgtaggggttacgcgtttaggtttagggcggtagggggtgggagtatagcgttttttagtttgttatcggtcggcgagggttttggaggatatagttaggatatttttttttttttttgagatagagttttgttttgtttttaggttggagtacggtggttcgattttagtttattgtaatttttgttttttaggtttaagtgatttttttgttttagtttttcgagtagttgggattataggtacgtgttattatagtcggttaatttttttgtattttagtatagatagggttttattatgttggttaggatggtttcgattttttgattttgtgattcgttcgtttcggttttttaaaggatatttttaattgagttttgtaatttagtaatagttttgttttttagaaattagattattgtaatggtagtatagatggagtttagattgtggtaggagttagggtgagttggagttttggtgatggtttcgttatatagtatagttttacgtagttaagggtttttaatttcgagggttttattttttggagggtgggtcgtaggtgagttggaaggatggtttataggaaggggtaggcgaagaaggagacgttatagaaagagatattgtggggttttgttatatttattcgtttgttattgttttttttgtagttgtcgtttagttggttacgtttatttgtttgttataagggtggggtataataggttagagagtatagttttttttgtagttgtcgttttgtcgtagatattttattttttttagtattataggaggtcgaggcgggtggattatttgagtttaggagttcgagattagtttgagtaatacggcgaaattttgtttttattaaaaatataaaaattagttaggtgtggaggtacgtgttttaagttttagttattcgggaggtttaggtgggaggattatttgagtttgtagttatttgtgatcgtgttattgtattttagtttggataatagaataagattttgttttataaaagaaaaaattaaataaaaataaaaatgacgaggagtaaggtttttatatttagtgggtgggcgtggaagcgtttgtagtttttttaaaggtttgttattttgtgagttagtagttttatttttaggtatatattttgaggaatagtatacgttacgtagaaacggagtacgagatgtttatagtagtaggacgtatagtagtcgagatgtggaattatttaggggtttttttatagacgaggattagtatagtttatttacgtatttaataagatttagttataaaaattagtgaggttttgattcgagttatagtttagttgtattttgaggatgttatagtgagatattaaaggatatatagtgtgtgatgtatttttttttttttttttgagatagggtttttttgtcgtttaggttggagtgtattttttaggtttaagcgatttttttattttagtttcgtaagtagttgggattatagacgtgtgttattatgtttagttaatttttgtattttagtagagatagttttatcgtgttgtttaggttggtttcgtttgaattattaggtttaagttatttgtttatttcggtttcggaaaacgttgggatgataggattttattttttgtttttttttttttggagacggagttttattttgtcgttaggttagagtgtaatggtatgattttagtttattgtaatttttgtttttcgggtttaagcgattttttttgatttagtttttgagtcgttgggattataggtgttcgtaattacgtttagttaatttttgtatttttagtagagatggggttttattatgttggttaggatggtttggattttttgttttcgtgagttatcgcgttcggtcgataggattttatttttatgtaatatttaggataagttaatttagagttaggaagtggatttagagtggttaggagttggtggaggggatggagagtgatataatgggaatggggtttgtttttggggtgatcgaacgttttggaattagaagtagtggttgtatagtcgtgtgaatgtatttaatgttattgaattgtatattgtgaacgaatgagttgtatagtatgtaaattttatttttatagtttttttttttttttttaatttttaataggaagtttaagtatggagtataaaaaatagttggggggttaggcgcggtgatttacgtttgtaatttcgatattatgggaggtcgaggtggattatttgaggttaggagttcgaaattagtttggttaatatggtgaaattttgtttttattaaaaatataaaaattagtcgggcgtggtgatgggcgtttgtaattttagttatttaggaggttgaggtaggagaatcgtttgaatttgggaggcggaggttgtagagagtcgagattttattattgtattttagtttgggtgatagagtaagattttattttaaaaaaaaaatttggggtgttaggggtattttacgatttagttttttttatttttagtttagggttgttttttgtaggaagttttggtttattttttttttttagtgtattagttttagggtttattgtttattgtttttagggtaattttagaaggttaaggtttgagttttgttagggttgtaggttgtgttggggttgggtttggataaggggtcgttagtttggggaggggttaggagagtaggatgaagggaaagtaaggtgtgatggggacggggtatagagggatatagttttttagaagcggagttagtgagtaattggtttcggtttttggttgtgttcggtgttttgtcgggttgtttagttttgaaagcgttttttatttttattggttatcgtaggtttggtttgttcgttgagaagttttgtgttttcgttttttttgggttatgtggtggtggtattaatttttagtagggttcggtaaggttatttatagaattggttagggtttgtgtttatagtttggtaggtatttagggtattgagggggacgttgagggtgaggttgggttcggtaaaggtttcggggtttagcgtttttttgtttgttaggttgtttaggagagttcggggtgggttcgagaggttcggtttagttttagatttttttgttttttagggttttgtgtgtttttaatttttttcgttgatgaaggttataggttatttttgggaggtaagatttgttttttatttagaggagatgcggtggtcggggggcggggaaggtgttgtttttagatagtagaggttagatgttcggacgtataggttttaagagtttgatgttttattaggaggcgaaagtatttttttttttagtaggagtcggttatcggtagggaaggtggtttaggatattattttagtttttttagtggagttgagggagttacgggtttttaggtttagtatcgttttggtttattttttgttgtttgtgtagggattattttatatttatttaggttttagtatagttttaattttgaggaggggtagtgaggttaggagtttaatttgtatgtagttttagagtttcgtgggggtcgttcgggaggttgtacggttttaaaagtaaatgagggtggaggatttttttttggaaatttttttgcgtcggttattatttgtcgatattatgttttttttatgagttattattttatagatggggaaacgggtataggaggattcgtttttatcgaaggcgttttgttttgtttttattttaacggggatattttatagtagtaggatatatagtagttgaaacgtggaagagtttaggtatttttgagtaggttagtatagattaagggatattgggttgtttgtttaattaaaagggattaaggtattttgcgtaggtacgtgcgtttttcgatttatgttaggggaggagtgggggtggagttattttcgtttggtggtagttattttcgggatgatgggtgtatattagtttttttagatcgttaggttttttttgacgtttttagttagaaaaagagtagaagaggaggtttagcgaaatttaagagtttggcgaggaataggaagagtttttaggagggggaagttcggtttttggggtatcgttagtcgtttcgaggtgttacgttaggggtttattgggtttgtttaggtagtatggattgtttagttgatttgttgattagtaggataggaaataggaaggagagttataaacgttatttaagtttatagagaggtggggttaggagttttcgtttgtttagaaatagattatatagggaagagatgggtttggttttcgtttcggttttttacggtttagagtaggattgggaggtatatggagatttaggaatatttagttttagattcgcgtgttttggtttttgaattttttttgatgtggttgaaataaggtttttaaggattttagagggacgtcggttgagtatacgtgtattaaagtagttataatttataggtagaggcgggagtagtttaagtgtttagttatagatgagtagttaaacgtagcgtggttttttatatattggaaagtgacgtagtcgtgaatagtagagaggttcggatttaggttacggcgcggatgttttttgaggatagtatatttcgtgagataagtcggacgtaaaaggttacgcggtgtgtgatattattcgtgtgaaatgtttaggataggttaatttagaggtaggaagggaatgcgtgggtgtcgggattggggagggaatggggagtgatggttgatagagacggggtttttttttggggtaataagaatgttttggaagttgatagaggtgatagttgtgtaattttgttaatgtattatatgttattgaattatatattttaaaaaggtgaattttgtcgggtgcggtggtttatatttgtaattttagtattttgggaggtcgaggtaggtagattacgaggttaggagatcgagattattttggttaatatagtgaaattttatttttattaaaaatataaaaaaattagtcgggtatggtggtaggcgtttgtagttttagttattcgggaggttgaggtaggagaatggtgtgaattcgggaggtagagtttgtagtgagttaagattacgttattgtattttagtttgggtgatagagcgagattttattttaaaaaaaaaaaaaaaaaaaaaaaaggtgaattttaggtttagtattatggtttatatttgtaattttagtattttgggaggttagagaggattatttaaggttaggggtttaagattagtttgggtaatatagtaagtttttgtttttataaaataaaaaataaaaaggtgggtcgggtatagtgatttaagtttgtaattttaggattttgggaggtcgaggcgggcggattataaggttaggagatcgagattatattggttaatacggtgaaatttcgtttttattaaaaatataaaaataaaattagttaggtttggtggtaggtatttgtagttttagtttatttgggaggttgaagcggagtttgtagtgagttaagatcgtgttatagtattttagtttgggggatagagcgagatttcgttttaaaaataaataaataagtaaataaaggtgaacgtggcgaagtagtggtttatatttgtaattttagtattttgggaggtttaggtaggcggatagtttgagtttaggagtttgagattagtttggataatatggcgaaattttatttttataaaaaattagtcgggtgtggtggtgtatatttgtagttttagttattttgggggtaggagggttatttgagtttagagttatgattgcgttattgtattttagtttcggcgatatagtgagattttgtttttaaaaaaaaaaaaaaaaaaaaaaaaaaaggtgttaagaaaattgagtttagtttgagtaatacggtggcgtttgtgggatatacgggtcgtttagtcgttttattgatttttcgatagttatagtagcgttttagattttgagagaggaattaatattttaggtttgttttagttggttgggtatcggaagtttattgtgtgtatagtttagaatttttagtggatttattattttcgttgttttgcggttgtttagtttttgagttttttttgggttttagagttttttttttcgttgtttagagaggggtataaatagaggtttcgaggatatttaggttttatatggttggcgtaggggttttagtagatgttggaattttataaaggtcgtttgggatgtaaagatttataaagtttaggattgatttttagttcgcgaaaattttttttattataggtttaagtatttgttaattatcgtcgtaattaggtatattgagtgtcgtttattttttattttttggttggatatcgcgggggcggtgcggatgggagagttatagttcggatttgggttcgttttttacggtagtagtgatttttatatttttaaataggtagaaagaaaagatacgaaagtatagtgttttgtaataggtggaagtgataggaaagggtagggtcgtgggatatcgttaggttgtgcgtttacggtagttttgggtgtttttgcggaggttttataaggcgggtagattttttgttttcgagtttatttttattggggtggaaagggggagggaggtatggcggttttttgtttgtatttttttttttagaattttattgtgggtttcgtagtagtagttagtcgtgttgtttttcgagaagtacggggagtcgggttgggtataggcgattttttttagtttttttttgttttattttaggaatttattgtttattagaaatagtttatggtattgattttattttaattaattgtttttttgagatataatttcgttttttttttttaggtttgtttagtttggaatgtaatgatgcgatttcggtttatcgtaattttcgttttttaggtttaagcgattttttttgttttagtttttttagtagttggattataggcgcgcgttattacgtttggttaatttttgtatttgtagtagagacggagtttcgttatattggttaggttggttttgaatttttgattttagatgaagtagttgggattattggtatgtgttattatatttggttagtttttttatttttagtagagagagggttttattatgttggttacgttggttttaaatttttgattttgtgattaaatcgtttcggttttttaaagtgttgggattataggcgtgagttattacgttcggttttagtttttttttttttcgagacggagttttatttttgttatttaggttggagtgtaatggtatggttttggtttatcgtaatttttgtttttcgggtttaagtgatttttttgttttagtttttagagtagttgggattataggcgtgcgttattatatttagttaattttgtatttttagtagagatagggttttattatgttggttaggttaatttttaatttcgggtgatttattcgttttggttttttaaagtgttgggattataggtatgatcgaatatgtttagttttttttttaatttattgatgttttttggaatttttttatttttaataagattatattttttgtcggtgagagcgggataaggtatggattttagggttgtttttttgggaaggaagggaagagacgggatttacgtcggttttatttgttttaatttattttttttggtgatcgtttacgttttttatattaattggaggatcggacgtttgaggtttgtttggaaggttttagatattcgttgcgagatataatttgagcggagtttattaaattttttatatataaaggaggttttttttttgtagcgttggtagtaaggttggttaaggttttgggttttagggttgggtagtggatattttttttttttgatagtattttgtatatggtagtttttagttagaatatattagtttttagaataggaggattttttggtagtatttagggggttggaggaaatgtagtggtttttgaattatagttgtaagcggggtagtttttgatggtagatagtgattaggaagggatagggtttattttttattttagggggtttcgtaagggtaaagtcgttatatatttagggttaggatgaaattggacgttgaatattagtgagggtgtattatttattttaaggtagtggggttaagttgtgggtagttgcgacgtatagtttagtttaggttttgttaatttttttgtttttttgttttcgtgttttttttcgtttttttaggtattgggttagattaggtttttgtaatttttttgtttgtttttattaagatttttaggttttgttttatcgtttaggtgtttatttgagtttttaggattttttttattgattgtttaggaaagtagggggtttatttttatagttaggtttttattttttagcgtttgtttttttattgattttgtatatatatttgttaaaatttaagttagatttatttatttatttatttatttatttatttatttatttatttttgagatagagtttcgttgtgtcgtttaggttggagcgtaatggtgcgatttcgggttatcgtaagtttcgttttttaggttttagtaatgttttgttttagtttttcgagtagttgggattataggtatacgttattatattcggttaatttttgtatttttagtagagatggggttttattatgttggttaggttggtttcgaatttttgattttaggcgatttatttattttagttttttaaagtgttgggattataggcgtgagttatcgcgttcggtttttaagcgtgggttttttattgttgggagagagattgttattggtttttttagagggtatttgttatttttagtataggttttgtttagtttttgattaatttattttatagagattaggtataggttttgtttagtttttgattaatttattttatagagattaggtataggtaattgttttattgatttaaggtattggttatattttttattcgggtttagattgggtattgagatattagaaaggtttcgtggaaatatattttttttagtcgtttttatttaattttgattgttttagttttagagtataaattttagagtttgtgtttttggttttcgtatgttatagtttgtatgttgattaagaagcgtgttggtcgggcgcggtggtttacgtttttaattttagtattttgggaggttgaggtaggtggattacgaggttagaagtttaagattaatttggttaagatggtgaaatttcgtttttattaaaaaaaaaaaaaaaaaattagttgggtattgtggtaggtatttgtaattttagttattcgggaggttgaggtacgagaattatttgaatttagggggcggagattgtagtgagttaagattattttattgtattttagtttgagtaataagagtgaaatttcgttttaaaaaaaaaaaaaaaaaaaaaaaaaaaggtcgtacgcgttgatttacgtttgtagtattagtattttgggaggtcgaggcgggcggattacgaggttaggagattgagattattttggttaatacggtgaaatttcgtttttattgaaaaatataaaaaattggtcgggcgtggtggcgggtgtttgtagttttagttattcgggaggttgaggtaggagaatggtatgaattcgggaggcggagtttgtagtgagtttagttcgcgttattgtattttagtttggggaatagagcgagatttcgttttaaaaaaaaaaaaaaaaaaatgtacgtgagttttagggtttttgagtaggagagaggtgagagtagatacggtaggagttttagggtttttgagtaggaggaaggtgagagtagatatcgtagtagttttttttcggatttttttttaaggttatggtgttttgcgtagggtgtttttgttagtttttcgaggtttagtttagtagataaggtttttttttggaaataggaggtaaagttttgaaagttaagaaggttgggaaaggagtagggtttgggtagggttcgttaggcggcggtaggtgtagcgtgtttggttgcgataaggtagggatattttcggttatttttattagttgggagaggtttaggtcggttagtgttgttttaggtaggagttttttcgcgtatagatgtagaggcgttcgggatgtttagcggtagtttcgtgtttgaagaagttagttggaaaagtaaggtttttcggatgtaattcgggagggaggtatagtttttttcgggtagggtttttagtttcgggggttagggatgtttttagcgttatatttttggtaaatgaggaaaggttacgttttttttttgttgattgataagtcggtgtaaatagttatttttggtagtttagggtttttttttgataggataaataaattatatttcgtttggtttcggtaacggttatatattgcgtagaaaacgtgttggcggtcgtatataaattttcggggtttaaataaatataggttgattttattgggcgtttttgttttttggatagttgggggagttaaggggttagttttaggggattgggggtcgttttttttttaggagggtttcgttattagggtattttaattggagtttaagagtttatgtaaacgtacgtttcgttgcgataattggttttgtttgagtgaaagttcgtaacgtaggtttttaattacgttttttttggtacggaggatataggcgttagacgggtttagtttagggtgttaagaggaagtaagggagggagggaggagagaaggaaggaagatagaattattagtatcgtgattggttcggttcggtttcgattttagtaagttatatttatttttttacgttggttttttcgttggggatttttcgtaattttttttttttgaggattttgacggtttttttgtatagcgttttcgagtttagtattttttttattttgtcgtaagagtttttttttagtaggttttttattaggtatttgtcgatgagtttggttcgtttgcggcgcggttggtagatgatttcggtggagtcgatgcggtggatgaacgtgtttatatttatcgatattagttcgtttttcgtgaatatgtttagttgttgcgggtttattatttttatgttggatttagggttttggagtttcgtcgttagttttgagttcgcgggtgagcggtttttttttgtgtttcgattttttttttttaaaattttataaagaaaaaagaaaaaaaaaaggtaataaaaattttaaaaggaagggaaaaattttttttttaatagaaacgattgttttatacgttagtttcggttgcgagtttaagttcggtgtagggtttgcggatcggcgggtatcgggggttcgggacggcggtttagacgcgagttttagtgggattcgggttttagaattgggagacggttcggttagggttaatttcgttttcggggattttggggaggtcggtcggggttttttagtgttaggttatttttcggggattttaggtttacggataagtatgaatacggtcgagcgtagtttttttcgggtcgtttattttataggtcgggttcgcgacgtcgttatttttcgggatttttatatttggagagtttaatttcgttgggggcgttttcggcgacgtttcggttttatcgtttgttttaggagtaaacgtttcgtcgcggacgatcgagcggatttttcggggggcgtcgattttcgtcggttcgggcgagcgttcggggggttgggggcgttcgggaggtttttcgtcgcggttaatagtttcgtttagggttggtcgttgttcggcgttcgcgagggttcgtattgggcgtttttcgagtcggttcgcgatttttaaggtggtcgtcggggttcggtaggcgttttttttttcgtaaacgtttgttcgagcgcgcgtttcgtttcgagtgtttttagcgttcggttcgcggggcggcgcggcggcgggggttttacggggttttcggcggtcgaggcggcgtaggtcgtaggtttcgggtcggggggttttcgaaggtgtcgggtttcgggcggcgcgtttttttcgtcgcggtcgtcgcgcgtgtggaggaggcggagcggcgaggggggtttagtttatttaaggtcgcggtagtaagtgtcgttattcgcgtttttttcgtcgtttcgcgttttattcgcgggcgtttcgggtcgtttttttttttcgcgttcgatacgtcgtcgttattttgtttatttttttttttttttttgcgtcgtcgcggatatcgtacgttcggtcgtagggtacgttttttcgcgaggacgacgtgtttattcgttggttgaatttgttattttcggttttttgttcgtttcgtcgtcgttgacgattggagcgtttggattcggtcgggcgttcgagcggcgattggtcggcgtttggtttcgttcgaggggtggatatagcgcgtttattggttttcggagacgttcgttacgggtagggggcgggaagtaggtatggggagacgaggttacggttgtgatttcggtggggttcgggaagggggtcgtaggttacgggtgttaacggtttttttgaacggtcgtagggtgggttgagttcggtgggcgggaatttgggtttgcggatttggaaggagcggggttatttttattagagtttttttttcgtatttttttttggggcgaggttaagggttaaaaagtaatataaagtggttaattttagttaaaaattttttttttgagttatttttggattaggggaaagagaaacgtttagggcggtttttgttttatcggaatttatgggggaagttttaggatagcgttgggataagtttagcgggggtttttcgtgaaaaataagagttgttaaaatatggtttgataaggttgaaaatattgaatttttttgtgttagtttcgtgttttttatttttttttgtattagcgttaggttgtttagttggaataaattattttggtataattttcgttttttggttttaagcgatttttttgttttagtttttttagtagttgagattataggcgtgcgttattacgttcggttaatttttgtatttttagtagaaattataggtgtatgtttgtaattttagttatttagaaggttgagggaggagaatcgtttgaattcgggaggaggaggttgcggtgagtcgagatcgtgttattgtattttagtttgggtaataagagcgaaattttgttttaaaaaaaaaaaaaagattttttttagaaaattgaagttgaaggaatattttttaatttaaatttattttggtattttttttttgtattgattgttggtttatattttaattttttggaatttggagataatgttggataattggtatcggtaggttttacgtttttttagagaattgtaggatatatggaagtgatttaggaaatatttggtgattattatagatagaatttttgaagatggatttttcgtttaaagattattttttttaagaattttttttagttatttttttaagtgtttggacggagatgtgttgtgagtgtgaattatatacggaatttttttgtttttttgatacgtataattttattataaaatgttaaaaaatgtagtattttaaaaaacgtaagatgtattgttgatattaatttttataagtgtgttgtgttgttatatataataaattttttaaaaattattaaatatttagggatattaggtagggtgcggtggtttatatttgtaattttagtattttgggaggtcgaagtaggcggattacgaggttaggagtttgaaagtagtttggttaatatggtgaaattttatttttattaaaaatataaaaattagttgagcgtggtggtatgtgtttgtaattttagttatttaggaggttgaggtaggagaattgtttgaattaggattcgggaggcggaggttgcggtgagtcgagattacgttattgtattttagtttaggtaataagagcgaaattttgttttaaaaaaaagaaaagaaaagaaaagtattttttgtatagagaattttatgagttatacgaaaatttgtatagttttatattgaagttaatattgagttgtattagaatttatatttttagtaaaataagtttattgtataggtattattaaaggatagttatttattttttatttttattttttttttttttatttttattttttttttttttttttttttttttattttttggtttgtttttttttgagttttttttttttgttttatttttgtttttagtacgatatgtagtaatattttttttatattttttttgtagtttaattgttttttgtttatatggttgtttatttttggttgattgtttagattatattttatttagtttttttgtagtttttacgataaataggtttgggtgtttatttttgatttttgggcgatgtttagagtaaaataggaagaaggtagatggtggttttttaggagtattgcgattttttttttttttttttttatttttttttatatttcggaggaatgtaatttttaatttttttgttatagcgagttttgttattttttgttttttttttaaattttattttttttttgtagacgtggttttttatttttttaaatattttttggagaattttacgaaattgatagaagagttcgggtgtttttttttgtgttttttttggtaggtttgcgcgaagagggtatacgaggatattttgtttttcggtttgttggggtgttttttatttatggggatagaatagtatttatttggtgcgagtttttttttagagttttatagagtattcggatttaatagagatatttttttttatattgattttttttttttttttttgagacggagtttcgttttgttgttcgggttggagtgtaatggtatgattttggtttattgtaatttttgttttttagatttaagtaatttttttgttttagtttttggagtagttgggattataggtatatattattatggttggataatttttggatttttaatagagatagggttttattatattgtttaggttggtttcgaatttttaattttaggtgatttatttgtttcggttttttaaagttttgggattataggtatgaggtattatgtttgttttatatattgaatttttaaagttagaaaaattaaaaatgggtttgttaggtacggtagtttatatttgtaattttagtattttgggaggtcgaggcggatggattattcgaggttaggagtttgagattagtttggttaacgtggtaaaattttgtttttattaaaaatataaaaattagttaggcgtggtggcgggcgttcgtaattttagttatttgggaggttgaggtaggaggatcgtttgaatttaggaggtagaggttgtagggagttgagattttgttattgtattttattttgggtaataatgagatttcgtttcgaaagaaaaaaaaatgggtttggtatggcggtttttgtttgtaattttagtattttggggggttaaggtaggtgattatttgaggttaagagtttaagattagtttgggtaatatggtaaaattttcgtttttattaaaaatataaaaattagttaggtgtcgtggcgttcgtttgtaattttagttatttaggaggttgaggtaagagaatcgtttgaatttgggaggtagaggttgtagtgagttaagattgtgttattgtattgtagtttgggtaatatagtgagattcggttttaaaaaaaaaaaaaaagggtataaataaaatattttattggttagatatagtggtttacgtttgtaattttagtattttaggaggttaaggtgggttgattacgaggttaggagttcgagattattttggttaacgtggtgaaatttggtttttattaaaaatataaaaattagttgggcgtggtggcgggtatttgtaattttagttattcgggaggttgagataggagaaaggcgtgaatttaggaggcggagtttgtagtgaattaagatcgcgttatcgtattttagtttgggagatagagcgagatttcgttttaaaaaaataaataaataaaaataaaataaaatattttattaataattttaataatgattgtatgttgaaatgatgtaattttggatatgttaggttaaagtaaatgtattattaaaattaattattttagggttatgtatagtggtttatatttgtaattttagaattttgggaggattttttgagtttaggagtttgaggttagtttgggtaatatagtaagaatttgttttaaaaaaaaataaatatataaataataggttaggtgtagtggtttacgtttgtaattttagtattttgggagg

SEQ ID NO: 135 - DNA, 11029 bp, Artificial Sequence
  chemically treated genomic DNA (Homo sapiens)
tagagtgtgtgtgtgatgaataagtgtttgtgtgatgatgttttatttgtgtaattttttagttatggaagggtatagttttatgatgtttttagtgaaattttggtttatgaggatttttatatatatattttgttatggggattgtattgtttaaatatgtgagagtaaggttttggttatgtgttaataaaatagttaagttttttatggaagaaaaatggaagttttttgaaaggatttatatttttgtttgagtttgtggaagaggggtttgtagttggtaatgtgtatatatatgtgtatttgttattttgtggaaattataatcggttaaggggtgtaagattgatttatgtaggagagttgtagtattatggagtagaatgtggttatgaaatttggattttagttttttgtttattattaattagtgttggttagggtgtttttttaattgttagtgaagggattggattagataattttgaagatattttttttgagaattaagtaatttgttttaaggttgggtgcggtggtttacgtttgtaattttagtattttgggagggcgaggtaggtagattatttgacgttaggagtttaagattagtttggttaatatggtgaaattttatttttattaaaaatataaaaattgatggtcgtgtacggtggtttacgtttgtaattttagtattttgggaggtcgagataggtgaattatgaggttaggagttcgagattagtttggttagtatggtgaaatttcgtttttattgaaaatataaaaaataagttaggtatagtggtgggcgtttgtaattttagttatttaggaggttgaggtaggagaattttttgaatttaggaggtagaggttgtagtgagttaagatcgtgttatggtattttagtttgggcgatagagtgagatttttttttaaaaaagtaaaataaaaatataaaaattagttaggtgtggtggtacgcgtttgtagttttagttgtaggttgaggtagaagaatgatttgaatttgggaggcggaggttgtagtgagtcgggattgtattattgtattttagtttgggttatagagcgagattttgtttggaaaaaaaaaaaaaaaaaaaaaaaaaaaaaaaaaaaattttttttttaatttttaaaaaatttttaaaatttggattaaggtttttaattttggaaatttcggggattttggttaaaaagattttttaaggaattggggcggggaaaaaaaagtttttttaatttagggttaaaatattttgtgggggttttaaagtggggttttaaataggtggggaaaatttatggattgtttttttttggtttaattttttaattttttttagtttttcggaattttacgggtttttttttttaattttaataattttttaaaagggttttatgggtttaaatttttttttcgtttttggatttgaatttattttttttaggggaattttttattttttttttttttaaaatttttttggggggggtataattttttttgtatggtaaatcggtttcggggtttagttttcggaaagtttgttttttggaattaggttcgttttcggggtttttatgggggatttttaaatttggttttttgtaaatttgggggttaaggggtaaagtttttttggttttgaatttttattattttagggtcgagcgggtaggtatagtggtttatatttgtaattttagtattttgtggaggttaaagtgggaggattgtttaattttaggagttttagattagtttgggtaatatagtaaaatgttatttttatgaaaaatttaaaaaattaggttaggtgtggtggtttatatttgtaattttagtaatttgggaggttaaggtgggtagattatttgaggttagaagttcgagatttagtttggttagtatggtgaaaattcgtttttattaataatataaaaattagttaggtatggtggtgggtgtttgtaattttagttatttgggaagttgaggtaggagaatcgtttgaatttgggaggtggaggttgtagtgagtcgagatcgtgttattgtattttagtttgggtgacgagtgaaattttggtgtttttttattttaattttttttttgtatttttagttttttaggaggtaaaggtgggagaattgtttgagtttaggagtttgaggttgtagtaagttatgattgtattattgttttttaggttgggagaaagtaaaatattgtttttaaaaataaaaattaggttgggtacggtggtttacgtttgtaattttaatatttagggaggttaaggtgggcggattacgaggttaggagtttgaaattaatttggttaatatggtgaaatttcgtttttattaaaaatataaatattagttgggtaaaatgggggggttttttaattttaggtttttagggggtttaggttaaaaaatttttttaattttggagtttaaggttttttttggttaaatttgggttaagggtttttagtttgggggtaaaaagggaatttttttttaaaaaaggtaaattaaaattttaaaattatttcgggttggtggtttcgttttttagttttaattgtaggtttaggttaaaaaatgatttgaatttgggaagttaaggttttaataaatcgggattgtttttttgtatttaaatttgggttttaaaagggaatttgttttggaaaaaaaaaaaaaaaaaaaaaaaaaaaattttgttttaagtatcgaaaaagttgtgaaagttgtgattaagtttttatattttgagaattttgggattgttggttaatagtatttgttatgtagttgggttgggataaataaagtttatttaatttagtgttagatattttgtgtgggtatttaagatggtgttttaatatgttgtgtaatattaatgaatgtattatatatgattaaatatgttaatgttttttagttttttgaatatttattgttttttttttttatttttattaatttttgaaaaggttttaatggttttaattttattattagtattagaattagaatttattttttttatggatatatttatatttatttattttaataattttatgagggaggtagtagttttattgtatagtaaaataggtatagagattaagttatcgaaaagtatgatttttgtaattagagtagtttttcggattttattgttgtattttattatttgtatattagtaaatttggggtttataggttatagatttttttagttttgatatttttattattttatagtttttgaatttttttttttagtttgtttttattgtttagataatgttttaaatatatttttgtatttatttcgaagtaaaataaagtaatttttaattcgtttcgggttggaagttttttttttttatatatttggtagaaattatatagttgaaagtttgtttttttaaaaatttgtcgtaagatattggtaatttttatgaaggatgtgtgagggtacgaaaagtgtgaggggtggtagttatttttaagatattattttattaatattattattaggttatggtttttgtgttggtagtgtgttgatagtttagtgtgttggtagttttttatatttttgattgttttttattttgatgaaaattatagaaattattttattatagttgattagagtgatggttagtaattaattagttaattagtttagtagtgatattgttgtattttttaatttttttagaattatgatgttaatattatatataaataaaaggaaaataaaaatacgagattttttttttagagagtagtaagaggggttaggtatagtggttcgtatttgtaattttagtattttgagaggttgaggtgggtagattatttgaggtcggaagttcgagattagttttatcgatatggagaaattttatttttattaaaaatataaaattagtttggcgtgatggtgtatatttgtaattttagttatacgggaggttgagatagaagaattatttgaattcgggaggtggaggttgcggtgagttatgattacgttattgtattttagtttgggtaataagagtgaaaattttgttttaaaaaaaaaaaaaaaaaaagtaagagggtaaggtaggaagtaatattttatatgtgaaagtgtattttagtgtaacgtataggagttttgataaaagatgtgtagaattatagttttattatgagttattttttgtatttataagtagaaagttgattattttttttaagttaaaaaaataatgttgggggagatggtgtttgtgtgagtgaatagaaatttagacggtttaaatgttttaaggtttgatatttttttttaatttttttaagaaattaattggtttgaaaaaagttattttgtaaaagagggaaaaaaagttggattttttagttgttgagaaggtatgtttacgtaatatgagtttaaagtgaatagttatttttgtacggattattatatattttcgttttggagggaaaaaagtttgttagagaatgtaaaatggcgatttttagtgacgttatatttgtttcggtcgcgttttggggtgtttgtaagggcggaagcgggttatagtcgttttattgtgggcggtcgtggttattatgtaaaaggaaaagttttagtgtcgggcggatgtgtatcggcggtaatatagtaagggcggaagtttttttttaagggcggaagttttttttttaagggcggaagttttttttttaagggcggaaaggttttagtcgtaaaatggtttcggtttttgtcgcgttatagttattttcggggcggatcggaagttgttttgttttgtttcgagatggttgcggggatgtatttggaatattatttggatagtaagagtaggttggaggtgggggtcggggttgtagagtggtgcggggattagggatgagaggatttgtagtttttaagttttagtgacgagaaggttataattatgaagcggttttgtggtaggaaatattggagggtgcggagaaagagggggcggggtagtaggatcgaggtttcgttgatgggtgtagacgagggaggggtgcggtgtgggggttagagacgtgttttgaagggttagtgtgtatggttaggaagatagttgttgtttttattttttagggtttttagtttcggtagatttttttttttatagtcgtttagaatcgttattatatattgttatttggagtagcggtaaagattttttttttattttatttttttttaaaagtggttttttatggggttgagagtggtggtgatgagtgattattgttagatgatgaattagaacgtttttttttatggagtaaagatttaatttttattaaatgaaaatttggtgtttatgcgatttatgtaaattatttttgtagaaagtttattgttttgtgcgtttatatttgttttagggttcggagttatttatttaataaatatttattgaggttttgttatgggttagatataatggtaggtattagggatagaaaaatgagtaagataaggtttttgtttttaagaagtttacgatttagtaggaaatagattttgtaaataattataaaatattgtgataagtgagataatggaaatatattaaaaaggatatttggtaggtaattttggagaaaaggggggtaattatttggggatgtaggaaaagttttatagcggaggtgatgtttgaatagggttttgaaggttatttgttagtgaggagagaaaaaaggaattttaggttggggaaagtattcgtaaaggtattgtgatgggtttgtggtaaggttaagggtgtttgatatttatgatttagaggttagcgtatttgatatttatgaatttaaggtaagaaattgagaaaggagattggagaaagaggttgaggttagattggataaggttttttaagttaaacgaagaagtttgtattttaaagtagagtatgatttttatagaggaaaatgattaatatatggtaaattggagtatgatattgttgataatagagattaattagtgataatattttaggatagagataagaatttgattttagggagttatagaagtatttaggagttaaatatgaaaggattgattgaatgattgagtggttgagagagaaggaagaatttaaggtggtttttttttgtttagaaagtgaggtagataggttgggtatagtagtttatgtttgtaattttagtattttgggaggttaaggcgggtagattatttgaggttaggagtttgagattattttgtttaatatggtgaagtttagtttttattttaaaaaaaaaaaaaaattagttgggtatggtggtatgtgattgtaattttagttatttgggaggttgagttaggagaattatttgaatttagtaggtgaagattgtagtgagttaagattatatatattattgtattttagtttgggtgatagagaaagatttcgtgttttttttaaaaaaaaaaaaaaaaaaaaaaaaaataaaggttggtggttaggtacggtggtttatgtttgtaattttaatattttgggaggttgaggtaggcggattatgaggttaggagatcgagattagtttggttaatatggtgaaatttcgtttttattaaaaataaaaaaaatagttaggtgtggtggtgtgtttttgtagttttagttatttaggaggttaaggtaggagaatcgtttgaatttgggaggtggaggttgtagtgggtcgagattatgttattgtattttagtttgggtaatagagtgagatttcgttttaaaaaaaaaaataaaaataaaaaggttgggagcggtgtttacgtttataattttagtatattgggaggttgagatgggtggatcgttttaggttaggagttttaagattagtttggttaatatagtgaaatttcgtttttattaaaaatataaaaattagttgggcgtggtggtagacgtttgtaattttagttatttgggaggttgaggtataagaattttttgaatttgagattgcgttattgtattttagtttgggcgataagagcgatattatattttaaaagaaaagaaaagaaagttatttagcggagaaaagattatgttaattgttgtagagatattttttaggataggtttaataatattattagatttggtaaattattagtgatttagttttgtgaattggtggtagtagatttgaagttgtaggtttaaatagtagaggtattttatttttttttatttattttattttagtttttttgtttgtttgtttgtttttgagatagagttttattttgttatttaggttggagcgtaatggtgtaattttggtttattgtaatttttgtttttcgggtttaagtgatttttttgttttagttttttgagtagttaggattatagtgttcgttattatatttagttaatttttgtatttttagtagagatgaggttttattgtgttggttaggttggttttaaatttttaattttaggtgatttatttattttggttttttagagtgttgggattataggtatgagttatcgtattaggttttttattttttatatatatatttaatttttatagagataggatttggttatattgtttaggttggttttagatttttgagattaagcgatttatttgttttggttttttagaatgttgggattataggcgtgagttattgtgtttagtaagtagaggtatttttaaagttttaggtggagttttggtaagagattttttttgtattggggtgataaatatttatgtatttatttaagtatttattgagtatttgttttttgtaagttataattttaaatattatggaaataggagagaatatgatagttatgttcggtttggggagatagatattaaataattaattatatattattttttttaatttttttgttttttgaaatagttttgtttttttgttcgggttgtaatttttatttttttggtttaagtaattgttttgttttagttttttgagtaattggaattatagttataggttattatgtttatttattttttttttttttttttttgagatagagtttcgttttgtcgtttaggttggagtgtagtggagcgatttcggtttattgaaagttttattttttggatgtacgttatttttttgttttagtttttcgagtagttgggattataggtattcgttattacggttagttaatttttttgtatttttagtagagacggggttttattatgttagttaggatggttttaattttttgatttcgtaatttgtttttttcggttatttaaagtgtcgggattataggtgtgagttatcgcgtttggtttaatttttgttttgttttgtttttgagatggagtcgtattttgttatttaggttgaagtgtagtggtgcgattttagtttattgtaatttttatttttcggatttaagtaatttttgtgttttagttttttaagtatttgggattataggttttattatgttggttaggttggttttgaatttttggttttaagtgagttattcgtttcggttttttaaagtgttagaattataggcgtgagttatcgtgtttggttttaatttttgtatttttagtagagatggggttttgttaggttgttaaggttggttttgaatttttggttttgagtgatttatttgttttttagaatgttggattataggtatgggttatcgtatttagttaattaattatatatttatttaattatagttggataagtgttttaaaaaggtggttagaatattttgatatagatcgagggtagttaatagagtttgggaaagttgagtttgagttgaattttggaagaacgaataggaatttaataggttaagagggatggggtggatgggatgaggaaaaacgagcggtgtattttaattagagagaatagtatgtggaaagttaaatggtaggaggagtataggttagtttgaggtagtgcgaggaggttagtatgggtaaagtagagtataaagggagattgatatgagtttaggttggtgtgaggtaagtaagggttagaaagcgtagaatatttttagagtagtaggaagtgattagaaggttataagcgggagagtgatttgattaggtttgtattttttatttttgtgtttgtttttgtttttgtttttttgagttagtgttttgttttgttatttaggttggagtgtattggcgtgatttcggtttattgaaatgtttattttttaggtttaagggatttttgtgttttagttttttaagtagttgggattataggtatgtgtattaagtttggttaagtttttgtatttttggtagagatagagttttattatgttgtttaggttggttttgaattttttagtttagttgatgcgtttatttgggttttttaaagtgttgggattataggtatgagttatcgtgtttggttaggtttgtattttttaaaaaggatattttggttattatatggaagtagattggaagtgttatgtgtataatagaggatattaggagattatttgtaatttgaggataaagagtttggaggtagagatggaaaataaaagaaaggggttcgttttagtggtttatgttagtaattttagtattttgggatattaaggcgggcggattatttgaggttaggtgatgaacgtaggagtatgtttattaaggtaaagaaagggaagagtttttttttttttttttggagatagagtttcgttttgttattaggttggagtgtagtagtgtagttttggtttattgtaatttttgttttttaggtttaagtgatttttttgttttagttttttgaatagttgggattataggtacgtgttattatatttggttaatttttatatttttagtagaaataggtttttattatgttggttaggttggtttcgaatttttgatttcgtgatttattcgttttaattttttaaagtgttgggattataggtttgagttattatatttgacgggaagagtttatttataaaggaaggttattgaaggcgaaaagggtgggatagttatgtagaaatggaaaggttttgtagagaaagagttaagtatggtttgttatgagagaattgatttattttgttatagataaatttagaggtttagaggaaggaaaattgagttgtattttattttttgtttgtttgtttgtttgtttgagatggagttttattgtgtcgtttaggttggagtgtagtggtgcgatttcggtttattgtaaatttcgttttttaggtttatgttatttttttgttttagttttttgagtagttgggagtataggcgttcgttatcgtatttggttaattttttgtatttttagtagagacggggttttattatgttagttaggatggttttaattttttgatttcgtgatttgtttttttcggttttttaaagtgttgggattataggtgtgagttattatgtttggttatttgtttgtttttgagatagggatttgttttattgtttaggttggagtgtagtggtttaattacggtttattgtaatttttgttttttggatttaagtgatttttatgttttagttttttaagtagttgggattagagatgtttatcgttatattaggttaatttttatatttttaatagagatggaggtttcgttatgttggttaggttggttttgaatttttggttttgagtgatttatttttttggttttttaaagtgttgggattgtaggcgtgagttattatgttcggtttgaattgtattttaaaaggagttgtaaggtttatgtatagttagttttgtgattgttttttttttttttt

SEQ ID NO: 136 - DNA, 11029 bp, Artificial Sequence
  chemically treated genomic DNA (Homo sapiens)
gggaagagagagaaataattataggattgattatgtataggttttatagttttttttaaagtgtagtttaggtcggatatggtggtttacgtttgtaattttagtattttgggaggttaagggggtggattatttaaggttaggagtttaagattagtttggttaatatggcgagatttttatttttattaaaaatatgaaaattagtttagtgtgacggtgggtatttttaattttagttatttgggaggttgaggtatgagaattatttgaatttaggaggtagaggttgtagtgagtcgtgattgagttattgtattttagtttgggtaatagagtaagtttttgttttaaaaataaataaatggttaggtatggtggtttatatttgtaattttagtattttgggaggtcgaggagagtagattacgaggttaggagattgagattattttggttaatatggtgaaatttcgtttttattaaaaatataaaaaattagttaggtgcgatggcgggcgtttgtatttttagttatttaggaggttgaggtaggagaatggtatgaatttgggaggcggagtttgtagtgagtcgagatcgtattattgtattttagtttgggcgatatagtgagattttattttaaataaataaataaataaataaaaaataaagtgtagtttagtttttttttttttgaatttttggatttatttgtgataggatggattagtttttttatgataggttatgtttaattttttttttataaaatttttttatttttgtatggttattttatttttttcgtttttagtgatttttttttataaataagtttttttcgttaggtgtggtggtttaagtttgtaattttagtattttgggaggttgaggcgggtggattacgaggttaggagttcgagattagtttggttaatatggtgaaagtttgtttttattaaaaatataaaaattagttaggtgtggtggtacgtatttgtaattttagttatttaggaggttgaggtaggagaattatttgaatttgggaggtagaggttgtagtgagttaagattgtattattgtattttagtttggtgatagagcgagattttgtttttaaaaaaaaaaaaaaaagtttttttttttttttattttgatgaatatatttttacgtttattatttggttttaggtgattcgttcgttttgatattttaaagtgttgggattattggtatgagttattaagacgggttttttttttttattttttatttttgtttttaagttttttgtttttaaattataaatagttttttggtattttttattatatatataatatttttaatttatttttatatagtagttagaatgttttttttaaaaaatgtaaatttggttaggtacggtggtttatgtttgtaattttagtattttgggaggtttaggtgggcgtattagttgagttgaggagtttaagattagtttgggtaatatggtgaaattttgtttttattaaaaatataaaaatttagttaggtttggtgtatatgtttgtaattttagttatttgggaggttggggtataaaaattttttgaatttgggaggtggatattttagtgagtcgagattacgttaatgtattttagtttggatgatagagtaagatattgatttaaaaaaataaaaataaaaataaatataaaaataaaaaatgtaaatttaattaagttattttttcgtttataattttttggttattttttattgttttgaagatgttttgcgttttttggtttttgtttattttatattagtttgaatttatgttagtttttttttgtgttttgttttgtttatattggttttttcgtattgttttaaattggtttgtgttttttttgttatttggttttttatatgttgttttttttagttggaatgtatcgttcgtttttttttattttatttattttattttttttggtttattaaatttttgttcgtttttttaaagtttagtttaaatttaatttttttagattttgttaattgttttcgatttatgttaaggtattttagttatttttttaaagtatttatttaattgtaattaaataaatgtgtaattagttggttgggtgcggtggtttatgtttgtaatttagtattttggaaggtaggtggattatttaaggttaggagtttaagattagttttggtagtttggtaaaattttatttttattaaaaatataaaaattagggttaggtacggtggtttacgtttgtaattttagtattttgggaggtcgaggcgggtggtttatttgaagttaggagtttaagattagtttggttaatatggtgaaatttgtaattttagatatttgggaggttgaggtataagaattgtttaaattcgggaggtggaggttgtagtgagttgagatcgtattattgtattttagtttgggtgatagagtgcgattttattttaaaaataaaataaaataaaaattaggttaggcgcggtggtttatatttgtaatttcggtattttgggtggtcgaggagagtagattacgaggttaggagattgagattattttggttaatatggtgaaatttcgtttttattaaaaatataaaaaaattagttggtcgtggtggcgggtgtttgtagttttagttattcgggaggttgaggtaggagagtggcgtgtatttaggaggtggagtttttagtgagtcgagatcgttttattgtattttagtttgggcgatagagcgagattttgttttaaaaaaaaaaaaaaaaaaaatagatgggtatggtggtttgtggttgtagttttagttatttaagagattgaggtaggataattgtttgaattagggaggtagaggttgtagttcgggtaaaagagtaagattgttttaaaaaataaaaaaattaaaaaaaataatgtgtaattagttatttggtatttgtttttttaggtcgaatatggttattatatttttttttgtttttatagtgtttagaattatgatttgtaaagagtaggtatttagtaaatatttgaataaatgtatgaatatttgttattttagtataagagaaattttttgttaaggttttatttaaaattttaaaaatgtttttatttgttgggtatagtggtttacgtttgtaattttagtattttgggaggttaaggtaggtagatcgtttgattttaggagtttgagattagtttgggtaatatggttagattttgtttttataaaaattaaatatatatataaaaaataaaaggtttggtacggtggtttatgtttgtaattttagtattttgggaggttaaggtgggtggattatttgaggttgggagtttgagattagtttggttaatatagtgaaattttatttttattaaaaatataaaaattagttgggtatggtggcgggtattgtaattttagttatttaagaggttgaggtaggagaattatttgaattcgggaggtagaggttgtagtgggttaagattgtattattgcgttttagtttgggtgatagagtgagattttgttttaaaaataaataaataaatagaaaaattaaaataaaataaataaaaaaaaataaaatgtttttattgtttaaatttataattttaggtttgttattattagtttataagattgagttattggtgatttattaaatttaatggtgttattaagtttattttaaaaaatatttttgtagtagttggtatgatttttttttcgttgagtaatttttttttttttttttttgaggtgtagtgtcgtttttgtcgtttaggttggagtgtaatggcgtaattttaggtttaaggaatttttgtgttttagttttttaagtagttgggattataggcgtttgttattacgtttagttaatttttgtatttttagtagagacggggttttattatgttagttaggttggttttggaatttttgatttaaggcgatttatttattttagttttttaatgtgttaggattataggcgtgagtatcgtttttagtttttttgtttttgtttttttttttgaggcggagttttattttgttgtttaggttggagtgtagtggtatgatttcggtttattgtaatttttattttttaggtttaagcgatttttttgttttagttttttaagtagttgggattataggggtatattattatatttggttattttttttatttttagtagagacggggttttattatgttagttaggttggtttcgattttttgattttatgattcgtttgttttagttttttaaagtgttgggattataggtatgagttatcgtgtttggttattagtttttgttttttttttttttttttttttttttgagagggatacggagtttttttttgttatttaggttggagtgtagtggtatgtatgattttagtttattgtaatttttatttgttgggtttaagtgatttttttgatttagttttttaagtagttgggattatagttatatgttattatgtttagttaatttttttttttttttaaagtagagattgggttttattatgttggatagggtgattttaaatttttgattttaagtgatttgttcgttttggttttttaaagtgttgagattataggtatgagttattgtgtttagtttgtttattttattttttaagtaggaagaagttattttagattttttttttttttttaattatttagttatttagttagtttttttatatttaatttttaaatatttttgtaattttttaaaattaggtttttatttttgttttggaatgttattattaattgatttttgttattaataatattatgttttaatttattatatattagttatttttttttataaaaattatattttattttaaaatgtaaattttttcgtttggtttaaaagattttgtttaatttagttttagtttttttttttagtttttttttttaattttttattttagatttataaatattaaatacgttgatttttgagttataaatattaaatatttttgattttgttataaatttattatagtatttttgcggatgttttttttaatttggaattttttttttttttttttattggtaaataatttttaagattttatttaaatattattttcgttgtaaagttttttttatatttttaggtaattattttttttttttttagggttgtttattaagtgttttttttaatgtatttttattattttatttgttatagtgttttataattatttgtagaatttgttttttattagatcgtgagttttttgagggtaggagttttgttttatttatttttttatttttagtgtttgttattatgtttgatttatagtaggattttaataaatatttgttgaataaatgatttcgggttttaaaataaatgtaagcgtatagagtaataggttttttgtaggggtggtttatataaatcgtataaatattagatttttatttgatgggaattagatttttattttatgaagagaagcgttttagtttattatttgatagtggttatttattattattatttttaattttatgagaagttatttttgaggaagaatggagtggaggagaggtttttatcgttgttttaaatggtagtgtgtgataacgattttgaacgattatggggaaaaaaatttatcgaggttggagattttggagaatgggggtagtaattatttttttggttatgtatattagttttttaagatacgtttttaatttttatatcgtatttttttttcgtttatatttattagcggggtttcgattttgttgtttcgtttttttttttttcgtattttttaatattttttgttatagaatcgttttataattgtgattttttcgttattggaatttaagggttatagatttttttatttttgattttcgtattattttgtagtttcgatttttatttttagtttgtttttattgtttagataatgttttaaatatattttcgtagttatttcgaagtaaaataaagtaattttcgattcgtttcggaagtgattgtaacgcgataggggtcgaagttattttgcggttaaagttttttcgtttttaaaaggagaattttcgtttttaaaaggagaattttcgtttttaaaggagaattttcgtttttattatattatcgtcggtatatattcgttcgatattgaaatttttttttttgtatggtagttacgatcgtttatagtgaggcggttgtagttcgttttcgtttttatagatattttaggacgcgatcgagataggtatgacgttattggaggtcgttattttgtattttttagtaaatttttttttttttaaaacgggaatgtatggtaattcgtgtaggggtaattgtttattttaggtttatattgcgtaaatatatttttttagtaattggaagatttaatttttttttttttttttgtagaatgattttttttaagttagttagttttttaaggaagttggggaagagtattaggttttgagatatttaaatcgtttgaatttttatttatttatataaatattattttttttagtattatttttttaatttgagaaagatgattaattttttatttataaatataaagaatgatttataataaaattataattttgtatattttttgttagagtttttgtacgttatattagaatatatttttatatataaaatattattttttgttttgtttttttgttttttttttttttttttttgagatagaatttttatttttattgtttaggttggagtgtaatggcgtgattatggtttatcgtaatttttatttttcgggtttaagtgatttttttgttttagtttttcgtgtagttgggattataggtatgtattattacgttagattaattttgtatttttagtagagatggggtttttttatgtcggtgaggttggtttcgaattttcgattttaggtgatttgtttattttagttttttaaagtgttgggattataggtgcgaattattgtgtttggttttttttgttattttttaagggggaaatttcgtgtttttgttttttttttgtttatatgtgatgttagtattataattttgaagggattgagggatgtagtagtattattattgggttagttggttagttagttgttagttattattttagttagttatggtagagtgatttttatggtttttattagaatgggaagtagttaagggtatgagaggttgttaatatattaggttgttaatatattgttaatataaaggttataatttaatagtggtgttagtaagatagtattttagagatagttgttattttttatatttttcgtatttttatatattttttataagaattattaatgttttacggtaagtttttaaagagatagatttttagttatataatttttattaaatatgtggagaagaggaatttttaattcggggcggattggaagttgttttgttttgtttcgagatggatgtagggatgtatttgaaatattatttggatagtaagagtaggttggaggagggggtttaggggttgtagagtggtgggggtattagagttgaaaggatttgtagtttgtaaattttaggtttattagtgtgtaggtagtaagatatagtaatagaattcgggaaattgttttaattataaaagttatgtttttcggtaatttgatttttgtgtttgttttattatataatgagattattattttttttatagggttgttggaataagtgagtgtgagtgtatttataaaaagagtagattttagttttaatattggtgatgaagttagggttattagggtttttttaagagttggtgagagtgggaggaaaaagtagtaaatatttagggagttaagaaatattggtatatttggttatatgtgatatatttattggtattatataatatattgagatattattttaggtgtttatataggatatttagtattaaattaagtgggttttatttattttagtttaattatataataagtattattggttagtagttttagagtttttaggatgtgggagtttggttataatttttataattttttcggtgtttaaagtaaggttttttttttttttttttttttttttttttaaaataaatttttttttggggtttaggtttgagtgtaggggggtaatttcggtttattggaattttggttttttaggtttaagttattttttggtttaaatttgtagttgggattaaggggcggggttattaattcggggtaattttgggattttaatttattttttttgaaaaaaagttttttttttgtttttaggttggaagtttttggtttaaatttggttaaggggaattttgggttttaaggttaaaaaaattttttggtttaaattttttgaaaatttggaattggggggtttttttattttgtttagttaatatttgtatttttagtagagacggggttttattatgttggttaggttggttttaaatttttgatttcgtaattcgtttattttggtttttttaagtgttgggattataggcgtgaattatcgtgtttagtttaatttttatttttggagatagtgttttgtttttttttagtttggagggtagtggtgtaattatagtttattgtagttttaaatttttgagtttaagtaatttttttatttttgttttttgagaagttgggaatataaaaaaaaaattaaaataaaaaaatattagagttttattcgttatttaggttggagtgtaatggtacgatttcggtttattgtaatttttattttttaggtttaagcgatttttttgttttagttttttaaatagttagaattataggtatttattattatatttggttaatttttgtattgttagtagagacgggtttttattatattggttaggttaagtttcgaatttttgattttaggtgatttatttattttggttttttaaattgttgggattataggtgtgagttattatatttggtttaattttttaaattttttatagagatgatattttattatgttgtttagattggtttgaaatttttgaagttaagtaatttttttattttggtttttataaagtgttgggattataagtgtgagttattgtgtttgttcgttcggttttaaaatggtggggatttaaagttaaagagattttattttttaatttttaggtttataaggggttaggtttaaaagttttttatagaaatttcgaaaacgggtttaattttaaaaggtaagtttttcggaaattggatttcggggtcggtttattatataaaggggattatattttttttaaaagggttttgggaaaaaggagggtgaggggtttttttaaaaggggtggatttaagtttaaaaacggggaagaaatttaggtttatagggtttttttaaaaaattgttaaaattggggggaaaaattcgtaaaatttcggggggttaaaaaaaattggaaaattgggttaaaggggaataatttatgggttttttttatttatttgggattttattttggggtttttatagggtattttggttttaaattaagggggttttttttttttcgttttaattttttaaaaggtttttttggttaaaattttcgaggtttttaggattggggattttggtttaaattttaaaaattttttgggggttaaaagaaaggttttttttttttttttttttttttttttttttttttttagatagaatttcgttttgtggtttaggttggagtgtagtggtgtaatttcggtttattgtaattttcgttttttaggtttaagttatttttttgttttagtttgtagttgggattataggcgcgtgttattatatttggttaatttttgtatttttattttatttttttgagagagagttttattttgtcgtttaggttggagtgttatggtacgattttggtttattgtaatttttgttttttaggtttaaaagatttttttgttttagttttttgagtagttgggattgtaggcgtttattattatgtttagtttattttttgtatttttagtagagacggggttttattatattggttaggttggtttcgagtttttaattttatgatttatttgtttcggttttttaaagtgttgggattataggcgtgagttatcgtgtacggttattaatttttgtatttttagtagagatggggttttattatgttggttaggttggttttgaatttttgacgttaagtagtttgtttgtttcgtttttttaaaatgttgggattataggcgtgagttatcgtatttagttttaaagtaagttatttaatttttaaaaaaggtatttttagagttatttagtttaatttttttattaatagttgaagaagtattttggttaatattggttgatggtaggtaaagggttgaagtttaggttttatgattatattttattttatagtattatagtttttttgtataaattaattttgtattttttaatcggttatgatttttataaggtaataaatatatatatgtatatatattgttaattgtaagttttttttttatagatttaggtaggagtgtaggtttttttaagaggtttttattttttttttatagggagtttagttgttttgttaatatataattaaagttttgtttttatatatttaggtaatgtaatttttatgatagaatgtgtatgtagaagtttttataaattaggattttattggagatattatgaaattgtatttttttatgattggagaattgtataaatggggtattattatataagtatttgtttattatatatatattttg

SEQ ID NO: 137 - DNA, 5567 bp, Artificial Sequence
  chemically treated genomic DNA (Homo sapiens)
tttagaggtttgtttatttagttatgagttgtatatattattgttttttattattttttaagtttttaggattttttttatgtagatgtaagagatattttatttattattatttcgcgataatattaggttagggattagggattggtttggaggttaggaattttagtttttgtttttttaggcgaaatgattaggggttggtgatttgttttaagttttttatttgtgaagtgaggggttttttgttataatcgtttttaggttggggagttttttttatgtgttaattttgagttgggtattttttattttttattgttaatttttagaatatagggtattatggtgttcgttgtttaagtaaagattcgagatttaagtttggattttattaggttatttattttagaaaggtggagttggggtttaaggttagttttgtttaattttagagtttagtttttttttttgttttgggttgattacgtggtttggaggggattttttagttttggatggttttaggtgttggtaaggggatgatggaggggaaggagtttgggtttgggtgggtgtgggtattggggggaagaagggagggtgatattagtatatttagtaggtgggttgttttttgagtcgtagagtagcgcgggagtgtgggggtttttttggttggtgtggagagttgttttttataggtagatgttgttagggttgaagtggggtatggaggagtatttggggttttataatttttttttaggtatttttttttttttaattattggtttttgtttgagggtgaagagggggtcgttttttttattttagagttagatatattgattagggtttggaaattgggatttttttgggtttaagaggaattttggggggtggggagtagaagtgtaggtggaggttataagggtcgtgggtatagaaatgaattgtttttaatttttttggggagtagagatttagaggatttttcgacggtttagggaaatttaaatttatattttttttttttttattttagttttattttattttggggtgtgattatttttttattaaggtttttgtttatttttagtttatttagagtttgtggtttgtaggatggatagattttaaattggttagtgttgtttggttgaagagaagtgttgttattttagatatttttgttttttttttggttttaattttttttttagtttgggtttttttttagtattgttaggagaggaagttcggttttagggttagggttataatatttttttttttaaatttttgggtttgtagttagggttataatttgttttagttttagttattttattgattttgttattagttagtaaatatttattatttttaggtgttttttttgattaatttttttttattattttttatattgtatttgttgagattttttgattttggtatatgtttgtggatatatgtattttgttttagtttagattgggagttttggtatatttggtgttttggtgatttatttggtgttttgtagttttatgtagtaggttgtttggttgtttgattaataaatatgagagttaaaggtagttatattagatttatatgagttttgtggatagattaaggatagaaagttggtgataagttggtgataggaaaggaggtgtgggtaatataggtggattttttgtaggaggtagtattttggtattgaatatagaattaagtaaaggtagcggtttgaggttttttggagagatttgggtgaaggttttttagtggtattgtgatggagaaggagatgggtgttggaggattgtatatttattttttgaggagggtgaagattggggagcgtttgtaaggtaaggggtgaggaggagatgtggtgtttgggtgggtttatattaatttgcgtttttttttttaaatttaagaattttttatttttttttttatttttttttttattttttatgttttttatgttgaataatatttagggttttttgtttgtttgttttgttttttttatattttattattaaaaagtgtaaatatagggtgaaatgagaataattgtatagtgaatatatttttattatttagatgttattattaatattttttgttttgttttgtttttgagatggggttttattttgttatttagtttgaagtgtagtggtgaaattatagtttattgtagttttgaatttttgggtttagaggtttttttattttagttttttgagtagttaggattatagatattagttattatatgaggttttgtagaaatggggttttattatgttgtttaggttgattttgaatttttggttttaagtaatttttttattttagttttttaaagtgttggaattataggagtgggttattgtatttggttttattaatattttttatttgttttattatatatttattaatttattttatttttaaatattttttaaaattataaatattagtatattttatatttaaattttttagaagtttaatattgattggagtttagtatttatttttttattttttttttggtttgaggaaggtaaattttatatataaattttaagttagtatttttttttttttttgagacggagttttgttttgttgtttaggttggagtttagtggtgtgattttggtttattgtaatttttgttttttgggtataagcgatttttttgttttagttttttaagtagttgggattataggtttgtgttattatatttagttaatttttgtatttttaatggagaaggggttttattatgttggttaggttggttttaaatttttgattttaagtgatttatttgttttggttttttaaagtgttgggattataggtgtgagttatttcgtttggtttaatattgttttgtttgtttgtttttgtttttaagatagagttttgtttttgttatttaggttggagtgtaatggtatgatttcggtttattgtaattttcgttttttgggtttaagtgatttttttgttttagttttttaagtagttggaattaaaggtgtttattattacgtttcgttaatttttatatttttagtagagatggggttttattatgttgattaggttgttttcgagttttttattttagatgatttattttttttggttttttaaagtgttggtattataggtaagagttattgcgtttagttttagtatttagtttttaaattgttttgttattaaggttttggagttagatgtttgggtttaaattttggttttgttattgattttgtgagttttataagttttttaatttttttgtattttagtttttttttagggtttttgttaggattataattattggttgggtatgatggtttatgtttgtaattttagtattttaggaggttaatacgggtagattacgtgagtttaggagtttgagtttagtttgggtaatgtggtaaaaatttatttttataaaaaatgtaaaaattagttgggtatggtggtatgtgtttatagttttagttatttaggaggttgaggtaggtgaatttatagattttgggaggttaaggttgtagtgagttatgattttgttattgtattttagtttgggtgatatagcgagattttgttttaaaaaaaaaaattattaaagtgtgtaaattagtggtataaatatgttaagtgtattttgtgggttagttatattattattagtattacggaaatatatagagatgttattaagaaggggagatgattggagttatttttagtttttttggatttggtttttttttttttgattttttttttttttttttttttttttttttgagagagagttttagtttgttgtttaggttggagtgtaatggtgtaattttggtttattgtaatttttgttttttaggtttaagtgatttttttgttttagttttttgtgtagttggaattataggcgcgtgttattacgttcggttaattttttgtatttttagtagagatagggttttattatgttggttaggttggtttcgaatttttgattttaagtgatttatttgttttagttttttaaattgttgggattataggtgtaagttattatttcggttatttttttgatttttaattatttatgttgtttatatttattatttatgtggtttttgttgttttgttttggttatttttgtatttatttgtttttttatttatttatgtataaatatttagtaagtatttattaatggatagggtttattgtagatttggaagttttttgagggtgggagtatgtttcgtttatttgtttttattttttgtagtaagggaggtaaagttttatttttatttttttttagtgagttagtagttagtggtgaggttaaggtttattttttttttttttatttagtatagggggttggagatgagtaagggaacgggaggaggttagtttagtatgggaattagttttttttagggaatttagatatttattttttaagattttagtttttgttttagttcggtttttgattttagagacgggattagttttttttttagtatttattttgagggtatagaagaatgtaaattatattggaaatttggagatttgtgtttttattttagttttgttgattggttttttgtaagttattttttttttttgggttttagtttttttttttgttgagttagaagatgtttaaagatttttttggttttattttgagagtttgtttttttaattttaattttttttttagtttagagaatttaggtatttagttgttttattttagttttgggtaaataggaagttgggtgaggggagtaggggtgtgcggaaagttttagttaggtgtgtaggtttatagggagggggtgggttcgtttttgaggtatgaaagttttttgttttggttttggtttagttttaatgggggtattggggttggagggtaggggtgggaggttttaggggaggggtttttttttgttagttgtggtaggagttatttttttggtgattttgttgttggcggtgtttattattgttttggttgtgttggttttagtgttttaggattagggaggattggtgagtggttgtaataggttttggtggagagttgtattttgcggatgtttggttttttttggttgtgtttgtggttttttgttttttttggtttagttggttcggttgtttttggtggggatgttttgtttttttgttgattttttttttatgtttttgtgatgttgtgtttgtgtttcgatataagttttttgtgttttttttttttttttcgaggtatatttgttttttcgtttaagtatttatgttttgtttgtttttttttttaaggaggtgtgtgttggggatggtgttggtaggagaaattttaggtttgtagtttgggtttatttttagaggggtaggggtgatatgagttgaatttgaattttgggtattgtgattttatttaattagg

SEQ ID NO: 138 - DNA, 5567 bp, Artificial Sequence
  chemically treated genomic DNA (Homo sapiens)
tttggttgggtggggttatagtgtttagagtttagatttagtttatgttatttttatttttttgaaagtggatttaagttgtaggtttggggttttttttattagtattatttttaatatatatttttttagaagggagaataagtaaggtataggtatttgggcggagaaatagatgtatttcgggaagaggagaggagatataaggggtttatgtcgggatataagtataatattataggaatatggaaagagagttagtaaagagataagatatttttattagggatagtcgagttagttgagttagagggggtaaaagattataggtataattagagggagttaagtattcgtaagatataattttttattagggtttgttgtagttatttattagttttttttgattttggggtattaaggttagtatagttaggatagtgataggtatcgttagtaataaggttattagagaagtggtttttgttatagttagtaggagggaattttttttttggagttttttatttttgttttttagttttagtgtttttattgagattgaattagagttagagtagggggtttttatattttagggacgggtttattttttttttgtagatttgtatatttggttgggatttttcgtatatttttgttttttttatttagttttttgtttatttagagttggggtggggtagttggatgtttgggttttttgaattggggaagaagttgaggttagggagataggtttttagggtggaattaaaggggtttttagatattttttggtttagtagagagagaaattgaggtttagggagggaaggtagtttgtaggaagttagttagtagagttgaaatgagaatatagatttttaggtttttaatgtggtttgtatttttttatatttttaaggtaggtgttggaggaagagttgatttcgtttttgaggttaagggtcggattaggataaggattggaattttgagggatggatgtttgggttttttgagaagaattgatttttatattgggttgattttttttcgtttttttgtttatttttagttttttgtgttgagtgagaaagggagaggtaagttttagttttattattgattattgatttattaaggagggatggaaatggagttttattttttttgttataaaaagtaaagatagatggacgaggtatatttttatttttagagagtttttaagtttataatgagttttatttattagtaggtgtttattaaatgtttatatataaatgaataaaaggataaataaatgtaggaataattaaaataaagtagtaaggattatatgaatggtagatgtaggtagtatgagtggttaagagttaagggagtagtcggggtagtggtttatatttgtaattttaatagtttgggaggttgaggtaggtggattatttgaggttaggagttcgagattagtttggttaatatggtgaaattttgtttttattaaagatataaaaagttagtcgggcgtggtggtacgcgtttgtaattttagttatataggaggttgaggtaggagaattatttaaatttgggaggtagaggttgtagtgagttaagattgtattattgtattttagtttgggtaataggttgagatttttttttaaaaaaaaaaaaaaaaaaaaaaaaaaagagttaagggaagaaagattaggtttaaggaagttggaagtggttttaattattttttttttttggtaatatttttatgtgttttcgtaatattaataataatatagttgatttataaaatgtatttaatatgtttatgttattgatttatatattttaataatttttttttttgagatagggtttcgttatgttatttagattggaatgtaatggtaggattatggtttattgtagttttgattttttaggatttatggatttatttattttagttttttgaatagttgggattataggtatatgttattatgtttagttaatttttgtattttttgtagagatggatttttgttatattgtttaggttgggtttaaatttttggatttacgtgatttgttcgtgttggttttttaaagtgttgggattataagtatgagttattatgtttagttaataattataattttgataaaaattttaagaggaaattgaggtatagagaggttaagaaatttatggagtttatagagttagtggtagaattagaatttgaatttaggtatttggttttagagttttgataataagatagtttaaaaattgaatattggggttgggcgtagtggtttttgtttataatattagtattttgggaggttaaggaaggtggattatttgaggtaaggagttcgagagtagtttgattaatatggtgaaattttatttttattaaaaatataaaaattagcggggcgtggtggtaggtatttttaattttagttatttgggaggttgaggtaggagaattatttgaatttaggaggcggaagttgtagtgagtcgaaattatgttattgtattttagtttgggtgataagaataagattttgttttaaaaataaaaataaataaataaaatagtattaggttaggcgagatggtttatatttataattttagtattttaggagattaaggtaggtggattatttgaggttaagagtttgagattagtttggttaatatggtgaaattttttttttattaaaaatataaaaattagttggatatggtggtataaatttgtagttttagttatttgggaggttgagataggagaatcgtttgtatttagaaggtagaggttgtagtgagttaagattatattattggattttagtttgggtaatagagtaagatttcgttttaaaaaaaaaaaagagtattgatttgagatttgtatgtaaaatttgttttttttaggttagaaaagaaatggggaaataaatattgaattttagttaatgttaagtttttgaagggtttagatgtaaaatgtattgatatttgtaattttaaaagatatttaaaagtgagatggattgataaatatgtgataaagtaaataaaaaatgttaatagagttaggtgtagtggtttatttttgtaattttagtattttggaaggttaaggtggaaagattgtttgagattaggagtttaaaattagtttgggtaatatagtaagattttatttttataaagttttatgtggtagttggtgtttgtagttttagttatttagaaggttaaggtgggaggatttttgagtttaggaatttaaggttgtagtgagttatgattttattattgtattttaggttgagtgatagagtgagattttattttaaaaataaaataaaataaaaaatgttaatagtagtatttaggtggtaagaatatgtttattgtataattatttttattttattttatgtttgtattttttaataataaaatgtaaaaaaaataaaataaataaataaaaaattttgaatattatttagtatggggaatatggaggatggggagaagggtgggggaggaagtagaaggtttttgaatttggaaggggaaacgtaaattaatatggatttatttaggtattatattttttttttattttttgttttataggcgttttttagtttttattttttttaaggagtgggtgtgtaattttttagtatttatttttttttttattatagtgttattaagaagtttttatttaggtttttttagagagttttaggtcgttgtttttatttagttttgtgtttaatgttagaatgttgttttttataggaagtttatttgtattgtttatatttttttttttgttattaatttgttattaattttttgtttttgatttatttatagggtttatgtagatttagtatggttgtttttaatttttatgtttgttaattagatagttaagtagtttgttgtatagagttgtagaatattaagtgggttattagaatattaaatatgttagagtttttagtttgaattggagtagggtatatgtgtttatagatatatgttaagattaagaggttttaatagatgtagtgtaagaggtaatagagaagagttaattaaggaagatatttgaaggtggtgggtgtttgttgattagtggtaggattagtgaaatgattggagttgaggtagattatggttttagttataggtttagaagtttgaaaagaaagatgttgtaattttaattttggagtcgaatttttttttttaataatgttggggaggaatttaggttgggggagaagttaaagttagaggaggggtaggaatgtttgaggtggtaatatttttttttagttagatagtattggttagtttggagtttgtttattttgtaggttataagttttgggtaagttgggaatgggtagggattttggtggaaggatggttatattttagagtggggtgaagttaagatgaggggagggagagtatgggtttgagtttttttgggtcgtcgaggaattttttgagtttttgttttttaaagaaattaaagataatttatttttgtgtttacggtttttatggtttttatttgtatttttgttttttattttttagaattttttttaaatttagaagggttttagtttttagattttagttagtatatttggttttggggtgaagagaacggttttttttttatttttaaataggaattagtggttggaggggaggaagtgtttgaggggaagttatggggttttagatatttttttatgttttattttagttttagtagtatttgtttgtgggaagtagttttttatattagttaagggggtttttatattttcgcgttgttttgcggtttagggagtagtttatttgttgggtgtgttgatattattttttttttttttttttagtgtttatatttatttaggtttaggtttttttttttttattatttttttattagtatttagaattatttagggttgaaaagttttttttaaattacgtggttagtttagggtagaggaaagggttgggttttggagttgggtagagttggttttaaattttagttttatttttttgggatgggtgatttagtaaagtttaggtttgaatttcgggtttttatttgggtaacgggtattatgatattttatgttttggggattagtagtgaggaatggaaagtgtttagtttagggttggtatataagggaggttttttagtttgggaacgattataatagagggttttttattttatagatgaggaatttgaggtaagttattagtttttgattatttcgtttaaaagagtaaggattagagtttttgatttttaggttagtttttgatttttgatttaatgttatcgcggaatgatggtaagtaaagtgttttttgtatttgtatagagagggttttgggagtttaggaagtgatggggaatagtgatgtatgtagtttatgattaggtggataggtttttggg

SEQ ID NO: 139 - DNA, 6668 bp, Artificial Sequence
  chemically treated genomic DNA (Homo sapiens)
gatttgtttgtttcggttttttagagtgttgggattgtaggcgtgagttattgcgtttgatttaattttttattttttgtagagatagggttttattatgttgtttaggttggttttgaatttttaagtttaattgatttttttattttggtattttaaaatgttgggattataggtatgagttattgtatttggtttataatgttttttttttttttttttttttttttttttgggaagggggtttttttttttataaagggggggggggggggggggaaaaaggttttttttttttttttttttttttttttttttttttttttttttttttgtttttttttttttttttttttttttttttgttttttttttttattttaggttttgttatttaggttggagtgtagtggcgtgattttggtttattgtaatttttgttttttaggtttaagtcgtttttttattttagttttttgagtagttgggattataggtatgtgttattatgttttattaattttttgtattttttgtagagaggaggttttattttgttgttaggttggttttggtaatcgttttttgttgttaggttggttttgagtttaagtgatttaattatgtcggttttttaaagtgttgggattataggtatgagttattgtattcggatttggttgttttgttttttatttttgagattaaattttattttgttatttgggttggagtgtagtggtttagttatagtttatcgtagttttggttttttgggtttaagtagtttttttgttttagttttttgttaatttatttttttagtttaagttgtttaagagtttattatttgggaaaatttatgttattgattgtagtgttattgtgttatttgagttgttagtataatacgtttgttttggaaggtttgaatttgtagttgttatatttgtaatgattttgtatataagtgttagtatttaatttttttattatatattttaatttagttggtatgtttgagtatttataggtggaagtatatattatatattaagtttttttttttttttgttatagttagggtattgttaaatttttaaaatatgtttaagtagtttagaattttgttttagtaaagttaaggtggtgatataaattatttgttggaaaaaaaatgggatgttggtttgagagagtttagatttatttttttattatgggttttttgtttttgtatttgtagtgttttgtatatatagtgtttgttgaattggttaatttatgttttttatattttttttatgtacgttgttgtatttaattattataataaatttgtgaagttgttaggggtaggtgtttttattttatagatgagagaattgagagagatgttaatatttagttatgcggttagatttttaattagaatatataattttatttatatcgatattatgtttttgtttattatatttttataatttagaattatttaatgtaggaatatatttttttatttttgttagtattattttttatatgtataatttttaattatgttttaggtatttgtggttataggaatataataaagagagagatgagaaagttgtttgtttaagaaagcgaggttattattatttgtatttaaagtaatttggtattaaaataaattttgagatatcgttaaggttttagtatagtataaattttagaaatgatgatatttgatggtgagattgtggtgaaatagttaatatttaaatattttaattgtattgtagatttatatatattttttggaatataatattagaaaatgattttaaaagtgtttgtatttttttaatttgttgtaagataattttatagaataaaaagttatggttagtttagaaatatttgtttggtatatgttaggaattgtgtatggtgttgggaatttttaaaatgagagtgttgttgttgtttttttggatttttaatttgtggtaataatgtgagatagatatgtaattaaataattaatgtgttatattgtaatttatatatgtaatttataattaaattgtaatcgtaattgttaaattgtaatttaacgtatttttttttttttttttttttcgattttttttttttttattgagttttattttgttgtttaggttggggtgtagtggtataattataatttatagtagtttttaatttttgagtttaagtagtttttttgttttagttttttgaggagttgggattataagtttatattattatgtttggcgaattttttatatttttttagatagattttaatagaaaatgtagaaaaatgcgtaatgtattttaggaaaaatttttttgtaaaattattattatttttttgagatagggttttattgtgttatttaggttgtagtgtagtggtataattatagtttattaaggttttgattttttaaggtttaggtgattttttagttttagtttttcgcgtagttaggataataggcgtgtgttattatatttagttaatttttttattttgagtaaagattaggttttgtcgtgttgtttaggttggttttaaatttttgggtttaagcgatttatttgcgtcggttttttaaagtgttgggattataggtgtgagttatcgtgtttggttataattaagtatgttaatattttaatagtagtttttttattgaatattatgtattagatacgttatgtagaattttttttttgagtttttgtatattttttttttaatttagatttagagtaattttattttttgattattatgaaaattggaattttaatttaaattttttgattttaaaattttttatgtaggttatttttggttatttggaaagtgtatttttagtatgtgtattaatgtgggtaagtgttttaagatatatgaaaaattgtttttttgtatggggtttatgagttgagatagatatttatgtgaaagagataataatagagggaggagtaagtttttaatattaggtgattgatgtatattttgaagaggtttaaaattataatagtggtagggagaatgggaggagagatagaaaagattgaggtaaagaattttgtaattgtaacggaatgtagggatagtgaaggaaagaggtacgttagagattttttgtaaagttttttaaggttaggtaattgagtggaattgatattttaataaaggtttttagaagaggaagagattttggtagaatgatgagttttattaattttgtgggaggatattttaaggatttaagtatgtagtaaaagaaaatgaaagtaagataagtttggaatgtaattttagtgaataaataaaatataaataagtatataaagtataggttttagttttgttttattttttttatttttaagttaatggtttttttttattttttgtggggttttgggattagataagttagttttttatttgttgaatggattttttattaatttttagtttttgttattttaatttttttgaaaataatttattttgttgtttttataggtaaaattttttgaggaatttagtgatttttttaaagaatagttgtattgagatataatttttatattataaaatttattatttgaaagtgtataatttagtggtttttattatagttagagttgtgtaattattattattattaatttttaggatttttttattataataaagaaatattatatttattagtagttattttttattttttttttttttaggttttggtaattattgatttattttttgtttttgtggatttgtttattttgtatattttatataaatgggattatataatgtgtgattttttgttattgattttttttatttagtatgtgttttcgaggtttatttatgttataatttgttagtattttatttttttttatggttgaataatatttcgttgtatggaattttatttatgtatttattagttgatggatatttgagttgtatttattatgaataacgttgttatgaatatttatgtataggtttgtgtggatatgggtttttattttttttaagtagaagtgtgaagagtagaattgttgggttatatttattttgtttaatattttgtattaatattagattgttttttaaagtatttgtgttattttgtaattttagtattaaggagtgagggtttaatttttcggtttttttaatatttattattgtttttttgatatatttattttagtaggtatgaagtagtagtttattgtggttttgatttttatttttataatgtttaatgtcgagtattttttatgtgtttattggttatcgtttttggagaagtgttttttagaatttttttgtttatttttaaattggggtttttttttttttttaattggttttttttaataaaggtgagtgttaattgttaggtagaattttatattaggcgatggtaaattttttataaatattagtaatagatttttaggtttaattagtgttgatttttataagtaattttttaaaaaagtgttggtaagatttttttttagggtgattagtaaagttagtaagatttgattgagtatgttattattataatgagaagatttaattttaatatttttggaatgttaaaaatagtgatattttaattaagtaattttatttttaaaaattatttttaatggttaatattttgtaagaattttaagtaatttttaattttgagtattaaattttaattatgtgtattgaatttttgatttaattagagtaattttatttttttttaagtagttagatttatttcgtaaaatgtgttttgatgtgtgtttttttttttttttttttttaggttattttgaatatatgtttaataattttttttgtaacgttagttgttgttttttattgtttttaaaggattaaaattgttttagaaattggagatatatttgatttaaaaggaaaaatttgaataaatggataatatgtttattacgaatatattaataagtaatgatgtttgtttgagtattgtgtatagtttgatgtgttatagataaggtggagagagtgaaatatttgtaaaaagagtaattgaaagtttggtaaagaagttgaaggagaaaaaagatgaattggattttttaataatagttataattataaatggagtttattttagtaaatgtgttattatatagagaatattggatgggaggttttaggttagttttataagagtttttttatattttttatggtggtagatttaaaaatttgttacgtttttttttaagttattatagggtaatttaatttgtgttttatttttttagatattgtgtattttgtataaatatgtattatgggaatttttggaagaatatgtaaaagataaaattttaaagttttttaatgttttatttagaaaaatgtttaatggagaaaatttggaaaataaaaataaaaagtagaaaatttatatttcgtaagaattatttttagtattttggtatttatttttgtagtttgttgttttttttttttttttttttttagacggagttttgttttgttatttaggttggagtatagtggcgtgattttggtttattgtaatttttattttttgggtttaagtaatttttttgttttagttttttaagtagttgggattataggtaagtgtaattatgtttggttaatttttgtatttttagtagagatggggttttattatgttggttaggttggttttgaatcgttgattttaggtgatttattcgttttagttttttagaattttggtattataggcgtgagttattgtgtttagtcgtgttgtttttttttttgatattgtatgtatatttaaataatcggattatatttagtttttttataatttagaaatttgatatgttttattgttagtaaatgttttattggttatattttttaggtagaattttataatatagtttttttgtttaaataaattttatagaaattttgtcgtagattttaaagttttattttaagattttatatatagtttttgtaatatagtttttttgtatatttatttattttattttatttttttgagatatggttttatttttgtttaagttggagtgtagtggtgtaaaatatggtttattgtagttttgatttattgggtttatgtagtttttttgttttagttttttgagtagttaggattataggtatatattattatgtttgggtaattttttattatttgtggagataagggttttgttatgttgtttaggttggttttgaatttttgggtttaagcgatttttttgttttggttttttaaagtgataggattataggtgtgagttattatgtttagttattttttatatttttaaaatttgagtataggttttgaaattatattaaggtttaaattttaggtttgatgtatgatatggttaagttagttattgtgaattttagtttttttatttatgaaatggggattgtaatattgagttggtaggattgtgaggattaaattagaatatataaaagtgttttgtataatgtgatatatgaataaatggtcgtttatttttttagg

SEQ ID NO: 140 - DNA, 6668 bp, Artificial Sequence
  chemically treated genomic DNA (Homo sapiens)
tttagaaaaataaacgattatttatttatgtgttatattatgtaagatatttttatatattttgatttaatttttataattttattaatttagtattataatttttattttataaataagaaaattaaaatttataataattaatttggttatgttatatattagatttagaatttaaattttggtataattttaaggtttgtgtttaggttttaaaaatgtaaaaagtgattgggtatggtggtttatatttgtaattttattattttgggaggttaaggtaggaggatcgtttgagtttaggagtttaagattagtttggataatatggtaagatttttgtttttataaataataaaaaattatttaggtatggtggtatgtgtttgtagttttagttatttaggaggttaaggtaggagaattgtataagtttagtaggttaaggttgtagtgagttatgttttgtattattgtattttagtttgggtaaaagtaagattatgttttaaaaaaataaaataaaataaataaatatgtaaaaagattgtgttgtagaaattatgtgtaaagttttgaaataaaattttaaaatttacgataaaatttttgtaagatttatttaagtaagggagttgtattatgaagttttatttgaaaaatgtgattaatgaaatatttgttaatagtgaaatatattagatttttaaattataaaaggattaagtgtaattcggttgtttaaatgtatatataatattaaaaaagaaaataatacgattgggtatagtggtttacgtttgtaatgttagaattttggaaggttgaggcgggtggattatttgaggttagcggtttaagattagtttgattaatatggtgaaattttatttttattaaaaatataaaaattagttaggtatggttgtatttgtttgtagttttagttatttaggaggttgaggtaggaggattgtttgaatttaagaggtggaggttgtagtgggttaagattacgttattgtattttagtttgggtgatagagtaagatttcgtttagggaaaaaaaaaaaaagaaaataataggttataaaaatgaatattaaagtgttaaaggtagtttttgcgaagtgtgggttttttgttttttatttttattttttaaattttttttattgaatatttttttgagtagaatattaaaaaattttaagattttattttttgtatatttttttagaaatttttataatgtatatttgtataggatgtatagtatttgaagagatggagtataaattaaattattttgtagtagtttgaaaggaaacgtagtaagtttttaaatttgttattatagagggtatagaaaaatttttataagattaatttgaagttttttatttaatgttttttgtatggtaatatatttattaggatgagttttatttgtagttatagttgttattaaagaatttaatttatttttttttttttttagtttttttattaaatttttaattgttttttttgtaaatgttttattttttttattttgtttatggtatattaaattatgtataatgtttagataggtattattatttgttggtgtattcgtaatagatatattgtttatttgtttaagtttttttttttaaattaaatatgtttttaatttttgaagtaattttgattttttggaaatagtgaaaaataatagttaacgttgtaaggaaaattgttagatatgtatttaggataatttaaaaaagaaaaaaaaaaaagatatatattagaatatattttacgaagtagatttgattatttgggaaaagatgaaattgttttggttaagttagagatttaatgtatataattaaaatttgatgtttagagttgaaaattatttaaaatttttataaaatattagttattaaaaataatttttaaaaataaaattatttaattaaaatgttattgtttttgatattttaaaaatattaaagttaggtttttttattatgatagtggtatgtttaattaagttttattgattttattagttattttaaaggaaaattttattagtatttttttaaaggattatttatgaggattagtattagttaaatttaaaagtttattattaatatttatgaaaaatttattatcgtttggtatgaaattttatttagtagttaatatttatttttgttaaaagagattaattaaaaaaaaaaaaaaattttaatttagaaatgaataaaaggattttaaaggatatttttttaaagacgatggttaataagtatatgaaagatgttcgatattagatattatggaaatgaaaattaaaattataatgagttgttattttatatttattgagatggatatattaaaaagataatagtaagtattgaagaagtcgagaaattggatttttattttttggtgttgggattataaaatggtataggtattttggaaaatagtttggtattaatataaaatgttaaatagagtaaatatgatttagtaattttattttttatatttttatttgagggaaatgaaaatttatgtttatataaatttgtatatgaatgtttatagtagcgttgtttataatggatataatttaaatgtttattaattgatgaatgtatagataaaattttatataacgaaatattatttaattataaaaaagaataaagtattaataaattataatatggataagtttcgaaaatatatgttaagtgaaagaagttagtgataaaaggttatatattatataattttatttatatgaaatatatagaataggtaaatttatagagatagaaagtaaattagtggttgttagggtttgggaggaaggggaatgaggaatgattgttaatgggtatggtgtttttttgttataatgaaaaagttttaaaaattgataatggtgatggttgtataattttgattatagtaaaaattattgaattgtatatttttaaatagtgaattttatggtatggaaattatattttaatatagttgttttttaaagagattattaaattttttaaaagattttatttgtaaaagtagtagggtaaattatttttaaaaaaattaaaataataaaaattgaagattaataaagaatttatttaataggtagaaaattaatttatttgattttaagattttatagagaataggaaaaggttattagtttaagaataaagaagataaagtaggattggagtttgtattttgtgtgtttgtttgtattttatttgtttattgaagttgtattttagatttattttgtttttatttttttttattgtatatttgaatttttaaagtatttttttataagattaataaaatttattattttattaaaattttttttttttttgaagatttttgttaaagtattaattttatttaattatttagttttgggaagttttgtaaaagatttttgacgtgttttttttttttattatttttatatttcgttatagttataagattttttattttagttttttttatttttttttttattttttttgttattgttgtagttttgagtttttttagaatgtatattaattatttgatattgaagatttgtttttttttttgttgttattttttttatataaatgtttgttttaatttataaattttatgtagagaagtagttttttatatgttttagagtatttgtttatattaatatatatgttgaaggtatattttttaaataattaaagataatttgtatgggagattttggagttaagagatttgaattagaattttagtttttatagtagttagaaaatgaagttattttgaatttggattaaaaggagggtatatagaagtttaaaggaaaaattttgtataacgtgtttgatatatagtgtttagtaaaaaagttattgttgaaatattaatatgtttaattgtggttaggtacggtggtttatatttgtaattttagtattttgggaggtcgacgtaggtggatcgtttgagtttaggagtttgagattagtttgggtaatacggtaaaatttgatttttatttaaaataaaaaaattaattgggtgtggtggtatacgtttgttgttttagttacgcggggagttgagattggaagattatttgagttttgggaggttaaggttttggtgagttgtgattgtgttattgtattatagtttgggtgatatagtgagattttattttaaaaaaataataatagttttataagaagattttttttaaaatgtattacgtatttttttgtattttttattaaaatttgtttaaaaaaatgtaggaggttcgttaggtatggtagtgtgggtttgtagttttagttttttaggaggttgaggtaggaggattgtttgagtttaggagttgaaggttgttgtgagttatgattgtgttattgtattttagtttgggtaatagagtgagatttagtagaaaggaaaggaatcgggaaagagggaaaaggaaagatacgttaaattataatttaataattacgattataatttaattgtaaattatatgtgtaaattataatgtaatatattagttatttgattatatatttgttttatattgttgttataaattagaaatttaagaaaatagtaataatatttttattttagaaatttttagtattatgtatagtttttgatatatattaggtaagtgtttttggattgattatagttttttattttgtggaattgttttataataaattagaagagtgtagatatttttgaagttattttttgatattatattttaaaagatgtgtatgaatttataatgtaattaaaatgtttaagtgttaattattttattataattttattattaaatgttattatttttaaaatttatgttatgttggggttttaacggtattttaaagtttgttttaatattaagttgttttgaatataaatgataatgatttcgtttttttaaataaatagtttttttatttttttttttattgtatttttatgattataagtgtttgaaatataattaaaagttatgtatataaaaaataatattagtaggaataaagagatgtatttttatattaaatggttttagattatggaagtatggtaggtaagagtataatatcgatataaataaaattatatattttaattaaaggtttagtcgtatgattgaatgttaatattttttttaatttttttatttataaaatggaaatatttgtttttgataattttataaatttattgtggtaattagatgtaataacgtatataaaagaaatgtgggaaatataaattgattaatttaataaatattgtatatataaagtattatagatataaaaataggaagtttatagtaagaaagtgggtttggatttttttagattaatattttattttttttttaataaataatttatattattattttagttttattgaaataaaattttaaattatttaaatatattttgaaaatttaataatgttttaattataataaaaaggaggaaaagtttaatatataatgtgtatttttatttataaatatttaggtatgttaattaagttagaatgtataataaagaagttagatgttagtatttatatatagaattattataaatgtgatagttataaatttagattttttaagataaacgtgttatattggtaatttaaatagtataatggtattgtagttagtaatatggatttttttaaatggtgaatttttaaataatttgaattaagaaaatgaattaataagaggttggggtaggaggattgtttgagtttaggagattaaggttacggtgagttatgattgagttattgtattttagtttaagtgatagagtaagatttggttttaaaaataaaaaataaaataattaagttcgggtatagtggtttatgtttgtaattttagtattttaagaggtcgatatggttggattatttaagtttaggattagtttggtaataaaggacggttgttaggattagtttggtaataaagtgagattttttttttataaaaaatataaaaaattagtggggtatggtggtatatgtttatagttttagttatttagaaggttgaggtgggaggacggtttgagtttgggaggtagaggttgtagtgagttaagattacgttattgtattttagtttgggtaatagagtttgaagtaagggagggaggtagggagggaggaaggaaaaagaaagaaaatagagagaaagagagagggagagagggagggagggagggagggagggagtttttttttttttttttttttttttttttgtgaaaagggggattttttttttaaaaaaaaaaaaaaaaaaaaaaaaaaaaaatattgtaggttaggtgtagtggtttatgtttgtaattttagtattttggaatgttaaagtgggaggattaattgagtttagaagtttagggttagtttgggtaatataataagattttgtttttataaaaaataaaaaattaggttaggcgtagtggtttacgtttgtaattttagtattttgggaggtcgaggtaggtaggtt

SEQ ID NO: 141 - DNA, 1452 bp, Artificial Sequence
  chemically treated genomic DNA (Homo sapiens)
ttaggatttatatggtttaagatgtgttttttttatgaggattggggatattttcggtttagaaagaagggattttatatagtttggttgtttttttttagtagttttagggggattagattagggatggcggtatgttttatttttatttgtattataggtaggaagttggggggtttttagggagatggggttttggggtaaaggggggatgtttatttatgttagggaattgggggttgaggaagtataggcgttggtaggaataaagatgagtgagatagataaggttattggaatttttattttagaattaaaggggttagttttggatattttatttaggatgtggtttttttttatttttgtttttagatttggggtaggtgaggattttatttttagagggtgatttaggttaacgtagggatttttatttggtttaaagatagagcggttttaggatttgttatgcgttcgggtgaggaatatgagggaggattgagggtattttaggattagaatattgagggagattgtatagaaattagttttgtttttgttgttattttagagagtatgggttgggtcgtttgtcgaggttttttcgttattttgggattattgatgttagggacggggaggttttggtttgagaaggttgcgtttaggttagtagagggagcgttttaggttttgttaggagttaaggtgaggattaagcgggtattttatttaggatatattaattttaatgaattttgatattttttgttgtttttttttaaggatttaggtacgtgtggttagatgtttgtttttttttgtttttttattttttattatggatgtgaatttttgatttggattttttagattagtaaaagggtaggatttaggttttgttaggaaaaatataagggttttgcgtgagaatagagggggttatttattgtatgagagtggggatgttatagagtttagtttatttttttggtagtattgagaagttagggttgtgtttgcggtttgtattttgagggttcgtggatttttttttttggagttttaggaattaggtagtgaggttttggtttgagatagtatttttaggttatagagtagaggatgtatagggtgtgttagtagtgaatgtttgttttgaatgtatattaagggttttatttgttataggatatataggattttatagagtttggttttatttttttattgttagttttgtagaatcgatttttgttggtcggttgtattttgagtatttttttatttttttttttaggtttttaggggataggttaatttagaggataggattttttggaggttatagaggagtattaaggagaagatttgtaagtaggtttttgttagagtttttaaggtttagtttttagttgaggttttttatatattttttttttttttagg

SEQ ID NO: 142 - DNA, 1452 bp, Artificial Sequence
  chemically treated genomic DNA (Homo sapiens)
tttggggagagagggagtgtgtgagaggttttagttgagaattgaattttggagattttaataaaggtttatttatagattttttttttggtgtttttttgtggtttttagggaattttgttttttgggttggtttgttttttgaaaatttgaaggaggaagtgagagggtatttagggtatagtcggttagtagaggtcgattttataggattgatagtagggaggtgaggttagattttgtggagttttatgtgttttgtggtaggtggggtttttggtgtgtatttagggtaaatatttattgttggtatattttgtgtattttttgttttgtgatttgaggatattgttttagattaaggttttattgtttggtttttggagttttaggaagaggaatttacgggtttttagggtgtagatcgtaagtatagttttggttttttagtgttattaggagggtgggttggattttgtgatatttttatttttatgtagtggatgattttttttgtttttacgtagggtttttatattttttttggtagggtttggattttgtttttttgttggtttgagaaatttaaattaagagtttatatttatgataaggaatggaaggataggaggggataaatatttggttatacgtgtttaggtttttggggaagggtagtaagagatattaaaatttattggaattaatgtgttttgggtgaggtgttcgtttggtttttattttgatttttggtagggtttgggacgttttttttattgatttgagcgtagtttttttagattaaggttttttcgtttttgatattaatgattttaggataacggaaggatttcggtagacggtttagtttatgttttttggggtgatagtaggggtagggttgatttttgtgtagttttttttagtgttttggttttggggtatttttagtttttttttatgttttttattcgaacgtatggtagattttgggatcgttttgtttttagattagatgggggtttttacgttgatttgagttattttttgagaatgaggtttttatttgttttagatttggaaataggagtgaaaagaagttatattttgggtgaggtgtttagggttgatttttttggttttggggtgaggattttaatagttttgtttgttttatttatttttatttttgttagcgtttgtgtttttttaatttttaattttttgatatgagtagatattttttttttattttaagattttatttttttgagggttttttaattttttgtttgtggtataagtgagaatggaatatatcgttatttttgatttggtttttttagagttattaaaaggggatagttagattgtgtggagttttttttttttgagtcggggatatttttagtttttatgaagggggtatattttgggttatatggattttgg

SEQ ID NO: 143 - DNA, 13321 bp, Artificial Sequence
  chemically treated genomic DNA (Homo sapiens)
tttcgaattggggtggggaatgtgggattaaggaggaaggggtggttcggtggttttgtttgtggaaggtagggagtgtggtagggtgggaaggtgggaagggttttattgttcgaaggttttgtttgtgtttgtgggttagtttagaggtttgattgtatggcgggttggagtaggtagattggatatagtacgagtattttttgaatgtcggaatttttcgaggttttttatggtaggtggggagagttttgttttagaggaattgagttttgggtttgtggggttttgtattagagatttttgtatttgggaggttgtatttagattgtgaaaggtttttgtaaatttaaacggttgttattttgtaagttaagttataattgatagttataggggatattgtttaatgtatttttgatagttaataaaaaatagaatgtaaatttaagttaaagataaggttgggcgtggtggtttacgtttgtagacgtagttatttgggaggttgagttgggaggattatttgaagttaggagtttgaggttattttgggtaatatagtaagattttgtttttataaaaaataaataaattagttgggcgtggtgagatgtatttgtaattttagttatttgggaggttgaggtaagaggatcgtttaagtttaggggttcgaggttgtagcgagttatgattatgttattgtattttagtttgggtgataggaaagtaaaggaataaaagggtggttatttttataggtagagtttttttgggtgttgttgattggttattgttagggttattttttgattatatgttatataaagggttgaattatttatgtattttttggaaaagaggtgaggaattttaagaattgaggtttttttatttttttagattatgttgggtaatttttcgacgttgttatggtatttgtaaacggttatggtattggtggaagtgtttttttatatgttaatggattataattagtatgtaatgagtagtgaggacgattagaggtcgtttttttcgttattttggatttggtgggtttcggttggtttttttattatattttgttttattagtggggtttttgtgatttgtgttttttgaaattcgttttgttattttttattttagagttatgtagtgtgtgtagttttttttgattggttttttttattgaagatattaatttaattaggttgttgtttatattagtaattaatttttttttttttgttgggtagtatagtttattgtttggatgtattatcgtttatttatttatttttttattgaagatatttgggttatatttagtttggtttattatgaataaagttattattgatttttatgtataggtgtttgcgagaatataaatgtttattttttttgggaaatatttgggagtgggattgttaagtagtatggtagatacgtgtttaattttagaagtttttaagttgttttttaaagtgtttgtattattgtgtattttttttagtagtgtaggtacgttttagttgttttgtatttttgtcgaatagatatttgtttatttatttatttatttatttattcgtttatttatttatttatttatttatttatttatttatttatttatttatttatttatttattcgtttatttatttatttattcgtttatttatttatttatttatttatgtatttagttatttatttatttatttatttatttatttatttatttatttatttatttatttatttatttatttatttatttatttatttatttatttatttgtttattcgtttatttatttatttatttatttatttatttatttatttatttatttatttatttatttatttatttatttatttatttatttatttgtttatttatttattcgtttatttatttatttatttatttatttatttgtttgtttatttatttatttatttatttatttatttatttatttatttatttatttatttattcgtttatttgtttatttatttatttatttatttattcgtttatttatttatttatttatttatgtatttatttatttatttagaggatgatggtaatgtttgtattataacgtgaatgtatttaacgttatcgaatcgtatatttagaatggttaatttggtttagtgtgatggttattatgtttagtttatttatttaattatatttgtgattttagtattttgggaggttgaggtaggaggattgtttgaggttaggagtttaagattaatttgattaacgtagtaagattttatttttgaaaaaatatttttttaatttaaaaaaaatggttaaaatggtaaattttatgtgatgtttattttattataataaaaagtaaattttggttaggtatagtggtttatgcgtgtaattttaatacgttgagaggacgaggcgggaggattatttgagtttaggagtttaagattagtttaggtaatagagtaagattttgtttttataaaaaaaaataaagaaaattagttaagcgtggtagtattagtttttggttttagttatttaggaggttgaggtgggaggattatttgaatttgggaggtggaggttatagggaattgtgattgtattagtgaattttagtttgggcgatagtgagatgttgttttataaaataaatataaataaataatttaaaattttaaaaattaggttggatgtagtggtttacgtttgtaattttagtattttgggaggttagggcgggtggattatttgaggttaggggttcgagattagtttggttaatatggtgaaatcgtttttacgaaaaatataaaaattagtcggtgtggtggcgtacgtttgtaattttagtattttgggaggtcgaggtaggtagattataaggttaagagattgagattattttggttaatatggtgaaattcgtttttattaaaaatataaaaaaaaaaaaaattagtcgggcgtggtggtaggtatttgtagttttagttatttaggaggttgaggtagaagaattgtttaaatttgggaggcggagtttgtagtgattcgagatcgtgttattgtattttagtttggtaatagagtgagattttattttaaaatagtaataagaataaaaataaaatttaattagacgtggtggtgggtatttgtgattttagttattcgagggggttgaggtaggagaattatttgaatttgggaggcggaggttgtagtgagtcgagatggtgttattgtattttagtttggacgatagagtgagattttattttagaaataaataaatataaattaaaaaattaaagagataataaaagtgtgtgattagtaataaaagtttgttatggaaagaatgtatttgggttagaggagcgatattatgagtaacgtaaagagtttcgcggagatggttatagtttttttggaggtttttagcgtattttaggatttcgagtgtagagtgtgggttaggataagggaagtattttttttattttcgggggatgtttttttgtaaatattttggggacgtgggatattgtcgttattgttgttgttgagttattttttggtatttgtttttgcggttaggttgtaggtattattgtggttagttgttttagacggtcgtgtgggttttagtaaggaggggttttttaggtggttagtgtagaattcgtaagtgggggggagagatggttcgggaggttgttttcgcgttttatagtaagaggttattgggttgttgtttaaatttttagttatatggtggtaaggacgatatttagaagatgtatagatttttttgtattggtttttgagttttatttgagtcgagaaaataggttttcgggttttatttgagttgagaaaataggttttttagaatttcgggtagatgttatgggtgttttggggggttttcggttgtttaggtttgaaatttttttttttgtagcgtttagaggggggcgggatttggggatttagaagcgtggtaaggggttttagacggattttttttttagtttgttttttatttgtgataggaagtagaggtagtttttttaggggttcgtttttatttgaggattttttataggattttttgggttagtggtgttttaattttattttgggtttgttgtgttttttggtaattattagttggggttttagaagggggttggttttatttatagaggttgtgattattagtcgtttatttttatttttatattgttggtttgtttgttttgtttttttgagatagggttttattttgttatttaggttagagtgtagtgatgaaattatggtagtttttattttttaggtttaagttatttttttgttttagttttttgaatatttggggtcgtaggtatatattattacgttcgattaatttttgtaatttttttgtagagatgggggttttattgtgttgtttaggttggtttggaatttttgggtttaagcgatttttttgttttggttttttaaagtgttgggattataggtatgagttatcgtttttagttggttttaatgttttttatgtttatagagatagagaatgggggaagggaggtttcgttatgttgtttaggttggttttgaattttcggtttttagagattttttcgtagggttttttaaagcgcggggattgtaggtgcgcgcggggttagcggtttttcgggcgggagaggagggcgtggtcggggggcgtggtcgcggggcggggagggggcgtggttcggggggtagggcggtgtgacgcgcgcgtcgcggatttcggaagcggtgttagatgttggggagtcgggcgggcgggtgcggtggcggcgggcggcgcgggggtatttgttgtttttcgcgaagtcggagttcgagcgttaggcggcggcggcggtcgaggggagcgcgatagtgagcgtcggcgcgaggatagcgcgtgttcgcgaggagtcgtcgcgcgttcgcgtttttcgcgcgacgttaggtgaggggcggtggggtagcggggttcgggtcgcggcggggacggggatcggggcgcggggtcggggttatttggtcgttgagttacggtcgtttgggggcgcgggtcgagggtggcggggttgggtgcgcggggttcgagatttttatgcggttcgcggcgcggttcgggtatttgtttaggtgggtttcgtttcgtaggttcgggggttttttcgggacgcgaggtttttttttttgtacgtgtcgttcgggttatgtttgtcgcgtcgggggttttagggcgcggattttagatttgggaggacgaggatttacgcgggtcggcggcgcgtatcgggttcgcgtttttatatttgcggggggcggggcggggcgggcgttacgtgcgggcggtgcggggagggcgcgggcgcgtggatttttcgcggttttcgttttagcgtggttttcgcgtgcggtttcggattgtttttcgcgttttttttcggtgacgggcggcgttttggtttagtggttggggttacgcgtgttcgggaacggggtgggggtaatcgggtttttttataggcgggattttgggattggtgtcgtttttagtcgtttatttgttagggttgttggaaggaaggtcgtggggaggcgggaggggggtaggtgatagtggttttaaggttcgtttttttgtttacgtgtggggtaggggtttcggttttttttcgtttttattgcgtgagtttttttgtgtttttgttaagtttaggaaattgtgtatgtgttcgtgattgtgtgtgtttgcgtttgtatagtttttagattttggggggtgggattaggcgttatcgagaaatttagaaagttaggatttcgtttggttttggtttttgatttgggttcgtttgggatatagtagtggttttgtattgtattttcgcgtttatatcgtgtgtgttcgtgttcgcggggtttttcgtgttttttttttggtgttttgcgtttttgagtatgttgtttttttgttttttaagtagtttttgtagttgaggtagaaattagatttatttattatttatttattaggtgatttataggtagttagttaatttttggttaggtgtttggttttgggaagattttgagatttaaaacgttttttatcgttttttatcgtggtttaggggatatttgtgtggttcggttttggtagcgttttttttatttttttgattttttagggtgggttgttaggtttttttattggtattgaggttttatcgttacggtgtgttgttgtaaggggttttttaatatagagtggggtgttttatgtagtttttttaaatttaatgtttttagggatatggagtattaaaagagtcgtgggcggggtttggagaatataggtgggttgtgtaggtgtttgggatatatttatattttatttgggcgtttagtgttatttatgagaatattttttttttttaggtaatttagtaggaatgtttgagtttgattttgggagagggagtttgtttttaaaattagattttttattattttaaaataagatatttattaaagtagaaaaattaggttttttttgttttttatttttgaatcgagttagggttttgaggggttggttgttcgtagcgtcgattttttaggtgttggtaaattcgggagttagcgtttatcgagggttagggttgtcggggcgttagtttttgtgtgtattcgggaggttgttgttaagggagatcgtttttcgggttatttcgttgtttataaggcgtgtgtttttatttacggggtttagcgatggttgcgtttgtttatagtttttggtaaagttgtttgttatttagacggagaagaagttgtgtttgtttttgttttagttgtttttgagtttaaaggtttttggagtggattttttgggtttcgggtttagtttatacgggaaatggaaatttggttagttgagagagggtttcgtgtggtcgttttttaatagtaaatagtgatttatcgtttcgtttttattttttttgtttttcgcgaatggaagatgttttttttcgttatttatttttgttttttataagttatagattcgttatgttttcgtttttttatagttttaggaaattgggagtgtcgttttaaaattatagagttttagagtaggtataagcgaatttgagtggttatatgttttatttttcgattagttgttgtagatgaggaagtttaggttatgaggtttgttggtttgttttataggtcggtggggtttggtgtagagtttttttgttttttcgtattgtgcgtcgggtgttttggggaaggtattggggtggagattgttttttttttgtttttttatgcggggtcggtttatttcgtatagcgggggttagtgtggggtgtagggaagattttttttttgtttgtaaggagtttattatgttttggggaggttttttgtttttagaaggatttagaattaggttttggtagagggtgtttgtttacgcgaggaggagagtagtggggagtgtttttggaagaagtagggtagggaattacgtgttttttgtagatggtgattagaaatttgaaacggtattggggtgggggagtcggggtttgggaggaatttttaagatttttgattgtttgtggggttgtgtggggggtattaggattagggtgagggtattttatttggtaaagttgtggtttagataggagacgttggaggtcggagtttgggtaggtgttgtgggtttaggcgggtgatgtttgagggttgggattaagtttggttggcgcgtggatgaggaaaagagagaggggtaggggtaatttcggtgaatgatgcggttgggggttggggggtatttgggttttttcgggaatgtttttgattggatttagaggttgggagcggattgaagttttagggcggtcgggggagaataggatgttgatggggagttggaggtcgaggataggaggatggtgtggtgggagttagggcggggattggagggggtgtggtgtgttttgtagtttgttttttgttgttgtagttgtttgagttatttttggatgtagcggaatgatatagtttttttagattgtaaatgtaaggtgattagacgttttttaagtcgggtcgatagttatggtttgttggagggtagttagttagggttaggttgttggttggtatgggtcgggttgcggggtgttaagtggggtgtttttcgtatgtttagtggggttgtgttcgggatagtcggatagtgggggttttcgtagtgtaggattttatttttagtaggaagggtgtttggttggtttttgggattagttgggttgtaattagtcggttgatatttgtttgataggtatttattgggtattagtgttatagcggttttatttatttttgcggtttagtgtggagggtattcggtttggggtttttggtagaaaggtttttgggagaggcgggtatattttgggtggtttttggttttgtggattgtatttgtcgtgggagttattggtcggggggcgggagggcgtttgttgttgtgttgttgggtttttgaattcgtgtttttcgtatagagttttcgtttttcgtttttggttttttttttgttttttttttttttttcgtattttatattttcggagattcgcggagaatagaagtggaagggttatttcgttttggttagattggttgggtagttgagggggtggggtatggagtttgtgttattatttattttttgggtaagaataagtgatttatttagagtttttatgttggtttcgtagagcgagcggtagtttcgatgcgtttttttatttgggaagaattagagttttaaagttgaaattttcgtttttttatgggtatttatagtcgggatcgtttagaggggttatttagtcgttagttgtttaatttatttttgtatttttttttttttttttttttaaaagataaggttttgttttgttatttaggttgttggagtgtagtggtgtgattatagtttattgtaatttcgatttcgaggtttaagtaatttttttattttagtttttcgagtagtcgggattataggtatatatgtgttattataattggttatttaaaattttttttttttttttttttgtagagatggggttttgttatgttgtttaggttggtttgaaattattgggttcgagtattcggttttcggaggcgttgttattataggtaagagttattgtgtttagttttaatttggtggagaaaatgtttttttttggattttaaagtaggttttttttagtttgtgttagtatagtaagaggtgttaaggttgttagttttttattgagtagggttaggtttatgggtgattagtgagtatttgttgggatttaaaaagttaaaaatggtcgggtatggtggtttatatttgtaattttagtattttgggagattgaggtaggaagattatttgagtttaggagttcgagattagtttaggtaatatggtgagattttgtttttataaaaaagtttaaaattttttgggtgtgggggtgtttattcgtagttttagttgttcgggaggttgaggtaggaggatcgtttgagtttaggaggtttgtagtgagttgtgattttattattgtattttagtttgggtgatagagtgatattttgtttttaaaatgaaaattaaaagggaaaatatgattttttagaagttgaggtggttgtttggggattatttgtttttgaaagtatagttttggacgattgattttgggttgtttgttttgtcggggggagtttagggttttgatttttattttttgtaaggtgtttttttgggcggagtcgttttgttttgcgttttatggagtttaggtttttagtttggattttggaaaggggcgttcggcgttttggtttcgttatttatttttagttgtagtcgtaggaattgtttttgtttgaggttgttggtagttttttttttttgagaggaagtgatgttttcgttgagttttgtttagttttgcgttacgtcgaggtgtttggttttgggttgaaaattttgttttttttattcgaaaattagttatttgagagttgttttaagttataggtggtgtcggagaattttgttgttcggcgttgttttcgggacgtggggcgtgagcgttgtatttttatttacgtcggttgttggggttttatagcggaaatttagattcgtttatttaggttttcgttgtggcgttgaatattgtatttttttggtgattatcgaaatttagaggagttcggggtgtcgggtgtttgtgcgtggcgatgttggtgttttgttagttgttgggcgtaagatataatgcgaggacgtcgtttttcgggggttgttggaggggagtttggttgtagtgttgattaggtgttaatgtagtagtttttgttttgggttcggggtagtgtacgggcgtttttgcgattttaggtacgttttttttttggatgatattttaaggttgcgtttttggttttggggtgggagcgttttttatatgtgttttggcggttttggaggttatgtgaggtcggatagtttataaaattttatttagggtagtcgttatttttagattagttgttttataaattttttttgtgtatataaaatttttttttgaatgtttttttaaaagtaagttgttattttttttgtttttgatgtttaaagcgatattaggttaaggttatttggatttattttgtgtatggtggggagagggaggcgttagtattattttatttcgtgttgggtttttgagagaagttttgttgtttggttgggtcgtttcgttgcgtcgtttttttaggcgcgtggttggtttaggttttttcggtagagtagagtcgtgatttgtttaaggaggtggggggtaggtttgcgagtatagcgtgggggtcgtttgggagttttgcgttcgttaggtttttattttttagagggttttagtgtaggtgtgtttcgaagtattggggttggagcggggtataggcgtgttttagtagttttggtaattttgattttttggaagtagttagttattttttttggggcgttttcggttatcgtgtgttttcgtagtgttatagggtatcgcggaggtatttttttagtggaaagatttttacgttgaattttgtttttggtatttggtcgagttttatacgttatcgtgggtttggttagacggttttgtttttcggatttttttttttcgttcggttgtgttgttacggcgggtagtgggttcgggggtttaggagcgggtttttgttgggtgggaggttcgggtgtgtgggaatgcgcgcggttttgtaaatatttggtgatttatcgtatagttatgtcgtggtcggtttgtgtattgacgtgttcgtagtggagttggaagcggtgttcgcggtttttttttttgatatggaaaagttttttatggtgtttttagtcgtcggtatttgtaggtttttacggtggcggaggtagttgggttttagtttttttattgttatttttattttaggacgtggtgcgaaggagtttggagtttatttggtcgttttcgggatcggttggtgttattttgtgttatttacgttagcgttttgagattagttggttttggtaggggtagcggattcggtagtttggcgtaggattttgttttatttgtgcggtttttttgttgtgggggtttgtgggttgcgggggtggggtttttatcggaggtagggttggagggtggagggatttgggttcgagggttttttggtttagggtgtggggagggttttgggttggtagggaggacgggatgcggttattcgtttttatgatgtttatgtttagtggaggtgttgattaaggatattttttatcgtcgtgtgttgttttgatgtttttgtgggaatttgtgtttggtatttggggtatgggagtgggtgttgtgaatttttgtttcgcgagttgttcggcgttttttgttcgttcgtttcggtcgtcgggtgtaaatgggtttgttgattgtttgtcggtttcgtgatgtttgtgtaatttgatttgaagttaggatcgcgtttgggtttttcggtttttatgataatcgtgggggttggttcggttttaaggtcgttatggtaattatcggagggtttatgtcggggatgttttggttgggttttttatgaatgattagaatgtgtgatataatgtagacgtgaggacggcgggggcggcggcggggacgattttcgttagacggttaaatgttcggtagggcggcggtttttttatttttttggtttttggttgcggttttcggatttgtcgttttttaggaattttatatttttttgggtcgtagggttttcgttcgggggtagtttaggtggaggtggtgatgttatagtcgtagcggttagggtcgtggtaggtgtttcgtggtttgtggggagggcggggcgggagggcggttgggtttttatttaggtttatcgtgggggatggcgatgttaggggttttttagaggttttttttcggggatttaggttgggttcggagtatcggagtttttgttagtgtagggtcgttgtttagcggggttttatatttttcggggtcggtatagttgttttgagggagggaggttttgttattagttattttggttttcggtacggggtattttgtgttgtgtaggtgtagacgttttttttgattttagggagagttagaataggaagtagttattgtcggcgtttgttggttattttatagtgtcggcggttgtagtttaggtttgtagggtagtagggggtcgtatttggttgttaggttttggggtggggttttagtcgttttgtggagtgtgttagagtgtgaggtgtagttagatttttttttgaatttttaggtagggatagaggtcgggttaggatgttttattttttgggaagttttttaggacgggttgggttcggatggtgtttcgttttgtttttatggtgttgtgattgtttatttcgggttgagaagtatttttgtatgggaggtgggtattttgttcggcgttgtcggttttgatttgtgttggtttttttgtttgtttatgttttttagt

SEQ ID NO: 144 - DNA, 13321 bp, Artificial Sequence
  chemically treated genomic DNA (Homo sapiens)
gttggaaaatatggataagtagagaagttagtataggttagggtcggtagcgtcggatagggtgtttattttttatgtagggatgttttttagttcggggtggatagttatagtattatgaaaataagacggggtattattcgggtttagttcgttttgaggggttttttagggggtgaggtattttggttcggtttttgtttttgtttgagggtttagggaaaggtttggttgtattttatattttagtatattttatagagcggttgggattttattttagggtttggtagttaggtgcggttttttgttgttttgtagatttgggttgtagtcgtcggtattgtggggtgattagtaggcgtcggtagtggttgttttttgttttgattttttttgaggttagagaagacgtttgtatttgtatagtataaggtgtttcgtatcgaggattaaagtgattggtggtaaaattttttttttttaagatagttgtgtcggtttcgaggagtgtggggtttcgttggatagcgattttatattggtaaaggtttcggtgtttcggatttagtttggattttcgagagggggtttttggggagtttttgatatcgttattttttacggtgggtttgggtggaggtttagtcgttttttcgtttcgttttttttataggttacgggatatttattacggttttggtcgttgcggttgtgatattattatttttatttaagttgttttcgagcgaggattttgcggtttaagggggtgtggggtttttgaggggcggtaggttcgggggtcgtagttagagattagggaggtgggggagtcgtcgttttgtcgagtatttgatcgtttggcgggagtcgttttcgtcgtcgttttcgtcgtttttacgtttgtattgtgttatatattttaattatttatgaaaaatttagttaaagtattttcggtatgagtttttcgatagttgttatggcgattttgggatcgagttagtttttacggttgttatggaaatcgagaagtttaaacgcgattttgattttaggttaggttgtatagatattacgaggtcggtaggtagttaataaatttatttgtattcggcggtcgggacgggcgggtagaaggcgtcgggtagttcgcgggataggggtttatagtatttatttttatattttaaatattagatataggtttttataggaatattagagtagtatacggcggtggggggtgtttttggttagtatttttattggatatgggtattatgggggcgggtgatcgtatttcgttttttttgttagtttaggattttttttatattttgggttagggagttttcgggtttaaatttttttattttttagttttgttttcgatgggggttttattttcgtaatttataaatttttataataagagggtcgtataggtgagatagggttttgcgttaggttgtcgagttcgttgtttttgttaaggttagttgattttagggcgttgacgtagatggtataggatggtattagtcggtttcggggacggttaggtgggttttaggttttttcgtattacgttttggggtgagggtgatagtggagaggttggggtttagttgttttcgttatcgtggggatttgtaaatgtcggcggttgggagtattatgagaaatttttttatgttagagggaggggtcgcgggtatcgtttttagttttattgcgagtacgttagtgtataggtcggttacgatatagttatgcggtgagttattagatgtttatagagtcgcgcgtatttttatatattcgggttttttatttagtaaggattcgtttttgggttttcgggtttattgttcgtcgtggtagtatagtcgggcggaaaaggaaggttcgggggataggatcgtttggttagatttacggtgacgtgtggggttcggttagatgttaggggtagagtttagcgtggggatttttttattaaaaagatgttttcgcgatgttttgtgatattgcggaggtatacggtagtcgggggcgttttaggaggggtggttgattatttttaggaggttaaggttgttagggttattgaagtacgtttgtgtttcgttttaattttagtatttcgaggtatatttgtattggggttttttgaagaatgaggatttggcggacgtagggtttttaggcggtttttacgttgtgttcgtaagtttgttttttatttttttgggtaggttacgattttgttttgtcgaggaagtttggattagttacgcgtttggagagacgacgtagcgggacggtttagttaagtagtaaagttttttttaggaatttagtacgggatgggatggtgttggcgtttttttttttttattatgtatagaataaatttaagtagttttaatttaatgtcgttttaaatattagaggtaagaaagatgatagtttgtttttggaaggatatttagagaagagttttgtatgtataaaaaaagtttgtaaagtaattgatttaaaaatgacgattgttttaaatggggttttgtgaattgttcgattttatatggtttttagggtcgttagagtatatgtagaaagcgtttttattttagggttagagacgtagttttagggtgttatttagggggaaagcgtgtttggggtcgtagagacgttcgtgtattatttcgggtttaaggtaggggttattgtattagtatttggttagtattgtagttaagtttttttttagtagttttcgaggaacgacgttttcgtattgtgttttacgtttagtagttaataaaatattagtatcgttacgtataagtattcgatatttcgagtttttttgagtttcggtggttattagagaagtgtagtgtttagcgttatagcgggggtttgggtgggcgggtttgagttttcgttgtggggttttagtagtcgacgtaagtaagggtgtagcgtttacgttttacgtttcgggagtagcgtcgggtagtaaagtttttcggtattatttataatttggaatagtttttaggtaattggttttcggatggaagaggtagggtttttaatttaaggttagatatttcgacgtgacgtagaattaaataaggtttagcgggggtattatttttttttaaggaaaaggaattgttagtagttttagatagaggtaatttttgcggttgtagttggggatgagtgacggagttaggacgtcgggcgtttttttttaggatttagattgagggtttgggttttataaagcgtagggtagggcggtttcgtttaggaaggtattttgtagagggtgaggattagagttttgggtttttttcggtagggtaggtagtttagggttagtcgtttagaattgtgtttttaggagtaggtgatttttaggtagttattttagtttttggaggattatgtttttttttttaatttttattttagagataaggtgttattttgttatttaggttggagtgtagtggtgaaattatagtttattgtagattttttgagtttaagcgatttttttgttttagtttttcgagtagttgggattacgggtgggtatttttatatttagagaattttaaatttttttgtagagatagggttttattatgttgtttaggttggtttcgagtttttggatttaagtgatttttttgttttagttttttaaagtgttgggattataggtatgagttattatgttcggttatttttaattttttaagttttagtaaatatttattggttatttatgggtttgattttgtttagtggggggttggtagttttggtattttttgttgtgttggtataagttgagaaggatttgttttggggtttaggagggaatattttttttattaagttgggattgggtatagtggtttttgtttgtaatagtaacgttttcggaggtcgaatgttcgagtttagtagttttaggttagtttgggtaatataataaggttttatttttataaaaaaaaaaaaaaaaagaattttaaatagttagttgtgatggtatatatgtgtttatggtttcggttattcgggaggttgaggtgggaggattgtttgagtttcgaagtcgagattgtagtgagttgtgattatattattgtattttagtagtttgagtgatagggtaagattttattttttaggaaaaaaaaaaagagagagtgtaaaagtgagttgagtagttgacggttggatgatttttttgaacggtttcggttgtggatgtttatagagaaacggggattttagttttggggttttgattttttttagatgagaggacgtatcggggttgtcgttcgttttacgaggttagtatgggggttttggatgggttatttgtttttgtttaaggggtgaatgatgatatagattttatgttttatttttttagttgtttagttagtttgattaagacggagtggtttttttatttttatttttcgcgggttttcgaggatgtgggatgcgggagagggaggaggggtaggaggaagattaggaacggaggacgggagttttgtgcgagagatacgggtttagaaatttagtagtatagtagtaagcgttttttcgtttttcgattagtgatttttacggtaggtgtaatttataaaattagaggttatttaaggtgtattcgttttttttaggagtttttttgttagagattttaagtcgggtgttttttatattgggtcgtaagggtaggtggggtcgttgtggtattggtatttagtgggtgtttgttaaataggtgttaatcgattaattgtagtttagttggttttagagattagttagatattttttttattgaggatgaggttttatattgcgagggtttttattgttcggttgtttcggatatagttttattaagtatgcgggaggtattttatttggtatttcgtagttcggtttatattagttagtagtttggttttggttggttgttttttagtaagttatgattgtcggttcggtttggaggacgtttggttattttgtatttgtagtttgaggaagttgtgttatttcgttatatttagaggtgatttaggtagttgtagtagtagagagtagattgtagaatatattatattttttttagttttcgttttggtttttattatattatttttttgttttcggtttttagttttttattagtattttgttttttttcggtcgttttggggttttaattcgtttttagtttttaagtttagttaggggtattttcgggggggtttagatgttttttagtttttaatcgtattatttatcggagttgtttttgttttttttttttttttttatttacgcgttaattaggtttgattttagtttttaagtattattcgtttgaatttatagtatttgtttaggtttcggtttttagcgttttttgtttggattatagttttgttaaatgggatgtttttattttgattttggtgttttttatatagttttataggtagttaaaagttttgggggttttttttaaatttcgatttttttattttaatgtcgttttaggtttttgattattatttgtagagagtacgtggttttttgttttgttttttttagaaatattttttattgttttttttttcgcgtaggtaagtattttttattaaggtttggttttagatttttttggggatagggggtttttttaaggtatggtgagttttttgtaagtagggagaaggttttttttatattttatattagttttcgttgtacgagatgagtcggtttcgtatgggagggtagggagagggtagtttttattttaatattttttttaggatattcgacgtatagtgcggagaagtaggaaggttttatattagattttatcggtttgtgggataggttagtagattttatggtttgggtttttttatttatagtagttggtcggggggtggggtatgtggttatttaagttcgtttgtatttgttttaaaattttatgattttaagacgatatttttagttttttgaaattgtaggaaagcggaaatatgacgagtttgtgatttataaaaagtaaaaataaatagcggggaaaggtattttttattcgcggagagtagggagggtggggacggagcggtgagttattgtttattgttgaaaggcggttatacggagtttttttttagttggttagatttttatttttcgtgtggattggattcgaaatttagaaagtttattttagaaatttttagatttagaaatagttgggataagaataggtataatttttttttcgtttgggtggtaaatagttttgttagagattgtaaataaacgtagttatcgttgagtttcgtgggtgaaagtatacgttttgtagatagcgaagtggttcggaagacggttttttttaatagtagtttttcgggtgtatataaaggttggcgtttcgataattttgattttcggtaaacgttggttttcgggtttattagtatttggggagtcgacgttgcgggtaattagttttttaaagttttggttcggtttaaggataaaaggtaggagaagtttggtttttttgttttaataaatgttttattttggaataatgagaggtttagttttaaaagtagatttttttttttaaggttaaatttagatatttttattgggttatttaagaaagggagatgtttttataaatggtattggacgtttaaatagggtgtaggtgtgttttagatatttgtatagtttatttatgttttttagatttcgtttacggtttttttaatgttttatgtttttgaagatattgggtttggagaagttgtatagggtattttattttgtgttggagaattttttataataatatatcgtgacggtgaaattttagtgttagtaaagagatttggtagtttattttggagaattagaggggtgggaagggcgttgttagagtcgaattatatagatattttttagattacgatggggggcggtggggggcgttttgagttttaggatttttttaaggttaggtatttggttagagattggttggttgtttgtgggttatttggtgaatgaatggtgagtggatttaatttttgttttagttataagagttatttaagaagtaagaaaatagtatgtttagggacgtaggatattaggagagggatacgggaggtttcgcgaatacggatatatacggtgtgagcgcgagaatgtagtgtagggttattgttgtgttttaggcggatttaggttaagggttaaggttaggcggggttttggttttttgggtttttcggtggcgtttggttttattttttaggatttagaggttgtgtagacgtagatatatatagttacgggtatatatatagttttttgaatttgatagaggtatagaagaatttacgtagtgggagcgggaagaggtcggagtttttgttttatacgtgagtaaagggacgagttttggggttattgttatttgtttttttttcgtttttttacggttttttttttagtaattttggtaggtgggcggttgagagcgatattagttttaggatttcgtttgtggggagattcggttatttttatttcgttttcgggtacgcgtgattttagttattgggttagagcgtcgttcgttatcgggaggaagcgcggggggtagttcggggtcgtacgcggaagttacgttggggcggaagtcgcggagaatttacgcgttcgcgtttttttcgtatcgttcgtacgtggcgttcgtttcgtttcgtttttcgtaggtgtgaaggcgcgggttcgatgcgcgtcgtcgattcgcgtggattttcgtttttttaggtttggggttcgcgttttggggttttcggcgcggtaagtatggttcgggcggtacgtgtaggggagagagtttcgcgtttcggggaagttttcgggtttgcggggcggggtttatttgggtaggtgttcgggtcgcgtcgcgggtcgtatgagggtttcgggtttcgcgtatttaatttcgttattttcggttcgcgtttttaggcggtcgtgatttagcggttaggtagtttcggtttcgcgtttcggttttcgttttcgtcgcggttcgggtttcgttgttttatcgttttttatttggcgtcgcgcggagggcgcgggcgcgcggcggtttttcgcgggtacgcgttgttttcgcgtcggcgtttattgtcgcgtttttttcggtcgtcgtcgtcgtttggcgttcgggtttcgatttcgcgaagaataataagtgttttcgcgtcgttcgtcgttatcgtattcgttcgttcggttttttagtatttgatatcgttttcgggattcgcggcgcgcgcgttatatcgttttgtttttcgggttacgtttttttttcgtttcgcggttacgtttttcggttacgtttttttttttcgttcggggggtcgttggtttcgcgcgtatttgtaattttcgcgttttgggaggttttgcgggaagatttttggaggtcgggagtttaagattagtttgggtaatatagcgaaatttttttttttttattttttgtttttataaatataaaaaatattaaggttagttgggaacggtggtttatgtttgtaattttagtattttgggaggttaaagtaggaggatcgtttgagtttaggagttttagattagtttggataatatagtgagatttttatttttataaaaaaattataaaaattagtcgggcgtggtggtatgtgtttgcggttttagatatttaggaggttgaggtaggaggatggtttgaatttggaaggtggaggttgttatgattttattattgtattttagtttgggtgataaggtgagattttgttttaaaaaaataaaataagtaaattagtaatgtaaaaatggggataagcggttagtgattatagtttttgtgggtggggttagtttttttttaaagttttagttggtggttgttaggggatatagtaggtttaggatggggttagggtattattggtttaaggagttttgtgagggatttttaggtgggggcgggtttttgagggagttgtttttgttttttgttataggtggaggataggttggagaggggattcgtttggagttttttgttacgtttttgggtttttaagtttcgtttttttttgagcgttgtaggaagaggagttttaggtttgggtaatcgagggttttttaggatatttatggtatttgttcggggttttgggaagtttgtttttttagtttaggtgggattcgggagtttgttttttcggtttaggtgggatttaggagttagtgtagggaggtttgtgtattttttgggtgtcgtttttattattatgtggttggggatttaggtagtagtttagtggttttttgttgtggagcgcgggggtagtttttcgggttattttttttttttatttgcgggttttgtattggttatttgggaggtttttttttgttaaggtttatacggtcgtttggggtagttagttatagtgatgtttgtaatttggtcgtagaaataggtgttaagaaataatttaatagtagtagtagcgataatgttttacgtttttaggatgtttgtagaaagatatttttcggggatgggaaaggtgttttttttgttttggtttatattttgtattcggggttttgggatgcgttgggagtttttagagaagttgtggttattttcgcgggattttttacgttatttatggtgtcgtttttttaatttaaatgtattttttttatagtaggtttttgttattaattatatatttttattatttttttaattttttaatttgtatttatttatttttgagatggagttttattttgtcgtttaggttggagtgtagtggtattatttcggtttattgtagttttcgttttttaggtttaagtgatttttttgttttagttttttcgagtagttgggattataggtgtttattattacgtttggttaaattttgtttttgtttttgttgttgttttgagatggagttttattttgttgttaggttggagtgtagtagtacgatttcggattattgtaagtttcgttttttagatttaaataatttttttgttttagttttttgagtagttgggattatagatgtttgttattacgttcggttaattttttttttttttgtatttttagtagagacgggttttattatgttagttaggatggttttaattttttgattttgtgatttgtttgtttcggttttttaaagtgttgggattataggcgtgcgttattatatcggttgatttttgtatttttcgtagagacggttttattatgttggttaggttggtttcgaatttttgattttaggtgatttattcgttttggttttttaaagtgttgggattataggcgtgagttattgtatttagtttaatttttaaaattttgaattatttatttatgtttgttttatgagataatattttattgtcgtttaaattggagtttattggtgtaattatagttttttgtagtttttattttttaggtttaagtgatttttttattttagttttttaagtagttgggattaagggttggtgttattacgtttggttaattttttttgtttttttttgtagagataggattttgttttgttgtttaggttggttttgaatttttgggtttaagtgattttttcgtttcgtttttttaacgtgttgggattatacgtatgagttattgtgtttagttaaagtttattttttattgtggtaaagtaaatattatatagaatttattattttaattattttttttaagttaaaaaaatatttttttagagatagggttttgttacgttggttaggttggttttgaatttttggttttaagtaatttttttattttagttttttaaagtgttaagattataggtgtgattaggtgaataggttgggtatggtggttattatattaggttaagttaattattttaagtgtacggttcggtggcgttaagtatatttacgttgtggtataaatattgttattattttttggatagatgagtgaatgtatgggtgagtggatggatgaatggacgggtggatggatggatggatggataagtagatggacgggtgggtggataagtggatggatggatgagtggatggatgggtgggtggatggatgagtagatagatgggtgggtggatggatgggtgggtggacggatggatgagtggatagatgggtaggtggatggatggatgagtggatggatgggtggatgaatggatggatgggtgggtagatggatggatggatggatggacgggtgagtagatggatgggtgggtggatggatggatgggtggatggatgagtggatggatgggtgggtggatggatagatgggtgaatggatggatagatgattgaatgtatgggtgagtggatggatgaatggacggatggatggatggatgagcggatggatgggtgggtggatggatggatgagtggatggatggatggatggatggatggatgagcggatggatggatgggtggatggatggatagatgtttgttcggtaggaatatagagtaattgagacgtgtttgtattgttggagggaatgtatagtggtgtagatattttggagagtagtttggaagtttttagaattaagtacgtatttgttatgttatttagtaattttatttttaagtattttttaagagaagtgaatatttatgttttcgtaaatatttgtatatgaaggttaatggtggttttatttatagtggattaagttggatataatttaaatgtttttaatagaagaatggataaataaacggtggtgtatttagataatagattatattatttagtaaaaaaaaagagattaattattgatgtgggtaataatttggttgaattagtatttttaataggagaagttaattaggaaaggttatatatattatatgattttgagataggaggtagtaggacgggttttagaagatataggttataaagattttattgataaaatagagtgtggtagagaagttagtcgaaatttattaaatttaagatggcgaggaaagcgatttttggtcgtttttattgtttattatatgttaattataatttattaatatgtgaaaagatatttttattagtgttatgatcgtttataaatgttatggtaacgtcgaaaagttatttaatatggtttaaaaaggtgaggaagttttagtttttggaattttttattttttttttagaaaatgtatgaataatttagttttttgtatagtatgtgattaagaaataattttaataatagttagttagtagtatttagggaagttttgtttatgggagtagttatttttttatttttttatttttttgttatttaggttggagtgtagtggtatgattatagttcgttgtagtttcggatttttgggtttaagcgatttttttattttagttttttaagtagttggaattataggtgtattttattacgtttagttgatttatttattttttgtagagatagggttttgttatgttgtttagggtggttttaaatttttggttttaagtgatttttttaatttagttttttaagtagttacgtttgtaggcgtgggttattacgtttagttttatttttagtttgaatttgtattttgttttttgttagttgttagaggtgtattgagtagtattttttgtggttattagttgtaatttgatttatagaatgatagtcgtttgggtttgtaaaagttttttatagtttgagtgtagttttttaaatgtagaaatttttgatgtaaagttttataggtttagggtttagtttttttggggtagggttttttttatttgttatggaaggtttcggaaagtttcggtatttagaaagtgttcgtgttgtgtttagtttgtttgttttagttcgttatgtagttaggtttttagattaatttatagatatagataggattttcgggtagtgaggttttttttatttttttattttattatattttttattttttataggtaggattatcgggttatttttttttttttgattttatattttttattttagttcgaga

SEQ ID NO: 145 - DNA, 7135 bp, Artificial Sequence
  chemically treated genomic DNA (Homo sapiens)
gaaaagaagaaaagttgaatatagaaatagaaattggtattgtgaaaggaaagggtaggataggtcgtttgggagaatgggttagtagtaaaaatagagtatgttttgaatttaggatgagtaagtagggtgatagagaaggggaggtgatttggggtaattgagagttttttttatatagtaagaagttgtagttgaaggatgtggtttatgagagattttagggtatggattagaggtagaaagaggattttgttagtaattttaaaaattcggattaggttttgaatttatatttttggtttttggtttaggtttgtaattaaaagatgaaagtatttggtttttttgtataagcgattttggttttgttatggttgtttatttgtgttggttaatatggtagtttcgagttatatgaggtttttgagtatagggaattaggtttatttgaagcgagatgtattgtaagagtgaagtattcgttgtatttgggggatttaatgtatgtaaaagaatatgaaatattttatttatatttttggtattgatgacgtgttgaaataatattttaaatatattaggttaaataaagtatgttattaaaatggattttgttggtttttttttattttttttaatatggttattagaattttatttgtataggtggtttacgttgtgtttttgttggacggcgttggtttaggtttttgttatttttattttttgtgtattttgaattttttttttttttttttttttttttaatattagtagtagtaggagtaataaaatattagtttttgaagtgcgtgtcggttattgtatcgttttttattttttttgttgtggttggttcggatttttgggttgttgttttaaattttttgacgattttagtatttggattatagttacgttttttaataatatttttggtttttaatattattttttagcgattttagtatttgtggataatttttttagttttgtggttttaggttttgtttttagtttaaatgattttattttttatttttttttagttttttttttttatagttatattttgtatttaatattgataattttaaaattatattgttttaggtttagttttaagcgttacgttttttagtttttatttttttttttttttttagtgtttttagtacggggattttaatgattttttgatatcgttgggattttcgatatgtagtttttattttttgtttatatttgttattttttttatgtttttattttttttttaattttattgggttttagagtttattatcgtagttttttttttttatgtgttttgttttttttgatttttattttgtgtcgtattcgtttggtaaattttagttttggttaaatttattttttttttttttttatgtcggtatttggatagttgaattaagtcgtagagaagtataggtgaggttgagtagttttttttaggttttcgagtattaagttgggcgggttgtaggttagtttggttggagattttgtattttgtgtatgtttttagtttttttttttttttatgtattttatatcgtgttttttttttttaaattttgaatatttttttatttttagttgatgattttgttttttattttattgtaaaagagatattgtatttttagaagatagtttttcgttttgggtatttttataattatatttatttattttatcggatttgtagttatatattttgtttttttttttattaggtataaattatgttgtggtaaggttgtgattttttttagttttagatttttattttttgattttttagttatttgttttttatttatgtataatttttatttatgtattattttttaattttatagtttttaagagggttgtttatatttattgtttttatttgttttttttttattttgtttaaattatttgtattaggtatttattttgtttagtttattgaaaatatttttattaaggttagtaatggttttatttttatggttaatattaagtttcgggttttagtttatttgaatttgtagtagaatttagtttagttgattttatttttttttttttgaattcgtttttatttggttttttgggagttttttttttttagttgtttttttgtttttttgttaggttatttttagttttttttttttttttttttttatttttttagtttttaattttgaaatgttttaaggtttagtttttgaatgtttttttttttttaatggttcgtattttatagatatttttattttgttttatagatattttcgttttgttttacggttttaaattttatttgtttgtatataatatttatatttatatatttaagttataattttttttcggtttttgatatttttttggatatggtttggttgttttataggtttttcgaattttataggttttgttaattcgttttatttgtatttgtttatttagtaaatggttaaatacgtattttttttttttattataatacgtatttttttcgttagtgaattaaatcgaagattttttattagatagtattatttttgttataatttgatttatgttaatattttttttgtgtttaggttagtgtttttattttttatttgatttttttttttttgttatggtttttagagtgttatttgaatataggggttatatcgaggttgtttacgttttagttttttaagttaattatatttttttttttagaattttttgtggtttattattttattgggggtaaaagtattagtttataaagttcgtttggatttggtcgttaaagatttttgtttttagtatttgattgttttttttgtcgggtcgtttttgttttgttggtttttttgcggttttttatttttggttgttttttgtttttggaatttcgaatttgttgttttttttgtttggaatattttttttttaagaatttgttggtttcggtcgtttattttttttatgtttttgtttaagtgtgattttatgagtgagacgttttttattatattatggacgatggaatttttaggtttttgttattttttttttttaatgatgttttatttttttttatagaattgtttacgtattgatattagtttgattgttgttgttgttattgtattttgtttgattgtttttttattgggatatagattttattaggtcggtattttgttttatttattgttatgttttagtgtttagtatagtgtttggtatgggttaaatgtgtggggggagaatttggggaatatggtggttttatttgtaaatttttaataaggtttggtttttatagtagggttttggttaggtatgatagggtatgcgagtttttattttgtgtgggttttttttcgggtttttgtttattaattatgaagtaaaaggaagtttttttttagtgaaagtaattttttgtattttattagaatagttgagggaagtgttaatgggataggtgtgattgggattacggaggtagtgtttttttgggtgtttggattatatcgttggaaggaaatatttgttttattaatttaaaggttatttgttggtttagggtttaggttcggttgtattgagattatagtttagggttttgtatatgttggggttttgttgatttgattttagaaatgtttaatattattagaattatttaagtgttacgaaataatatatttatgtattattttgttttaggtgagtttaggaggaaaagatagatatttatttattaaaaatatttttttgattggtcggtacggtggtttatatttgtaattttagtattttgggaggttgaggtaggtggattatttgaggtcgggagtttaagattagttttattaatatggtgaaatttcgtttttattaaaatataaaaaattagttaggtattgtggtacgcgtttgtagttttagttatttaggaagttgaggtaggagaatcgtttgaatttgggaggcggaggttgtagtgagttaatattttattattgtattttagtttggtgatagagtaagtttttgttttaaaaaaaaaaaagttattttgattaattttttatggataaagtttagaaagtaaagaataatgttttattatatatatatatatatgtatgtatataaattagaaaaaaaaatttttttgagtgttttgtttggtatttggcgatggtgtttttcgtattatttggtttgtggtttgtggggacgtatatacgttttgttagggttttttatttagtttatatattaatggtttgtttggtttacgtagtttgagtaggtgtttagttttgtcgtagatattgaagtcgtgtaaaataaatgttttttgattgtttatattttaagtaatattggtataatattaaatttattgttttaggtattttttttttttattgtttatggtattttatgtattaaaaaatgatagtggtagtattgtttagatatgcgttttgttattaagttttaatgtagtttatttggttttttaggtaaatgaatggaggtatagaagatgaaatgatttttaaaatgttattaggaaagtttaggttagaattggaaatgggtttcgtatagggtattcggttatttttgtttggttattttttttttggtattaagttataagtatataatgatatagaatgaatggttattattggggatttagaagggttatttaattagtttttagttttattaggtttaagttttttttttattaggttttaaaggtttaattttattattgtgataaagataattgtagagtttgttaaatttttttttaataatatgaagattatgatttatagttgaattttttttttttattttaatttaataatttttatggttttttgtgtttgttttgttttggatatatttatagaaaattatttgaagagttttaatttgaggtttttttatggatgggttaaacgtgatattatttgttgttgaggaatttacgaatattttaattggtaggaacgttttagtcgggaatgtatatcggtaaatttttatcgtgtattgggttattatgagtatttttttagtggggtttgttgagaatgggatttttttttggtttttgtgttttcggatgagaagaaatttttttattgtttatattatttatttgtttatcgtagatattttattgtttttttgtatttttattttgtttatcgattatgttttagattatgagtttttttttggttattattatataattgttatattattagtgatttttttgtttggttataatacgggtttttatttgttgacggttattagtgtggagaggtgtttgttagttttttattttatttggtatcgatgttatcgttttaagtattagtcggtattggtttgtgtttttttgtgggtttttttttgtttggtgattattatggagtatgttatgtgtatcgatagagaagaagagagttattttcggaatgattgtcgagtagttattatttttatagttattttgagttttttggtttttacgttttttatgttggtgtttagtattattttggtcgtgaagattcggaagaatacgtgggttttttatttttttaagttttatatagttattatggttattattattatattttttattttcgttatgtttatgagatttttttatttgttgtattatgagtattggtcgatttttgggaatttatattatatttttttgtttttttttataattaatagtagcgttaatttttttatttatttttttgtgggaagtagtaagaagaagagatttaaggagtttttaaaagttgttttgattagggtttttaaagatgaaatgtaatttcggcgttagaaagataattgtaatacggttatagttgagattgtcgtttaagaattgtgagggaagttgtggataaaaatggtggaatataggttatttttagtttgtgtttggaatatgatttaagtattttttaaatgtgatatagaagaatattttattttatatgtatgagatattaattaatgatgaaattgaatttttgtattgtattttttggaaatgatttgttatttttgtatttgataaagattttattttttttagtttttttggtagtattttattatgaattataaaaatgatttttgtaggaagatttatagatgtgtacgggataaggtaataaaattatttgttggaatttgaggaggtagtttgatgtagtaggaagaataagggtcgttttttgtgtgattttaggtaagttgttaaattttttagagttttatttttttatttataaaatggttgcggtaatagtttatatttttttggtttgttgtgaagatgaaatgagaagatgaggtttgtaaagtatttggtatattgtggatgtttaataaatattagtttttttttattttttttaatggtagataagatataaatttttgttttgtaaagtatatatatatatatatatatatatatatatatatagttttattatgtatagaagttattatgtgtttttatatgttgaatgtaaatttacgaaggttttttttttgtttgtagtatgaaagtattttatggtattatatttttattgaaaaatatcgcggatgttatgatttaataagttatgtgttagtgtattattttaggttgtgaagaaatatatttggttattagtagaggagttttttatggttttttttttttttgtgggaatattagatgaaatgaaagtttgtgttttgaaattttttgattgtataaatatttttacgaatggagttgaatttatgattttttgggggtgattgggattttttttttttatgaagaggtgggttatttgtagttagagtttttatttgtagttaagtgcgggtttttgtatttgtttgttttttttttttttgaggtttttttttttttttttattatatttggaaggaggtttagtggtaagggttaatgaaaatgtggttatattttggaggattttgatatttttgtttatga

SEQ ID NO: 146 - DNA, 7135 bp, Artificial Sequence
  chemically treated genomic DNA (Homo sapiens)
ttatgagtaaaaatattagagttttttaggatgtgattatatttttattagtttttgttattgagtttttttttaggtgtgatgaaaaaaaaaaaaaaagttttaggaggagaggaggtagataggtgtagagattcgtatttggttgtaggtgagaattttggttataaataatttatttttttatgggggaggaaggttttagttatttttaggaagttataaatttaattttattcgtaaaaatgtttatgtaattaaaggattttaaaatatagatttttattttatttagtatttttatagagggaaggggagttatgagaaatttttttattggtggttaaatgtatttttttataatttgaaatgatgtattagtatatggtttgttagattataatattcgcgatgttttttaatagaggtgtaatgttatgaaatgtttttatgttgtaagtaaaaagaagattttcgtaaatttatatttaatatgtaaaaatatataataatttttgtatatgatagagttgtgtgtgtgtgtgtgtgtgtgtgtgtgtgtgtgtgttttataaaataaaaatttatattttgtttattattgaagggagtgaggagagattgatatttgttgaatatttataatgtgttaggtgttttataagttttatttttttattttatttttatagtagattaaggaggtatagattattgtcgtaattattttatgagtgagaaaatgaggttttgagaggtttaataatttgtttgaggttatataggaagcgatttttgttttttttgttatattaagttgtttttttaagttttaataaatagttttgttattttgtttcgtatatatttgtaaatttttttgtaaaagttatttttatggtttatggtaagatgttgttaaaagagttgaaagaaatagagtttttgttaagtatagaaatgataggttatttttagaagatatagtataagagtttaattttattattaattagtattttatgtatatgggatgagatgtttttttgtattatatttaggagatatttaagttatattttaagtataaattaaaaatgatttgtgttttattatttttatttataattttttttatagtttttagacgatagttttaattgtgatcgtattataattgtttttttggcgtcgaggttgtattttatttttgaaagttttggttagaataatttttaaggattttttgaattttttttttttattgttttttataaagaagtaaatgaaagggttggcgttattgttgattgtggagaagagtagggaaatgtggtgtaggtttttaaaggtcgattaatatttatagtatagtaggtaaaggagttttatgggtatagcgaagatgaggaatataatgatggtgattatgatgattatgtaaagtttggaggaatgggaagtttacgtgttttttcggatttttacgattaagatggtgttggatattagtatgaggggcgtgaagattaggaagtttaggatggttataaagatgatgattgttcggtagttatttcgagagtgattttttttttttttgtcgatgtatatgatatattttatggtggttattaagtaagaaagagtttatagaagggtatagattaatgtcgattggtatttggggcgatggtatcggtattagatggggtaaaggattgataggtatttttttatattaatggtcgttagtagatagaggttcgtgttgtagttaaatagaaaagttattgataatgtgataattgtgtagtaatggttagaagaaagtttataatttaaagtatagtcgatagataagatgaaaatatagaagagtagtgagatgtttgcgatagataggtgggtgatgtagatagtgaagggatttttttttattcggaagtataggaattagaggagaattttatttttaataaattttattggggagatgtttataatgatttagtgtacgatggggatttgtcgatgtgtattttcgattgaggcgtttttgttagttgagatgttcgtgggttttttaataataaatgatgttacgtttgatttatttatgaggaggttttaggttggaattttttaggtaattttttgtaaatatgtttagaataaaataaatataaaaagttatgaaaattgttgaattggaataaaagggagaaatttagttataaattataatttttatgttattaaaaaaaagtttaatagattttatagttatttttgttataatgataagattaggtttttaggatttgataagaaaggaatttagatttgataagattgagaattgattgaatgatttttttggatttttagtgataattatttattttatattattgtgtgtttgtggtttagtgttaaaaaggagatggttaggtaagagtggtcgagtgttttgtgcgggatttatttttagttttggtttgagtttttttaatggtattttgaaaattattttattttttgtgtttttatttatttgtttgagggattaggtggattgtattaagatttgatgataaaacgtatgtttgggtaatgttgttattgttattttttaatatatgaagtgttataagtagtaaggagagggagtgtttgggataatgggtttaatattgtattaatattgtttaaagtgtgaataattaaaaggtatttattttatacggttttaatatttgcgataaagttgggtatttgtttagattacgtaagttaggtaagttattgatgtgtggattggatggagagttttaataagacgtatgtacgtttttatagattataggttagatggtgcgggaaatattatcgttagatgttagataaagtatttaaaaaaatttttttttttagtttgtgtgtatgtatgtgtatgtgtatgtagtaaaatattgttttttgttttttgaattttgtttataagaagttgattaaaataatttttttttttttgagatagagatttgttttgttattaggttggagtgtagtggtgagatgttagtttattgtaattttcgttttttaggtttaagcgatttttttgttttagttttttgagtagttgggattataggcgcgtgttataatgtttggttaattttttgtattttagtagagacggggttttattatgttggtgaggttggttttgaattttcgattttaggtgatttatttgttttagttttttaaagtgttgggattataggtgtaagttatcgtgtcggttaattaaaagaatatttttagtgaatagatatttgttttttttttttgagtttatttgaagtagaataatatataaatgtgttatttcgtggtatttgaatggttttggtgatattagatatttttagaattaagttagtagagttttagtatgtgtagggttttgagttgtgattttagtatagtcgggtttggattttggattagtaggtagtttttgggttggtgaaataggtgtttttttttagcgatgtgatttaggtatttaggaggatattgttttcgtggttttaattatatttattttattgatattttttttagttgttttaatgggatgtaggaaattatttttattggaggagagtttttttttattttataattagtagatagagattcggaaaagaatttatataggatgagagttcgtatgttttgttatgtttaattaaagttttgttgtagagattaggttttgttagaagtttgtaagtaagattattatgttttttaaattttttttttatatatttagtttatgttaggtattgtgttaggtattgggatatggtagtaaataaaataaagtgtcggtttggtggagtttgtattttagtagggaggtagttaagtaaaatataataatagtaataataattaaattgatgttagtgcgtgaatagttttatggaaaaaagtaaagtattattaaaggaaaggagtggtagggatttgggggttttatcgtttatagtgtgatgggaaacgttttatttatgaggttatatttgggtaaagatatgaaggaaataggcgatcgaggttagtaggtttttgggggaaaagtattttaggtaaaagaaatagtaagttcgaagttttagaagtaggaggtagttaggagtgaagaatcgtagaaaggttagtaaggtaggaacggttcggtaaggagaatagttaggtgttgaaggtaggggtttttggcgattaggtttaaacgggttttgtgggttggtgtttttatttttagtgagataataaattataggaggttttgagaggaggaatgtggttaatttgggggattgaggcgtgaatagtttcggtatggtttttgtgtttaggtgatattttaggggttatggtaggaaggaggaggttaggtgggaggtgaaggtattggtttagatatagggaggatgttagtataaattaggttgtggtagaggtagtattatttggtgggaggttttcgatttgatttattgacggaagagatacgtgttgtggtagaaagagagaatacgtgtttagttatttgttgaatggataggtgtaggtgaagcgggttagtagggtttgtggagttcgagaagtttgtgaggtagttaggttatgtttaggggagtgttaggagtcggaggaaagttgtagtttgggtatataaatgtgggtgttgtatgtaaataggtggaatttgaggtcgtgaggtaagacgagggtatttgtgaggtaagatgagagtatttgtgaaatacgggttattaaaaaggagaagatatttaaggattgggttttgaggtattttaaagttagaggttggggagatgaggaggaagaaggagaggaaattgaggatgatttgatagagaggtaggaggataattggggaagaagggtttttaggaggttaagtaagaacgagtttaaggggaagaaagtggaattaattgggttaaattttattgtaagtttaagtgggttgagattcggaatttgatattgattatgggagtggagttattgttgattttggtaggagtatttttagtagattggataaaatgaatgtttgatgtaagtggtttagatagaatgggaggagaataggtgaagatagtgagtgtagataatttttttgggggttgtggggttgagaagtgatatatggataagaattatatatggatagaaagtaaataattgaggagttaggaagtaggggtttagagttgggaggagttatagttttgttatagtataatttatatttggtgaaggggaaggtagggtgtgtggttgtagattcggtgaggtgggtagatgtggttgtgggagtgtttaaggcgagaagttgttttttgaaagtgtagtattttttttatagtaaagtaaggagtaaggttattagttaagagtgaggagatgtttagggtttaaggagagagggtacgatgtgaaatatatgagggaaagagagggttagggatatatataaagtgtaggatttttagttaggttaatttatagttcgtttagtttagtgttcgggaatttgggagagattatttagttttatttgtgtttttttacggtttagtttagttgtttaggtgtcgatatggagaaagaggagaggtggatttaattagggttggggtttattaggcgggtacgatatagagtgggggttaaaggaagtaaagtatatagaagggaagggttacgatgatggattttggagtttagtggggttaggagaaaaatgagggtatgagggaggtaatagatgtgagtaggaaataggagttatatatcggaggttttagcggtgttagggaattattgaagttttcgtattaaaggtattgaaggggaaggaggaggtgggggttggagaacgtgacgtttaaaattgagtttggggtagtgtagttttggggttattagtattaagtgtagagtgtgattgtggaaaagaagggttgagggagagtggaggataagattatttgagttgagagtagaatttggagttatagggttggaagaattatttatagatgttgaaatcgttgagaaatagtgttggagattaggaatattgttggaaaacgtggttgtaatttaggtgttgaaatcgttaaggaatttgggatagtagtttaggggttcgaattaattatagtaaggagggtgggaggcgatatagtggtcggtacgtattttagagattggtgttttgttgtttttgttgttgttggtgttggagagagaggagagagggaagaaaatttaaagtatataaaaggtaggggtgataagggtttggattagcgtcgtttaatagaaatataacgtgggttatttgtgtaagtgaagttttaatagttatgttaaagaaagtaaaaagaaattagtaaaatttattttaataatatattttatttagtttaatgtgtttaaaatattattttaatacgttattaatattaaaaatatggatgaggtattttatgtttttttgtatgtattaagttttttagatgtagcgggtattttatttttgtagtgtatttcgttttagatgagtttggttttttatgtttaggagttttatgtgattcggggttgttatgttggttaatataggtagatagttatggtaaaattaaagtcgtttatgtaaggaagttaagtgtttttattttttaattataaatttaaattaaagattagagatgtaaatttaggatttaattcgagtttttgaggttattgataagattttttttttgtttttggtttatgttttgggattttttatggattatattttttagttgtaattttttgttgtgtggagagagtttttagttattttaggttatttttttttttttgttattttgtttgtttattttagatttaaggtatgttttatttttattattgatttatttttttaagcggtttgttttattttttttttttataatattagtttttatttttgtatttaatttttttttttttt

SEQ ID NO: 147 - DNA, 5689 bp, Artificial Sequence
  chemically treated genomic DNA (Homo sapiens)
  unsure 3724, 3742..3743, 3755..3756, 3759..3760, 3872: n is a or g or c or t
taatgttattatgtagatttgatttagtaggtttgggtggggattgaggttttgtattttttattagtttttttgtgatgtgtttgtagtgtagtttcgataagtttatttggggttttattaaagatatttaagtgtggatgaaaatgaatttttgcggttttagatgtattttagagaaatattgaaaaggaatattaaggaaattttttatttgtttcgtttttttttgtgtgtatgtgttttatttatgaaaatttttatatttgggttatttgaaagtttgttttttttttttttgagattgagttttattttattgtttaggtttattgtaatttttattttttaggtttaagtgatttttttgttttagtttttcgagtagttgggattaaaggcgtgtgttattatatttggttaatttttgtatttttggtagagaagggatttttttatgttggttaggttggtttcgaatttttgattttaaaatgattttttcgttttggttttttaaagtgttaggattataggagtgagttattgtgttcggtttaaaagttttttaaattttaaatgtatgagatttttttagttaattttttgttatttttttattttaattgtattaggtttaagaatatattaatattatagttttttaaaatttgttgagatttggttgggtagggtggtttatatttgtaattttagtattttgggaggtcgagataggtagattatttgaggttaggagttcgagattagtttgattaatatggagatattttatttttatagtaaatataacgttagtcgggcgtggtggtttatgtttgtaattttagttattcgggaggttgaggtaggagaattgtttgaattcgggagacggaggttgtagtgaatcgagattacgttattgtattttagtttgagtaataagagcgaaattttattttaaaaaaataaaataaaataaaaaaaattatttgttgagatttgttttatagttaagtatatggttaatttttgtaaatgttttatgagtgtttgaagataatatattttataattgttgggtgtagtgttatgtttattaggttaaattttttaattaggttgataggtttttatattttattgatttttaaaaggagatgtgttaaaatttttagtttttttattaggaaagttttttttttttattttagtttacgttatttacgataagtaaaatgttacgtggtttttgtagatttagtttttattttaatgtaattgataattttagaagatttttttggttattaatatttttttaattttattttatatttggtatttttttttttttttttgagtttttatagtatttattgtttatataaataatttgatatttatataatttgtttttattataattatttgagttgataatttatttttgttaggttttaaattttatatgggtaaagattattttattttttttttataatagttttattggaatatagttattgatatattataaaatttattttttagaagtatatagtttaatgggaaattattttatttattttggtatcgtttatagttgtggtttttagttttgggtgtatattggaattattggaagagttttaaaaaattttttagtttggaaaaaaaaaattttttagtttggattttttttttagaggttttggtttaattggtttggggtgtggtttggggatgggaatttttttaagtttttaggatgattttaatttgtagtcggggttgttttagagtgttttgtttatagtaggtatttaagaattgtttgttgtaattattaattagttttaatttttagtatttagttaattaatttatttaaaagtggtcgtttgtttttttaatagtttattagtttttattatataatggtttgtttatatttgtttttttaatttagtaggaaaggaatattatgagataaaagtatgtagaaaaggtaagtttatttgtaaagatgtgtagatttagtaggattggattattgaataagaaatataatagatattagatcgcgagcggtggtttacgttataggcgtgagtacgtgagtattttgggaggtcgaggcgggtgtattacgaggttaggagtttcgagattagtttggttaagttggtgaaattttgtttttattaaaaatataaagattagttgggcgcggtggcgggcgtttgttttagttattcgggaggttgaggtaggagaatcgtttgaattcgggagagggaggttgtagtgagttaagattgcgttattgtattttagtttgggcgataaagtaagatttcgttttaaaaaaaaaaaaaaaaaaaaagagagagagaaagaaatataatagatattaaaggaaaaaatgtaaaggaaaaagtattatatttatatttgtttttttagtatagatgatatgtttacgttgaggaatgtgtgttataagaattgtgtgtgatatatttttaaatttttatatttaaaagttagggataatatggtatttattcgggaattagtaatttatgggaaaagtttaagatgttatttattttggagattagatgtaaaggagtagtatgggtattttgttttagggtggaaagtgtttgttatggttttttttttttttatgggatttgttgtatatttttataatggcggtaggatcggtacgtttgtttgtatagttgtgagttgtatgaaggtagggatggttttggttttattcgttatggtatttttttgtggtaagttaggtgtttaataaatatcggtggaatgtatgtgattatattttatgttatagtatataaatatgattttaattggatagggaattgtaaaagttttttatattgattttttttgtaattttaattatggtattttgagttgggatattgtttaaattgtttgggttataataaattttgaaggggtttttatttttacgtttatagtggttgagggttcgcgttgtgtgaacgttggagttttacgtgagtagttgagtagcgaggatggttatttttagataaacgaatataggattttcgcggttgggagcggtcgttcggcgaggtcggttattttgtttgttcggtagtattacgaaatatttgttattgatatttttttattagttttcgagggttcgcgtaggtatttcgagtcgcgttttttggttcgtcgtagttagattttttttcgggcgggttacgtttttaggcgtaaaacggaattatttcgtatgaagaagataaagtataattagttatattaaagagaggtagtattatttagatagtcggttatttttttagagattttatttagttttttgggttcggcgtttagcgcgtagacggtgttcggttttaggagttttagttttttttacgtgttttgtttttttagtagttttttttgtcgtttcgggaggaaaattttttgataattcgcggtttgcggattacgatttttaggaggcgtcgcgtcgcgtttacgtagggagtcgtagttcgtagatcgcgagtagttaggagattttttttcgaggagaagagaagatgtggaagaaagatagtagagagagagggtgagtttatttttatatgtttttttttttttattatttaaaaataattaaaaaaanataggagagtttaataannttaaaaaaaaanntannataagaaaagataataatgatataaaaaatttattaatgaaaaagtgtaaatgaaaaggaataaatattaattaagtgatttattttatatatattagagtaaagtgattantggaggttataaaataaaaatgagtaagagaatgatataaaaaatatatagagtagaaaatagtatgtaggataaagtggtgaaaaaaaagtgaaaatgttaaaaaatagaaaaaagcgaaaagtaatgataaataaagatacgtagtatattagtttaattaatgaagtaagataaataagaaatatataatttattaagaataaataaaatgttaattaaagtagttggtaatattaatagaggggtaggaggaatgtttggtagcgttgaaaatgtaaatatatagttgataaaagatatttacgatgtataagtcgtatataatttattttacgagtaatatagtaaaaaagataatgtttatagtagaataataattaaataaaaatttgtttttaatatataatatattataaaatgcgaaaattaattatatagaggagataattatatttgagtaaatatgaataattatattattatattaatgtttaatatataatttaatatatgattaaaaaataaaaaataatatgtatttatttatataatttatatttggatattaaaaatgtaatgttttataattaaaataaattaattttttattaaaaattaatatatataaatttataaattatcgttttttttttttttttcgggtcgcgtaggcgttttgggtttcgttattaagtcgggttggcgtcgtttggatgcggtttttttcgggatttgtagtttttttggagttattcgggtcgtttgttagagggataagatttataagtttcggttgttttagcgttgcgagtttggttacgtggcgggggtcgaacgggcgtgcgtgtcgtcgttgattcggtgttgtagtgaggaggtggtttttgttcgtgttgtgtgtgtgtgtgagtgagagagcgagtgagtgagtgagtgagtgtgtgtgtgggggggattcggtttgttgttgtcggtgattttttttttttttttattttttttttttttcgtcgtcgttgtagtggtcgttttttgggtcgtaggaaatgagcgataacgatgatatcgaggtggagagcgacgtgagttttggggttttttttttttcgtgcgggttgttaggcggggatagcggtcggggtttttagcggggcgacggcgggagggggtcgggttgtcgtcgttttttttttttttttttcggggttaggagtgttttcgtcgcgttttcggttcgttttttttcggtttttggtcggagcggttttttgggattggaggttgggggaagatacgcggtttttgggatttttatttttttttttgcgggagggtgttgcggtttttcgtttttatttttttcggtttaggattcgggggataaggatggggggcgttcgggattttattgttcggatttaggggaaggggacggcgtttaggatttgttttttcggattgcgatttttttttttcgtgattcgcggattttgggggtcggggaagggcggagaggggttgggggtgtttagatgttcgagttgggtttgtagggaggagatagttttcgggatttttttggtttaggtcggatttcggaaggaggggcggcgttcgggatttttttattttgttatcggatttcgtcgagggtggaagggtgggggtaaggggtggggagggaggaaggggtgtcgggttgattttttatttttcgttttttttgtcgtcggtatttttttttttattattgaatgttaagtgtaaaaataatttttatattttttattttttttttttttttttattttagg

SEQ ID NO: 148 - DNA, 5689 bp, Artificial Sequence
  chemically treated genomic DNA (Homo sapiens)
  unsure 1818, 1930..1931, 1934..1935, 1947..1948, 1966: n is a or g or c or t
tttggaataagagagaaaaaaaaaaatagaaaatatagaagttatttttatatttaatatttaataataagaaagaaaatgtcggcggtagaggaagcggagggtggggagttagttcgatatttttttttttttttttattttttgtttttatttttttattttcggcgggattcggtagtagggtagaggggtttcgagcgtcgttttttttttcgggattcgatttgggttagaggggtttcgagaattgttttttttttgtagatttagttcgggtatttaggtatttttaattttttttcgttttttttcggtttttaggattcgcgggttacgggaggagaggatcgtagttcgaaggggtaggttttgaacgtcgttttttttttttggattcggataatgggatttcgggcgttttttatttttgtttttcggattttgagtcggggaaggtgggagcgggaggtcgtagtattttttcgtaagggaggaggtgggggttttagaagtcgcgtgtttttttttaatttttagttttaggaggtcgtttcggttaggagtcggaggggagcgaatcgggaacgcgacggaggtatttttggtttcgaggggaaggggaaggaggcggcggtagttcggttttttttcgtcgtcgtttcgttaagagtttcggtcgttgttttcgtttgataattcgtacgggaaggaagaagttttaggatttacgtcgttttttatttcgatgttatcgttatcgtttattttttacggtttagggagcggttattgtagcggcggcggggaggggaaggggtgaaggggagggggaagttatcgataataataagtcgagttttttttatatatatatttatttatttatttattcgtttttttatttatatatatatataatacgggtaagaattatttttttattgtagtatcggattaacggcggtacgtacgttcgttcggttttcgttacgtgattaggttcgtagcgttggggtagtcgagatttgtagattttgtttttttaatagacggttcgggtagttttagaaaaattataaatttcggaagaaatcgtatttaggcgacgttagttcggtttgatgacggagtttaaggcgtttgcgcgattcggggaggggggggggggcggtggtttataaatttatatatattagtttttaataaaaagttaatttattttaattataaagtattatatttttaatatttaaatatgaattgtatagatgaatatatgttattttttattttttaattatatattaaattatatattgaatattaatgtagtaatataattgtttatatttatttaaatataattattttttttatgtaattaattttcgtattttataatatattatatattaaaaataaatttttatttgattattattttattgtgaatattattttttttattatattattcgtgagataaattgtatacgatttgtgtatcgtaggtgttttttattagttatatatttatatttttaacgttattaaatattttttttatttttttattaatattgttaattattttaattaatattttatttatttttgatagattatatgttttttgtttgttttgttttattaattgaattaatatattgcgtatttttatttgttattatttttcgtttttttttattttttaatatttttattttttttttattattttattttatatattattttttattttatatattttttatattatttttttatttatttttattttataatttttantaattattttattttaatatatataaaataaattatttaattaatatttatttttttttatttatatttttttattaataaattttttatattattattatttttttttatnntanntttttttttaannttattaaatttttttatntttttttaattatttttaaataataaaaaaaaaaaaatatataaaaataaatttattttttttttttattgttttttttttatattttttttttttttcggaggaaaattttttgattattcgcggtttgcggattgcgattttttgcgtgagcgcggcgcggcgttttttgggagtcgtagttcgtagatcgcgagttgttaggagatttttttttcgaggcggtagaggaggttgttgggaagataggatacgtggagggagttggagtttttggagtcgggtatcgtttgcgcgttggacgtcgggtttaggggattgggtggagtttttgggggagtagtcggttgtttaaataatgttgtttttttttggtgtgattggttatattttgttttttttatacggagtggtttcgttttgcgtttaggggcgtaattcgttcgggagggaatttggttgcggcggattagggggcgcggttcgggatgtttgcgcgaattttcgggggttggtggggaggtgttagtggtaggtgtttcgtggtgttatcggataggtagaatgatcgatttcgtcgggcgatcgtttttagtcgcgagaattttgtattcgtttatttgggagtgattattttcgttatttagttatttacgtgaggttttagcgtttatataacgcgaatttttaattattatggacgtggaagtaaaagtttttttagagtttgttgtagtttagatagtttaggtaatattttagtttagagtattataattaagattgtaaaaaggattaatatgggaaatttttgtagttttttgtttagttaaaattatatttatatattgtggtatgaagtgtaattatatgtattttatcgatatttattgaatatttaatttgttataaggggatgttataacggataagattaaaattatttttgtttttatgtagtttatagttgtgtaagtaagcgtgtcggttttgtcgttattgtaagagtgtgtaataagttttatgggaaggaagaaaattataatagatattttttattttgagataaagtatttatattatttttttatatttggtttttaaagtgaatgatattttgagttttttttatgagttattgattttcggatgaatattatattatttttgatttttgaatgtggaaatttggggatatgttatatataatttttgtgatatatattttttaacgtgagtatgttatttatgttgaaaagataaatgtaaatgtggtatttttttttttatatttttttttttaatatttattgtatttttttttttttttttttttttttttttttttttttgagacggagttttattttgtcgtttaggttagagtgtagtggcgtaattttggtttattgtaatttttttttttcggatttaagcgatttttttgttttagtttttcgagtagttggggtaggcgttcgttatcgcgtttagttaatttttgtatttttagtagagatagggttttattaatttggttaggttggtttcgaaatttttgatttcgtgatatattcgtttcggttttttaaagtgtttacgtgtttacgtttatagcgtgagttatcgttcgcggtttaatatttgttgtattttttatttagtgatttagttttattaagtttgtatatttttgtaagtgaatttattttttttatatgtttttgttttatagtgttttttttttgttgagttggggagatagatataagtagattattatgtgataagagttgatgggttattggggagatagacggttatttttgagtgagttaattaattggatattagaagttaaagttaattgatgattataatagatagtttttgggtgtttgttatgaatagagtattttagggtaatttcggttataagttaaaattattttaggagtttaaaaaagtttttatttttaggttatattttaaattaattaagttagaatttttgaaggggagatttagattgaaggattttttttttttagattgaaggattttttaaagtttttttagtaattttagtgtgtatttaagattgagaattatagttatagacgatgttagaataaataagatagttttttattgaattgtatgtttttaaagagtgaattttatggtatgttaataattatattttaataaaattgttataaaagaaaaataagataatttttatttatgtggaatttaaaatttgataggagtaaattattaatttaaataattgtgatgaagataaattatgtaagtgttaaattgtttgtatagatagtgaatgttgtaagagtttagaggaggaagaaggagtgttaggtatgaggtggggttggggaggtgttggtgattagggaagttttttgaggttgttagttgtattagggtaagggttgggtttgtaaaggttacgtaatattttgtttatcgtgaataacgtggattgaggtgaggaggaaaggtttttttggtagggagattggagattttaatatatttttttttaggaattaatagaatatgaagatttgttaatttgattaagaaatttgatttaatagatataatattgtatttaatagttgtagaatatgttgtttttaagtatttatggaatatttataaaaattgattatgtatttagttataaggtaaattttaataagtggttttttttgttttgttttgtttttttgagatggagtttcgtttttgttgtttaggttggagtgtaatggcgtgatttcggtttattataattttcgtttttcgggtttaagtaatttttttgttttagtttttcgagtagttgggattataggtatgagttattacgttcggttaacgttgtatttattgtagagatggagtgtttttatgttggttaggttggtttcgaatttttgattttaggtgatttgtttgtttcggttttttaaagtgttggaattataggtgtgagttattttgtttagttaaattttaataagttttaaaggattataatattagtgtatttttggatttagtgtaattaaagtagaaaaataataaaaagttaattagaaaagttttatatatttgggatttaagaaatttttaggtcgggtatagtggtttatttttataattttagtattttgggaggttaaggcgggaggattattttgagattaggaattcgagattagtttgattaatatggggaaattttttttttattaaaaatataaaaattagttaggtgtggtggtatacgtttttaattttagttattcgggaggttgaggtaggagaattatttgaatttgggaggtggaggttgtagtgagtttgggtaatagagtgagatttagttttaaaaaaaaaaaaagtaaatttttaaatgatttaaatgtagggatttttatgagtgaggtatatatatataggaaagaacgaggtagatgagaagtttttttagtgtttttttttagtgtttttttgaggtgtatttaggatcgtaagaatttatttttatttatatttgagtgtttttggtaaaattttaggtgagtttatcggggttgtattgtaaatatattataaggaagttggtaagaaatatagaattttagtttttatttagatttattaaattagatttatatgataatatta

SEQ ID NO: 149 - DNA, 6018 bp, Artificial Sequence
  chemically treated genomic DNA (Homo sapiens)
tttatttttttattttttaggatagagttttgttttgtcgtttaggttcgagtgtagtggcgcgatttcggtttattgtaatatttgttttttaggtttaagagattttgttgttttagtttttcgagtagttgagattataggtttgtattattatgttcgtttaatttttgtatttttagtagggacggggttttatatgttggttttaaatttttgatttttagtgatttgtttgttttggttttttaaagtattgggattataggcgtgagttattgcgttcggttcggattttgttttttaaataatattatttagttttagatgtttggaaagatataaggaatttgaattatttttgtaattttagatggttttataaatattgtgaaatttagtattttaaatacggtttttgagttaaattttgtttagtttttattatgttttaaagattagttgtggttaggtatagtggtttacgtttgtaattttagtattttgggagggtgagacgggtggattatttgaggttaggagttcgagattagtttggttaatatagtgaaatttcgtttttattaaaaatataaaaattagtcgggtatggtggtataagtttgtaattttagttattcgggaggttgaggtaggagaattatttgaatttaggaggtggaggttgtaatgagttgagatcgtgttattgtattttaatttgggtgatagagtgagatttcgttttaaaaaaaaaaaaaaaagaaagataaaagattagttatgattaataaatataagtacgaagtggtttttgggttaagataagtttgttgtagatttttttttttttttttgagatatggttttattttgttatataggttggagtgtagtggtaggattatattataatttattcgggtttaagttatttttttagttttggtttttaagtagttaggattataggtgagtgttattacgtttggttaatttttttttgtaatttatagagatagggtttcgttatgttgtttaggttggttttaaatttttggttttaatagattttttagttttggttttttatagtgttgggattataggtgtgagttttgtttgtagagtttaggttttagagaatataaagatatttaaagtattttaattttttggaatattttttgggtattaagaataacgttattagaaataagtagtttgtttttagagaaattttaagtaagtataataaagggtaaagtgatataagataattgtggaatgtaagtaaatagtagtagttggtttgtatttttttaaatggtaaagttataaataatagtaattgtttttagagtgagtaggtagtttgttttttttttttttaaatggaatttattttttaagtgatgatatgtatttgggggtgggtaggtgtgagtttatttgtgttttgaaattttaaattaatgagtatgataaatcgttattgttggttttgtttgattttttattttgagtaattggtgggttttttttaatttttttttaatttttattttttttttttttttattgatttgggatagtttttgttaaagtgttaattatagtgggaaggaggagaaggggggaggttatagtgtatgggatttaaggttatagtgggcggagtaacggggattattaggtaagtaagttaagttttcgttgtttaagtttagttgtttgttacggtagtgtaatttttggcggacgatttaggacgcgttgacgcggtagtcgcgttatttttttttgtttgtatttatttgcgttgtttgaagtcgtgtgatttattaggatttagaggttgtttgattatattattgggttgtttgttgttttcgggttaggagattttggttggtttgaagggaagaagattagaggaagatttatcgaggatgggttttttttgttttttttcgggttggcgttgtttaggattcgttttttggtttcggtgtattcggttttttattgtgttagggatttgattggaagggcgggtttgttagcggatttggggttgttgattatatcgttgttggtgggttttttgaggatgcggatttgtggagggggtttcgggggaaaattattattttgaattataatgggtattttgggagatttgaattttttgttttttgtgtgatttttagttttttttttagacgtttattttttcgttgtttgtcgtttttttttagtttttagtaatttttttatattttattttattcgttattttttagatcgtttgtttttttatttttatattttttttgatttttgtagtatttaatattattatttgattttgattttttagatattattatatggtttttggttttttggtcgttttttttatttttttgttgttttaagttttgtttttagtttaagttttttattatcgaattttgttttgtgatttataatttaaaattaatttaattttttattttttttagattttttttggtaagtagtattattatgttttaggtggatattgagttatattgttgtggtagtgttggtatacgtagttttgaatattaggtttttgagtgaattttttttattttttttttttttttttattttcgttttttttttttgtttttatttttgattttttttttttggttttattagaaaaggattaattttattagttttgtttttttttttttgttttaataattttgttaagataatttttttaaagtataaggttaatgagaagggggaaagtcggtttagaaggtagtcggttcgattattttgagtttgaatttatttttggtggttttgttaaaatatagtttgaagtaaattatttgtttttatgtttttaatgtttattttgtcgaaagtttaaatttttttgtttggtatttaaggagattttaagtttttaaaatttttttttgatttttatgtaagttaaacggatttatttattgtattttaaatagtttttttatatttttttttttgtattttttgataatttttttgtgtttggaatattttttgtttttatttaagttttattattttttaagatataaaatatgtgtgatttttgaggtttttgtgaattgtttttagtatttattaagtaattaattttgtttttgaatttttatagtataaatttattcgtttatttgatatttaataaatattaatttttattatttattttttttttttttttttttttttgagatggagttttgttttgttatttaggttggattgtagtggcgcgattttcgtttattgtaatttttgtttttcgagattaagcgatttttttgttttagttttttaagtggttaggattataggcgttcgttacggggttcggttaatttttgtatttttagtagagataaggttttattattttggttaggttggtttcgaatttttaatttcgtgatttatttattttagttttttaaagtgttgggattataagcgtgagttatcgtgcgtagtttattatttatttttttatgtttatatttttttattgtttgagatttttttttatttagggttaagtattgagtttattagaaattttattgtatatgatttgatgaagatgagattatttttttaaaagttatatattaaattttttaagttaataatattggtaattaatttaaattaattgagtgattattatgtttaaggaagttttttttttggtaggttgggaagcgggagaagggaaggatataattttataaaaaaaaaaaagttgtagaagggaaggatataattttataaaaaaaggtttttgtttataaggagttaattatttattggttagagaagaaacgtgttttttttttgtaatggttgtgtttttgggtttagttaatttaattttttatgtttttaatttatgagatcgtattaaaaacgtttttgttatatttttgtgggaaagtaggtgagttagaatgagtgtataatatataagtatatattttaatgataatgaatgtgtagattaataaatttaaattttgtttttgtttttttgagagttttgttttgtcgtttaggttggagtgtaatggtatgattttggtttattgtagtttttgtttttcgggtttataggattgttttgttttagttttcggagtagagtagttgggattataggtgatcgttattacgttcgattaatttttgtagtttttagtagagacggcgttttttatgttggttaggttggttttgaatttttgattttaagtgatttattcgtttcggtttatttaaagtgatgggattataagcgtgagttatcgcgtttagttaaatttaaatattttaaaagcgtagagtaatcgttttttttttcgttaacggtaattagtattttcgttttttaattagaatagttgtatgtatcggtgtataagtttgttttaagtgttatttttaattttttttaaaaataggttttaaaataatttatttgggtataattttagcggttggtggagtgggtttaatatattaaatagttgttaattttggtttttttttggtaatagcgatacggagattcgtatttgtcgtagtttttatcgcgggcgggaagtgtaaatataagaaatataaatatagcgtaacggttaaaggagtgttatagcgttaaattttgttggtttcgcgttaggtcgagttttatttttttagttcgcggttaatatttttatttcgttttatagttcgtcgcgttcgcggggcgatattttttattttattatttcggaggtggtgcggtcgagtttcggatttaattggcggaagcggggtcggttgtgtgcgcgcgtataaatgttcggatgcgtcgcgacgattcgcgcgtttttttcgggcggtagggggcgcgtatcgaggtatcgcggcgagtttggttgtttttggggtttgtgtggttttgtgtgtcggaaagatggagtaagaagtcgagttcgaggggcggtcgcgatttttttgatcgagattttgttgttttcgtagttaggagtatcgttttttttcggattagtgcgtacgagcgtttagtgttttggttcggagagtggaatgattttcgaggtttagggcgtcgtgttttcgcgcgtttcgtgaaggaaattggggagttttgagggattttcgattttaagcgcgaaaatttcggatggtgaggagtaggtattggttcggtagcgagcggttatttttgggtttgggttttgacggtgttttttttatcgttggtttttagtttttgttcgttcgtagtttttgtgcggttcgtggttgggggttcggggcgcggggcgcggggtatggggtacgtggttttgcggaggttttgttggattggggttaggtagtcgtcgttagggaggagggcgggatttcggacggttttcgcggcggtgggggtgggggtggttcggaggttttcgcgggagtttagggtaaaggttacgggggtcgggggttgcggggtcgtttcggcgcgggaggttcggatgatcgtaggtgtttgtcgggttattagtgtgaacgttgcgcgtagtttgggcgggattgggtcggtttagtgggtaggttgatttagtttttttttttgagttggttaagtttagatacgtttcgaaattgtagtaaaaggagttaagttttgatttgtttttagttggggttatttaaattatgtatttttttagttgtgtttagtggcgattggagggtagatttgtgggtacggacgtacgttattttttttttgttgatttaggtaagtatcgatttgtttgtagttttagttttaattgttgtttatgttttttatatatgatgtattttttatagatgttttatgatttttagtttttatcgtgttttttttttttttgtagg

SEQ ID NO: 150 - DNA, 6018 bp, Artificial Sequence
  chemically treated genomic DNA (Homo sapiens)
tttataaggaaaaaaaagatacgatgaaaattggaaattatgaaatatttgtggaaaatatattatatataaagaatataaataatagttaaaattaaagttataagtaagtcggtgtttatttggattagtagagaaaaagtggcgtgcgttcgtgtttataggtttattttttaatcgttattgaatatagttgggaaaatgtatggtttaaatagttttagttggagataagttaggatttaattttttttattgtagtttcggaacgtgtttgaatttgattagtttaagaggaaaagttgagttaatttgtttattgaatcggtttaatttcgtttagattacgcgtagcgtttatattagtgattcgataggtatttgcgattattcggatttttcgcgtcgaagcggtttcgtagttttcggttttcgtgatttttattttgaattttcgcggagattttcgaattatttttatttttatcgtcgcgagagtcgttcgaaatttcgtttttttttttggcggcgattgtttagttttagtttaataaaattttcgtaaagttacgtgttttatgtttcgcgtttcgcgtttcgagtttttagttacgaatcgtataaaggttgcgaacgggtagaggttgggaattagcgatagaggggatatcgttagagtttagatttaaaagtgatcgttcgttgtcgggttagtatttgttttttattattcggggttttcgcgtttggagtcgggggttttttaagattttttagttttttttacggggcgcgcggaagtacgacgttttgggtttcggggattattttatttttcgggttagggtattgggcgttcgtacgtattaattcggggagggacggtgtttttggttgcgaaagtagtaggatttcggttagaggggtcgcggtcgtttttcgggttcggttttttgttttattttttcgatatatagggttatataggttttagaagtagttaagttcgtcgcggtgtttcggtgcgcgttttttatcgttcgaggggagcgcgcgggtcgtcgcggcgtattcgggtatttgtgcgcgcgtatataatcggtttcgttttcgttaattgggttcggggttcggtcgtattattttcgggatgatggagtggggggtgtcgtttcgcgggcgcggcgggttgtgaggcggggtgggggtgttggtcgcgagttgagagggtggggttcggtttggcgcggagttagtaaggtttggcgttgtgatatttttttagtcgttgcgttatgtttgtattttttgtgtttatatttttcgttcgcggtggaaattgcgataaatgcggattttcgtgtcgttgttattaaaaagaaattaaaattaatagttgtttaatatattaagtttattttattagtcgttggagttgtatttaaatgagttattttaaggtttgtttttaaaaaagattaaaaatagtatttaaggtaggtttatatatcggtgtatatagttgttttggttggagaacgaagatgttggttatcgttggcggggaggggagcggttattttgcgtttttagaatgtttgggtttggttgggcgcggtggtttacgtttgtaattttattattttgggtaggtcgaggcgggtggattatttgaggttaggagtttaagattaatttggttaatatgggaaacgtcgtttttattaaaaattataaaaattagtcgggcgtggtggcggttatttgtaattttagttattttatttcggaggttgaggtaggataattttgtgaattcgggaggtagaggttgtagtgagttaagattatgttattgtattttagtttgggcgatagggtaagatttttaaaaaaataaaaataaagtttgggtttgttaatttatatatttattattattaaaatatatatttatatattatgtatttattttgatttatttatttttttatagagatgtggtaaaaacgtttttgatgcggttttataaattgaggatataaagaattgagttagttaaatttaaaaatatagttattgtaaagaaggaatacgttttttttttggttagtaagtgattagttttttgtgaataaggatttttttttataaagttatattttttttttttgtagtttttttttttttataaagttatattttttttttttttcgttttttagtttattagaaaggaaatttttttaaatatagtggttatttagttgatttaagttgattgttaatattattaatttaagagatttaatatgtggtttttaaaaagataattttatttttattagattatatatagtggggtttttaatagatttagtgtttgattttggatgaaagaaaattttaagtagtgagaaaatgtaagtatgaaaagataagtgataggttgcgtacggtggtttacgtttgtaattttagtattttgggaggttgaggtgggtggattacgaggttaggagttcgagattagtttggttaagatggtgaaattttgtttttattaaaaatataaaaattagtcgggtttcgtggcgggcgtttgtaattttagttatttgggaggttgaggtagaagaatcgtttgatttcgggaggtagaggttgtagtgagcggagatcgcgttattgtagtttagtttgggtgatagagtaagattttattttagaagaaaaaaaaaaaaaaagagataagtgatagaggttgatatttgttaaatattaagtgaacgaatgggtttgtgttataaaagtttagagatagaattaattgtttagtaaatgttggaggtagtttataaaggttttagagattatatatattttgtgttttgaaagatggtgagatttaaataaaagtagagaatattttaggtataagaaaattattaaaaaatatagaaaggaaaatataagaggattgtttgagatataataaataaattcgtttgatttgtatgaaagttaagaagaagttttaagaatttggagtttttttaaatgttaagtaaggaaatttgggttttcgatagagtagatattagaagtataaaaataagtgatttgttttaaattgtattttaataggattattaagagtagatttaaatttagaatagtcgggtcggttgttttttggatcgattttttttttttttattggttttgtgttttgaaaaaattattttgataaaattattagagtagaaaaaaaaaggtagaattgataagattagtttttttttaatggaattagaaaagaagggttagaaatgaaggtagaagggagaagcgggggtgggggagagagagagaagtaaaaaggatttatttaagaatttggtatttaaaattacgtgtattagtattattatagtagtatgatttagtgtttatttaaagtatgatgatattgtttattaaaaaaagtttggagggaatgaaaagttgggttagttttaagttatgggttatagaatagaattcggtggtaaaaagtttaggttgggaatagagtttgaaatagtaaaggaatgagaggaacgattaaaaagttaaggattatatagtgatgtttgaaaaattagaattaggtaataatattgaatattgtaaaagttagagaaaatgtggaaataagaaagtaagcgatttggaaagtggcgagtaagatggaatatgaggaggttgttgagagttgggaggagacggtagatagcggggaaatagacgtttggaaaaaaaattgaagattatatagaaagtaggaaatttaaattttttaaagtgtttattgtgatttaggatgataattttttttcgggattttttttataggttcgtatttttaagaggtttattagtaacggtgtggttagtagttttaagttcgttagtaggttcgtttttttagttaagtttttggtatagtgggaagtcgagtatatcgaggttaggaagcggattttgggtagcgttaattcgaggagaagtaggagaaatttattttcgataggtttttttttgatttttttttttttaggttaattaggattttttaattcgaagatagtagatagtttaataatgtgattagatagtttttgggttttgatgggttatacggttttaaatagcgtagataaatgtaggtaagaagagatggcgcgattgtcgcgttaacgcgttttgggtcgttcgttaagggttgtattatcgtggtagatagttggatttgagtagcgggaatttgatttatttgtttggtgattttcgttgtttcgtttattgtgattttgaattttatgtattgtgatttttttttttttttttttttttattgtgattggtattttgataaggattgttttaagttaatggaaagggaaaaagggtgagggttaggagaaggttggggggaatttattaattatttagagtagagagttagatagggttagtaatagcggtttattatgtttattaatttgggattttaaaatataaatgaatttatatttatttatttttaagtgtatgttattatttaaaaagtgagttttatttgaaaaaaaagaaagtaaattatttgtttattttaaaagtagttgttgttgtttgtgattttgttatttaaaaaaatatagattagttgttgttgtttgtttgtattttatagttattttgtgttattttgttttttgttgtgtttatttgaagtttttttagaggtaaattgtttatttttagtagcgttgtttttgatgtttaagaggtgttttaagaggttgagatattttgagtgtttttatattttttgggatttaaattttgtaaataaggtttatatttgtaattttagtattgtgggaggttaaggttggaggatttattgaggttaagagtttgagattagtttgagtaatatggcgaaattttgtttttataaattgtaaaaaaaaattagttaggcgtggtggtatttatttatagttttagttatttgggagttagagttgggaggatggtttgagttcggataggttgtggtgtgattttgttattgtattttagtttatgtgatagagtgagattatgttttaaggggaaaaaaaaaagtttataatagatttattttgatttaagggttatttcgtatttgtatttattagttataattaattttttgttttttttttttttttttttttgagacggagttttattttgttatttaggttggagtgtagtggtacgattttagtttattgtagtttttattttttgggtttaagtgatttttttgttttagtttttcgagtagttgggattataagtttgtgttattatattcggttaatttttgtatttttagtagagacgggattttattatgttggttaggttggtttcgaatttttggttttaggtgatttattcgttttatttttttaaaatgttgggattataggcgtgagttattgtgtttggttataattaatttttaaagtatggtgaaaattaaataagatttagtttagaaatcgtgtttagaatgttgagttttataatatttatgagattatttaaaattatagaagtagtttaaattttttatgtttttttaaatatttggaattgaatagtgttatttaaaaggtaaaattcgggtcggacgtagtggtttacgtttgtaattttagtattttgggaggttaagataggtagattattgaaggttaggagtttgagattagtatgtaaaatttcgtttttgttaaaaatataaaaattaggcgggtatggtggtgtaagtttgtaattttagttgttcgggaggttgaggtagtagaattttttgaatttgggaggtagatgttgtagtgagtcgagatcgcgttattgtattcgagtttgggcggtagagtaagattttgttttggaaaataaaaaagtaaa

SEQ ID NO: 151 - DNA, 6106 bp, Artificial Sequence
  chemically treated genomic DNA (Homo sapiens)
gttgttgagggaattaagtatagtttatatgattttatagggaaaggatttttagaaatttttatatttgttttttattggatattgtcgtatatgttttttttttttatttatatgttttgtatttttttattgtaatatatgatagttatgaataagattatgagtttttttagtaaattattaaattagaagatttatatggtttttatattaatgaattttttaatattgtattaatattatatttttagaataaattatatttgattaaaatgtattagttttttaatgatgtgttatattgttattaatatttttatattttaattaatattaataattgatatttgtttataatttttttttttaattgtattaggtttaggtataaatgttatatttattttataaaaagtattagattttttttaattttttgaaatttttttttttataaggtgtaaaaatttttaaaattattgggattatttaggttttgaaattttgatataagttttttttgaaattatttgggtttaatgattgattttgaggaagtgttttgataaatttttttttttttgatagagaaattagtttatttaaattttttatatatagtagggtttatttgggtaaattatatttttgtaggaaattattattatattttttaaatatataatagagagattgtaggattttttaaatgtattatatgttatgttaatggttattttttttttgtttttttattatatatatattttagttaaggtagttagtaattggttttttttgaaaattttttattaaaaaatattatttttatttagtaattatgtgttttttaatttagataaattgataaagtaaatattgtttattttttgttttattgtttttttattttttttgtttgttttttttattttgtttaatatgaaaattttatttatttataatttgtatttttattaataaaagggtttagggttataaaattttttttggttatatttttgaatgtattataggtgttttgatatagaatatttttattatttatgatttttattaaaaaatatttttggattgtattttatttttaatttaagagtttaatttaaaaagggaaagaaaaatgatagaagtaggttaggtatagtggtttatatttggaattttagtattttggaagttgaggtaagaggatatttgagtataggagttataaattgttttgggtaatatagtgagattttgtttttataaattagttttaaaagttagttaattaatttggaaagatggtttgagtttgagaggttaaggttatagtgagttatgattgtgttattgtattgtagtttagaagatagagtgagattttattttaaaaaattatagaagtaataatattataattatatataattaaattatattgtaaatattaaaaattttatttgttttaaatttttatattaattatgtatagttgtaatagttgtatagtaaatagttgtatatagtttttattttttattagatattttattaaaaaagaatttaaaatttatgggaaaattttgtattttgtgttagaaatttagttttttggtttttttatttttatttgatggagggtaaagaattttattagtttgtaggttacgtagagataaattagaaaagaaatataaaatagaaatattttgtgtatagtatattgtttaaagatgagataaattggtttaaaaatgatatggtgtaatggagatatttaagagtttgttagtaatttttataggttttaagaggtttaaatagtttagaaatagaatagaatatgatttagtatatttttagagaatttaaaagtttttgtaaagtttatttaggaaatttttagggaaaaataaattttgtttttttttttatttggtaattttttatatttttagaataagtttgaaaattattttacgttggttttaatattttataaatttggtaatagtgataggagttatgttattttgatagttggatttgattaaattaagttagtggttattagtgtttgttaattttaatgatggtaggtagattttttaaagtggtaattattttgaacgtggtttattttttatttttttaaaaattaattaattaattaattaatttttgtttgtttttggtatttttagtaagtatttttttagtattttttgtatttttattttttttttttgtaaattgtttatatgtaattattaagtattttaatgataatttttgtttttattttcgttattttattttttttttgttagtgattttttttttaatattacgtatttattttatatagatcgttttaaaatttttttattttttattttttttagtttttttttagtaattggttagttaataagtttttttgattaagttattattttttattggaattgttgtaatagttttttgattggtttttttgatttttgtttttgttttttatagtttatttttaataagataattagtgtgataaagtaattaattaattagttaatattgttttttttatgatgaaatgtttttattttaatggtttttgttgtttttaagagttaaagagaaattattaaaatagttattaatgtttatattttagttttttaatatattatattaatatattatatattaaatgttatatatataattaattatatataatataattatatgtattatttatatattaatataaattaatataatataattatatattatattaatataattatatattaaatatattatattaaatattaaatatattatattatattgattatataattattataaattaattatatataattattataaattaattatatataattattataaattaattatatataattattataaattaattatatataattattataaattaattatatataatataattatatatataaagtttttatatattaaatattatatatttataatattatatatataatatttatattttttttattttttatagtattttatattatttgtggttttattggagttattgtattgaatttgttgttttttatttaagttaaattttttgtttatagtgaaaggaatagagaaagatgtagggagattttttgaaattattgttatagaataaaagatgaaatgtttttaattattgtaaatataaaattgtatgtagtattgtgtaaagataatgttaggttggattgttagaatgagttaatagcgcgtgacgtgtttttttttgtagagagtttatgaatggacgtgcggttagggaggttttatattattaagatttttattttagaaaagtagatgtttatagttttaggaatggaatgcgatttttgtggagagtttataaacggatgtatggggcgggggggtgtttgtttatatggataagatagggttataaacgtttttattttgttatggtttttttatatttttttagggttaaggtatatttttttttgagaatttttcgtttaattagttgtttatttttacgttttatttttatggattgtttgtaattagtttttgttgtaattgttattgttgattaatattttgttaattataggttatggaaagattgtgtttttgttttaaggttttgttagaaattattaatatatatattatattgtaaatttttatttttgtatattgtatttttttatataaatgtattgtatttttatatataaatgttatgttaaagaattattttatttttatgtgattattttattttataattaaatgattttaaattttttattaatttatttttgtttttattaaatttaataataaatgttggtatatttagtgtattgttggtatcgtgggattagaaggtagtgatttttttggatttagtttttattattttgtgtgtgtttattattttttaatttgtcgattcgtttaagaataaagagagagtttcgttgtattgtaggttgttggttagattttataatatatatatagattttaaaatgtatttttaatttttaaaagattttggttatttattattattttgtttatttttttgtaattgagaaaagtatttgttaatttattttttttttttgtgatagtttagttatttataaagttttattttatattttatttttttttttaatttgtgttaaaatattgtgaaaattaatatttttttggaatataatttttttattataaattaaatattgatataattgtaaagtaaataaatgaatttttataaagttaatttatttttatattttttatatttattattttaaatttttgttatatttttaattttgtttgaaatattatatggtattttaaattgaaatttattaattattttttagttagtggataaagagaaattaaaaatttgaataaattaatttaatttttattttattttttatttgaaggtttttttagtaatttattaaaagaagttttttttttttttttttttttttttagtttagattttaatttttattttgtttattttggttaaattttttaattttggttattttttaattatattttaatttttaagttatgtaatttttcgaggtttttgtttgtttttttaattgtttattaagacgttttatattttagtaaaaagattatatatatttttttaatgttttggagttatagttatgtatttaaaatttattttatttttatttttattttttttttatttaaatttatttttgggtttttattgattagtgtttttaagtttgtttgttttagtttatgtagttttttttttggtattgggataaatatttgtattattattttaaaggttattattattttttatttgtgaagagtagaatatgaagaaatttattttatttagatattttttagatttttaaagattagagattattttttatttttttaggagtatttattttaggaagtaattagataaaaggtaaggtataaatattttttttaattgtttgtattttataaatttaattttatgaatatatttgttttgattagaagtttgtaattaaatttaattagaattaagaatttttttggttttattttagtaaaaaaaattagtgtaaatagggggagaaaaataagatttttttgtcgtattttttagttaatttttaagataaaaattttgaaataattttttatttatttttttttttaagagttttaaagttattatatttatatttaaattttattattcgataaatgtgtatgtgtaaatattatatgtatgtgtgtatatatttatgtattagatatatatatatgatattgtacgttaagttatgtttttgtttgaagattgtatgtttatgtatggttataggaatatttttattttatgtatttttttagagttgaattattttttttttatgaaaaagtatggttaatatttaagaataaggtagaaagtattttttttaaatatttaaattatttgttttaaaaataatttattgaagaattatttttattttatttaattatttaaattaagaaataagattaataatttagagagattattaattatttaatttttatttggaaaagattattataattttgatttaatattttatttgtataggaaatgattattatgtaaatttgattttgatttaattaatgtaggatttttagatttgagttattcgattttgatacgattttttgtttttatttttaaagttttagtatttttaatgtttattaagttttataatgaaatttagtaatgataaatgttttattttataaagtttattttaaatgtttaaggttttattattattttattgtttatttttagaaatatttcgagtgttatgttgtttgaaaagaagttaaataagtatatattagatttattttatgtaaatattttttttagttaaaagtttttttattttggttaaatttataa

SEQ ID NO: 152 - DNA, 6106 bp, Artificial Sequence
  chemically treated genomic DNA (Homo sapiens)
ttgtaagtttgattaggatagaaagatttttggttgaaagaaatatttgtataaagtaaatttgatatatatttatttaatttttttttaagtaatatgatattcgagatatttttaaagataaatagtgagatgatgataaaattttagatatttgaaatgaattttataaaatgaaatatttattattattaagttttattatgaaatttgataagtattgaggatattaaggttttgaaaatgaaaataaagaatcgtattagaatcgagtagtttaaatttaaaaattttatattaattaaattaaaattaagtttgtatagtaattattttttatgtaagtagaatattgaattaaagttatgatagttttttttaaatagaaattaaataattaataatttttttaaattgttagttttgttttttagtttaaatgattgggtggggtagaaataattttttaatagattatttttagaataagtagtttaaatatttaaaggaaatgttttttgttttgtttttaagtgttaattatgtttttttatagaaaggaaatgatttagttttaaaaaagtatatgaagtaaaaatatttttgtaattatatataaatatatagtttttaaatagaaatatggtttggcgtataatgttatatatatgtatttgatatatagatatatgtatatatatatataatatttatatatatatatttatcgaataataggatttaaatgtgaatataatggttttggaatttttaagaaaggaagtaagtagggagttattttaaagtttttattttagaagttaattaaaaaatgcggtaaaaaaattttatttttttttttttatttatattaattttttttattgagatgaaattaaagaaatttttaattttaattaaatttgattgtaaatttttagttaagataaatatatttataagattagatttgtaaaatataaataattagaaagagtatttgtattttattttttatttggttgttttttgaagtgagtatttttaggagaatgagaaatgatttttaatttttaggaatttggagaatatttgaataaagtagatttttttatgttttattttttataggtaaagagtaatgatagtttttaaaatggtaatataagtgtttattttagtattagaggaggagttatatgaattaaggtaggtaggtttgaaagtattaattagtgaaaatttaaggataagtttgggtggaggaagggtgggagtagagataaaataaattttgagtatatgattatggttttaaagtattgaagaaatatgtgtgatttttttgttaaggtgtaggacgttttaatgagtagttgaaaaaataaataaaaatttcgaagagttatatggtttagggattggggtataattgaaaaatagttagagttgagaagtttagttagaataggtagaatgaagattagaatttaagttaaaaaaaaaaaaaaaaaagagagagattttttttggtaggttattgggaagatttttaaatgagaagtgaagtaaaaattgaattaatttgtttaaatttttaatttttttttatttattggttaaaaaataattagtaaattttaatttaaaatattatatgatattttaaataaaattgaaaatgtaataagaatttgaagtaataagtatggaaaatataaagataaattagttttatggaaatttatttgtttattttgtaattatattagtatttaatttataatgaaaaagttgtgttttaaagaaatgttaatttttataatgttttagtataaattgaaggaaggagtaaagtataaaataaaattttgtaaatgattgagttgttatagagagaaaaaatgagttgataaatattttttttaattatagaaaagtagatagaatagtgataagtaattaaaattttttaagagttaagaatgtattttggaatttgtgtatgtattgtgggatttggttagtagtttgtaatgtaacggggttttttttttgtttttaggcggatcggtaggttgagaaataatagatatatataagatagtgaaagttgggtttaggggggttattattttttggttttacggtgttaataatgtattggatatattagtatttattattaagtttagtgagggtaggggtaggttagtgagggatttagggttatttgattatgaggtgagatggttatatggggatgaagtaattttttaatataatatttgtatatagaagtatagtatatttgtatggagaagtatagtatatagagataagaatttataatatagtgtgtgtgttagtaatttttaatagagttttaaaatagaaatataatttttttataatttatgattagtaagatattaattagtagtaatagttgtaataaaagttggttataaataatttatggaaataggacgtgaagatagataattggttagacgagaaatttttagaaaggagtatgttttaattttaaagaggtgtagaagagttatggtaagatgaggacgtttatagttttattttatttatatggataggtattttttcgttttatgtattcgtttataggttttttataagggtcgtattttatttttagagttatgaatatttgtttttttgggataggaattttggtgatgtgaaatttttttgatcgtacgtttatttataggttttttgtagggggaagtacgttacgcgttgttggtttattttggtagtttaatttggtattgtttttatataatattgtatgtaattttgtatttataataattaggagtattttattttttattttgtagtaatagttttagggggtttttttatatttttttttattttttttattgtgagtaaaaagtttgatttaagtaaaaggtagtaaatttaatgtaataattttagtgaagttataggtagtgtgaaatgttataaaggatgagggaaatataaatattatatatataatattataaatatataatatttaatatataaggattttatatatataattatattatatataattaatttataataattatatataattaatttataataattatatataattaatttataataattatatataattaatttataataattatatataattaatttataataattatataattaatataatataatatatttaatatttaatataatatatttaatatataattatattaatataatatataattatattatattaatttatattaatatataaataatatatataattatattatatataattaattatatatataatatttaatatataatatattaatataatatattaaaggattagaatgtgggtattaatagttattttaataatttttttttaatttttagagataatagaagttattggaatagaagtattttattataggaaggataatattgattgattgattgattgttttgttatattagttgttttgttaggaataaattgtagagggtaagggtaaaaattagaaaggttagttaagagattattgtaataattttagtgagagatggtgatttgattagaaaggtttattaattgattaattattgaagggaagttggagggaatggagaatggaaaagttttgaaacggtttgtatggagtaagtgcgtgatattggaaggaaagttattgataaggagagaatagagtaacggaaataaagataggaattattattaaaatatttgatgattgtatataggtaatttgtaaagaggaagagtaggaatataaagaatattaagagaatatttgttagaagtgttaaaaataggtaaaaattaattgattaattaattaatttttaaaaaaataaaaaataaattacgtttagagtgattattattttgggaaatttgtttattattattaaaattgatagatattggtggttattaatttagtttagttaggtttaattgttagaatgatatgatttttgttattgttgttagatttgtgggatattggagttaacgtaaaatggtttttaagtttattttgagaatatagaaagttattaaataaaaagaggagtaaagtttgtttttttttgaagattttttgagtgagttttataaaaatttttgaattttttgaaaatatattgaattatgttttgttttgtttttgaattgtttgaattttttgggatttgtaggaattgttaataagtttttaaatgtttttattgtattatattatttttagattaatttattttatttttgggtaatgtgttatatataaaatatttttgttttatgttttttttttaatttgtttttgcgtagtttgtaaattagtgaagttttttgttttttattagataggaataagaaagttaagaaattaagtttttaatataaagtgtaaggtttttttataaattttaagtttttttttgataagatgtttagtgagaagtgaaggttatatatagttgtttattgtataattgttatagttgtatatgattagtgtagaaatttaaaataagtaaaatttttggtatttgtaatgtagtttaattgtgtataattatgatattattatttttatgattttttaagatagggttttattttgttttttaggttgtagtgtagtggtatagttatggtttattatagttttgattttttaggtttaagttatttttttaaattagttggttaatttttaaaattggtttgtggaaatagagttttattatgttgtttagggtagtttgtaatttttgtgtttaagtatttttttgttttagtttttaaagtgttggaattttaggtgtgagttattgtgtttggtttatttttattatttttttttttttttttaaattaaatttttgggttaaaggtaaaatataatttaaaagtgttttttaataaaaattatggataatggaggtattttatattaggatatttgtaatatatttaagaatgtagttagaaaaagttttatagttttaaatttttttattaataaaaatataaattataaatgaatgaaatttttatgttaaataagataagaaaaataaatagaaaaaataaaggaataataaagtaaaaaataaataatatttgttttattaatttatttaaattgagaaatatataattattaaataaaaataatattttttggtaaaaaatttttaagagagattaattattagttattttaattgaggtatatgtataataaaaggataaggaggaagtaattattgatatgatatatgatgtatttaaaaaattttataatttttttgttatatatttgaaagatataatgataattttttatagaaatataatttgtttaaataggttttattatatgtaaaaaatttaaataagttaatttttttattaggaaaagaaaaatttattaagatatttttttaaaattaattattaagtttagatgattttaaggaagatttgtattaaaattttaaagtttggatagttttaatgattttgaaaatttttgtattttataaaaaagaaaattttaaaaaattaaggaaaatttaatattttttgtaaagtaagtatgatatttatatttaaatttaatatagttagaaaagaaaattatagataaatattagttattaatattgattgaaatgtaaaaatattagtaataatataatatattattaagaaattgatatattttgattaagtgtgatttattttgggaatatgatattgatataatattaggaaatttattgatataaaaattatatgaattttttggtttgatgatttgttaggaggatttatagttttatttatggttattatatattatagtaaaaggatgtaaagtatataagtaaagggaaaaggtatatgcggtaatgtttagtgaaaaataagtatgaaagtttttaggagttttttttttgtggaattatatgggttgtgtttaatttttttagtaat

SEQ ID NO: 153 - DNA, 11327 bp, Artificial Sequence
  chemically treated genomic DNA (Homo sapiens)
atgattttattgtggtaatggaaatggaagaatgtaatttaagagttatttgtttttttattttttatttttgagatagagttttgttttgttatttaggttggagtgtagtggtgtaattttggtttattgtaattttcgtttttcggatttaagttatttttttgtattagttttttgagtagttggaattatagatgtttattatattcggttaatttttttaatttttaggaaaaacggggttttattatgttatttaggttggttttaaatttttaatttaggtgatttatttatttcggttttttaaagtgttgggattataggtatgagttatcgcgttcggtttttaagagttatttagaatttttttaaaaattagaatgtgacggatgagagatgaaaggtagatgttaaagatagtttaagttttatttttaaggaaaattaggataagttagtttgggtattggttgatgggtttagttgtgaatatgttgagttaggagtatttgataaatttaaagggagatgttttgaacgtaggtggatgtgaagagatggttgggttaaggataaaatattgagaatggttagtatggattaggagtttttagaaagtgagaatagagatagaataacgaggattataaatattaagggataggtagaatttattttttttttattttaaaaagattttaatggggtttgaggaaaaaataaataaataaagaaggggaggtagaggtagaggtggtagggagaagaaattagtaaataaaatagggatagggtcgggtatagtggtttatgtttgtgattttagtattttgaggggattatttgatgttaggagtttaagattagtttggttaatatggtgaaattttgtttttattaaaaataataaaaattagtcgagcgtggtggtacgtgtttgtaattttagatattcgggaggttgaggtagaagaatcgtttgaattcggcgggtagaggttgtagtgagtcgagattatgttattttatttcggtttgggtgaaagagcgagattttattttaaaaaaaaaaaaaagggggataggggttaagcgtggtggtttatatttgtaattttagtattttgggaggtcgaagtgggtagattatttgagtttaggagttcgagattagtttggttaatgtggtgaaattttatttttattaaaaatataaaaattagttagatgtggtggtgggtttttgtaattttagttatttaggaggttgagataggagaattattggaattcgggaggtagaggttgtagtgagttgagatcgtgttattgtatttcggtttaggtaataaagagtgaaattttattttaaaaaaaaaaataataatggtatagggttaggtatggtggtttatatttgtgattttagttttttgggaggtggaggttggaggattttttgagtttaggagtttgagattagtttgggtaatatagggagattttatttttataaaaaataaaaaaattagtttgttatagtagcgtgtagatgtagttttagttatttgggaggttgaggtgggaggatggtttgagtttaggaattttagattagtttgggtaatatagtaagattttatttttataaaaaataaaaattagttatgcgtggtggtgtatgttagtagttttagttattttggaggttgaggtgggagaattattggagtttgggaggcggaggttgtagtgagtgaaattatattattgttttttagtttgggttatagaataagattttgttttaaaaataagtaaataaatgaggataatattaagaaaaaagaatatttagaggtgattaagattattaaatattatagaggttgaggtttgtaggtggttaatgtttttggttgaagtttttttaattagagttagattagtagaagaatgagttgaagtggaagggaggaggaaaggttgggttttttttttatagatttttaagtaagttttaaggtttcggaggttttagagtgatttagaatagattggattatttttaagaagtagggagttttagtgattaaattgcggtttgggaagtttggtattttgagtttagatattaaatttttatttttaagtaggaagggggaaaagttatttaattttttttggttttagtttttttattattaaataggaaaaaaataataatatcgttttgttgggttggtattgggattaaaattttaagagttaggggtcgggtgtaggggtttacgtttgtaattttagtattttgggaggtggaggtaggcggattacgaggttaggagttcgagattagtttggttaatatagtgaaattttatttttattaaaaatataaaaaaatatattatattaggcgtggtggtgggtgtttggaatttaagttatttgggaggttgaggtaggagaatcgtttgaattcgggaggtagaggttgtagtgagttaagatcgcgttattgtattttagttttggtgatcgtgagagattttattttagaaaaaaaaaaaagttagggttttgtttcgtcgtttaggttggagtgtaatggtgcgattatagtttattgttgttttgattttttgggtttaagggatttttttattttagttttttgagtagttgggattataagtatatattattatatttggttaattttttaaaaaaattttttgttttttgagatggagttttgttttgttatttaggttggaatgtagtgatataatttcggtttattgtaattttcgttttttagatttaagtaattttggtgttttagtcgtttgagtagttgggattataggcgtatatgattatatttgtttagtttttgtatttttagtagagatggtgttttattatgttggttaggttggtttggaatttttgattttaggtgatttatttgttttggttttttaaagtgttgggattataggtgtgaattatttcgtttggttaaaaaatttttttttttttgtagagatggaggttttgttatgttgtttaggttggtttttattttttggtttttaatgaatttttattttagttttttaaagtgttgggattataagcgtgtattatgacgtttagttaattttatttgttgtagagatggggatttttttattttgttcgggttggttttgattttttaagtttaagtaatttttttgttttttaaagtgttgatttttaaagtgttgggattataggtttgagttattatatttagttgtaagttcgattttttaaatgtattttttttttgtttttttttttttttttttttttttttttttttttgagacgtagttttattttgtcgtttagattggagtgtagtggcgcgatttcggtttattgtaggtttcgtttttcgggtttatattatttttttgttttagtttttcgagtagttgggattataggcgttcgttattattttcgggtaattttttgtgtttttagtagagacggggttttatcgcgttagttaggatggtttcgattttttgattttttgattcgttcgtttcggttttttaaagtgcgggattataggtttgagttatcgcgtttagttttttttttttttgatagggttttgttttgtcgtttaggtcgaattgtagtggggcgattacggtttattgtatttttaattttttggttttttaaagtattgggattatagacgggagttaacgtttcggttagtttttttaacgttgagagttttggtttttagataggatttagtatttttattgttttaatttttttttttttattattttcgggttggttcggataatttttaaggtggtcgagggcgggttttgaggaggtcggcgcgcgttttcgggtatagtttgtggcggtgaagtcgtttagatggcggaggttttgggtatttttaagtagatcgttaggtcgtagatttcggagttcgttttgggttatttttatttattttttttgagacggagtttttttttgtcgtttacgttgtagtgtaatggcgcgatttcggtttattgtaagtttcgttttttagatttaagtaattttttgttttagtttttcgagtggttgggattataggcgttcgttattacgttcggttaatttttgtatttttagtagaaacggggttttattattttggttaggttggttttgaatttttgatttcgtgatttacgcgtttcggttttttaaagtgtgggaattaaaggcgtgaattatcgcgttcggtttgggttatttttcgagtatatagtttttttttttttttttttttttaggtttttattgtttcgattcgtaggtcgtagataaggttgagagcgttattttgttttttcgcgttcgtttcggtgtttattgcgtttgcgcgagttgtgagggcgggatttagagatattcgttttaattattggcgtgcgttttttgttgtcgtttaacggaatttcgggcgcgcgtgcgtacgtattttaagttacgtttcgttaggttgtcggcgcgcgagcggttggcgtcgttttttgtttttttttttttatagtggggcggggtcgggtcgttcgagtcgggggtggaaggcgggggttatataatgttacgttttcgtttcgtttttatttgaagtttcgcgattttttattgttggttaattagagttcgtgttttttttagtgtcggttaatgggaggtgcgttcgggttgttttcggtttcgcgtttcgttcgtttttttttaaggttttttcgcgattggcgggacgtaggggcgggcgtcggtcgcggtgacgcgtagcgggtttggagttaataaggggcgggttcggtgttgatggacggtgttggtggttagtggagaggcgttggtcgtatttttcgtcggggagagagtgtaatatggcgaagatttacgattatttgtttaagttgttgttgatcggggattcgggggtggggaagatttgtgttttgtttcgttttttcgaggacgtttttaattttatttttatttttattataggtaacgggatcggggaatggttgggggcgtcggaggttcgggttgggcgcgtttttgaggggttggggttgagggatttatagggttggacgggtcgagggcgttgagagggtcgagggggtttaaagggagaagagtagtcgtttgtatcgtcgttcgggggtttttgggtcgtggtgggggagattaggtgtttattttgtagatagggagattgaggtttcgatttttagttcgttcgttagggcgtgttatgttttgggttggggttttcgcgttcgttttttcgatttgttttagtagtagttttcgaagcggtttttttgaggtttttgttttatagaagtggaaattgagttatggggaattggttatgggaaaaagatagtggtattttattttaatgagtatttattatgtgttaagtgttttacgtgtatttttatattttttagtttttggtgttaagtgttgttatgagttcgtttgataagatgaggaatttgaggtttagggagggtatggaatttgtttaaggttatatagtttgtacgtggtgagaatgggatttgatggaatttgaatttggttgtgttttaatttaaaattcgaggtttagtttttttagagagatgttattgtatatttttagttgatgataagtttagttaatgtattttggagtcgggattttaatttatattatttttgtttttttttttggagcgtttagaggttgagtttttttttttgattatgtttttttttataagcgtatttttttttagaaggaatgataagaagagttaggattttttttttgtttattttttattttgttttaggaatgatagtaatggtaagtgatagtattgtttgtttttgggatttgttatttttaagaagatgtaagataaaagttttagcgagaaattaaattagttattgttatagatagttttgatttttttattaaagggtttaagattttagttgttattttagaatagttttttttgtagggttagtttatattgtggttgaatagaattggtttggtgtattttagttgtgatgtttatagaagtggagttgattttttttagtgttataaaagtagttttggtttataatgaaaaggtttgatttaggagtaatatttatttgagtggtttgtgagttttgtagttttgttagggatggggaaagtgggggaacggttattaagtttaggagtttatttcgatttaagaaaatttagggaatggtttttgttttattgtgttattttgatagaatcgtgttatttttttgaattttaagataatgtgttaattttatttttgtttttttttaggagttatgttttatttattttattttattttattttttgagacggagtttagtttttttgtttaggttggaatttagcggtaggatttcgggttattataatttttgtttttcgggtttaagtaatttttttgttttagtttttttagtagttgggattataggtattcgttattacgtttagttaatttttgtatttttagtaaatatagggttttattgtgttggttaggttggtttcgaatttttgattttgtgatttgtttgttttggtattttaaagtgttgggattataagtatgagttatcgtatttagcggagttgtgttttataaaatagttatatgttagatgtaaaatagagagaattgattggaaattattacgtttggtttttagttgttgtttgtttttgaatgtgtattatttttttttgagttttgttgtttttagagtaggagtgatattgtttgtttagtttagtgttttggtggttgaggattagaattagataataaggggttgttattataattagaggttatttagaggaagtaaatgaatggtttttgtagtgatagtatttagtttttgaagatagatgtttttgaattttttttttttttttattttaaggttaaattttagggtaatttttgtgttttaattaattaagaagtggcgttaatttagtttgggtaatatggtaaattttatttttataaaaaataaaataaaattagtcgggtatagtggtttatttatgtagatttagttatttgggaggttaaggtgggaggatcgattgagtttaggaggttaaggtgtagtgagttgtgatggtgttattgtattttagtttgggtaatagagcgagattttgttttaaaaaataataataaaaataaaagaaagaaagaaatgatgttaattgtgagtagattggtttgtatttatttagattttagttttttagttttttttataaatttttttttttttttttttttttttttgagatagtttttttttgttatttagtttggagtgtagtggcgcgatttcggtttattgtaatttttattttttaggttttagcgatttttttgttttagttttttaagtagttgggattataagtatttgttattatgtttagttaatttttgtatttttttttttttttttttagtagagatggggttttattatgttggttaggttggtttcgaatttttgatttcgtgatcgtttattttggttttttaaagtgttggggattataagtatgagttatcgcgtttagtttaatttttttttttagagttattttgagttttaaagaggtttttttttatttgtagatgaggatgtgatttggtgaaagttatttagtaaggtggaggtggtatttgattttaagattttttttttttatttttttatttttttttttttatttgtagttttttgttttttaggaaagtttaatttattatgattttgaaggttagattttataatttttaggttttataaagtttatattttttaattaaatttggtatgttaataaaatttagaggagtgtagggcggagtgttgttgtggagtttggttaatttaatagtgtttttcgattttttgtgtttttgtatacgtgtgataggaaatggggaatgttttaggaagtttaggtatattgggttgtttagttttgaagtagtattattttaatgtttaaaggtgattttataaattagttatacgtggtggcgtttgtttgtatttttagttatttaggaggttgaggtaggagaatcgtttgaatttaggaggtagaggttgtagtgagttaagattgtgttagtgtattttagtttgggtaatagagtaaaattttgtttttaaaaaaaaaaagaagtaattttatattggttgagtgtatttttgggttttttttatagataaggattgagtggttatttattttttgttatttaatttttaatattttgttaaaagttatattttattaaagtttatttttagaagttttatagattatttgtggtgtgaatttggttttgtagttttttggaatgggtttttattagtttggttcggcgttattgtttttttaggggtttattgatttttttagtgaaagggttggtatttgagaaagtgttttgtgaatcgtttaatatcgcgtagattttgttgcgttttaatattttgatttagttatattttgttagtgttttttgtgggttaggtagttattttggtaagagggttgtagaaaggatataggtgagttaaggtgcgtgtaggattggggtattagtttttagtaaatgtgtatttaatttttgtgtgtttagttattggaggtaatagtagtggatgagatttgttagttttttgttttagggagtttacgtttgagagggcgaaagtttagtgttggggttggatggatggaattagtatttttattttgggtttagagaggtttagttaggtttgggttttaagttttttttagtaggtatttgaataaatttttggtggtaaaggttgggtttggttgttttttatttatatgggttattatgatttgtaagtattatgtttaggtttatgtagtagatatatatatgtatgttagttatgttaataaataggtaaagggagaattgatgaggatggttagaaaggtttttttgaggagggaatttgaatgggaatttgaataaagggatagttaggtagttatagaagaaagaattttttagggtagggaagagtaaatattaaagtttcgagttaggagtatgtttggaatgttgaggaaatcgttgtgtggatggtgtggttagagagagtaggttatgagttagagtgttgagaggtgattaggttaggtaggattttgatatatatgagtagttgtttttattttattcgagggaagtggggtagggaagttattgaaagaggttttaaaaaaaaatagttttatgagatagaattcgtatatagtttatttatttgtagtgtataatttagtggttttgggtatatttatagagttttataattattattataggtaatttgggaatatttttattatgttaaaaagatattaatttaaggttaggtacgtacggtggtatagtggtttacgtttgtaattttagtattttgggaggttgaggtgggtagattacgaggttaagagatcgagaatagtttggttaatatggtgaaattttgtttttattaaaaatagaaaaattagttgggtatggtggcgcgtgtcggtagttttagttatttgggaggttgtggtaggagaattatttgaattcgggaggtagaggttgtagtgagttaagattgtattattgtattttaggttagttaagatcgtattattgtattttaggttagttaagatcgtattattgtattttagtttggtgatagagaaattttattttaaaaaaaaaaaaaaaaaggatattaatttttttagtttttttatgtgtttttttagttttagataattgttaattagttttttgtttttatgaatgagtttatgttggatatgtttgttaatggaattttatattaagtgatttttagtgtttggttttttttagtattttgtttttaaggtttatttatattgtatagtatggatgagtatttcgtttttttttatgattgggttatattttgttgtatggttggattatattttgtttatttatttatttgttggtggatatattagaaagtttggagtagagggtcgggtgcggtggttgatgtttataattttagtattttgggaggttgaggtaggtagattatttgaggttaggagtttgagattagtttggttaatacggtgaaattttatttttattaaaaatttaaaaattggtcgggtattgtggtaggtatttgtggttttagttattcgggaggttgaggtaggagaattatttgaatttgggagatagaggttgtagtgagttaagattgtgttattgtattttagtttgggcgatagagcgagattttattttaaaaaaaaaaaaagaaagtaagtttggagtagaggttagttgtgtaatatggttagggttatatttttgaaggttggggaggggattgcgggtgaatagtgggagtttggggaatattaaggtggttgcgaggttatcgtggggaaaggggatgaaagcgggaggtgagagataaggaagatggggttaggaaggtttgttaggaggtgatttttaagggggttttaaaggaggagaagtgtgtttagttgacgggttagtgggatatagattattcgtagaaaatgaatagtatgtataaaagttgggggtaggagagaacgtgattatgtgtattgacgtatggtggggtttaaggttttgtgtgtttgggggttggttagttgtagggtgttggggagtaagggatttaggtttgtagagggttttgttgagatttatttcgtataattgtttggggtggggaggcgggtttagttggtagtaagggataagagtagggttttgttattcgcgttttttgggtttgttttgtattgtttttattagtttttggagagggaaaatatttttaagtgtttttagatttggatatttcgatattttgtatgtttagtattaggtagggttttcgtaagttataatagttgttatttgtataggttggtggcgtttagtttagatataatttgggaaatgggttgatagtgacgtgttttttttttttttttttttagg

SEQ ID NO: 154 - DNA, 11327 bp, Artificial Sequence
  chemically treated genomic DNA (Homo sapiens)
tttgaaagaaaaaagaaaaaaggtacgttattgttagtttattttttaagttgtgtttgagttgggcgttattaatttgtgtaggtgatagttgttgtggtttacggagattttgtttggtgttgggtatgtaggatgtcggaatatttagatttggaaatatttggagatattttttttttttaagagttgatgggagtagtgtagagtaaatttagggggcgcgggtggtaaagttttgtttttgttttttgttgttagttgaattcgtttttttattttaggtagttgtacggagtgggttttaatagagttttttgtaggtttgagttttttgttttttaatattttgtagttgattaatttttaggtatatagggttttaggttttattatgcgttaatgtatatggttacgtttttttttgtttttagtttttgtatatgttatttattttttgcgggtggtttgtgttttattggttcgttagttaggtatatttttttttttttaaggtttttttgaagattattttttaataagtttttttgattttattttttttgttttttatttttcgtttttattttttttttttacggtgatttcgtagttattttgatgttttttaggtttttattgtttattcgtagttttttttttagtttttaaaaatataattttaattatgttatatagttaatttttgttttaaatttattttttttttttttttttgagatggagtttcgttttgtcgtttaggttggagtgtagtggtataattttggtttattgtagtttttgttttttaggtttaagtgatttttttgttttagtttttcgagtagttgggattataggtgtttgttataatgttcggttaatttttgagtttttagtagagatggggttttatcgtgttggttaggttggttttaaatttttgattttaaatgatttgtttgttttagttttttaaagtgttgggattataggtattagttatcgtattcggttttttgttttaaattttttagtatgtttattaatagatgaatggatgaataaaatgtggtttaattatataatagaatatgatttagttataaaaaggaacggagtatttatttatgttatataatgtggatgaattttgaagataggatgttgagagaagttagatattaaaggttatttagtgtgagattttattaatagatatgtttagtataggtttatttatagaaatagaaagttgattagtagttgtttggggttgggggggtatatggggaaattggaagggttggtattttttttttttttttttttgagatggagtttttttgttattaggttggagtgtagtggtgcgattttggttagtttggagtgtagtggtgcgattttggttagtttggagtgtagtggtgtaattttggtttattgtaatttttgtttttcgggtttaagtgatttttttgttatagttttttaagtagttgggattgtcggtacgcgttattatgtttagttaatttttttatttttagtagagatagggttttattatgttggttaggttgttttcgattttttgatttcgtgatttgtttattttagttttttaaagtattgggattataggcgtgagttattgtgttatcgtgcgtgtttggttttgggttggtgtttttttggtataataaaaatgtttttaaattgtttgtggtgatggttgtggaattttgtgaatgtatttaaagttattgaattgtatattgtaaatgggtgaattgtatgcgaattttattttataaagttatttttttttaaagttttttttagtggtttttttgttttatttttttcgaataaagtggaaatagttgtttatgtgtgttaaggttttgtttaatttggttattttttagtattttggtttatgatttgttttttttggttatattatttatatagcgatttttttaatattttaagtatgtttttgattcggggttttgatgtttgtttttttttgttttggaaagtttttttttttgtagttatttggttatttttttgtttaggtttttatttaagttttttttttaggggaatttttttgattatttttattagttttttttttatttatttattaatataattgatatatatgtatgtatttgttgtatggatttgggtataatgtttgtagattataatggtttatgtagatgagaaatagttagatttagtttttgttattaggagtttgtttaagtgtttgttggggaagatttgaggtttaggtttggttgggtttttttgaatttagggtggggatgttaattttatttatttagttttagtattggattttcgtttttttaaacgtaagttttttggggtagggaattgataagttttatttattgttattatttttagtgattgaatatataggggttgaatatatatttgttagaagttggtattttagttttgtacgtattttgatttatttgtgttttttttgtagtttttttgttaaaatggttgtttggtttatagaagatattggtaaaatatggttggattaaagtattaaagcgtaatagggtttacgcggtgttgagcggtttataaagtatttttttaaatgttaatttttttattggaggaattaatgggtttttgaggaggtagtggcgtcgagttaggttggtgagaatttattttagggagttatagggttaagtttatattataaatgatttatggggtttttgagaataggttttgatgaaatgtaatttttggtaaaatgttaaggattgagtggtagaaaatgaatagttatttaatttttgtttataaagaaaatttagaggtatatttagttaatatagaattgtttttttttttttttggagatagagttttgttttgttgtttaggttggagtgtattggtataattttggtttattgtaatttttgttttttggatttaagcgatttttttgttttagttttttgagtagttgggaatataggtaagcgttattacgtatggttaatttatggaattatttttaagtattaaggtgatattgttttaggattagatagtttagtgtgtttgggttttttaaaatattttttattttttgttatacgtgtatagggatataaaaaatcgaggagtattgttaggttggttaagttttatagtagtatttcgttttatatttttttgggttttattaatatgttaaatttaattaggaagtgtaaattttatgaggtttaagaattatgaggtttgatttttaaggttatggtgaattagatttttttagaagatagaaggttataaatggaaggaggggaatgaaggggtgggagggagggattttagggttaggtgttatttttattttgttaggtaatttttattaagttatatttttatttgtaaatggaagaaagtttttttaaagtttaaagtaattttaaagaggggggttgggttgggcgcggtggtttatgtttgtaatttttagtattttgggaggttaaggtgggcggttacgaggttaggagttcgagattagtttggttaatatggtgaaattttatttttattaaaaaaaaaaaaaaaaaaatataaaaattagttgggtatggtggtaggtgtttgtaattttagttatttgggaggttgagataggagaatcgttggaatttgggaggtggaagttgtagtgagtcgagatcgcgttattgtattttagattgggtgataaagagagattgttttaaaaaaaaaaaaaaaaaaagaggggggtttgtggggaaggttgggaaattgggatttgagtgaatgtaagttagtttgtttatagttaatattattttttttttttttttatttttattattattttttaagatagggtttcgttttgttgtttaggttggagtgtagtgatattattatagtttattgtattttgattttttgggtttaatcgatttttttattttggttttttaagtggttgggtttatatgggtgagttattgtgttcggttgattttattttattttttgtagagatggggtttgttatgttgtttaggttgaattaacgttattttttgattggttggagtataagaattattttaaagtttagttttggagtgggggagggggaagaatttagaaatatttgtttttagaggttggatgttgttattgtaggagttatttatttgttttttttagatagtttttggttgtggtgataattttttattgtttaattttaatttttaattattagggtattaggttgggtagatagtgttatttttgttttaaagatagtagggtttagagaggggtagtgtatatttaagggtaaatagtaattggaaattagacgtaatgatttttagttaattttttttattttatatttggtatataattgttttataaagtatagtttcgttgggtgcggtggtttatgtttgtaattttagtattttgggatgttaaggtaggtagattataaggttaggagttcgagattagtttgattaatatagtgaaattttgtatttattaaaaatataaaaattagttggacgtggtggcgggtgtttataattttagttattagggaggttgaggtaggagaattgtttgaattcgggaggtagaggttgtagtgattcgagattttgtcgttggattttagtttgggtaaaagagttagatttcgttttaaaaaataaaataaaataaaataaataaagtatagtttttggaggagggtaagaatggaattagtatattattttggggtttagggagataatacgattttgttaaagtgatatagtaaagtaaaggttattttttaggtttttttgagtcggaataaatttttggatttagtgatcgtttttttattttttttatttttagtagggttatagagtttataagttatttaaataggtgttatttttgggttaaatttttttattgtgggttaggattgtttttgtggtattgagagaggttagttttatttttgtggatattataattgagatgtattaagttaattttgtttaattataatgtgggttggttttataggaaaagttgttttaaagtgatagttggagttttgggttttttgatagggaagttaaggttgtttgtggtagtggttgatttagtttttcgttgaggtttttattttgtatttttttggggatgataggttttaggggtaggtagtgttgttatttgttattgttgttatttttggagtaggatgaaaggtgggtagggaaaaggttttgattttttttattattttttttagaggaaaatacgtttatgaggggaagtatggttagggagaggggtttaatttttgaacgttttagagaaaagagtaggaatggtgtgggttagagtttcggttttaaggtgtattagttgagtttgttattagttgggagtgtgtagtggtatttttttaggagagttaagtttcgagttttgggttgagatatagttaggtttaaattttattaaattttatttttattacgtgtagattgtgtggttttgggtaagttttatgttttttttgagttttagattttttattttgttagacgggtttataatagtatttaatattaagaattgaagagtgtgaaaatgtacgtgaagtatttggtatatagtaaatgtttattaaggtgagatgttattgttttttttttatggttaattttttatgatttagtttttatttttgtaaggtaagagttttaaaagaatcgtttcgagggttgttgttaggatagatcgagaggacgggcgcgaagattttagtttaagatataatacgttttaacgagcgggttgagggtcggagttttagtttttttatttgtaaaatgggtatttggttttttttattacggtttaggaattttcgaacggcggtgtaggcgattgtttttttttttttaggttttttcgatttttttagcgttttcggttcgtttagttttgtagattttttagttttagttttttaggggcgcgtttagttcgggttttcggcgtttttagttatttttcggtttcgttatttatggtggagataaaagtggagttgaaggcgttttcggagaagcggaataggatataggttttttttattttcgagttttcgattagtagtagtttgaataggtaatcgtaggttttcgttatattatatttttttttcgacgggaagtgcggttagcgtttttttattggttattagtatcgtttattagtatcgagttcgttttttattggttttaggttcgttgcgcgttatcgcggtcgacgttcgtttttgcgtttcgttagtcgcggggagattttgggagggggcgagcggagcgcggagtcggaagtagttcgagcgtattttttattggtcggtattagggagagtacgggttttgattgattagtagtgaagagtcgcggggttttaaatggggacgaggcgggggcgtggtattatgtggttttcgttttttattttcgattcgggcggttcggtttcgttttattgtaggagagggaaggtagggagcggcgttaatcgttcgcgcgtcggtagtttggcggggcgtggtttggggtgcgtgcgtacgcgcgttcggagtttcgttaggcgatagtagagggcgtacgttagtagttggggcgggtgtttttgggtttcgtttttatagttcgcgtaggcgtagtaggtatcgaggcgagcgcgggaaagtaaggtagcgtttttagttttgtttgcggtttgcgagtcggggtagtgggggtttagggaggaaggagagaggaggagttgtatattcgaaaagtgatttaagtcggacgcggtggtttacgtttttaatttttatattttgggaagtcgaggcgcgtggattacgaggttaggagtttaagattagtttggttaagatggtgaaatttcgtttttattaaaaatataaaaattagtcgggcgtggtggcgggcgtttgtaattttagttattcgggaggttgaggtagagaattgtttgaatttgggaggcggagtttgtagtgagtcgagatcgcgttattgtattgtagcgtgggcgatagagagagatttcgttttaaaaaaaataaataaaagtgatttaagacgagtttcgaggtttgcggtttagcgatttgtttagagatatttaaggttttcgttatttgagcggttttatcgttataagttgtgttcggaagcgcgcgtcggtttttttagggttcgttttcggttattttaggggttgttcgggttagttcggggatggtggggggggaggggttagagtagtgaggatgttgggttttatttaggggttagggtttttaacgttgaaaaaattggtcggggcgttggttttcgtttgtgattttagtgttttgggaagttaggaggttgagggtgtagtaagtcgtgatcgttttattgtaattcggtttgggcgatagagtaagattttattaaaagaaaaaaaggttgggcgcggtggtttaggtttgtaatttcgtattttgggaggtcgaggcgggcggattaggaggttaggagatcgagattattttggttaacgcggtgaaatttcgtttttattaaaaatataaaaaattattcgggagtagtggcgggcgtttgtagttttagttattcgggaggttgaggtaggagaatggtgtgaattcgggaggcggagtttgtagtgaatcgagatcgcgttattgtattttagtttgggcgatagaatgagattacgttttaaaaaaaaaaaaaaaaaaaaaaagaaagagaaaaatagaggagagatatatttggaaaatcgggtttgtagttgggtgtggtggtttaggtttgtaattttagtattttgggagttagtattttgggaggtaggaggattgtttgagtttaggaggttaagattagttcggataagatagggagatttttatttttataataaataaaattagttgggcgttatggtgtacgtttgtaattttagtattttgggaggttgaggtggaggtttattggaggttaggaggtggagattagtttgggtaatatagtaagatttttatttttgtaaaaaaaaaaaagttttttggttaggcgaggtggtttatatttgtaattttagtattttgggaggttaaggtaggtggattatttgaggttaggagttttagattagtttggttaatatggtaaaatattatttttgttaaaaatatagaaattaggtaggtgtggttatgtgcgtttgtagttttagttatttaggcggttgaggtattagaattgtttgaatttgggaggcggaggttgtagtgagtcgagattgtgttattgtattttagtttgggtgatagagtaaggttttattttaaaaaataaaaaatttttttaaaaaattagttaggtatggtggtgtatgtttgtagttttagttatttaggaggttaaggtgggaggattttttgagtttaggaggttaaggtagtagtgagttgtgatcgtattattgtattttagtttgggcgacggagtaagattttgatttttttttttttttgagatggagttttttacggttattagggttggagtgtaatggcgcgattttggtttattgtaatttttgtttttcgggtttaggcgatttttttgttttagttttttaagtagtttggattttaggtatttattattacgtttggtgtggtgtatttttttgtatttttagtagagatggggttttattgtgttggttaggttggtttcgaatttttgatttcgtgattcgtttgtttttattttttaaagtattgggattataggcgtgagtttttgtattcggtttttgatttttaaaattttaattttagtattagtttagtaaaacgatgttattgttttttttttgtttaatggtgagaaaattgaagttagaggaggttaagtgatttttttttttttttgtttaaaagtgggaatttggtatttgaatttagagtgttaagttttttaggtcgtagtttgattattagggttttttgttttttagagatggtttagtttgttttaggttattttggggttttcggggttttgaggtttatttaaggatttgtggaaggagggtttagttttttttttttttttttattttagtttatttttttgttaatttagttttggttaaaaaagttttaattagaggtattgattatttataggttttagtttttgtggtatttgatagttttgattatttttgaatattttttttttttggtattatttttatttatttatttatttttgagatagggttttgttttgtggtttaggttggagagtaatggtgtgattttatttattgtaattttcgttttttaggttttagtgatttttttattttagtttttagagtagttggaattattggtatgtattattacgtatggttaatttttattttttgtagagatggggttttgttatgttatttaggttggtttggaatttttgggtttaagttatttttttattttagttttttaagtagttgggattatatttgtacgttattatggtaggttaatttttttattttttgtagaaatggggtttttttatgttgtttaggttggttttaaatttttgggtttaagagattttttagtttttattttttaaaaagttgggattataggtatgagttattatgtttggttttatattattattatttttttttttgagatggagttttattttttgttgtttaggtcggagtgtagtggtacgattttagtttattgtaatttttgtttttcgggttttagtgatttttttgttttagttttttaagtagttgggattataggggtttattattatatttggttaatttttgtatttttagtagagatgggattttattatattggttaggttggtttcgaatttttgagtttaggtgatttgtttatttcggttttttaaagtgttgggattataggtgtgagttattacgtttggtttttattttttttttttttttttttgagatggagtttcgtttttttatttaggtcggagtaaagtggtatgatttcggtttattgtaatttttgttcgtcgggtttaagcgatttttttgttttagtttttcgagtatttgggattataggtacgtgttattacgttcggttaatttttgttatttttagtagagatagggttttattatgttggttaggttggttttgaatttttgatattaagtgatttttttaaagtgttgggattataggtataagttattgtgttcggttttgtttttattttatttgttggttttttttttttattatttttgtttttgtttttttttttttgtttgtttgttttttttttagattttattgaagtttttttgaggtgggggaggggtgggttttgtttgttttttagtgtttgtggttttcgttgttttgtttttgtttttattttttgggggtttttaatttatgttgattatttttagtgttttatttttagtttagttatttttttatatttatttgcgtttaggatatttttttttggatttgttagatatttttagtttagtatgtttataattgaatttattagttaatatttagattggtttgttttgattttttttaggagtgaaatttaagttgtttttgatatttgttttttattttttattcgttatattttggtttttaaggaggttttaaatagtttttgagggtcgggcgcggtggtttatgtttgtaattttagtattttgggaggtcgaggtgggtggattatttgagttagaaatttgagattagtttgggtaatatggtaaaatttcgttttttttaaaaattaaaaaaattagtcgggtgtggtgggtatttgtaattttagttatttaggaggttgatgtaggagaatggtttgaattcgggaggcggaggttgtaatgagttaagattgtattattgtattttagtttgggtgatagagtaagattttgttttaaaaataaaaaataaaaaaataaatagtttttgaattgtatttttttatttttattgttatagtggaattat

SEQ ID NO: 155 - DNA, 6174 bp, Artificial Sequence
  chemically treated genomic DNA (Homo sapiens)
cgagtttatttgtataataaatttgtatatgtaattttaagtttaaaataaaagtttaaaaaaaataggtttattgtttttagttaaacgattgtattatttattatagaatcggagataatttaaaataattataatagaggtcgggtatagtggtttatatttgtaattttagtattttgggaggttgaggtgggtggattattttagattaggagtttaagattattttggttaatatggtgaaatttcgtttttaataaaaatataaaaattagtatggtggcgggagttcgtaattttagttatttaggaggttgaggtaggagaattatttgaatttgggaggtagaggttgtagtgagttgagattatattttcgtattttagtttgggttataaagtaagattttattttaattaaaataaataaataaataattataatggaagtgtagttattttggaaagatatagatttaagatagttgtgtgattttggataggttatatgatttttttgagttttattttttttaatgtaaatcgagaagggtgatatttattttggagtttttttaatgaggatgtaagtagagttttagatttatgatgaatatatggtatatatttaataagtgatagttaaatatattatatttttgtttgattttaggagagaggttataagttggatgtgaaaatgaattaaattattaataaaattgtagtattttgttggagacggtaatttttttttaatttttttgtttataattttttaggttttttaattaatattgtgatattttagtttgtagtttagtagttttgtttttgtttttaatattaagtatgtttagttatatttttagataatttaatattgtatatttatttttagatagtttagttatatataaatgattaatataaattaatataaaagtagtttatatttaaagtgtttagttttaattttttgtagttggtagttttatttttaacgcgaagttttttaaaatgtataatttataaaattaattttatagaaaattgatattgaagatattaagaaaaattaaagtattttgtggttaattaaattggggagatggtagggtaagtaaagttaagaagggtttttttggtttttggttcggttttgttgttttgttttattatatgaatttttaaaatttttaatattcgaatatatatgatatagttttaaaaaggtaataggagttttatatttttaaattttatttgtgtttagaaatgatattaggtgatattatttgaatttttttattgtttttttgtagagatatttgttataggtataataataggggtgatggggtaggaggaagggaaaaatagagtgaaagaaggagttttagagtaattattttttaaggtagggattatagattttaatgtttataggagaaagtgaaattaagattagaggtgggttagatataatttaagagaagatggtaggttaatggtaaatagtagattatatggtttttttattttaatttatatttttaaaaatattttgtgtatttgtatatgtttgtgggttttatttattatatattgtaagtatgaagtttttatttttaggagattgtttttatttttattttaaaaatagtattaattttaagagtgtttttaaagatttaaattttaatgtgttaaagggagggaaaaaaagatagagtatattagagtaggaggtggttgtttttttgtttttttgttatagttattattagatttattttaaagttaagagatgggattttgtttgtagtttaatattatgttatttataggtggatggataagatttgtttatgtttttggattatttatattttattagatattgttttatgtgttttatttgtagttttttattttatttttataataattttattatgatttttattttatagatgagatacgagagagtttaatttattggtttgtagttatatagttagtaagagatatagttgggattgaaatttaggttgtttggttttaaaatttttaattattatgtttaatttagttttggagatgttgtttttaatttgaggggtttattagttttaattgtttttagttgtaggtgatagaagttttagttattagtgtttagaataagttttgtttttgttttttttttataaaataagaaatttggaagtaggtgtttattggtagtagggttgtattttagtaatgttagtattaatttttgtatgttggttataagatggttagttttttattgggtattatatatgaaattaagaagtaagaaaggaaaaggggtggtattagttttaaatttttttttataaggttttattagattttaatttatattttattattagaatgatattatatggttatgtttagttgtaaaggagtttgggaaagtaaatatttttttttttaagttttaagagtggaggtaggaataggaaaatttcgttgggaatagatgttggtttagttagttaatagtgtggattataagagatttggtttggttaagaaaatattaatagaattttattatatagtgtattatttatgatatgaatttaaggaaagttaaatagtaataattaaaagtttgttgtaaaattaaaattgaattatagaatttttattattttttaaaatatttgtttttatttatttttaaaaatttgaaattatttgtaaatatttttttaattaaatttgtttaggtagtgtgtaaaaattatttgatttttatatatttagatatttttagttatgttattgttagttatgttattttataaaatgttatttttttatttatagttgataaatgaaatgatgatttttaatatagttttaaaattggattgaaattttgttagttattagaaattagaaagttttagtgttgaaaatatataacgggttgtttgtatttattatttattttattttttagtttgtattggtttttttgggtttttttataattttaattgtaaatttttttttttatatttttattatggtatttaaatttagaaaatttgttaaggtaattatataatgtgatttaaaaatttagttaatatattgttatggaaattaggaaatagaaatagtattttaattatttttttagataattatggttttgtgtgtgtgtgtgtgtgtgtgtgtgtgtgtgtgtaaaattttttaaatttattaatttatttattttttattgaaagttgttattgaatttaaaatttgtaattgatttgtttataaataggtttagtgttttattattagtaaattagtgttttttaatgagttatagttattgataaattatgttatgtcgtattaggaaatttttagttaggtcgcgttgtttatttagtttgttgaggttttttggtatggtgtgaaggatatttgattgggttgaaagttaagttttaattttgttttttttattaattagttatgtgatttttttgggaatttttagggatttagtttttttatttgtaaaatggtttaatgtaagattttagtaacgtaatgggaattttttttttttataaaattggggaattaagaggtaattttttttgaggattgaaattatttttatgtaatttttggttatattattatttttaagtgtttggtatttgggaaatgataattatttttattatatttttttatgttttattttgtagtaaataagaattgaatttgtatagtaattgttattttaatttatgatttttaataacgaagatatttatgttttattatttattgttatgattgaataagttggtatgagagtcggaacgaatttaagttttaatcggtaatgttcgttttttagattttattatttttgagtgtttatttatttttgtaggtgttaatttttatagcgaaatataaagttattttaatataattatttttaatagagtttatcgaggttttaaaagtttttttttaaaaattattataagattttaatatttaagaattaaatttttgttttgttgtgtttatttatcgttatttgtttagttatttaattagtttgttttcggttatggaaaaaaaaaaaaagaaaaaaagaaatggaagtttttttagggttaaatttttttgttgtttttttttgtagaaatttgagttattatagtagaggataatcgttgtataatgaaattattgggataattcgtttatttatttttattttcgtttttaataatgaattttttgtttttgcggtgtttaaatttttttaaattcgggtgggcgcggggcggttagcggagacgtgggagaggtcgagagtaaagttcgcgtttttttcggggttagcgagcggggtgttaggagggtgcgcgttttgtatttgagttcggggtgatattcgttttttaagcgttaggagggggagattcggtttcgtttattttcggttgtgttaattttagattgtttgagttgggggaggagagcgcgtagttagggcgagaaaatttttttatttagaaagttttattttgtcgtgggcggggtagaggcgggaggaaacgcgattttcgcggggttaggcgcggcgcggacggtaggaagggcgggggtcgatttttttttgggtggtgttagtttttattttagcggttttcggaattcgcggattaggggacggatagtacgcgaggtagatagatacgtgttggggcgggtaggcgagcgttttagtttggtcgtttggcggtgttttcggttttaacgcgttcgggtcgtcgcgggtcgcgcgcgtcgatgttcggttgagttattggtagggtagcgcgcgtgtgggaaggggcggagggagtgcggtcggcgggcgggcggggcgttgggtttagttcggtcgtaggtgattcggaggttttcgtcgttcgcggcgtttcgagcgttttgtgagtagatgcggagtcgagtggagggcgcgagttagatgcggggcgatagttgatttgttgagaggaggcggggaggcgcggagcgcgcgtgtggtttttgcgtcgttgatttttttattggtttttgggtatcgaaaggtaaaattgtagttttttttagatttagtatttaatttttcgttttaggggttttgttttttttgtttttttaagagatttgattgttgttttagggggtaaaattacgtaggtgggttagagtttaggggtttcggaaattgaagagacgtggttacggcgaggacgaaattagaatggggtttgtttttttagggggttgtttttgatggttatttgtatgatttaggagggagaggggcgttgggatagtgggtgatgtgtgattgttacggtttagtaagttttaaagttgggatttgatttagtttttataaaagggattcggttattttcgttttatcgtgatgtagttggtaaggtttgagtcgagttgtttttttgtttttagttttgttttatttgtgttatgttggggtttttttaaggggtaggtgtttttgtgaaagtttgaatttatttttggtaattacgcggggtttgtgatttattaattttttatcgtattttatttttttttggggtttgtggtggatatttattttattaggtgaaatagattataattagaggttgagcgatgtggttagtcgtagtgttgattcgataattaaagtattagtgaaagtattttttttgattattgttaatgtagaatttatttcgaagtacggttttttatttatattttttatgttttaaaagagttatttgttaatttggtagttggagagggttttaatggtttacgtatgaatagttgtttagtgtattttattttattatagttttatgtttaaaggagttttcgggtagaatgaaatattgttaatttttttaggtaaaataattaagatattttaattgttatgttaagatggtttatgaatgtgagaggattgtaagaattgacgttggaggtaatatagattatttggatttttttttgaattttaagaagattgtttatattttgtagttttgggtgggggtttatttt

SEQ ID NO: 156 - DNA, 6174 bp, Artificial Sequence
  chemically treated genomic DNA (Homo sapiens)
agaataaatttttatttaaagttatagaatgtgaatagtttttttaaaatttaagagagggtttagatagtttatattgtttttaacgttagtttttataatttttttatatttatggattattttaatatagtaattaaagtattttgattattttgtttaagagagttgataatattttattttgttcgagggtttttttgaatataaaattgtgataaggtaaaatatattgggtaattatttatgcgtgagttattggagttttttttaattgttaaattagtaaatggtttttttaaaatatgaaagatatgaatgggaaatcgtatttcggagtaaattttgtattgataatagttagggaaagtatttttattggtgttttaattatcgggttagtattacgattggttatatcgtttagtttttggttataatttattttatttaataagatagatgtttattataagttttagaaagagataaggtacgatggaaaattgatggattataagtttcgcgtgattgttagaaatgaatttagatttttatagaaatatttgttttttggaaggattttaatataatatagataaagtaaggttgggaataaggaaatagttcggtttaaattttgttagttgtattacggtgggacgaggatgatcggattttttttgtaagggttgagttagattttagttttaaaatttgttgggtcgtaatagttatatattatttattgttttagcgttttttttttttttaagttatataggtggttattagaagtaattttttaaaaagataagttttattttagtttcgttttcgtcgtggttacgtttttttagttttcgaagtttttaaattttagtttatttacgtggttttgttttttggaatagtagttaggttttttaggggaataaagaaagtagaatttttgaggcgagggattgggtattggatttgaaaggggttgtaattttatttttcggtgtttaggaattagtggagaagttagcggcgtaaggattatacgcgcgtttcgcgttttttcgtttttttttagtaagttagttgtcgtttcgtatttggttcgcgttttttattcggtttcgtatttgtttataaagcgttcggggcgtcgcgggcggcgagggttttcgggttatttgcggtcgggttgagtttagcgtttcgttcgttcgtcggtcgtatttttttcgtttttttttatacgcgcgttgttttgttagtgatttagtcgggtatcggcgcgcgcggttcgcggcggttcgggcgcgttggggtcggaggtatcgttaggcgattagattgaggcgttcgtttgttcgttttagtacgtgtttgtttgtttcgcgtgttgttcgttttttagttcgcgggtttcgaggatcgttgaggtggggattggtattatttagagggaaatcggttttcgttttttttgtcgttcgcgtcgcgtttggtttcgcgggggtcgcgttttttttcgtttttgtttcgtttacgataaggtgaaattttttaggtggagaagttttttcgttttggttgcgcgttttttttttttagtttaggtagtttgaagttagtatagtcggagataagcgggatcgagttttttttttttggcgtttgggaggcgagtgttatttcgggtttagatgtagggcgcgtatttttttggtatttcgttcgttgatttcgggaagggcgcgagttttgttttcggttttttttacgttttcgttaatcgtttcgcgtttattcgggtttagagagatttgggtatcgtagaaataaggagtttattgttagaggcggaggtagaagtggatggacgaattgttttaatgattttattatgtaacgattattttttattataataatttaaatttttgtaaggaagaataatagaggagtttaattttgaggagatttttatttttttttttttttttttttttttttatagtcggaagtaggttgattaaataattgggtaaatagcgatgaataagtataatagaataaaagtttaatttttgaatgttgaaattttatgatgatttttaaaaaagagtttttggggtttcggtgaattttattaggagtaattgtgttgggataattttgtatttcgttataaaaattggtatttataagagtaaatgaatatttaaaggtaataggatttaaggaacgggtattgtcggttagaatttgagttcgtttcggtttttatattaatttgtttaattatggtaatagataatgagatatagatattttcgttattgaaagttatgggttaaaataatagttattatgtaggtttagtttttatttattatagaatgaaatatagaaaaatgtagtaagaatagttattattttttaagtgttaggtatttggaaatgataatgtaattagaggttatataagagtgattttagtttttaaaagagattattttttgattttttagttttatggaaaaggaaagtttttattacgttattaaagttttgtattgaattattttgtaggtaaagaaattgagtttttaaaagtttttaggagagttatatagttggttagtaagaggggtaaagttagaatttagtttttagtttagttaggtgttttttatattatattaagaggttttagtaggttaaataaataacgcggtttgattggagattttttgatacggtatggtataatttattaatgattatagtttattaaaaaatattaatttattggtaataaggtattgggtttatttatggatagattaattatagattttgggtttagtaatagtttttaataaaagatgaataaattaatgaatttaaaaagttttatatatatatatatatatatatatatatatatatagagttatagttgtttaaaggaatgattagagtgttgtttttattttttggtttttatagtaatatgttaattggatttttagattatattatgtagttgttttaataggttttttgagtttgagtgttatgataaaaatataaaagaaaaaatttataattaaagttgtagaaagatttagaaaagttaatgtaaattggaaaataaaatagatgataaatataaataattcgttgtgtatttttagtattgaaattttttagtttttaataattaataaaattttaatttagttttgaaattgtattgaaaattattattttatttattaattgtaaataaggagataatattttatgaaataatataattaataatagtataattaaaagtatttgggtgtgtgaaggttaagtaatttttatatattatttagatagatttgattgggaaaatgtttatagataattttagatttttggaaatgaatggaaatagatattttaaaaggtaataggagttttataatttaattttggttttgtagtaaatttttaattgttgttatttaattttttttgggtttatgttatgggtgatatattgtatgatgaagttttgttggtatttttttaattaaattaaattttttgtggtttatattgttggttggttaagttagtatttgtttttaacgagatttttttgtttttgtttttatttttggggtttgaaaagagaaatatttgtttttttagatttttttgtagttagatatggttatgtgatgttattttggtaatgaggtataagttgaagtttgatggggttttgtgggaaagggtttaaggttggtgttattttttttttttttttgttttttgattttatatatgatgtttagtgaagaattaattattttgtgattagtatgtagaagttggtgttgatattgttgaggtatagttttattgttagtagatatttgtttttagattttttgttttgtggaaaaaaaataaaaataaaatttgttttagatattggtagttgggatttttgttatttgtagttgaaagtaattaaaattgatagattttttaaattgggaataatatttttaagattgagttgagtataatagttaagagttttagaattaaataatttggattttaattttagttatgttttttgttagttgtgtagttataggttagtggattaaattttttcgtgttttatttgtgaaatggggattatgatagggttattgtgaggataaaatgaggagttataagtagagtatatggaatagtgtttggtaaaatataaatgatttaaaggtataagtaggttttatttatttatttgtggataatataatgttgaattataaataggattttattttttaattttgagatgggtttagtgatagttgtgataaagagatagaggaatagttattttttgttttaatatgttttatttttttttttttttttttaatatattaaaatttgggtttttgaaggtatttttgaagttggtgttgtttttgaaataaaaatgaaagtagttttttaagaataggggttttatgtttgtaatgtatggtgaatagggtttatagatatatataggtgtatagaatgtttttaaaagtgtgaattgaggtagaaagattatatgatttgttgtttgttattgatttattatttttttttgggttgtgtttggtttatttttgattttgattttatttttttttgtaggtattaggatttgtgatttttgttttaaagagtagttattttggaatttttttttttattttgttttttttttttttttgttttattatttttattattgtgtttatggtaaatgtttttataaaaagataatagaagaatttaggtaatgttatttaatgttatttttgagtatagataaaatttggaaatgtaggatttttattatttttttagagttatgttatgtatgttcgaatgttgaaggttttgaaaatttatgtgataaaataaaatagtaaaatcgaattaaaaattaaaaaaattttttttaattttgtttattttattatttttttaatttaattgattataaaatgttttgattttttttaatatttttagtgttaattttttataaaattagttttatagattatatattttaggaaatttcgcgttaaaaatggaattgttagttatagagggttaaaattgggtattttggatatgaattgtttttatgttgatttgtattggttatttatgtgtggttgggttgtttaaaaataaatatgtaatgttaagttatttaaaaatatgattgagtatatttaatattgaggataagaataagattgttaggttataagttaaagtattataatgttaattagaagatttaggaaattgtaggtagaaaaattaagaaaaaattatcgtttttaatagggtgttgtaattttgttagtgatttggtttatttttatatttagtttatgattttttttttaaaattaggtaaaggtataatgtatttagttgttatttattaaatgtgtattatgtatttattatgagtttggagttttgtttatatttttattaaaagaattttagaataggtattatttttttcggtttatattgagggaaatgaggtttagagagattatgtaatttatttaaagttatatagttgttttaagtttgtgtttttttagaatgattgtatttttattataattatttatttatttattttaattgagatggagttttgttttgtggtttagattggagtgcgaaggtgtgattttagtttattgtaatttttgttttttaggtttaggtgatttttttgttttagttttttgagtagttaggattacgggttttcgttattatgttagtttttgtatttttattagagacggggttttattatgttggttagggtggttttgaatttttgatttgaagtgatttatttattttaattttttaaagtgttgggattataggtgtgagttattgtgttcggtttttgttataattattttaaattgttttcggttttgtagtgaatgatgtagtcgtttaattgggagtagtagatttattttttttaagtttttattttaggtttagggttatatgtgtaggtttgttatataggtaaattcg

SEQ ID NO: 157 - DNA, 8093 bp, Artificial Sequence
  chemically treated genomic DNA (Homo sapiens)
ttatggaaggaaatgagattagttagcgagttgatatagaataaggtagtttaaaataaatttttttaaaaatacgaagaatagatattgaagggaagaggtgtttgtaaagattaagaaagtatatttggagatggtatttttttaaagttaaagttattaagtgtttaagtgttttaaggagggtaagattattaataaggatttagtatagtagagtaatttgagtggtaatacgggatattgggaatataaatttgttaagaaaattagtaggaatgagttataggatagtaattggtaaggatttaataattttttttttaatgtacgtattttaattatatttattgttataataggattagtaataattatatttatttaaaaaaaaaaagattgttatgtagttatagaattatttaatatagaaaatagtaaaatatatttttttttttttttttttttttttttttttttataaataagattagtttatagtaaattttttatagttaagggttaatttaaaatttttggtttatattttttttttatttaatgattatatgatgtaaattaattttattaatattttaagtaaaatatattggaattttataaaatgtataagattttaatatttaaggaattggggttagaaagtagaagtggtttttaggttttttagttttttttttaagtaataaagttttgttgtgaatatttaaagttattgggaaattatcggtagatttttttgtttttttttttcggttttttattatgttgtttttttagatatgtaagtttattttattaattaaaattttagtttgattatttttgataagtatttaatcgatatgtaattttttttttgttttaaatatgtataataggatagagtttttaaatttgatttaattattaatttttgatttataagtgttatggtgagttaatagaatttattaatgtttttattgtattttattagttaaatttagaaggttggaattagttttttttatttagtattttgttagtttgtttagtttgtatttttaattttgtttttaatggtaatttgttttattttttgaaataaaataatttatattttgggagggttaattttttattgtgttaggttgttttatgtattgtaggggtgagtgtttttaggtttaaatgttaatagaagtttttagtaaatatgataattaaaaaagtgtttttatatattttttagtattttttggaatgataggttattgtttttagttgaaagttattggtataattttggtttttaagtttttatgttatttattttaattgtttagatattaattttatttaaatttttagttatagtttggttttttgaatttgttggattagtaattatagattaaggtgttttaatagttaagataggattttggaataagagtttttaaattgtataatatttgagaggatttatgaatataaattgggttttgtttataattagttttatataatgaattttaagattgtttttttatggtgaatagaagtttggaaattattgttttggtataaagtagattattttagtagaaatatagaattattgtaatttgtgaataagattgtttttaaatatttttatttgtgtgttattttatatatagaatgtgtacgatagttttaaattttagaataaatttatttttagtatttaataaaatttgatattgtattattttaaaataaagtgtttattttaggtaggattttttaaaataaagtagtaatatttacgtagataagataaaaaagttaaaatattttatattttttaattttggagtgtaattttttttttttatcgtttttgatagggttaaatttgtgtttatagtaaaaaaaaaaaaaaaaagaattattaattggtaattattaagattttatatttattatagttttttaataggtaagttgataaaatagtttttagttattaaaaaaaaaatttaaggaaaatttttaataattagttttatttttaaattgtatgaagttttttatatttgaaatttaaaaatgattttaatgattttttttattagtaatgtgttattattgaggtgggtgatggggagggaagagggaagaaatttgttagtattattttcgaatttagaaatgtttaaaaaaaagttttaaatattttgatggttagataaaatatttttattgttatgtatgggttttttttttggaaatttatgaatttgttatgtgagtttttgtaaattggtttaaaagtatatttaaggagttgataatttaagattatatgaattagaattttaatattttattaaaataagagttgaaatttttggtatttatttttagaatatttaaaaaatagattgtaaatttaatttatattaatattaaatttttttaaaattaattatattataaaagataatgattttgttattaaattaagttttaaaaaaggtggtatttttatgttttagttttatgttgttatttgagatgaaaaaaaaggtaattgttagaattttaattgtgattagtttggacggttggtatttggtatttttttataatttaaattagtaaatttgaaaatttaaattaatttttgtttttagaattaaatttttgttgagttttttaattttgtattataaagttttatggattagatttattttttttttttataaggttattttaatcgggttttattttagttgtggtaattcgaaatagggtttggagatgtttatttgttaatggttgatttaaagtgtgttggtttcgagttaaatatgaaaaagtttttttatagatttggttattattaaataaggatgttattttataggtaatttttttgataattgggtaggatttagtagataatttagtataaaattgttttaagtttttgattttgtatttattttaaagattagtgtttgtttgaagttttgttagttttatttttattgaaataggtgtatatttaggtttaaagttaaatggatttgaaaaaagttttaagttttttttaatgaatttgaggtttttaaaatgttttttaaattttttttggagacgatagattattatttgatatttattaggattaaatatttttttattttttttattttgttgttttagtttattaataatttttttgagggtaggaaagtttgttagatttttttttttaatatgtttttgaaataaatttagtttaatttcgaaagtataaatatggttaaaggtagtagtagtaaagattttattaattcgtaattttttattgagttttcgaaggtgttttataatgtttattaagaagttaaagttataaagttattgtttgtttgagaagtggattgttgttgtttttattgaaattaagaacgtttttatttttttttttagagagaatattagttttaaagtttttttttttttaagttaattgtttagatatcgtttattaatttttttattatgttttgatttagatttcgttagtaaagtttgaaatttaggtcgtttaacgtttttggttttaattaaaattatttattcggatatggtatttatgatttgattaatatttatattataggagtttaatagttttaagtgaagaaattttgaataatgaatgatattttaatagttggggtttacggtttttttttttatgtatgagacgagttttgagtttttattaattatttttaaagtatgggtcgtggttagtttaattattttttgtaagttaagttttgttgtttgtagggattttaggattgtcgatatgagcgtattaatattgaaatgatgagttaggttgattatggttagaagatttttttgtatttttaatttagggtttatatcgcggataaagattaggaggtagtttttataggttataaaagtttggtcgtttaaggtaagagaataggttttaaagtttttggttcggttaaaaagttggttgcgtagatttttgttaatgtttaggattttttgttttgtgatatttggagataagttaacgttttgtaggacgtttatatgttcgggtagtattttttttagtaatatttttatgtattggtatataaagttttttttattttagtcgcgattttttaaggttaagaggcggtagagttcgaggtttgtacgagtagttttttttttaggagtgaaggaggttacgggtaagtcgttttgacgtagacgttttattagggtcgcgcgttcgtcgttcgttatatatcgttcgtagtattcgtgtttagtttcgtagtggcgtttgacgtcgcgttcgcgggtagttacgatgaggcggcgatagattaggtatagggttttatcgtttttcggaggttttattattaaataacgttgggtttattcgggtcggaaaattagagtttcgtcgatttttattttgttttttttgggcgttatttatattttgcgggaggttataagagtagggttaacgttagaaaggtcgtaaggggagaggaggagtttgagaagcgttaagtatttttttcgttttgcgttagattattttagtagaggtatataagttcggtttcggtatttttgtttttattggttggatatttcgtatttttcgagtttttaaaaacgaattaataggaagagcggatagcgatttttaacgcgtaagcgtatatttttttaggtagcgggtagtagtcgttttagggagggacgaagagatttagtaatttatagagttgagaaatttgattggtatttaagttgtttaattaatagttgtcgttgaagggtggggttggatggcgtaagttatagttgaaggaagaacgtgagtacgaggtattgaggtgattggttgaaggtattttcgttgagtatttagacgtttttttggtttttttggcgttaaaatgtcgttcgtggtaggggttattcggcggttggacgagatagtggtgaatcgtatcgcggcgggggaagttatttagcggttagttaatgttattaaagagatgattgagaattggtacggagggagtcgagtcgggtttatttaagggttacgatttaacgggtcgcgttatttaatggcgcggatacgtttttttgttcgggtagaggtatgtatagcgtatgtttataacggcggaggtcgtcgggttttttgacgtgttagttaggtttttttttttttcgtagatcgtgtgtttttttatcgttttttttcgagattttttaagggttgtttggagtgtaagtggaggaatatacgtagtgttgttttaatggtatcgttaattaagtaaggaagttatttaatttaaaattatgtatgtagaatatgcgaagttaaaagatgtataaaagtttaagatggggagaaaaatttttttttagagggtattgtgttattgtttttttgttttttatttattttagaaattatttgtttatatttaaaggtataatttattttgagttttttttaaaataaatcgtttgtagttttaggataggttgatgtattttgggtttgatttttgattattttattgttaaattagtgattttttttagtgtttttttgttttttatttcggaggacgtatttcgaagatattagattttatgggttatttttggattttgaagtttataattgtgataaaaaatgtgaagggaagagatttgaaatatgtggaaggaaaagtgagtgtagattataaatttttaaaaagataagtttaaaatatatttaaacgttatgttagattattttgttaaaattagttgttagtgacgttcgtacgttaatagaaaaaagaatgttttagtttggagtggtaggtttttagagggatttattgtgaaagtataaattatttagggtaatgggattgagagaatagtgggtagaaaggattattgaaggaaaggaagagaattggaaggtagatgaaagaaggagtaagaatttggggatgtttttttttttttatttgtaatagtagtaatagaagtaatggtagattggtttttgtttttattgtgttagaatgaattgataggataattgggtttattattgtattgtgttagaatattgtaaaataaaattaaatatattagtttggtggtttgtaattaattatttaagtggagatttttattttttttttattttttttttagacggagttttattttgttatttaggttggagtgtagtggcgcgattttagttgattgtaattttttttttataggtttaagggagatttttttgttttagtttttcgagtagttaggattataggtatgtgttattatatttggttaattttgtatttttagtagagatgggatttttttatgttggttaggttggtgttaaaattttcgattttaggtgaatcgtttgttttagttttttaaagtgttgggattataggcgtgagttatcgcgttttgtagttttttgtatttttaatagagatagggttttattatgttagttaggatggtttcgattttttgattttaggtgatttgttcgttttggttttttaaagtgttgggattataagtatgagttatcgcgttcggtttaagtggagatttttatatggagtttagttatattttttttaatatataagttgagatgattaatataattttaatataggggtttatgagaaatgtttgtaatatttaagtaatttattgtttttttttttttttttttaagatgaagttttattttgttgtttaggcggaagtgtagtggcgtgattttggtttagggtaatttttgttttttggttttaagcgatttttttgttttagtttttcgagtagttgggagtataggcgtgtatgattatattcggttaatttttttatttttagtagagacggggtttttttatgttggtcgggttggttttgaatttttgattttaggtgattcgtttattttagtttttttaagtgttgggattataggtgtgagttttcgtgtttagtttattattttatttttgaataaagaattgtttgtgtggggaatagataatttttttttatgtagtttttgttagaaaatttgttttttttagtagttggtttgtgtttataggttattttttgaaagtataaaaaatttattgattttttttttttgggtttttttttttttttgagatagagttttgtttttgttgtttaggttggagtgtaatggcgcgattttagtttatcgtaatttttattttttgggtttaagtgatttttttgttttagttttttgagtagttgggattataggtatgcgttattatgtttggttaattttgtatttttagtataaatggggtttttttatgttggttaggttggttttaaatttttgattttaggtgatttattcgttttggttttttaaagtgttgggattatgggtgtgagttattgcgtttggttagaaaatttattgattttttaaagatttattaattttttgtattattttttttttttttttttatcgtaaatataaaagggaatagtagagaaaattatttagaattttattttttagtgatattatttagtgatattttattagagttatttaggaatttgaggttgaataaagtttaggtaaaagtaaaattagttgagaagagatatttgttaaaagaaatttatttttaattttatttgttgttttttttagaggaatagaaatagtgttgaatgttttattagaaatgatggttgttttgttcgtttttttttttttttttatataatatgtaaatttatatagtgtatgagtttgtaagataaaggaaaaatacgttaatgaggtattattgtttgtatttggagtttgttattattgtttggtttatattaaaatatgtatattagagtagttgtagattgataaattattttttgtttgatttgttagt

SEQ ID NO: 158 - DNA, 8093 bp, Artificial Sequence
  chemically treated genomic DNA (Homo sapiens)
attggtaaattaaatagaaaataatttattagtttgtaattattttaatgtatatattttaatatgagttaagtaatgataataaattttaaatataaataatagtgttttattaacgtgttttttttttgttttataggtttatatattgtatgagtttatatattgtgtgagagagagggaagagacgggtagagtaattattatttttaataggatatttagtattatttttgtttttttaggaaagatagtaagtgaagttaaaaatagattttttttggtagatgtttttttttaattaattttatttttatttgaattttatttagttttaggtttttaagtgattttaataaaatgttattaaataatgttattaaaaaataaaattttgaatgattttttttattatttttttttatatttacgatggaggggaaaaaaaaaagtaatgtagaaagttaataaatttttaggaagttaatgaattttttggttaggcgtaatggtttatatttataattttagtattttgggaggttaaggcgggtggattatttgaggttaggagtttgagattagtttgattaatatggagaaattttatttgtattaaaaatataaaattagttaggtatggtgacgtatgtttgtaattttagttatttaggaggttaaggtaggagaattatttgaatttaggaggtggaggttgcggtgagttgagatcgcgttattgtattttaatttgggtaataagggtaaaattttgttttaaaaaaaaaaaaaaatttaaaaaaaagaagttaataaattttttgtgtttttaaagagtagtttataagtatagattaattgttagagaaaataaattttttagtaggggttgtatgagaaagagttatttattttttatatagataattttttatttagaaataagataataggttgggtacgggggtttatatttgtaattttaatatttggggaggttgaggtgggcggattatttgaggttaggagtttaagattagttcggttaatatggagaaatttcgtttttattaaaaataaaaaaattagtcgggtgtggttatgtacgtttgtatttttagttattcgggaggttgaggtaggaagatcgtttgaaattaggaggtagaggttgttttgagttaagattacgttattgtattttcgtttgggtaatagagtaagattttattttaaaaaaaaaagaaagaagataataagttatttaaatattatagatattttttatgagtttttgtattgaagttgtattagttattttaatttatatattaaaaagagtataattggattttatataaaaatttttatttgagtcgggcgcggtggtttatgtttgtaattttagtattttgggaggttaaagcgggtagattatttgaggttaggaaatcgagattattttggttaatatggtgaaattttgtttttattaaaaatataaaaaattgtagggcgcggtggtttacgtttgtaattttagtattttggaaggttgaggtaggcggtttatttgagatcgagagttttgatattagtttgattaatatggagaaattttatttttattaaaaatataaaattagttaggtgtggtggtatatgtttatagttttagttattcgggaggttgaggtaggagaattttttttgaatttgtgaggaggaggttgtagttagttgagatcgcgttattgtattttagtttgggtgataaagtgagatttcgtttaaaaaaaaaataaaaaaaaaataaaaatttttatttaagtaattaattataagttattaagttagtatgtttagttttgttttatagtattttggtatagtataataataggtttagttgttttgttaatttattttaatatagtagaaataaaagttagtttgttattgtttttgttattattattataagtgaaaaggaaaaaatatttttaggtttttgtttttttttttatttattttttaatttttttttttttttttagtggttttttttatttattgtttttttagttttattgttttgaatagtttatatttttataataaatttttttagaaatttattattttaaattgaagtatttttttttttattaacgtacggacgttattaataattgattttaataaaataatttgatataacgtttaggtgtattttgggtttgtttttttggaagtttatagtttgtatttatttttttttttatatgttttaaattttttttttttatattttttgttatagttataagttttaaaatttaaggatgatttataaaatttggtattttcgaagtgcgtttttcgaaataaaggataggaaaatattaagaggggttattaatttaataatagggtaattagaagttaagtttaaagtgtattagtttgttttaaaattataaacgatttgttttgaaagaaatttaaaatgaattgtgtttttggatgtgaatagatgatttttggaatgaatgaaaagtaagaaaatagtaatatagtattttttgaaaaaaggtttttttttttattttaagtttttatatattttttaatttcgtatgttttgtatatataattttaaattaagtggtttttttatttagttaacggtattattaagataatattacgtatatttttttatttatattttaaataatttttaaaaggtttcgggggagagcggtaaagaaatatacggtttgcggaaaaggagaaggtttgattggtacgttagggaattcggcggttttcgtcgttgtgggtatgcgttgtatatgtttttgttcgggtaaagaggcgtgttcgcgttattgagtgacgcggttcgttaagtcgtagtttttaagtgagttcggttcgatttttttcgtattagtttttaattatttttttgatagtattagttggtcgttggataatttttttcgtcgcgatgcggtttattattgtttcgtttagtcgtcgaataatttttgttacgaacgatattttggcgttagaagagttaaggaaacgtttagatgtttaacggaagtgtttttagttaattattttagtgtttcgtgtttacgttttttttttagttgtagtttacgttatttagttttattttttagcggtagttattgattggatagtttgaatgttagttaaattttttaattttgtgggttgttgggttttttcgtttttttttgaagcggttattgttcgttatttagaaggatatgcgtttgcgcgttagagatcgttgttcgttttttttattggttcgtttttaggagttcggggaatacgaaatatttagttaataggagtagagatgtcggaatcgggtttgtgtgtttttgttgaggtgatttggcgtagagcggaggaggtgtttggcgttttttaggttttttttttttttttgcggtttttttaacgttggttttgtttttgtggtttttcgtagaatgtggatgacgtttaaaagaagtaagatggaagtcgacgaggttttagtttttcggttcgagtggatttagcgttatttggtggtggagttttcggagggcgatggggttttgtgtttggtttgtcgtcgttttatcgtagttattcgcgaacgcgacgttaggcgttattacgaggttgagtacgaatattacgagcggtatgtggcggacggcgagcgcgcggttttggtggagcgtttgcgttagggcgatttgttcgtggttttttttatttttgaagagagagttgttcgtgtaggtttcgggttttgtcgttttttggttttgaagggtcgcggttggggtgagggggattttgtatattagtgtatggaggtgttgttgagagaggtattgttcgagtatgtaagcgttttgtaaggcgttgatttatttttagatattataaggtagaggattttgagtattgataggaatttacgtaattagttttttaatcgagttagggattttaaagtttatttttttgttttggacgattaggtttttgtggtttatgagaattattttttggtttttattcgcggtgtaggttttgagttggaggtgtaagaagattttttgattataattaatttgatttattattttagtgttggtgcgtttatgtcggtaattttagagtttttgtagatagtagggtttagtttgtagagaatggttggattgattacgatttatattttgaggatgattggtgagaatttaggattcgttttatatatgagagaaaaggtcgtaagttttaattgttggaatgttatttattatttaggatttttttatttggaattgttgagtttttatgatgtagatgttaattagattataaatattatattcgaatggatagttttgattaagattagaggcgttaggcgatttgaattttagattttattaacggaatttgaattagagtatggtgaaagggttaatggacgatgtttgaataattggtttaggagagggaaaattttaaaattaatattttttttaagaaaagaaatggaagcgtttttggttttagtaggggtaataatagtttattttttagataaataatggttttgtgattttggttttttggtggatattatggaatattttcgagaatttagtgaagaattacgagttagtaaagtttttgttgttgttgtttttgattatatttgtattttcgaagttaagttgaatttattttaaagatatattgaggaaaaaaatttaatagatttttttgtttttagagaagttgttgatgagttaaaatagtaaaataaggaagatgaaaaaatatttgattttgataggtattaaatggtgatttgtcgtttttaaaaagaatttgagagatattttaaggattttaggtttattaaaaaggatttagaattttttttaaatttatttaattttaaatttgaatatgtatttattttagtgagggtggagttaataaaattttaggtaaatattaatttttggaatgaatatagaattaaagatttggggtagttttatgttggattgtttgttgaattttatttaattattaaaggggttgtttgtaaggtggtatttttgtttgatagtaattaaatttgtgaaaaggtttttttatatttgattcgaaattaatatattttgagttagttattaatagatgagtatttttaagttttgtttcgggttgttataattgaaatggagttcggttgggatgattttgtgagagaaagaaatgaatttaatttataaggttttgtagtataagattgaaaaatttaataagaatttaattttaaaagtaaaaattggtttgagtttttaagtttattaatttggattgtgagaaagtattaagtattagtcgtttaaattgattataattaaaattttgatagttgtttttttttttattttaaatggtagtatgggattgaaatatgagaatgttattttttttaaaatttagtttagtgataaagttattgttttttatgatatagttaattttaaagagatttagtattaatgtgagttgaatttgtagtttgttttttaggtgttttgaagataaatgttaaaaattttagtttttattttaatggagtgttaaaattttgatttatatagttttaaattattaattttttaaatgtgtttttgaattaatttgtagaagtttatatagtaagtttataagtttttaaaaaggaagtttatatataatagtggaggtgttttgtttaattattaaaatgtttgagatttttttttaaatatttttgagttcgaaggtaatattgatagatttttttttttttttttttttattatttattttagtgataatatattattgatagaggaagttattagaattatttttaagttttagatataggagattttatgtaatttggagataagattaattattgggggttttttttggattttttttttaataattgggggttattttattagtttgtttattaaaggattatggtaagtatagaattttaatggttgttagttagtaattttttttttttttttttttattgtagatataagtttggttttattaaaaacgatgaggaaaaaagattgtattttaggattaggaggtgtgagatattttagtttttttgttttatttgcgtgggtattgttgttttattttaaaaaattttgtttaaagtaaatattttgttttaaaatgatatagtattagattttgttagatgttagaaatggatttattttaaaatttggaattgtcgtatatattttatatgtaagatagtatataagtagaaatatttaaaagtagttttatttatagattgtagtaattttgtatttttattaagataatttgttttgtgttaaaatagtaatttttaaatttttgtttattatgaaaaggtaattttaaagtttattatgtaaaattaattataaataggatttaatttatatttatagatttttttaagtattatataatttaaaaatttttgttttaaagttttgttttaattattgaaatattttaatttgtggttattaatttagtaaatttaaggaattaggttatgattaagaatttaggtggaattgatgtttgggtaattaaaataaatggtataagagtttaaaaattaaagttgtgttagtggtttttaattagaggtagtaatttgttattttagaggatgttgagaaatgtgtaggggtatttttttggttgttatatttattaggggtttttgttggtatttaagtttaaagatatttatttttgtagtgtatgggatagtttggtataatgaagaattagtttttttaaaatgtagattattttattttaagggatagggtagattattattagaagtaaaattaaaagtataagttgggtaaattgatagaatattagataggagagattaattttaattttttaaatttggttagtaaagtgtaataaaggtattgataagttttgttagtttattatagtatttgtaaattaggaattaataattgaattagatttaagggttttgttttgttatatatatttaaggtagaaaaaaagttatatgtcgattaggtatttattaagaatggttaagttgagattttggttaatagagtaagtttatatatttagagaaataatatagtggaaaatcgaaaaaaaaaaatagaaaaatttatcggtaattttttaatagttttgaatatttatagtagagttttattatttgagagaaagattggaagatttgaaagttatttttgttttttaattttagttttttaaatattgaaattttgtatattttgtgaaattttagtatgttttgtttaaggtgttaataaaattagtttgtattatgtagttattgagtgagggggagatataagttaaggattttaaattgatttttagttatagagaatttgttataagttagttttgtttgtaaaaaaaaaaaaaaaaaaagaaaaagaaaaaagtgtattttattgttttttgtattaagtaattttgtaattgtatggtagtttttttttttttaaataaatatagttgttattggttttgttgtagtagtgaatatagttaaaatacgtatattaaaaaaaaaattattaggtttttattagttattgttttatagtttatttttattagtttttttgatagatttgtatttttagtgtttcgtattgttatttaaattgttttattatgttaagtttttgttaatagttttattttttttgaaatatttgaatatttgatgattttagttttgaggagatattatttttaggtgtgtttttttagtttttgtaggtattttttttttttaatatttgtttttcgtatttttaaaaaaatttgttttagattgttttgttttgtgttagttcgttagttgattttatttttttttatgg

SEQ ID NO: 159 - DNA, 9510 bp, Artificial Sequence
  chemically treated genomic DNA (Homo sapiens)
  unsure 310, 626, 692, 746, 779, 1117, 1183, 1188, 1378, 1382, 1473: n is a or g or c or t
  unsure 1523, 1935, 2923, 2931, 2943, 3423, 3690, 3707, 3842, 3856: n is a or g or c or t
  unsure 4181, 4203, 4397, 4727, 4736, 4805, 4838, 5261, 5272, 5414: n is a or g or c or t
  unsure 6104, 6313, 6694, 6698, 6836, 6851, 7445, 7457, 7501, 7512: n is a or g or c or t
  unsure 7779, 7834, 7872, 8484, 8486, 8689, 8801, 8816: n is a or g or c or t
ttgggattataggtatgagttattatatttggttaatttatgtgttattttaaggtgtttgtgtgtattgtttaataatttttagatatatatgtggttttatatttatttaattatgttaaggtttaaaaatgtgttatgaaaagtttttgagatttattgtagtttatttaatagtttggtatataattaatgtttataaatattttataggtgtttaaaaaaatatatagtttttaatttttgggtgaaatgttttatatatttttattggattattttttaatattgttatttagattttttatantttttattgatttgtgtatttgatatattaaatattgagaaaggtgtattaaaattatttattaatatgggtgattttatttttttaatttttatattattttttgtagtatttatttaaaatttatgatattagatgtaattaagtttagaattttattaatgttattagtttgttgaattgattaatttttttttttggtaaaattttagttttattataattttattatattagtaattttttatttatatttgtttgatatattttttgaattattttatttttaattatgttatagttttatgttttaagntgtgttttttttaaatagaagatagttgaattttgtttatttgtttgttttatgttaatttgtgtntttttaattggagaatttggtttaattatatttattgtaattaatatattttgnatttatttttagtattttatgttatattttttnatatgtttttttttaatattttttatttttttgtttttttttagattgatttatgtttaattttgttttttttttttgtaaaatttgattttatgtattttatttttattttttttgtggttgtattagtattttttatatatataattaatttaataaagtttaaagtatataattaattaatattattatttttttttttaataatataagtaaggattttattttatttatttagttagggttttattatgttgtttaggttggttttaaatttgggtttaagtgatttttttgttttagttttttgagtagttgggattataggtgtatattanttaggtttgattgagtaaagattttagagtgttttaattttaattaaatttttttagtttatatanttttngttgtttggttttttagttgattttttttattattatttttttatttttgttaatgtttgtttagatttatttatgttgttattatattttttgtttattatttttttttatatattagattttttataaattattattttgttttttaaatttatttttaagaagtttttttggttatagttagtggtngggnaagttttttaatttttattttgaatagtttagtttggattattttattatagatttttaatttggaaatatttaggttatataattagtantaaattttatttttatatttatttgaagtttggttaaattatgaattttntatagaaagtttttgttgtaagtttattagtttgagttaggattgaaaaaagtaagtatatttatgttttttgtggaagagtaggggtgaggagtcggagttggggttgagttttattttttgttagtttatatttttattttgttttggattatattttgtatgaagttttttggtatttgtaagttttgttaaagtgaaagttttaggtcgtttaagtttagtgaggttttttgaaatggatagatattattaggatagttattgtttttagtatttatatattttttttgatttttttgtcggtattataagaaagatattttgatttagattttaaaagagggtttttggattttttgtaagaaagaatttagaatgaatttataaagtgaaattaagtttattaggnaaagtaaaggaataaagaatggttattttataggtatagtagtagtataggcggtttgattgagtaaatttatagttatttttttattatatgttaaataaggggtagattatttatgagtttttagggaaaggggtagagattttttggaattgagggttttttttttttttaaattatataggttaatttttggatgttgttatagtatttgtaaattgttatagtattggtggtagtgttttttagtatgttaatatattaaaatttatatataatgagtagtgaggattattagcggttatttttatggttattttggttttggtaggttttggttggtttttttatagtattttgttttattagtatagtttttttgatttatattttgtgttaatcgattttttatattatcgtatgattaagaaggttttattttttgggaatttagtttagtaggttttagttttattttattcggtttttatttaagatggagttgttttggtttaaatgtttttgatagttttttttgtttttggtttttaagatttttttttatttgtttgttggtttaatggtgtatataaaaatgtattatagtatttttaaaggatttaaaaaaatttattaagtatttgtgttatatatagtggtttttaaggatttattttgtaaattgttagaattaatgtattttatttttaataatttatgtatggttattaggagggttatttttttttttatttttataagtggttaaattgagtgattttggattattttagtaagttttagttgtttaaatttatttattgtaaatagttggggattttttaagattttttaaaaaaattattttaaatttgtataaatttttgggaggagatttagtatttttgatttaaaaataaataaataaataataataataaaaattttaagtttttaattaattttaatgaaattaagatattgtaangggagatngtgggtagtttnaagttatttaagaggttgaggttgaaggattgtttgagtttagagttagagattagtttgggtaatatagttagatttttatttaaataaaaaaaaacgaataatagtaataataataaaaaatagaaagaaaagagaaaaagaaaaaaatatttgttttgggaaattagttattaatttatattgtcgattattagttgaaagttagagtttaaaattaattttaagtaggtatttttttttttttttgttatatattttaagtaaattttttttttttttttaaaagagtttttatcgttaggtatgattgttaatatttgtaattttagtattttgggagatcgaggtgtgtagattatttgaggttaggagtttgagattagtttggttaatatggagaaatttcgaaagtaaaagtatatatatatatatatatatatatatatatatacgtaagtaaaattagttcggtgtggntggtgcgtgtttgtatttttagttgtttaggaggttgaggtaggagaatcgtttgaatttaggaggtagagattatattattgtattttagtttgggcgatagtacgagattttgtaggaaaaaaaaattttagttgagatgttttttagggcgttagttaagtttcgtatgtttatttgtgggagtgaaaatattaatatttcgggattgttgtgaggattaaatagtgtttgtaagatgtatagagaaagcgtaaatagacgttnaatagtatttgttaggntttatatattttattttttttttatattaatcgaattatttaaagattggttagttttttggggaaatgtttttttattgtattttatttattaggatgaattattttttttttttgttttttagttttttttgnttatgaaaaagatnggaaaattttttagtataaggggattttttttaagtagtaaattattttgatattaaaaatagataattgtaaatttagttttattttagtatgaatttcgtagtggagtgtgaatatgtgtgtgtatgtgtgtgtgtgtgtgtgtgtgtgtgtgtgtgtaattatttgtgatttaaaagaggaaagggattagtattaaaggtatttgtatattggaagtaaaaaaaaaaggaagtttagtttttttgagttttttggtaattatagttgttaaaggtagtttttataaagaaattgtttttgtgtttaaagtatttatttttnttgtttgtatttatttttttgnaggaggaatcgttgtgttttgagtgaaaggggtacgttgtttgtttgtattaaattgtgagggtttaggcgtattacggttgattttagtaggtagagtagatatattttagtttattttttttttttttattttttatttttaattttcgatgtatatacgttttaagattttttgaagttaggaggtgggangcggagagttttagtttagattttgatatgagagtatttcgattaaggaaaagaaagggaagaaagagggaagcggggtggagaaagtaggagtaaggaaggaaagaaggaaacggggagggagagtaagaaaaaagaaaacgaaggagggagggagagaggatatttaaatgaagaaggaaggaagtttggatttagggaggaaagggagcgggaaagagagcgaaagaagagcgtgagaagaggtaagtattatagttttcggtttataggggagagatggagtttttttaggattagagaatttcgaagagttcgtgtattgttttntttgaaagntttcgaagttaagtaattttaaaaatgtttagtaaagtttttttgggaatggtgagatggggggtgggngaggatgggatatttttattgttatcgttcgtnttttcgttttttcggtttttttatatgaagtgattggatttgggagatttagcggaaatttttaggttatttagggaattgtttttttttttggttttgtagcggcgaggcggggtagggggtggggggggtgggtcgtgagagcgtcgagacgcgcggggcgcggagatgtgtaagtggcgaagtttgatcgagagtaggttggagtagtcgtttaatttttggcgcgggatttgttgaggggttacggtgagtttttgtgggtgcgggtcggagggatgtttaggtgtttcgtcgttttacggttcgggcggaggcgggttcggaattttttttaagttcggttttagtttggagttcgcgcgttttgggcggatgtacggattgagaggcgtttggttgggtttttagttcgttattgtntattcggtttncgtgcgtttattggtcgggatgtgtcggtttagtagtttttaatttttttcgaattttattggtgagttttaggagagcgagttgagggagaaaggtttaaagggcgcgagcgtttagggcgttgggagttcgtgggacggngtacggggagggtagagttagtcgaggggagcggttgtcgggaggtgcgttgagtagggttcgtagttaaggtttagcgcgattcgagcgtttaggattttgcggtcgtggaggaggcgtgttttgggaaggagtcgttattgggatttgaagagtgaggggagggagaggggtttagagggtgatttggaggagggttttggaagttacgttaggttggttttttaggtttatttttatagttttttgcggtttttgttttggggagttatgttttgttatcgagattcgcgttattagattgtatcggggttgatttgggggttgggaatttgttattttgttgtatagatattgattttttttttttttttttaaaaagtaaggtttgtttttattttggtttttgtcggatttttttatttgtaatttatttttttatttttattttttttaatcggaagatttttttattattttatttttttattttgtttttaatttgattttttattatataattaatgtttaaattttataagggttggtcggtgcggggttggtgtgtttttttgtagatgaaagtttaagattttttaattggttttagtttatttgtttggttttaaaataagggtaattgtaattaaatatttttttttagtttttcgattaagtcgattttttttnttatatatgatttaaatggtaattttattaaattgaaaattagtatttgatttgtagcgttagtatttggaaagtgtttgtcggtaaatcgattgtatgaaggcgtgtagttttattttttgttatttttgtgggttttagtattttaaaaaattgtttggtaattttttggatttaattttgtgtttttggttgtagagtagtattanattaggggagtaatatggttggtatttcgtgtttagaatttcgtattttaggttgggaaatatttaattaatgtttgggaaataagaagatgatttattttgagtatttttgtttttagtttttgtagatatagtttaaatatggaaattgtttttttttttttttgtgttttagtttttatagaataaattgtaattgtatagtatagttttaggaatttgtagatataagttaatgttataatgtgtagtgaagatgaaaattgtttagttaagtttaagtttgtaagttaatgagattttttttttaataaattagttatttaggttttttgttttgattgtttgatatagtaatgtttatgtttaattggtataagnaatntgttgttttatattgttttgaaattaagtttatatttaaaatagtaatttattttgttggtaatattgtcgagttgaagtttgtaggtttttgttattttagattttttaattttttattttcgtttgtggtagtgtnttattttttcgtttnaaattttttatttaatatatttttagttgaagtgaaatattttaagaatataggtatgtttttgcgtattttgttttatatgggattataagttttaatttggtattttttttttttttgtatttttttgtttatttgttttttttatttttttttatgggattgggtgtggttaagttggatatttaggtatttggggtttagttatatgttttatagtgagattttagatattgttttttgatgttttaaagaaaaattgtgaattttttagaattaattggaaatgaacgataaagttaattaggagattaaatttgtattatttttgtttttgtttaatgtttttgaaaaaaggttattaagagtaaaagattttttttaagaatttatagggtatttataagagggggagatggaggaagattttgtaggtgatttaaagattatattgttttgatgtagtttttgttattgtttttatttttttgtaattgtttttgtaaatttgggtgttgatttattaagagtttagttgttttagtatttagttttaagggtaaggaggagaagttaagggaaagtaatttatangggagaaagaanatgtttatttattagttttattatattataaggtatggagtttnttatagagtantttgtaatttaattttgaggttgttttggtttattttttcgttttattttatagggatattgattgttatttttaaggaagaattaagaaaaaaaaaagtttttttatattagtaaaatatttttatatattgttttttgatatatgcggggggaataatatttaggaaagggaaatattttagtaaatgtgtttaatatttaggtgttttttaggatagttatgaaatatggggagattgggagaattattattgtttattttttntgtaaagtgtttagagtattattaaatttgttttttttttttttttgtttaattnaatatattattaaaataggattataattaatgtaattnttatattataattttaggggtggtgagattaagttagtatgttttatataattattaagtaagatattttaatatttaggtatattatattttatttttatttagtagatacggtttttattgtgtaataaaatatttttatttgatagtttgtttttgtttatagttttatgtaattaaggggatagtatgtttaagattttgtatttagaattttaaggtttagttgtggttcgtttattaataatttattgggaaggttaatttttagttttttgttgggttttttagattatattttaaatgtagaatatgtttttttttttttttatgttttagtttttataaaatatatttttagagaattgtgtgtgtttaataaagatttttaattataagagtatttttgagtcgttattttattttgggattaaattttaagagtaatttgtattgagttataaatagttaatttgttagtttaagatgtttttttatatagttatgtagaaaaatggaaattgtgtgttttaatttttggagattggttgataaagtgttattaggtttttgatgaaatttaatatttaggtttatatttttttaattttntntttttaaatttttatagtacgtttttattgtatgatgatatagttttattttgaatagtgattaaatgtgttttttataaagaatattgacgagttgtgtagttttgaatacgttgtttgatttttttgtgttttagttttttaattttttattttattttgtggtagtgtttattttttggtttaaagtttttaatatattntttagttgaggtgaaagattttaggaatataggtatgtttttgtatattttgttttatataggattataagtattaatttggtaattttttgtattattttgtttatttatntttttttattttttnttttaaatgggattgggcgtggttaggttggatatttaggtattttttggtatagtgagtgattatttttagaatgttgtttaattagttaatagatattggtattagtagtagtagtaattttgaattgtaaaaataaaggttgtttttatgattaaaataaattattttatgtgtttattcgttttgttgtttatttatattaatattttaaattattgtttagttaaaattttaaggtattagttattggtttttgagtttataaaggaagttattggagtaagatataaaattaattattgatgttagtttagagtttaaaagggtgagtttaaaatttttttaatgatggtatagtaattatttgtttataaattgttgaattaattttatttgagtatttaattaagttttattgtttaattttgttgagatttttagtgatatattaaagtaaaataaaataaaataatagtaataaaaaataaaaggttgtgattgagatttgttaaatttatttggttttatatattttgtatttagtaataaaattttgattttttaatagtaaaaatgtatttttattttaaaataattgagttttttatttttatttagttatattaagtatttggatatttttttttttatttatttgttttttattattagtatttttattttttgtaga

SEQ ID NO: 160 - DNA, 9510 bp, Artificial Sequence
  chemically treated genomic DNA (Homo sapiens)
  unsure 695, 710, 822, 1025, 1027, 1639, 1677, 1732, 1999, 2010, 2054: n is a or g or c or t
  unsure 2066, 2660, 2675, 2813, 2817, 3198, 3407, 4097, 4239, 4250: n is a or g or c or t
  unsure 4673, 4706, 4775, 4784, 5114, 5308, 5330, 5655, 5669, 5804: n is a or g or c or t
  unsure 5821, 6088, 6568, 6580, 6588, 7576, 7988, 8038, 8129, 8133: n is a or g or c or t
  unsure 8323, 8328, 8394, 8732, 8765, 8819, 8885, 9201: n is a or g or c or t
tttgtaaaaaatgaaaatattaataatgaaaaataaataaataaaaaagaaaatgtttaaatgtttaatgtggttggataaaagtaaaaggtttagttattttaaaatagaaatatatttttgttgttgagaagttaaaattttgttgttgaatgtaaagtatatagagttaaatgaatttgataggttttagttataattttttgttttttgttgttgttgttttgttttgttttgttttggtatattattgaaaattttagtaaaattagatagtaagatttggttaaatatttaagtaggattaatttagtagtttataagtaaataattgttgtattattattaagaaagttttaaatttatttttttgaattttggattaatattaatggttaattttatattttgttttagtggttttttttataagtttaaaaattagtgattaatattttgaggttttgattaagtaataatttgaaatattaatatagataaatagtaaaacgaatgaatatatgaagtagtttattttagttataaaaataatttttatttttatagtttaaaattattattattattgatattagtatttattaattggttagataatattttgaaaatggttatttattgtattaaaagatatttgaatatttaatttaattacgtttaattttatttaaganggggagtaagggggnataagtaaataaaatagtataaaaagttattaagttgatatttgtagttttgtataaagtagggtatgtaaaaatatatttgtatttttaaaattttttattttaattggangatgtgttaaaaattttaaattaaaaagtggatattgttatagaatagaataaagaattaggaaattggggtatagagaagttaggtaacgtgtttaagattatataattcgttaatattttttgtaaagaatatatttggttattgtttaaaataaagttgtattattatgtagtaaaagcgtattgtagaaatttaggggngnaaaattaaggggatataagtttaaatattaaattttattaggggtttagtgatattttattagttagtttttaaggattagaatatataatttttatttttttgtatgattgtataaaagaatattttaaattagtagattagttgtttatagtttaatataaattgtttttagaatttggttttaggatgaagtggcggtttagaaatgtttttatagttaaagatttttgttgaatatatataattttttaagggtgtgttttgtggaaattgaggtataggagaaagaagaaatatattttatatttgaagtatggtttgggagatttagtagaaaattagaaattaatttttttagtgaattattaataagcgaattatagttagattttaaagttttggatataaagttttaaatatgttgtttttttgattatatgaggttataagtaaggatagattattaaataaaaatattttattatataatgaaaatcgtgtttgttaaataaaagtggaatgtaatgtatttgaatgttaaaatgttttatttaatggttatgtaaggtatgttggtttagttttattatttttggggttatgatatggnaattgtattgattgtagttttattttaatagtgtattnggttgggtaaaggaaagaggggaataaatttaataatattttggatattttatangagaggtaaataataataatttttttagtttttttatgttttatgattgttttaaagaatatttgaatgttaagtatatttgttaaagtattttttttttttgaatattgtttttttcgtatatgttagaagataatgtatagaaatgttttattggtataaaaggattttttttttttttagtttttttttagaaatgatagttagtgtttttgtaaagtaaagcgaaggggtgaattagggtagttttagggttaaattataggntgttttgtggnaaattttatgttttgtggtgtagtaaagttagtggataagtatntttttttttttntgtaagttatttttttttggttttttttttttatttttgagattgggtattgaagtagttgggtttttaatgggttagtatttaagtttgtagaaatagttatagagaaatgaagatagtgatagaagttgtattaaaataatataatttttgaattatttgtaaagtttttttttattttttttttttgtaaatgttttgtaaatttttaaaggaagttttttgtttttagtagtttttttttaaaagtattgagtaaaagtagaaatgatgtaagtttaattttttaattaattttgtcgtttatttttagttaattttggaaggtttataatttttttttaagatattaggggatagtatttggaattttattgtggaatatatgattaaattttaaatatttgaatatttaatttaattatatttaattttatagagaagagtaagggggataagtaaataaaagaatataaaaaaaaaaaaaatattaagttgaggtttatagttttatataaagtagggtacgtaaaaatatatttgtatttttaaaatattttattttaattgaagatgtgttaaataaaaagtttnaaacggaaaagtggnatattgttatagacgagaatagagaattaggaggtttaagataataagaatttgtaaattttagttcgataatattattaatagaataaattattattttaagtgtaagtttaattttaaagtaatgtaaagtagtanattntttatattagttgagtataagtattattatattagatagttaaagtaggaaatttggataattgatttgttaaaaaggaaattttattgatttatagatttagatttagttaagtagtttttatttttattgtatattataatattaatttatatttgtaggtttttgaagttgtgttatgtaattatagtttgttttatggaaattgaggtataggaagaaggagaaatagtttttatatttaaattgtgtttgtagaagttgaggatagaggtatttaggataaattatttttttgttttttagatattaattaggtgttttttagtttgaaatacggagttttggatacgaagtgttaattatattatttttttggtntagtgttgttttataattaaagatatagggttaagtttaagaaattattagataattttttaaagtgttagaatttataaaaatggtaggggatgaagttatacgtttttatatagtcgatttgtcgataagtattttttaaatgttgacgttgtaagttaggtattagtttttagtttaataaaattgttatttgaattatatatggngggaggaatcgatttgatcgagaagttaaagagggatatttggttgtaattatttttattttgaaattagataaatagattgaaattagttaagaggttttaaatttttatttataaaaggatatattagtttcgtatcgattaatttttgtgagatttaagtattaattatataataggaaattaggttaaaagtaagatgaagaggtgggataatgaaaagatttttcggttaagaaaagtaaaaatagaaaagtgagttataaatgagaaaattcgatagaaattaaaatgaaaataaattttgttttttaaaaagaagaaaaaaaaattagtgtttgtatagtagaatggtaaatttttagtttttaaattagtttcggtgtaatttggtagcgcggatttcggtaataaaatataattttttaaggtagaggtcgtagggaattatggaaatgaatttgaagagttaatttgacgtgatttttagagtttttttttaggttattttttgggtttttttttttttttttattttttaggttttagtagcggtttttttttagggtacgttttttttacggtcgtagggttttgggcgttcggatcgcgttggattttagttgcggattttgtttagcgtatttttcggtagtcgtttttttcggttggttttgtttttttcgtgtntcgttttacgggtttttagcgttttgggcgttcgcgttttttggattttttttttttagttcgtttttttgggatttattagtgggattcgggagaagttggaggttgttgagtcgatatatttcgattaatgagcgtacgngggtcgggtgngtagtggcgggttgagagtttagttaagcgttttttagttcgtgtattcgtttaaggcgcgcgggttttaggttgaggtcggatttgggggaggtttcggattcgttttcgttcgggtcgtggggcgacgaggtatttgggtattttttcgattcgtatttatagagatttatcgtgattttttagtagatttcgcgttaggagttgggcggttgttttagtttgttttcggttaagtttcgttatttgtatattttcgcgtttcgcgcgtttcggcgtttttacggtttattttttttattttttatttcgtttcgtcgttgtaggattagagagaggagtagttttttgggtgatttgaaggttttcgttaggttttttaaatttagttattttatgtgagggggtcggggagacgggggngcgggcggtggtaatgaaaatgttttatttttntttattttttattttattatttttaaaagggttttgttaaatatttttagaattgtttagtttcggggntttttaagnaaaataatatacgggtttttcgggattttttagttttgagggggttttattttttttttgtggatcggagattataatgtttgtttttttttacgtttttttttcgttttttttttcgtttttttttttttttgaatttaagtttttttttttttttatttaaatgttttttttttttttttttttcgttttttttttttttatttttttttttcgtttttttttttttttttttgtttttgttttttttatttcgtttttttttttttttttttttttttttttggtcgaagtatttttatgttaagatttgaattgaaatttttcgtnttttattttttgattttagggaattttaaaacgtgtgtatatcggaggttgagggtggggagtgagaaagagaaaaataaattaaagtgtgtttgttttatttattgaaattagtcgtaatgcgtttggatttttatagtttaatgtaagtaagtagcgtattttttttatttaagatatagcgattttttttntaaaggggtaaatataaataanggaaataaatattttaggtataaaggtagtttttttgtaaaagttatttttagtagttataattgttaaggagtttagaggaattaaatttttttttttttttgtttttagtgtataagtatttttaatattgatttttttttttttttgaattataggtaattatatatatatatatatatatatatatatatatatatatatatatatttatattttattgcggaatttatattgaaataaaattgggtttgtaattatttgtttttaatattaaaatgatttgttgtttgagaagagtttttttgtgttaaaaaattttttnattttttttatagntagagaaagttgaaaagtaaggagaaaaggtagtttattttaataagtggaatataatggagagatatttttttaaaaagttaattaatttttaaataattcgattaatatagaggaaaaatggagtgtgtagantttaataagtgttattngacgtttatttacgttttttttgtgtattttatagatattatttagtttttataataatttcgaaatattggtgtttttatttttataaataagtatgcggggtttgattagcgttttggaaagtattttaattggaattttttttttttatagagtttcgtgttgtcgtttaggttggagtgtagtggtgtgatttttgttttttgggtttaagcgatttttttgttttagttttttgagtaattggaaatataggtacgtattanttatatcgagttaattttgtttgcgtgtgtgtgtgtgtgtgtgtgtgtgtgtgtgtgtatttttattttcggggtttttttatattggttaggttggttttaaatttttggttttaagtgatttatatatttcggttttttaaagtgttggaattataggtgttagtaattatgtttggcggtgaggatttttttaaaggaaaaaaaaggatttatttaaaatgtatgataaaagaaaaaaaaaatgtttatttagagttaattttagattttgatttttagttgatagtcgatagtatggattggtaattggttttttagaataaatattttttttttttttttttttttttttgttttttgttgttgttgttgttgttcgtttttttttgtttagatgagggtttgattgtgttgtttaggttggtttttaattttgggtttaagtaattttttagttttagttttttaagtagtttnggattatttatnattttttnttataatattttgattttattaaagttgattagaaatttagggtttttgttgttgttgtttgtttgtttgtttttaaattaagaatgttaaatttttttttagaagtttgtgtaagtttgagataatttttttaagggattttaaagagtttttaattatttatagtaagtaaatttagataattgaggtttattgaggtggtttaagattatttagtttggttatttataggaatggaggagaaagtagtttttttggtggttatatataagttattaagaatggaatgtattggttttagtagtttgtagaatggatttttaaaaattattgtgtgtgatataaatgtttgatgaatttttttaagttttttaaaaatgttatagtgtatttttatatgtattattgagttagtaggtaagtaaaagaaaattttagaagttaaaaataaagagagttgttagaggtatttggattagagtaattttattttgaataggggtcgggtaaaataaggttgagatttgttgggttgaatttttaggaggtgagatttttttagttatacgatgatgtaggaggtcggttggtataaggtataggttagaaagattgtgttgatgaaataggatattgtaaagaagttagttaaaatttattaaaattaagatggttatgaaagtgatcgttggtggtttttattgtttattatatgtaaattttaatgtattagtatgttaaaagatattattattagtgttatgatagtttataaatgttatagtaatatttagaagttaatttatatagtttaaaaaggggagggatttttagttttaggaaatttttgtttttttttttgaaaatttatgaataatttattttttgtttggtatataatgaagaaataattgtaagtttatttagttaagtcgtttatgttgttgttgtgtttatagagtagttattttttatttttttattttntttaataaatttgattttattttatggatttattttgaatttttttttgtaagaggtttaagaatttttttttggggtttggattaagatgttttttttgtaatatcgataaaaaaattaagaaggatatgtgagtgttgaaaatagtagttgttttggtggtatttatttattttaagaggttttattggatttaagcgatttagagtttttattttaataggatttgtaagtgttaagggattttatataaagtgtagtttagggtaaagtgaaaatgtgggttaataaaaaatgaaatttagttttaatttcgattttttatttttatttttttataagaaatatagatatatttgttttttttagttttgatttaggttggtaaatttataataaaaattttttgtanagaatttatgatttggttagattttaaatggatgtaggaatagaatttantattaattgtgtagtttgagtatttttaagttaaagatttatggtaaagtagtttaagttagattgtttaaaataaaaattgaaaaatttntttnattattgattgtaattaaaggaattttttgagaatgaatttaggaagtaaaataatagtttatggaagatttgatatgtgagaaagaatgataagtaaagaatatagtaataatataaataaatttaagtaaatattaataaaaataaaagaatggtgataaaaaagattaattaaaaaattagataatnggggntgtgtaagttgggagagtttaattagaattaaagtattttgaagtttttatttaattaggtttggntggtgtgtatttgtagttttagttatttaggaggttgaggtaggaaaattatttgagtttaagtttgagattagtttgagtaatatagtgagattttggttaaataaataaaatgaagtttttatttatgttgttggaaagaaggataatgatattgattaattatatattttagattttattaggttaattatgtatgtaaaaagtattaatataattataaaaaagataaaaatagagtgtataaggttaagttttgtagaaagaaaaaataaaattaaatataagttaatttaaaggaggatagaaaaataaaaagtattagagaagaatatatnaggaagtataatataaaatgttagaaataaatntaaaatatattaattgtaataaatataattggattaaattttttagttagaagnatatagattggtataaaataaataaataaataaaatttagttgttttttgtttaaaagagatatantttaaaatataaggttatagtatagttgaaagtaaaatagtttaaaaaatatattaaataaatataagtgaaggattgttggtatagtaaagttgtaataaaattaaaattttattaaaaaaagagattaattaatttagtaggttgataatattgataaaattttaagtttgattatatttagtattataaattttaagtaaatattataaaaaataatataagaattaaaagggtaaaattatttatgttaatgggtgattttaatatattttttttaatatttgatatgttaagtgtataaattagtaaggantatagaagatttggataataatattaaaagataatttaatagaaatatatagaatattttatttaagaattggagattgtatatttttttaagtatttatggaatatttataaatattgattatatgttaaattattaaataagttatagtgaattttaaagattttttataatatatttttggattttaatatgattaaataaatataaaattatatatatatttagaaattgttaaataatgtatataaatattttaaaataatatataaattggttaggtgtggtaatttatgtttgtaattttag

SEQ ID NO: 161 - DNA, 7040 bp, Artificial Sequence
  chemically treated genomic DNA (Homo sapiens)
atatagtttggtttgagggaagatgttagtatgtgattataaattggataaaattatttaagatagtcgtattttaattagattaaattttaaaattttaaatatttataagtattttatgtttttaaaaatatgagaaatttgtaagatattattaaatttaaaggtttttaaaattagtttgaaatatatttgtatgttttaaaattttttgtgaagtttagttgtatttagataagtaaaattttatttacgtatttttagagttaaaatataaaatttaagcgattagggtaaagtggaagtaattaattttaattttttcgtatggaaatagatagtgtgcgttggttatatttagggacgtgttttatgtaatttataaattaagatttgtttcgattatattatatggattatataaaaattaaagtagttgtatatgtattttattgatatagaaataagtttatgttatattgttaagtataaaatttaaattttagaatgttaatagtataattttattgaagtaaaaaaaaattgatatgttttttaagtttgagtttataatttttgtatgggaatttttagtaaagcgtatatatttatttatagtttaattttttagttttaaaaaaggtaaaagtgaaatttcgataatgaaatttacggttgtaattagtaatattatatttgtacggttgtaatattcgcgtttttcgtattgtaatttttggaatttattgtaatttttcgaattcgttgttattcgagattttttaatttggcggttttttgttaggattcgggcggtcgttaagagtgcgtaggcgtaagcgcggtcgtcgtcggtggggttttatgtgttgttgagattgttgttgagtttttgggtttttttaagattgttttttaaaagacgacgtgatgattttaaagagaaaggaaaatttgttgcgtacgtagaagggtaggttgggcgtattttgagcgtttttcggggatcgacggtttcgtttacgtgttttcgggtattagcgcgtttaaagttcgtgtattaggaaacgtataaaagtattagcgggcgagttcgagggcgagtttacgggtagttaggaggcggcgagggcggtttgttttttagagattggggaattaagaaaggtagagttattttttcggttttagcgtagtaagtgtaggaggtagggagggcgtagcgtttcgtcgtttacggtattcgtggaattcggtgcgcgtttcgggagttggggcggtttaggtttagcgtgtttagaaagttaattacgttggttaggaggacgtttttttattattcgcgatttttaggttttgattaaagttaaattaaaaggagttattcgtttcggtatttgttgttatttttgtgataaatatggtgtttgatacgaaagtattttaatagttatgttgttaattaaagaataaaatacgtaaagtttgtgcgttaagaatacgagagtatttcgttttttaggaggtgtagtttattttgttttttttgttttatatataattttaaggagaattttttgttattaatatattttgttttttgtttttgggggatgatataggtatattgtatttgattagattagtgttaattttttatttacgtttttattatatgttgtattattaatatagtaggattttatatttttaatcgtaaaatttaagagtagaaaaatatttaaattgtatgttagtttaatatgaaaacgagttattttagttttgataggatatttttaaattaatattatttaataaatatgttttttattcgtataagtttatatatatggttttttaaatgagttttataaataataattagtattgaggttttgatttaagtatttgaaattttgttattttttataataattttgagatgggtatattttttttattttgtagataaggaaataggtattgggatggtaagaaatttaggttatttggtttttaatagttttttattattatgttaaagttttatttatttttgagatttaaaatattatatagtgtatatatatttggtaattaaattaggattaaatattaaagttaagggttaagtatagtgttttgtaattttagtattttgggaagttgaggcgggtagatcgtttgattttaggagtttaagattagtttggaaaatatggtgaaattttattttaataaaaaaatataaaaatagttgggtgtggtggtgtgtgtttgtggttttagttatttgggaggttgaggtgggaggatcgtttgagttaaggaggtagaggttgtagtgaattaagattatattattgtattttagtttgggtgatatagtgagacgttgttttaaaaagaaaaaagtaaaattaaagtaagaatataataagaaatatgtttggtattgtgttacggggagaaaaaattaatagggagataaattttgtttttagggtaagtgtaatttgttgagtaaaagaaatattttaagatattttaaaaaagaaaataaaggttgttgtaaattggatatttaattaaatatttttgggtagattggtagatgatagatttaatgaatttggggtttataaatatatagaatgttatatttttattaatattttatgttttgggtaaagagtaaaattaattttgaaaatgaattgtgtatgtaattattttaaaaataaagattatataataagttatattattttgtattatgtgtaatatttagggggttaaggtatttttattttgttaatatttatagtatttttattatataattattttagagttttgaattataattttaattaggtgatagttattgagtaaattttgtaatgtaaatttattatagaatataattgtattattttttttttatttattggtatttttttatatttggggtttgatataattgtatataataatttttttattaaaatattttatagagttggttaggtatggtggtttacgtttgtaattttagtattttgggaggttgaggtaggtggattatttggggttaggagtttgagattagtttggttaatatggtgaaattttatttttattaaaaatataaaagttagttgggtatggtggtatgcgtttgtaattttagttattcgggaggttgaggcgggagaatcgtttgaatttaggtggcggaggttgtagtgagcggagatcgtgttattgtattttagtttgggtaataagagcgaaattttgttttaaaaaaaaaaaaaagattgaggtttaagtaggttaaatattatatatatattagattatatattaagttatataggttgtatagaatagaaattttattttagggttttatagattttaaattgtttttgtaaatggtttatgtttattaatttatttttttaaagttaatatattttaaaaatagaattgttattattaaaatgtggttatatataatttaatatataagtgttttagaagaagggaattttattatttgattttttaaaatatagattttaatatttttgtgtgtgtgtgtttttttatgaatatggtaatattattggttttttttttaaagatatggtatgaaattaattttttgtttagagttaggattttgttttattatttagtttggtgtgtagtggtacgattatagtttattatagttttaaattttttagtttaagttttttttcgttttagtttttaaagtagttaggattataggagtgtattattatatttagttaattttattattattttttgtagaggtaggttttaaatttttggttttaagtggtttttttattttagttttttaaagtattggtattataggtataatttattgtatttggtagaaaattaatttttattataaaaattagaaagaaagattttattgtttgatggttaatattttgaattttattttaatttttggttttttatattatatgtaggtattagtgattttgtgttatttttatttttttagatttttttttttttataatttttttatatgtgttattatttgaagttttgattatagttttgaattatttttatttttttgttttttttaattttggtttaaaatttcggtaatttatttgttacgaagtttagaattttttttgtaagtgagttgatcggttgggttaaatcgttttggaagggaaggattgttaggaagttagtatgttgttaagatgttttgttaatttgttgtgtaagttgtatagagtgttaggggatttttttttttattgatgaatttaggtgtgtgttatgatttgtattagtgattttatttggattgattaaggttgtaattttttatttatatgaatgttgtatttagtttttttttgtaattggttaaataaatgtttgttgtttgtattttaatttttagttaatatttgttggaagtgatttaatgtagttggagaatgatattaataattattatagtttgtaaagtgtgaaataattttattgtgttttgtggtttttttagtttgaggattgataatgtgtagcggatgagatttgaaaaaaacgtattttattataatttaagaaataatgtaaaagaggggtgagttttgaggtagttttatgttgtttgtttggtatgagtttgtttttataagaatttattttaagtgtggaagggaaatgtttttatttgaaagggatagttgtgttttatttcggtttttttttttatttgataaaaatttttgttgagtgatagtatagatgtagtttatttggaataagtgaaggaaaaggagaaaagggatgaggtggagcgaaggagtagttagttatgtttttaaagtttcgcggttttttttagtttttttatttaatttagcggttttggtgtttttttgtaaagtgagatgttttcgtttttggttttacgtttttattttcggagcgagttttttttatcggtggacgcgcggttttgtagtagttttttagagttatttgcgaagttgtttttgggggttatttttttcgggtttcgcggttgtcgcgtcggttggtttggtgttttattgattgggagtaggtgtgtttgttgtagaggttgggagttggagggtttggttcggtgtataaggcgatttatcgcggtgtttttgtggttataaagtaagtgaataagtgtattaagaatcgattagtatttcggcggagtttttgggttgagtttaacgtagtaaggttgcgttacgataatatcgtgcgcgtggtggttgttagtacgcgtacgttcgtagggtttaatagtttagggattattattatggagttcggtggtaacgttattttatattaagttatttatggcgtcgtcggttattttgagggggacgtaggggagttttattgtcgtattggaggatagttaagtttgggaaagtgttttaagtatttattagatgttgtgaacggtttgttttttttttattcgtaaagtattgtgtatttggatttgaagttcgcgaatattttgattagtgagtaggatgtttgtaaaattagtgatttcggttgttttgagaagttggaagatttgttgtgtttttagatatttttttattttttaggaggtatatatatttatcgcgtttcggagtttttgaaaggagagggcgtgacgtttaaagtcgatatttatttttttgttattattttttggtaaatgattattaagtaggcgtcgtattcgggggagcggtagtatatattgtacgcggtggtggtttacgatttgcgttcgttttttttcgttgtcgttttcgaggattcgtttttcgggtagcgttttggggacgttatttagcgttgttggagatttagcgcggcgtagaggtcgagcgcgcggttgtttttggtggattttatttttttgaaagttgaattcggttgattgaaaatttggttaagataagtttttgtttgattttatttgtttttaaaggaagtggagatgtcgaagaaaatatatttgtaggatggagttttagaaaataaagttattaaaaatttttttagtttttagtgttttttttaggatatattagtaaagttataagtttagtatttgttgttttagtattgttagtaattaattttatttatatagttatgtgttttgttttttattgttagtattttatttatttaaatttgttattgataaaagtttgtttaaaatagaattttattgtagaaatgttaaaattttttataaatttatatatattttatatttattatataaattttaattattaatggtgtagttgtttttatattaaattagtaaaaatttttaaaaaaataagtaatgtttttttattattttttttagtaaaattttttgtttgtaatgatttttatttataaaagttatatattgaggtatatttatatttaaaggaattatattataaatgatttattgtaatatttttaatttgtgtattgtaatgagtagaaatattttgttaaaatatttttaaattgggttatttttatttggtattgggatttagaagtagaagataaagattatatgatgtgagaggaaaatgtaggagtagaaggtaaagattatatgatgttaggaattatgaaatttaatatttggatggaagagaatagataaatagaattagattgtttattttagatattaaaataatggatgttggtatataggatttaaaggagaaggtgattggattttgttattgggatagttttgatttttttttagtaatagtagtttttgtgtatggtggaaagtaaggttgatgtaatggttggtagagggaatggtaaggttttgaagtagaggttgtgtatgtattgttaaggagggagaggtaggaagtttaaaagggggttagagatatagaaatgtt

SEQ ID NO: 162 - DNA, 7040 bp, Artificial Sequence
  chemically treated genomic DNA (Homo sapiens)
aatatttttgtgtttttgatttttttttaagttttttgtttttttttttttaatagtgtatgtatagtttttgttttagggttttgttattttttttgttagttattgtattagttttgttttttattatgtatagaaattgttattgttaaaagaaagttaaagttgttttaatgataaaatttaattatttttttttttaaattttatgtattaatatttattgttttgatgtttagagtgggtaatttagttttatttgtttgtttttttttatttaaatgttaaattttatgatttttgatattatataatttttattttttatttttatattttttttttatattatataatttttattttttatttttgagttttaatattaggtaaaaatgatttagtttagaagtgttttagtaaaatgtttttatttattgtaatgtataagttaaagatattataataagttatttatgatataatttttttgaatgtaaatgtattttagtgtatgatttttatgagtgaaggttattataaataagaagttttattggggggagtagtaggaaagtattatttatttttttaaaagtttttattgatttggtgtgggagtaattatattattaatagttggaatttatgtggtaggtatgggatatatatggatttatagaaaattttgatatttttgtagtggagttttattttggataaatttttattaataataaatttaaataaatgaaatattagtaatggaaagtaaagtatatgattatatgaataagattagttattaatagtattgagataataggtattagatttgtagttttgttaatgtgttttagaaaaagtattggagattaaaggagtttttagtaattttattttttaaaattttattttataaatatgtttttttcgatatttttattttttttaaaaataaatagaattagataaaaatttattttgattaggtttttagttagtcgagtttagtttttaaagaggtgagatttattaaaagtagtcgcgcgttcggtttttgcgtcgcgttgggtttttagtagcgttggatgacgtttttaaggcgttgttcggggagcgagttttcgaaaacggtagcggagagggacgggcgtaggtcgtaggttattatcgcgtatagtatgtgttgtcgttttttcgaatacggcgtttgtttggtagttatttgttagagagtgatggtaaaggaataaatgtcggttttaggcgttacgttttttttttttaggagtttcggggcgcggtgggtgtatgtgttttttagagggtaagagggtgtttggaagtatagtagattttttaattttttagagtaatcgaagttattaattttatagatattttgtttattgattaagatgttcgcgggttttaggtttaagtgtataatgttttgcgagtggaggaagagtaggtcgtttataatatttagtgagtatttgagatatttttttaaatttaattgttttttagtgcggtagtgaggtttttttgcgttttttttagggtggtcggcggcgttatagatgatttggtgtaaagtgacgttgttatcgaattttatgatgatggtttttaggttattggattttgcgggcgtgcgcgtgttggtagttattacgcgtacgatgttatcgtggcgtagttttgttacgttgagtttagtttagaaatttcgtcgagatgttagtcggtttttggtgtatttgtttatttgttttatggttataggaatatcgcggtaagtcgttttgtatatcgagttaaattttttagtttttagtttttgtagtaagtatatttgtttttagttaatggagtattaggttagtcggcgcggtagtcgcggggttcgaggaagatggtttttagaagtagtttcgtaggtagttttgagggattgttgtagggtcgcgcgtttatcgatggggaaaattcgtttcggaggtaggggcgtagggttaggggcgagggtattttattttgtagggggatattagggtcgttggattgaatgaagagattaggggaaatcgcgggattttggaaatatgattgattattttttcgttttattttatttttttttttttttttttttatttgttttaaatgagttatatttgtgttgttatttagtaagagtttttattagatggagggagaaatcggaatgaagtatagttattttttttagatgaaagtattttttttttatatttgaagtgaatttttataaaaataagtttatgttagataaatagtatggagttgttttagaatttattttttttttatattattttttaaattataataaaatacgttttttttaagttttattcgttgtatattattagtttttagattaaagagattataaagtataatgaaattgttttatattttgtaggttgtaatgattgttagtgttattttttagttgtattaaattatttttagtaggtattggttaagagttaaaatgtaaatagtagatatttgtttaattaattatagggaaaaattaggtgtaatatttatatggataaaaaattgtaattttaattaatttaaatagaattattgatataggttataatatatatttaaatttattagtggaaaggagaattttttgatattttatgtagtttatatagtaaattagtaagatattttagtaatatattgattttttaataattttttttttttaaggcgatttggtttaatcggttagtttatttgtaagagagattttagatttcgtagtaaatgagttatcgaagttttgaattagagttgggggagataaaagaatagaaatgatttagagttgtgattagggttttaaataataatatatatgggagaattgtagaagaggaaaaatttgaagaaataaaaatggtataaaattattggtatttatatataatgtagaaaattagaagttggaatgaaatttagggtattggttattagataataagatttttttttttgatttttataatgaaaattaattttttattaagtgtagtgagttatgtttataatattagtgttttgggaggttaaggtggaagggttatttgaggttaagaatttgagatttgtttttataaaaaataataataaagttagttgagtgtggtggtgtatttttatagttttagttattttggaggttggggcgggaggagatttgaattgaggagtttgaggttatagtgagttatgatcgtgttattgtatattaggttggatgatggagtaagattttgattttaagtaaaaaattaattttatattatatttttggaaaaaggattaataatattattatatttatgagaaaatatatatatataaaagtgttaggatttatattttaaaaaattaaatggtaaagttttttttttttaaagtatttatgtgttaggttatgtgtaattatattttaatgatagtagttttgtttttgaagtatattgattttgagaaggtaaattaataaatatgaattatttatagaaataatttgaggtttgtgaagttttggaataggatttttattttatataatttgtgtggtttagtatgtgatttagtgtgtgtataatatttaatttgtttgagttttaattttttttttttttttgagatagagtttcgtttttgttgtttaggttggagtgtaatggtacgattttcgtttattgtaattttcgttatttgggtttaagcgattttttcgttttagtttttcgagtagttgggattataggcgtatgttattatgtttagttaatttttgtatttttagtagagatggggttttattatgttggttaggttggttttaaatttttgattttaggtgatttatttgttttagttttttaaagtgttaggattataggcgtgagttattatgtttggttaattttatggaatattttagtagaaagattgttgtgtgtaattgtgttaaattttaaatataaaaggatgttaatgaatagagaaaaagtaatataattatattttataataaatttatattgtaaaatttatttagtaattgttatttagttaggattataatttagggttttgaaatggttatataataggagtgttgtgaatattagtagaatgagagtgttttaattttttagatattatatataatgtaagataatgtgatttattatataatttttatttttaagataattgtatatataatttatttttaaagttggttttattttttatttaaaatataaggtattagtgaaaatgtggtattttgtgtatttataaattttaagtttattagatttattatttgttaatttgtttaagaatatttaattgaatatttaatttataatagtttttgtttttttttttaaggtattttaaaatattttttttatttagtaaattgtatttattttgaaagtaggatttatttttttattgatttttttttttcgtaatatagtgttaaatatattttttattatgtttttattttaattttgtttttttttttttgagatagcgttttattatgttatttaggttggagtgtagtggtgtgattttggtttattgtaatttttgtttttttggtttaagcgatttttttattttagttttttaagtagttgggattataggtatatattattatatttaattatttttgtatttttttgttgagatggggttttattatgttttttaggttggttttgaatttttgaggttaagcgatttgttcgttttagttttttaaaatgttaggattatagggtattgtgtttggtttttaattttaatgtttaattttgatttggttattaaatatgtgtgtattatgtaatattttggattttaaaaatgggtaaagttttagtatggtggtaaaaggttattaggggttagatggtttgggttttttattattttagtgtttgtttttttatttgtaaaatgaggaaaatatgtttattttaggattgttgtgaagagtaatagagttttaaatatttagattagggttttaatgttaattattatttataaaatttatttaaaaaattatgtgtatgggtttatacgaataagaaatatatttgttaggtagtattggtttaaaagtattttattagggttgaaataattcgtttttatgttaaattaatatataatttgagtatttttttgtttttgaattttgcggttaaaggtataaaattttgttgtattaatggtatagtatgtagtaaaaacgtgggtggaaggttaatattaatttgattaaatgtaatatgtttatgttattttttaaaggtaaagagtaaaatgtgttgataataaggaattttttttggaattatatatgaaataaaggagataagataaattgtattttttgaggagcgaaatgttttcgtgtttttagcgtataggttttacgtgttttgttttttgattggtagtatgattattaagatattttcgtattaaatattatatttattataagagtaataatagatatcggaacggatagttttttttaatttgattttaattagagtttgaggatcgcggatagtgggagaacgtttttttgattaacgtggttggttttttgggtacgttgggtttgagtcgttttagttttcggggcgcgtatcgggttttacgggtatcgtggacggcggggcgttgcgttttttttgttttttgtatttgttgcgttggggtcgaggaggtggttttgttttttttgattttttagtttttggaagataagtcgttttcgtcgttttttggttattcgtgggttcgttttcgggttcgttcgttggtgtttttgtgcgttttttagtgtacgggttttgggcgcgttggtgttcggaagtacgtgggcgaggtcgtcggttttcgaaagacgtttagagtgcgtttagtttgtttttttgcgtacgtaataaatttttttttttttttagagttattacgtcgttttttggaaggtagttttaaaaaggtttagaagtttaatagtagttttaatagtatataaaattttatcgacggcggtcgcgtttgcgtttgcgtatttttgacggtcgttcgagttttggtaggggatcgttaggttaagagatttcgggtgatagcggattcgagaggttatagtggattttagaggttatagtgcgaagagcgcgagtattgtaatcgtgtaagtgtggtattgttggttataatcgtggattttattgtcgaaattttatttttgttttttttaagattaaaaagttaagttgtagatgaatatatacgttttattaaaaatttttatataaagattatagatttaaatttgaaaaatatattaatttttttttattttagtgggattatattattgatattttaaaatttgaattttatatttagtaatataatatagatttgtttttatgttagtaaagtatatatatagttattttaatttttatatggtttatataatatggtcggggtagattttagtttgtggattgtatggagtacgtttttggatgtgattagcgtatattatttgtttttatgcggggaggttggggttggttgtttttattttgttttgatcgtttgggttttgtattttgattttggagatacgtaaataaaattttatttgtttaaatatagttaaattttataaaaggttttaagatatataaatgtgttttaaattggttttggaaatttttgaatttaatgatattttgtaagttttttatgtttttaagaatataaaatgtttatagatatttgaaattttgaaatttgatttgattaaaatgcggttgttttgaatgattttgtttaatttatgattatatattggtatttttttttaagttagattatgt

SEQ ID NO: 163 - DNA, 6200 bp, Artificial Sequence
  chemically treated genomic DNA (Homo sapiens)
tgttgtaagaataaagtgttaagtatagtggtaggtaaatagtaggtgtttattaaatgtttattttttttttagtagttttttttttagttttatataaaggtgtatttttaattgagtgatattatttgaagagtttatttttattttaagaaataaaattattattttaagaaataaaattttttatattttaatttttatgttttgaaaggttaataattagttatgttagggtaaatgttattaaatggtattaggtttgggaaagaagagtttggtatgtgttgtgtattttaaaggttttatgaagttataaaatataatttttatattgatgatgttttttttattattttaggatagagtgggttttttttagttatattttaattttttattgtatttattagagttgtaattatatagttatttatgagattatttgttttatgtttgtgtattttttaagagtttagtatagtgtttggtatatagaagatgaatgaatgaatgaatgaagaaaatgtttattggttttattattttttagttatatattaattttatgatgatttaggggtatggattatatttttattttatagaggatgaaagtttgtattacggttaaggttagttattgaggaagtggtggggtaggtattttagttaatttagattttttaatattaaatttttgtttatttttgtttttttgttttttgatttattagttttatttttgtgtttatttagatggtaatattttagggggtattattttttgtttaggtatgttatttggtggttaattgttatattttgagtgtagaaggtttattttttattttaatttattgagtaatgggttatttattggttgataatagttttagttgatgatggtatagtaagtttttgtatgtttatttgtataagtttgaggaagtagataaaggatttttagagttgggaatttaagttggttgggtttgtgttgtttgttagggggggatttttgatatttaatttgaatatttgtggttattttatttataataataataataattttgggttttagtttatatgtttaatttttttttaattgttatttattatttattaattaattaagtttttgatatagttatgtagtaaatattttagttttgtttattttgtttatgaaatttagtttataatttagttttattggtatatgaagtttatttgtttttgttatttttatttttttatttttggggatttttggagaatatttagaggtgtatgttttaggagataatgaatttaatgtttagatagatatgatgggtgaatatttggagtgggaatattaaaatatgtgtgtatggtttagtttatttttaattggttgtgatatgcgtaataagtgattttatttttatagattcggtttttgcgtttttgagtttgtagtggtttttttttaagttttgtgtttttttagtttatttaattttttaaatagatagattgtttttgatgataaatttgaataagagaaatatttttgtattattttagagtttattcgaggttttttattaggtagaaaagatgatttttaagtttattgtggtttggaagtgtttgtaataagattgtttttgtaataatttttttaaggagattttaaagttttttattaatttatatagtagttgagttggtagggatagagtagtaatattttttgaaatgtgggtggtatttgttttttggtggtttttggaggagaagttattttatttttttaaatttattacggataagtggttttattggttattaaggttggtttgagagtgtgtataggttgagggttagtatagatgtgagattagagagggtttgtttggttgttgtggttaagagaagagggtatgataggttaggttataaatttaggggttttgtattagaattggggtggatattttttcgtagtttatgtgatttgagtagtgtgtataggtagtagtgagtaggattatagagcggggaggaaatcgagtttggtttttgtagcggtgtagagatatacggagggtttagggaagttagaagtataaatgattatagtggtggtaatagtagtgggaagatttagggggtattggggtagtaggttaataagattagagaaatatttttgtttttttagtatagtttgtaggtttagtatagtttgtagggatagaaaggtgtgatttttttttttttttattataaaggttatagttgatatttaaataataaaagataggttaataagtgatataagagattttagaaatgaagatttaaagatttagggagaacggtgtttttgtttaggtttgatgaagaatatggatggtcgtatagaaatgtgattggagagaagggtgtgattttatagtgatagattgaggggaatttagtaaggtttgttcgttttaattttttttgatttttttgtgtagtattgtttttttttgggtatggggtaggatttttttcgaatgagggtttttaaaggagaagggagaggggagagagtgatgtttttagattttatggtttgttgtggaggagaggggttttattttttatgatttgtttggggaagagggattttggtttttatgatttatttagcgggagaagaaggggtaggatataggagtatgggagaaggttagagatattttgtttttgacgtttttttagttttttttagtttagagtatttagtatgttaaggcgttatattttggggtattatgttttaagttttttaaaaaagcgcgtgatatatagcgggtgtttagtaaataatgtaagttttttttttttgtttttattttaaaagaggtttttttttttttagttttatagtgaggatggaatgatgtattgatttagtatgagttttatttatttattcgttattaaggggaattgtgataagttttttatgtgtattttattgtgttgtttttttatttttagtttatttttttgtattttaatttggaaggtaagaatttaattaggatgtattgaataattggtagaaatttatgtgaatgtaattattttgtttagttttttaatttgtgttaagtttaggtaggtatttgaagaaaaaaaaaaaaaagtatgaaggaggtttttgtttaaatggtattatatttgggggattttgagtagggttgaaatagtttttgtaaaaattataattgaggaaattatggtagtgataaagattagatttaaatgatttagttttttttttaatttttatgttgtttttatttatttttgggtataggttaaattaattttagaaaggaatttagtttatggtttgatttagaaataaaattaataatagttttttttcgaaaagattttttttttgtttgggtgttagtttgtttttgtacgattaatttattagttataatattagaaattatggtttaggggttttgcggcgttaggttgtaagagtttgaatttttttaagttgttgttggggataatatcgttattgtaaaatttaatattttattttgtagattttgtattggatggattagttgatattatttagatcgtgtgtgatttggtttaattagttttgcgattttatttaggaatagaagattgtaagaaaacgttattttaatttttttgtgattttatttgtaatttgattaattagtattttttaagttttaagtttttatttgttaaattatttttaaaaatttttagaggtagggtgtagtggtttaacgtttgtaattttagtattttaggtggattacgagattaagagattaagattagtttggttaatatggtgaaatttcgtttttattaaaaatataaaaattagttgggtgtggcggcgcgtgtttgtaattttagttatttaggaggttgaggtaggagaatcgtttgaattcgtgaggtagaggttgtagtgagttaagattatgttattgtattttagtttgggcgatagagggagatttcgtttgaataaataaataaataaataattttcggaatgtttggggagattgatttgagtattggaattttagtattttaggaggttaaggtaggtggattatttgaggttaggagttttagattagtttggttaatatggtgaaatttcgtttttattaaaattagaaaaattagtcgggtgtggtggtgggcgtttgtaattttagtattttgggaagttaaggtaggtgaattatttgaggtcgggagtttaaggttagttttaaattggcgaaatttcgtttttattaaaaatataaaaattatttgggtatggtggtatgtgtttgtaattttagttattcgggaggttgaggtaggagaatcgtttgaattcgggaggcggaggttgtagtgagtcgagattacgttattgtatttcggtttgggtaatagagcgagatttcgttttaaataaataaataaaggaacgaaaattttcggttttcggtacggtaagttttgcgtgaattattttttttattgtaatttttttgttttgataaatgggttttgtttaagtagcgggtaaggtgaattcgttgggttgttataggattagtgatagattaagggtatgttattgaaggaatttttagacgtatttttttggatgtgagataggcggattttatttacgtttgttagtagtttttcggagaattgtgtttttgggttagttttggtttagaggagcgtcggggattcgtagagtgttgttgaagttaaggttataatttatttaggatttggggcgttagtttttcggtgggtagggcgttttttttttttatttttttttcgtacgatgatattaagtgtttggcgttgagttgttttataaaagttgttcggggaagttaggagagcgaagggcggacgtattcgttacggtatttaggttgcgcgtacgcggtttcggtgtgtagttggagagcgagcggttatcgggagttttcggtatagttcgcgttcgtttcgtaggagttcgcgaagatgtttcggcgtagtttgtacgcggcggtcgtgtttttgttggtgattttaaaggaatagttttttagttcggttttagtgaacggtaaagttttcgtttgttttttttttaatatttttgagcgtttagtcgtttttgggttgaaggttttttaatgataaagtaaaattattgttgcggggagtagggaaggtgtagtattaaatagtagatttttaagaaaggatgtttcgtttttttttgttgaggttgggtcgggaagtacgttgttttttagtggcgtttggcgtagatttggtgttaaaatgtttgcgtgtattttcgggtatcgttagttttgaagatgtggtttgggaatttgttaattagggaggagatgtaaagttaagatttaaaatagcgtttttttgatttacgtttagaaagtagagatatgattgtggtattttgattggggtaagtatagagaaaggtttgttgtgtttttgtgtagaattcgtagatagtggtaggcgtttttttttggaggagaggatttttattattaagttttatttataagttaaagggatgatgtattttatttttaattattgtttttttttaggagggttttattatgttgaatgtacgtgtgtgtgtacgtatatatatatacgtacgcgcgtacgtatataaattatatatatatatatatatatatatatagtatatttttgattgtaattagaatattaaattttaaaaggttggaggttgagggattgaatggaggtttcgtggagtgataggaggaggtggtagaggggatttgaattgtgggtttacgtcgggttagtgagttaatacgtgtatagttaaggttggtttattaattttttggaataagaaagtgattttggatcgaaagtgattttattggttgaaattagattttttttggcgaggtagtggtggtgggaaatgtgttttgtttagtagtataaaagttttgagtttttttttttggaggttatagtgtttatggggaagggtaggggagttaggttgtggataatttttaattaaattttagttaattagt

SEQ ID NO: 164 - DNA, 6200 bp, Artificial Sequence
  chemically treated genomic DNA (Homo sapiens)
gttagttgattggaatttaattaagagttatttatagtttggtttttttgtttttttttatgggtattgtgatttttaagagaggaggtttagagtttttatgttgttgagtaggatatattttttattattattgtttcgttaggaagaatttagttttagttagtaaaattattttcggtttaaaattatttttttattttaaaagattaatgaattagttttggttgtatacgtgttagtttattggttcggcgtgagtttatagtttaggttttttttgttatttttttttgttattttacggagtttttatttagttttttagtttttagttttttgggatttagtgttttaattataattagaaatatgttgtgtgtgtgtgtgtgtgtgtgtgtgtggtttgtgtgcgtgcgcgcgtgcgtgtgtgtgtgtacgtgtatatatacgtatatttagtatagtagagtttttttggagaaaaataatgattaagaatgggatgtattatttttttgatttgtaggtaagatttaatggtaaagatttttttttttaaagaaaagcgtttattattgtttgcgggttttgtataggggtatagtaaatttttttttgtgtttattttaattagaatgttatagttatgtttttattttttaaacgtggattaggggaacgttgttttaaattttggttttgtattttttttttggttagtaagtttttaagttatatttttagagttggcggtgttcgggagtatacgtaaatattttaatattaaatttgcgttaagcgttattagaaagtaacgtgtttttcgatttaattttagtaaaggaaaacggagtatttttttttgagaatttattatttggtattatattttttttgtttttcgtagtaatgattttattttattattgaagagtttttagtttaggggcggttgagcgtttaggagtgttaggaaagaagtaggcggaaattttatcgtttattggggtcgggttggaaggttgtttttttaagattattagtaggagtacggtcgtcgcgtgtaggttgcgtcggggtattttcgcgggtttttgcggggcgggcgcgggttgtgtcgggggttttcggtggtcgttcgttttttagttgtatatcgggatcgcgtgcgcgtagtttgggtgtcgtggcgagtacgttcgtttttcgtttttttggttttttcgggtagtttttatggagtaatttaacgttaaatatttgatgttatcgtgcggggagggggtgggggaggagaacgttttgtttatcggagggttggcgttttagattttaggtgagttgtagttttgattttagtagtattttgcgggttttcggcgtttttttgggttagggttgatttaggaatatagtttttcgaggagttgttggtaggcgtgggtgagattcgtttgttttatatttagaagggtgcgtttagggatttttttagtggtatgtttttggtttgttattggttttgtaatagtttaacgagtttattttgttcgttgtttagatagagtttatttattaagataggggagttgtaatggagaaagtaatttacgtagagtttgtcgtgtcggagatcggaggttttcgtttttttgtttgtttgtttgagacggagtttcgttttgttgtttaggtcggagtgtaatagcgtgatttcggtttattgtaattttcgtttttcgggtttaagcgatttttttgttttagtttttcgagtagttgggattataggtatatgttattatgtttagataatttttgtatttttagtagaggcggggtttcgttagtttaaggttggttttaaattttcgattttagataatttatttgttttggttttttaaagtgttgggattataggcgtttattattatattcggttaatttttttaattttagtagagacggggttttattatgttggttaggttggtttggaatttttgattttaaatgatttatttattttggttttttaaagtattgggattttagtatttaaattagtttttttaagtatttcgggagttgtttgtttgtttgtttgtttagacggagtttttttttgtcgtttaggttgaaatgtagtggtatggttttggtttattgtaatttttgttttacgggtttaagcgatttttttgttttagttttttgggtagttgggattataggtacgcgtcgttatatttagttaatttttgtatttttagtagagacggggttttattatgttggttaggttggttttgattttttgatttcgtgatttatttaaagtgttgggattataggcgttgaattattgtattttgtttttgggagtttttaaagataatttggtagataggggtttgggatttggggagtgttgattggttaggttgtagatgggattataggggggttgaagtaacgtttttttgtagttttttgtttttgggtgggatcgtagaattggttgagttagattatatacggtttgagtggtgttagttgatttatttagtgtagggtttgtaaaataggatgttagattttataatagcgatgttatttttagtagtaatttgggaaggtttagatttttgtagtttgacgtcgtaggatttttaaattataatttttaatgttgtaattaatagattaatcgtataaaggtagattggtatttaggtaagaagggggttttttcgggaaagggttattattgattttgtttttgagttaaattataaattgaatttttttttaaggttagtttggtttatgtttaggaatgaataaggatagtatgaaagttagaagaaagattgagttatttaggtttgatttttgttattgttataatttttttagttataatttttgtaaaggttgttttagttttatttagaattttttaagtatagtgttatttgggtaaaagttttttttatgtttttttttttttttttttaggtgtttgtttggatttagtataggttaaggaattggataagatagttatatttatatgagtttttgttaattgtttagtgtattttgattaagtttttattttttaagttgagatgtaaagagatgaattgagaataggagaatagtatagtggggtatatatgaagagtttattataattttttttagtaacgggtaagtagatgggatttatgttgggttaatatattattttatttttattatgaagttgggagagagggggttttttttggggtgggagtagaagaaagggatttatattatttattgagtattcgttgtgtgttacgcgtttttttggggggtttagaatatgatattttaaagtatggcgttttggtatgttgagtattttgaattgagagagattgagaaggcgttagaaataaagtgtttttgatttttttttatatttttgtgttttgtttttttttttttcgttaagtgaattatagaaattagaattttttttttttaggtaggttatagaaagtagagttttttttttttatagtaagttataaaatttagaaatattatttttttttttttttttttttttttaaagatttttattcgagaggggttttgttttatatttaggagaaagtaatgttatatagagaggttaagaagaattggaacggataggttttgttgggttttttttagtttattattatgagattatatttttttttttaattatatttttatacggttatttatgttttttattaaatttaagtagaaatatcgttttttttgagtttttgggtttttatttttgaagttttttgtgttatttgttggtttgttttttgttatttgagtgttaattgtgatttttatgatgggggaggaaagggattatatttttttgtttttataggttgtgttagatttataggttgtgttagagaaataggagtgtttttttagttttgttaatttgttgttttaatattttttaaatttttttattgttgttgttattattgtagttatttgtgtttttggtttttttgggtttttcgtgtgtttttgtatcgttgtaggggttaggttcggtttttttttcgttttatgattttatttattgttgtttatgtatattgtttaggttatatgggttgcggaagggtgtttattttagttttggtataggatttttgggtttgtgatttggtttgttatgttttttttttttggttatagtagttagataagttttttttgattttatatttgtgttgatttttagtttgtgtatatttttaggttagttttagtgattaatgaagttatttgttcgtggtgggtttgaagggatggagtaattttttttttaagagttattaaaaagtagatgttatttatattttaaggggtgttattgttttgtttttattagtttagttattgtgtgggttaataaagggttttgaagtttttttaaggaagttgttataaagataattttgttataagtatttttagattatagtaggtttagggattattttttttgtttgatagagggtttcgagtgagttttggagtggtgtaggagtgttttttttgtttagatttgttattaagggtagtttgtttgtttagaagattaaatggattagaggaatatagagtttggggagaaattattgtaggtttaaagacgtagagatcgaatttgtggaggtgaaattatttgttgcgtatgttataattagttaaaggtaaattgggttatgtatatatattttggtatttttattttaggtgtttatttattatgtttgtttaaatattaagtttattgttttttggaatatgtatttttaagtattttttagagatttttagagatggagaggtgaaaatggtagaaataggtggattttatatattagtaaggttagattgtgaattgggttttatagatagaatgaatagggttgagatgtttattgtatggttgtgttagaaatttggttaattagtaaataatggatagtaattaaaagggaattgagtatgtaaattgagatttagaattattattattattatgaatggaatgattataggtatttaagttgaatgttaaggatttttttttgataaatagtatagatttaattagtttaagtttttaattttgggaattttttgtttgtttttttaggtttgtgtagatgaatatgtaagggtttgttgtgttattattagttggggttgttgttagttaataaataatttattgtttaatgagttagggtagaaagtagattttttgtatttaaaatgtggtaattggttattaaatgatatgtttagatagggaatggtattttttaggatgttattatttgaatagatataagggtgaggttggtgagttaaggggtagagaagtaggaatgaataaggatttggtgttaggaagtttgggttggttgaagtgtttgttttattatttttttaatggttgattttgatcgtgatgtaagtttttattttttgtaaaatgaaggtgtaatttatatttttgagttattatagaattgatatatggttggaaggtgataaggttagtggatattttttttatttatttatttatttattttttatgtgttaggtattatgttaggtttttggagagtgtataaatataaaataaataattttatgaataattatataattataattttaatgagtgtaatagaaggttgagatatgattgagaggggtttattttgttttggggtggtgaggaagatattattagtataaggattatgttttgtgattttataaaatttttgaaatgtatagtatatattaggttttttttttttaaatttagtgttatttggtggtatttgttttgatatagttagttgttagttttttagggtataaaggttagagtatagagaattttgttttttaaggtgataattttattttttaagataagaatgaattttttaaatggtgttatttaattgggaatgtatttttatatggagttaaagaaaggattgttgggaggaaaatagatatttagtgagtatttattgtttgtttgttattgtgtttgatattttatttttataata

SEQ ID NO: 165 - DNA, 6565 bp, Artificial Sequence
  chemically treated genomic DNA (Homo sapiens)
  unsure 600, 657: n is a or g or c or t
tttttttatttgaggttaggttaatttttttgatattagttaaggattcgtttttatattttttaggtatcgttttgttttgttttaatttttattttttgtagtatttgattacgtggtatttatagttatttaaagtaggatgtaaataggaatgttttgagagatttgattatagtttttaaatttttaagtttatgatttgtagtatttgtttacgaggatcgatgtgttttttggttttaatggggagttattggattttttattttaggaaggtgtttaatagttgttgtggatggttttattgtttaggtttagaattagttagaagggaatttttttttttattattattttttatgtgtttaagtttagttgattgggtgtttttatttatgtatttttttatttagtgatttttgttgttgtttttagttaggaatttttttttttttatattgaaatgttaatattagaatttgggtttagtttttgtagtagaatggtttttgtatagttagattagttttgtttagaaaaagggtttttattttttttttttttagagtttagattaattttttaggaatttgttgngtttggagaaaatttttagatagtagggttgtttaattttgttttgttttttgtggngggttatatatagatttttattatatttttatttttttaagtttgttttttatttttaattttagtattgtttatatagttttgttattatgttaaatgattatggttatttatttatgggtttttgggatgcgtattttgtttttgttaaattggggattgtgagggttttagatatgtggtgcgttttggcgggggtttattgttggggatggaggaaggatcgatggaggcgcgacgcgagtggttgggttgggttttttggttgtttcgggggggcgttggggattggtgggtggggtggggggcgggtggggttgggggagggcggcgcggatatttttttttttgttattatgtgaagaaggatgcgtttgtttttttttttattatgattttaaattttttgtggtttttttagttatgaggaattgtgagttaattaaattttttttttgtataaattgtttagttttgggtagttttttataagaatatgagaatggattaatataggtttaattttggttattttttaattttttaagttattggagttgattttttgggtagttttaatatgattattttttttattttttagttattagggtatattaggttttatgaattattgattttaatttttgggttggaggataggaaaatttttagtagaggttaattggagatattcgtttttttttaggatttttagaattattttaatattttgaaatgttttatttttagatattgggtaatgaatgttaagtataaaatattattgggtattgtggttaattaggaataatagagtagaagattatgatttattttagtttattttaaaatttatattttattgtatttagggttgggtttagaaaggggattattatttaattttagtaagttttaaaaaatagttgttttgattttatgtgaaattataggttattgattatattgtataatttatatttgggtttattgaatgatggtttaagataatttgtaaatttgatattatagtgagttatttaatgtttaatgtaattttttaaggtgatgaaattaattatttaggtagtagaataagttattgttatgtagtataaataattgtttattaattttttataattatttttgtgatattaagtagttttattaatagttttttttatataattttattttattatatattgatttttattatgagatatgatttttttgtggtgaatttatgttaaggtatttatttgagttttttgttgagaattaaattaattttattttttaaaggtcgattttttttaggaatggagaatttaggtttttttatttataattattagattttgttatttataaaattataaagaaagtttaagtatattttgggaatatatatatatttttatgtattatatataatatgtttttgaataatatcgtttttttttaacgttgatgagaaaaataattaatttttggttagggttatcgtttgtgtggagtttgtatgttttttttatgtttgtatggggtttttttaggtattttagtttttttttatattttaaagatatgtatattattttttttaaatgtatgtatagtttatatttattttagtgttttttattagaagtgtttttggtttttatttagaagtttggtgatgtttttgtgattagtaatatgttttaggaatttaatttttgtgtatatttagtagtttatggtaaaattggttttgttttatattgttttatttaaagttatagtttttaagaatttatagatgatattgaggattatttatgtgtatagatatgatggatattttgatatttagtggattttttttaaaaaattgaatttaaaagttttattaaaatttatatttattatttattatttaaatttaattatttttttttttggtattatttaatttatatttaatatttagttttaattatttgtaattgtgtatgatatagtaaagattttggggaggttaagatgggtagattacgaggttaggagatcgagattattttggttaatacggtgaaattttatttttattaaaaatataaaaaattagttaggtgtggtggtaggcgtttgtagttttagttatttaggaggttgaggtagaagaatggtgtgaattcgggaggcggagtttgtagtgagcgtagatcgtattattgtattttagtttgggcgatagagtaagatttttttttaaaaaaaaaaaaaaaaaaagattttgagttaaagtgtttaagttgaatgtattttgttatttataagataaatcgtgttaattttttgtggtttattttatttataaaatagagataataatagtttttgtttttagggttgttgtgggaattaaagatttagaataatgtttagtttttaattagtgttgttataattgtttgatataattgtattatatttgtgtattttgtagattgatattaaattatatttttaaaaataggtgtttaatgttttatttaattattttaaaatatgtttaattatgtttttattttatttttataatatttttataaaaattttttatatatagcgtttatttttggtttagttttttaggaaaataattttgagagttagttatttgaattaaagaaatattaatattattagattatattgggatttttgagattggtttttattaattttttagttacgggtttttgttattatttttattagtgatttaagtgttaaatttaaatgttttgtatttgttttattaaagagatgtagtatttgttttttttttattgtttttattttttttgttatgtttttttttataattataaatatttaggttttttaggttttaaacggggtattttttaatttttatatttttttttttggttatttttttttttttaatagtttaatttatttagatttttacgtttgaaattattttagatgttttagaggcgttttattattataatggtatattattttttatttttttatatgttacgttagtttttaaattgaaaatttgagcgtttatttttggtgtattatttttaaattttagatttttaaaatttagggttatgtaattttaaaaaatttttatttttttttttttattgtttttgtttaggttttattttttttagtagttgttttaaaggtttattttgtttttttttcggagtgttaatttttatcgaagtttttatttagttgttaattttgttttatgtttgataatttgttcgtgcgttgatatatataaaatttttaagataaaaattttttaataatggtaaatgaattttgggaattgtatatagattatatagatttataataagagaaaaggttttagattaatacggaaaattttttatttaattaatatttgtattggtaaattttattaagtaagattttatttaattttatattattttttattgaagaggttgtggttattttttggaaatatttgaatttatttttataagttagagaaatagcgttattcgaaatattattttttgggttcgagttttaaggtatttgataaacggagcgttgtgggtaggggtgaggtgttttttttagggttgggattttgttttgggcgagggcgtcgtagggtaaagattttatcgggtagtagaattcgggtagaaattagtaattgggtttttcgcgtagtagaaaaggggaatttagtcggggtttattttttttgttagcgtagatcgtaagtttggttttattttttcgtcgggagtcggtttggcgcgtttcgtttaggtatttcgatcgtgggtagtttgcgttcgtttgggttttatcgtttcggttcggtagatatttgagcggtggttagggtaggttttcgtttttgtcgatgtttatgttttgggatatagcgacgatgtagtttagcgaattaattatgatagtagcgggaggattttcgagttcgttcgttatagtagaacgcgcggttaagtttggcgcgaaattgtggtcgtttcgttttttcgtttttatttgtgtaggcgaggtttcgttttttcgtttcggcgtacgtagggtcgcggcgtgttcgcgttcgtagacgtttgggaattgcggtcgcgggttcgcgtttttcgtcgggttttgtcgtcgggttgttatttttgttttgttatgtttcgtcggaagtttgcgtcgggcggtttcgttgtttttagtttagtttttgcgaggtaagcggttttgagtcgatttttttagtttacgggaagtttgaaatttatttttttttttataggtgtagtcgattaggtggattttggcgttgtagcggtcgtagcgtttttagcgttcgttttttcgttttagttgtcgtcgtacgtagtaggttttgtttgggattgggtagggttatcggggttgggggggcggggtttgtgggtaaggcgggcggaggcgtggatttttcgttcgatgatagggttggaggaggaaggggcgggttgaagaaggggaaggtgggaagagtttagtcggggttataaattgggtgaagcgttgaggttttagtattttcgtttgaggagataggtaaaggttatgtaggtttttaatggtaggtttgagataggaatttaggttttttgatttttattttgatgagggggtttgtgggtaaggggtgcgttttttaatttttattttttttttttttttttggtggtcgaagagttttattgattttttaaaaaagtgttggattgggtgattagaagaaagttgtttttaggtttttagtttttaagattgtaatagtatggtttaatatttgaaattattacggttaaaagtagttatattgtgtagttttttagtgaatattttttgtagtttagattataaagtttgaaatatagtttgggtggataaagttttttaggatggtatagatgtgattaattatggagttttttttgttgtcgttttttaacgtaataagtacgtttgtttgtttttaaattagagatattgttataggaaaagtttaagggtgattttttatttgggttatttgtatagtattttttagattgaggttgtggaagggtattgaagattggtgtttagttatttatcgtgttttaatgtaggtggtagtttgggtgttttaaaattttgtttttttcgtatatattttttttttaaaatgattattttttttttgttttttttgaggacgagttacgtttttatgaatttattaaaattttgtatttattatttaaagggtagttggtgaaggatttatgtatgtttttggtaagttttttgttaagaaaaaatttataattttgttatatttttagtgatgaatataaattttttaaataggaaatatttaaattgtaatgaatatgttaaaaatgatattgtttttttattatttatttttttttttttgtgtttttgttatataattgtttattttttagaggtattttatttagtatatgtaagtagggtgatttaagttttataattagagaaagttgaaggtttattgaattaagatcggtagtagttttggttttaattaattttaaatacggtttgagttgttgaggtttttgattattagattttattttgttttttatggtgttaaaaatagtttatttatagggttttttagagttaaaagtagaggattttttgaagagtggatggtaaggaattttgttatttagttgtaaagtttaaattggtttatatacgttaggtttttttagagtagagataatatattattttttaattttttcgatatagg

SEQ ID NO: 166 - DNA, 6565 bp, Artificial Sequence
  chemically treated genomic DNA (Homo sapiens)
  unsure 5909, 5966: n is a or g or c or t
tttatatcgggaaggttagaaaatgatgtgttatttttattttgagaaggtttgacgtatgtgaattaatttaaattttataattgaatgataaggttttttgttatttattttttaaagaattttttatttttagttttggaaaattttatgggtgaattgtttttaatattataaaagataaggtagagtttgatagttaggagttttagtaatttaagtcgtgtttagaattaattgaaattaaggttgttatcggttttgatttaatgagtttttagttttttttaattataaaatttgaattattttatttatatatgttaaataaaatatttttaagaaataaatagttatgtagtaaaggtatagaggggaaaagataggtaataaaagaatagtattatttttgatatgtttattgtaatttaagtgttttttgtttaaaaggtttatgtttattattaaagatgtgataagattatgaatttttttttggtagaaaatttgttaaaagtatatataagttttttattagttattttttaaatggtgggtgtaaaattttggtgaatttatgaaaacgtagttcgtttttaaaaaaaatagaagaggagtaattattttaagggagaaatatatacgaaaggaataagattttgaagtatttaagttgttatttatattaaaatacggtaggtggttaaatattagtttttaatgtttttttatagttttagtttgaaaaatattgtgtaggtgatttaagtgaggggttatttttgggttttttttgtggtagtatttttggtttaaaaataaataaacgtatttattgcgttgaaggacggtaataggaaggattttatgattagttatatttatattattttaagaaattttatttatttaaattgtattttagattttataatttaaattataaaaagtgtttattggggaattgtataatatgattgtttttaatcgtagtgattttaaatattgagttatgttgttgtagttttaaaaattggagatttaagggtagtttttttttagttatttaatttagtatttttttaaaaaattagtaaaatttttcgattattaaggaaaaaaaaaaaggatggaggttaaaagacgtattttttgtttataagtttttttattagaatgggagttaggagatttgagtttttgttttaggtttgttattaaaaatttgtataatttttgtttatttttttaaacggaagtattaaaattttagcgttttatttaatttgtagtttcggttgggttttttttattttttttttttttagttcgttttttttttttttagttttattatcgggcggagggtttacgttttcgttcgttttatttataagtttcgtttttttagtttcgatggttttgtttagttttagatagaatttattacgtgcggcggtagttggggcgggaaggcgggcgttgggggcgttgcggtcgttgtagcgttagggtttatttggtcggttgtatttgtggaggaggaggtggattttaggtttttcgtagattggaagaatcggtttaaaatcgtttgtttcgtaggggttgagttggaggtagcgaggtcgttcgacgtaggttttcggcgagatatggtagggtaaggatggtagttcggcggtagggttcggcgaggagcgcgaattcgcggtcgtagtttttaggcgtttgcgggcgcgagtacgtcgcgattttgcgtgcgtcggggcgggggggcggggtttcgtttgtataaatagggacgagggggcggggcggttataatttcgcgttaaatttgatcgcgcgttttgttgtaacgagcgggttcggaggttttttcgttgttgttatggttggttcgttaaattgtatcgtcgttgtgttttagaatatgggtatcggtaagaacggggatttgttttggttatcgtttaggtatttgtcgggtcggggcgatgggatttaaacgggcgtaggttgtttacggtcggggtatttgggcgggacgcgttaggtcgattttcggcgagaggatggggttagatttgcggtttgcgttggtaggaagggtgggtttcgattggattttttttttttgttgcgcgggaggtttagttgttgatttttgttcggattttgttgttcggtgaggtttttgttttgcggcgttttcgtttagggtaaagttttagttttggagaaaatattttatttttatttatagcgtttcgtttgttaggtgttttagagttcgagtttaagggataatgtttcgagtaacgttgtttttttaatttgtaggaatgaatttagatatttttagagaatgattataatttttttagtagaaggtaatgtgggattaagtagggttttgtttgatgaagtttattagtgtaaatgttagttaaatggaaagtttttcgtgttaatttgggatttttttttttattatggatttgtatgatttgtatgtagtttttaaggtttatttattattattaaaaaatttttgttttagaaattttatgtatgttaacgtacgagtaaattattaggtatggggtagaattggtaattgggtggaggtttcggtggaggttagtatttcgaaaggaaaatagagtaggtttttggaatagttgttggaagagataaggtttgaataagggtagtggagaagagagggtaaaaattttttaaggttatatgattttggattttggagatttggaatttaaaggtgatgtattagggatgaacgtttagatttttagtttgaaagttggcgtgatatgtaaaggagtggagaataatgtattattgtaatgatgaggcgtttttaggatatttaggataattttaggcgtggggatttaggtgaattgaattgttggagggaagggaataattaaggaaaagaatgtgggggttgagagatgtttcgtttaaaatttaagagatttggatatttatggttgtaagaggaggtatggtagaggaaatggaaatagtaagaaaggagtagatgttgtatttttttaatgggatagatataaggtatttgggtttgatatttaggttattggtagagatgatgataagagttcgtagttaaagaattgataaaagttagttttaaaaattttaatatagtttggtaatgttaatgtttttttggtttagatagttgatttttaaagttatttttttaagaaattgaattaaaagtggacgttatatgtaaaaagtttttatagaagtgttataagagtaggatagagatataattaaatatgttttaaggtaattgagtggaatattaagtatttatttttaaaagtatgatttaatattaatttataaagtatataaatataatataattgtattagatagttgtgatagtattgattagaggttgaatattattttaagtttttaatttttataataattttagaagtaggaattattgttatttttattttatagataaagtaaattataaggggttaatacgatttgttttgtggatgataaaatgtatttaatttgagtattttgatttagaatttttttttttttttttttttaagagggagttttgttttgtcgtttaggttggagtgtagtggtgcgatttacgtttattgtaagtttcgtttttcgggtttatattatttttttgttttagttttttgagtagttgggattatagacgtttgttattatatttggttaattttttgtatttttagtagagatggggttttatcgtgttagttaggatggtttcgattttttgatttcgtgatttgtttattttggtttttttagaatttttattatgttatatataattgtaaatgattaaaattaaatattggatataaattggataatgttaaagggaaaaatagttagatttaggtaatgagtgataagtatgaattttggtaagatttttaagtttagttttttaaaggagatttattaaatgttaggatgtttattatatttatgtatatagatagtttttaatgttatttgtgagtttttggaaattgtgattttaagtgaaataatgtagagtaaaattaattttattataggttattggatgtatataagagttaagtttttagggtatattgttggttataaaaatattattaaatttttaaatgaaggttaaaaatatttttaatagaaaatattgaagtaaatatgagttatatatatatttaagaagaataatgtgtatgtttttgggatgtggaaggaaattggaatatttggagaaattttatgtagatatgggaaaagtatgtagattttatatagacggtggttttggttaggaattgattattttttttattaacgttagaagaaaacgatgttatttaaggatatgttgtatataatatatgaaaatatatgtatatttttaaaatatatttaggttttttttgtgattttataggtaatagaatttggtgattatgggtaagaagatttgggttttttatttttgagaagaatcgatttttaaagggtagaattaatttagtttttagtagagaatttaagtaagtattttaatataaatttattataagaaaattatgttttatagtggagattagtatatgataaaatgaaattgtataaaaggagttattgatgaagttgtttaatattataaaggtgattatagaaaattaataagtagttatttatattatatgataataatttattttattatttgagtaattgattttattattttgaaaagttatattaaatattaaatagtttattgtggtattagatttgtaagttattttgaattattatttagtaggtttaaatataaattatatagtgtaattaataatttgtagttttatataaagttaaaataattattttttgggatttgttaaaattaagtgatgattttttttttggatttaattttaaatgtaataaaatgtgaattttaggatgggttgaaatgggttataattttttattttgttatttttagttaattataatatttaataatattttgtatttaatatttattatttagtgtttgaaggtaaaatattttaaagtattgaaatggttttagagattttggagagaagcgggtatttttagttagtttttgttaagaatttttttgttttttaatttaggggttggagttagtagtttatgaagtttgatatgttttggtgattggagagtgggaggggtaattatattaagattgtttaggaagttaattttaatggtttgggaggttgaggggtggttagaattggatttgtgttaatttatttttatgtttttataaagaattgtttaagattgggtaatttgtataggaaagaggtttaattgatttatagttttttatggttggggaggttataggaaatttaaaattatggtggaaggggaagtaaacgtatttttttttatatggtggtaggaaggaaagtgttcgcgtcgtttttttttaattttattcgttttttattttatttattaatttttaacgttttttcgaggtaattagggggtttaatttagttattcgcgtcgcgtttttatcgattttttttttatttttaataataagttttcgttaggacgtattatatgtttaaagtttttatagtttttagtttagtaagggtagagtacgtattttagaaatttataaatagatgattatgattatttaatatagtagtaaggttatgtagataatattggaattgagagtgaaaagtagatttagaaggatggaagtgtggtggagatttatgtataatttnttatagagagtaaagtaaggttaagtaattttattatttggaagttttttttaaatntaatagatttttaaagagttagtttgagttttgagaaagaaaaaagtaagaattttttttttaaatagggttggtttgattgtataaaagttattttattataaagattaaatttaggttttgatgttggtattttagtgtgaggaaagaaagatttttggttggaagtagtagtaaaggttattaaatgagagagtgtatgggtgggaatatttagttaattgggtttgaatatatagaagatggtggtgagagggaaaatttttttttgattagttttaggtttggataatgggattatttatagtagttgttgggtatttttttaaggtggagaatttaatagttttttattgaagttaaaagatatatcgattttcgtgggtaggtgttgtaagttataagtttaggaatttgggggttatggttaagttttttaaggtatttttatttgtattttattttaggtaattgtgggtgttacgtggttaaatattgtaggggatgggggttggagtaaagtagggcgatgtttgggaagtgtaaaaacgaatttttggttagtgttaagggagttggtttggttttaggtgaaagag

SEQ ID NO: 167 - DNA, 8952 bp, Artificial Sequence
  chemically treated genomic DNA (Homo sapiens)
tggattattttatttaatttttatattgattttttgaggatgagaaaattgagataaagtgaggtggtaaattgtttaatattacgtagttagtaaatataaatgtaggaattaaattaaggtaggaattaaattaaggaggtttgattttagattttcgttattaagagaaatataaataagatataaatatattttgaattgtggaatttatgaggataaagtgagatagataggaattgtatgtaagatttgaggagagtggaagaaatttggaatagttatttgtagttaataggggaggaatggaaagattgtaatgtggagaatataattgaggtggagagtataaataaataatatatcgtgatttttatttgtttgtaattttttttagtagggttttaggagtaaaggtagaatttgatgttgggggttagggaagttaagggtaagggattttaaatttattattaagtgtattattaaaatatttgttggagtgatgttagtgaaaatagtaaaggaaggaattataaaattttatttttttattaaaataatgaaaaattgataaaaacggttagatttaattattttagaattttggaaattaattaaagttttgtaataatttgggaagtatatatttaaaaatagtggttgaattttagaagagtgagttttgtgatattttaatgtgttttattttatttttttttttttagtttagtagtagttttgaaaataaaaagttatatttttagtattgaggggagtagagaagaatttattttttttaaattgttattatttgatttgtttagaggttttttggacgattggtttgaaaagcgtgtttttattaggaatatagtgttaatagtttttttttaggggatgttttttaaaaatatttagaggtaaatgttttttttttttttttttttttttttttttttttttttttttttttttgagatggagttttgtttttgttgtttaggttggagtgtaatggcgtaatttcggtttattgtaatttttgtttttcgggtttaagcgatttttttgttttagttttttgagtagttgggattataggtatttattattatgtttagttaatttttttttttttgtattttaatagggatagggttttattatgttgaagttatgttgaagttatgttgaggttaaatttttgattttaggtgatatgtttttttcggttttttaaagtgttggggttataggcgtgagttattgtgtttggtttagaggtaaatgttttaatggtatggatgttttaggtatttaatgaagcgtttttatttaaaatgtataaggaatttaatttaatagtaaaagaataaataatttgattaataaacgtgtaaaggatttaaatagatatttttttaaagaagatatataaatgtttaataggtatatgaaaaggtgtttaataatattagttattagggtaatgtatattgaaattataatgagttatcgttttatatttgttagaatggttattattaaaaagataagtaataataagtgttagtgagggtttgtagaaaagggaatttttgtatattgttggtgggaatgtaatttggtgtagttattatagaaaataatatggagattttttttaaaaatgaaaatagaattattatatgatttgttaattttatttttaagtatatatttaaaggaaagaaaattagtattttaaaaaatatttgtatttatatgtttattgtagttttatttataataggtaagatatagaaataatttaagggtttttcgatggatgaatggataaatgaaatttggtatatagtgaaatatatttagttataaaaaagttataaaaaatttatatttatttaagtagagagtagaatcgtagttgttaggggttggagagtggggaaaattggggagatgtttacggaagggtataaatttttagtaaaaagatgaataaattttggaatgtaatagatagtattatgattatagttaataatattgtattgtttttttgaaatttataaagaaagtagatttttttttgtgtttttattatatatatatatatatatataatggtaattatattgattgaggcgttaaataatttgtgataataattttataatatatatatatattaaattatattgtatattttgaatatatataatttttatttgttaattatattttaataaatttggaaaaaagaaaaaaaaaattagagaaaatgaatgaaattaaattttggtatttattattaaaatttagaaatttttagttagattgattaataaaataaataaataaataataaaaaaatagaagaatgaaatgattaaaattagaataaaagaagatatattattattaatttatatagaaataaaaagtattatatgggaatagtatgaataattgaatgttaataaattggatattttagataatatagataaatttttagaaatataagatagatttaagaagaaatagaaaatttttatagatttggaataagtaaagatattgaattaataataaaaatttttttataaaaaaaaaatttttaagattagatagttttaagagtgaattttattaagtgtttaaataaaaattaatatttattttttttaaatttttttaaataatagaaaagaaggagcgttttattttttgttttttttttttattttatttattatgttttaagttttagggtatatgtgtataacgtgtaggttaattatatatgtatatatgtgttatgttggtgtgttgtatttattaatttattatttaatattaggtatattttttaatgttatttttttttttattttattttattataggtttcggtgtgtgatgtttttttttttgtgtttatgtgtttttattgtttaatttttatttatgagtgagaatatgcggtgtttggttttttggaaggagtattttttaatatatttttatgaggtaagtattattttgaaattaaatttatatgtattataaaaataaaattaatgattaatattttttattattattaaagtaaaatattaaataaattataatattagtaaaatgaattcggtaatatataaatagaattatataataatatgatgattaagtgggatttattttaggaatgtaaggttgatttaaatatttagtaatttaggaatagaattgaaattttttaatttgataaagagtatgtatgaaaaatttatagtttatattatatttaatggtgaaagattggaagtttttttaaaggaattagtaataatataaggatgtttgtttttaatatttttatttaatattgttttgaaagttttaacgagagtaattagttaagaaaaataaaagttatttaaattataaaaagtaaaattatttttgtagacgattttttgtttgtttgtttgtttgttttttttagatagggttttatattgttattaaggttggagtgtagtggcgtaattttggtttattgtagtttagttttttttgttttaaattatttttttattttagttttttgagtagttgggaatataggtgttggttattatgtacgattaatttttgtatttttagtagagacgggtttttattatgttggttaggttggaattttcgattttaggtgatttgttcgttttggttaagtgttgggattataggtacgagttatcgagttttgttgatataattttatatatagaaaattttttttaaaaatttagggttaataagttgggcgtggtggtttatgtttgtaattttagtattttgggaggtcgaggtaggtggattatttgaggttaggagtttgagatttttttggataatatggttaaatttcgtttttataaaaaatataaaaattagttgggtatggtggtagtcgtttgtagttttagttatttgggaggttgaggtaggagaattttttgaattcgggaagtggaggttgtagtgagtcgagatagcgttattgtattttattttgggtgatagagcgagattttatattaaaaaaaagaaaaaaaaatagggttaataaatgatttaagtaaagacgtaggatataagggtaatatataaaaattattatttatatttatatatattaatagtgaataatttgaaaaagaaatattaaaaaattataattaaaatattcgtattgtaggtggagtttattggtttatgtttgtaattttaatattttaggaggttgaggtatatcgattatttgcggttaggagttaagattagttttgttaatatggcgaaatttcgtttttattagaaatataaaaaataaaaataaaaataaattaattaggcgtggtggtttacgcgtttttgtagtcgtagttattttggaggttgaggtgggagaattatttgaattcgggaggcggaggtcgtagcgagtagagattgagttattgtattttaatttgggtgatataagaaagaaagaaaatgaaggaaagaagaaggaaggaaagaaagaaggaaagaaggaaggaaggaagaaaggaaggaaggaaggaaggaaaaaaatagttggatatgatggaggattagtattttttaattttaaaacgtattataaattatattaattaaaataatgtggtattggtataaggatagatatatagattaatggaatagaattgagagttagaaatttatatatttaaggttaattgatttttaaagagatgttaagattatgtaattggaaaagaataatttttttaataaatggtgttggaatatttggatatttatatgtaaaagaatgaagttgggtttttattttacgttatttataaaaaataatttaaaatgaattaaagatttaaatataagagttaaaattgtaagttttttagaaataaatagagggcgggtcgcgcgttcggtggcgcgttgtgcgcgtgtgtggagtgttttgttgtttttagttggaggggaattagtttgttttaggtggtaagttgcgtgagtaagtaagttaatatggatcgcgattcgtattattattatttttacgattatgacggcggggaggatttttatcgttttacgacgtttagcgaggatatttggaagaaattcgagttggtgtcgtcgttttgggatttgggtttcgtagtcgggaatttagtttttagttttggttttttggaatcgtggtcggtagggtgcgttggggacgagacggaattttaggattattggaaagtttgggacgcgaattacgttttttttattcgtcgtgattgtatgtggagcggtttttttatttaggagtcgttggagagagcggtgagtgatttgtttgtcgttggcgcgttttcgggatattcgtttaaggagttcgttattttcgattatattttcgagttcgaagtcggtaatttagcgtttatttttttttgtttgttgggcgagtttaagatttaggtttgttttaggtttgagagtttaagcgatttcgagggtgaagaaatcgacgtgatagtaaagaagaggtagtttttgagtacgcggaagttagttattatcgcggtgcgtgtagattttttggattttcgtatgaattttttttatatttttatttattagtaatagtataattatgttgtttttttttttttagaaagttgtttttaagaaggggttttaaagaggatgtttttaaaagaggttttagagagagaagttttagggggaaaggatgataaggaagatgaagagattgtgagttttttatttgtagaaagtgaggttgtttagttttgttagtttaaatttatttattatgatattgagaattggattaagaagaagtattatagttatttggagcgtaagagacggaatgattaacgttcgcggtttttggttttgagggacgaggtattcgttttggttagttgttttagggtttttaaagtaatgattttagttaaggttacggaatatttatatgaattggcggaagtcgaggagaggatggttacggagaaaaggtagttcgaatgttagcgacggtaattgtagaaaagaattgagtattttagtagttattgattaaaaagtttgattattttgttttaaaaagatataagttttttttttgattttttttttttttttagtaatttgtatatttttgttatagtaggatattttggatagtagattgtagaatgtattgtagttagtgtataaataatataaaggtttgtatttttggaaattttgaaatttagtttttttttttttttgatttatgggagtgttttgtgttttttggtatttttggttttttagtaggtagttgattgaggagatttggggtttttttggtttattatttttaaagaaaaggttgatagatggtatgtaataggtggtggatgttgttgggggttttagtttggaggaaattttatattttatatgaattttaggttaggaaaggatgtttttggggtgatgtaaggatagttgggtgtggacgttttttttgcggttttatttttttttaggagatatataagttgttttgggtgaaaataagtttagagatttgattaacgtggattattattttattgttagatattatagtagttgaggagttggaaattttatatatatgtatatatgtatatatatatgtatgtatatatgtatatatgtatatatatatgtatgtatatatgtatatatgtatatatatatgtatgtatatatgtatatatgtatatatatatgtatgtatatatgtatatattatgatgttggttgatttttttttttttatttttaatgttgtgatttagaatatttaagagaatttcgtttgtaagtaatttgttttaaagttttttgggtttttttttttgagtgagggaattttttgtttttataagggattttgttttattttgtttttgttatgtaatgggttttatagtattttttttcgtaggttagaaatatttttttaagatatagggaaatgggttttagtttggggtttggggaaagtttttaagttttggtttatgaatttaatttttgtttaggtgttttttgaggggtttttgaggtttaatttttttttaagataggtgtgaggtattttagaagggagaattgtaatattttttttttcgtatttgttttttattttaatttttgattgatgaatttgaagttttattagaattatgaaaatttgtttttttcgtgtatttttaaggagtttgttggttttgtagttacgtttgggttttcgtattagtttgtaatgagttagatgtttgttatagaatttgggtttttttgaagttttttggagagttgttgggatttatttagtgttttataacgtggatttgttttttggtgtgttttaaaggattttttaggagttttgtttagttaattattatgatggatttttttttttttttttgagacggagttttatttttgtcgtttaggttggaggttaatggtatgatttcggtttattgtaatttttgtttttcgggtttaagcgatttttttgtttgagtttttcgagtagttgggatcgtaggcgtttgttattacgtttagttaatttttgtatttttagtagagatggggttttattatattggttaggttggttttgattttttgattttaggtgatttatttgtttttatgatagattttgttttagttggattttgtagttttacgtggaatttaggtgttgtttttagtttgggaaagttatttaatttcgtagttgttatgtgggtaatttttgaaatttttaagtttgttttgtgagaaggattagtttttttagaattttgtttaggatagtaggtgtttgtttggaagttgggaggatggggagtggtaagttttattatatgtggttttggaatattagttgttatttttaaatttattgtttataatggtttttttttgaggttgttttttgtttttagagaattttaggggatgtttggaaatagtttttttatttttttggagtatggtttataagagttagttgatttttgaaattgtttatggaataggttaagtgtaggttattgatgttttatttgaatattttgtattttataagttgttgtttggtattatattgggggagagtattttttatatttttttttgggttttgtttttgtttttgtgttttgagacggagtttcggtttgtcgttaggtcggagtgtagtggtataatttcggtttattgtaattttcgtttttttggtttaagcgatttttttgttttagttttttgagtagttgggattatagatatgtgttattatatttatttaatttttgttttttttagtagagtcggggttttattatgttggttaggatggttttaattttttgatttcgtgatttatttattttggttttttaaagtgtatattgtatttttgtatgttttttgtaaagtggtgttaattttttttgtataagaaaaaaaaaattttttgggtaattttgttaaaagggtttgaatagtttgtgttttataagttgttgtttggtattatattgagggggagtattttttatattgtatttttgtatgtttttggtaaagtggtgttaattttttttgtataagaaaaaaatatttttgggtaattttgttaaaagggtttaaataatttgtgttttattagttgttgtttggtatattgggggggagtattttttatattgtatttttgtatgtcgtttgtaaagtagtgttaattttttttgtttaagaaaaaaa

SEQ ID NO: 168 - DNA, 8952 bp, Artificial Sequence
  chemically treated genomic DNA (Homo sapiens)
ttttttttttgaataaaaagagttaatattgttttgtaaacggtatataaaaatataatataaaaaatatttttttttagtatattaaatagtagttgataaaatataagttatttagatttttttaatagaattatttaagagtattttttttttgtataaaaagagttaatattattttgttaaaggtatataaaaatataatgtaaaaaatatttttttttagtgtaatattaaatagtagtttataaaatataagttatttagatttttttaatagaattatttaagaggtttttttttttttgtatagaaagagttaatattattttgtaaaaggtatataaaaatataatatatattttgggaggttaagatgggtggattacgaggttaggagattgagattattttggttaatatggtgaaatttcgattttattaaaaaaaataaaaattaggtgggtgtggtggtatatgtttgtaattttagttatttaggaggttgaggtaggagaatcgtttgaattagggaggcggaggttgtagtgagtcgagattgtgttattgtatttcgatttggcgatagatcgagatttcgttttaaaatataaaaataaaaataaaatttaaaaaaaaatataaaaaatatttttttttagtataatattaaatagtagtttataaaatataaggtatttaggtgaaatattagtaatttatatttaatttgttttatagatagttttaaaagttagttggtttttgtaaattatgttttagaagggtaaagaggttatttttaaatattttttggagttttttgagggtaagaagtaattttagaaagaaattattatggataatagatttggaagtagtagttggtgttttagagttatatataataggatttattattttttatttttttaatttttaagtaggtatttgttgttttaggtagagttttggagaggttggttttttttataggataggtttaggggttttagaagttatttatatgataattgcggggttgggtgatttttttagattggaggtagtatttggattttacgtggagttgtagagtttagttggggtaaaatttattatggaggtaggtggattatttgaggttaggaggttaagattagtttggttaatgtggtgaaattttatttttattaaaaatatagaaattagttaggcgtggtggtaggcgtttgcgattttagttattcggaaggtttaggtaggagaatcgtttgaattcgggaggtagaggttgtagtgagtcgagattatgttattaatttttagtttgggcgataagagtgagatttcgttttaaaaaaaaaaaaaaaaatttattatgatgattggttaagtagagtttttggaggattttttaaaatatattaggaggtaagtttacgttgtggagtattggatgagttttaatagttttttagaaaattttagagaggtttagattttgtgatagatatttgatttattgtaggttggtgcgagggtttaagcgtggttgtagagttagtaagttttttggagatgtacgaaaggaataagtttttatggttttagtagaattttaaatttattagttaaggattgagatgagaggtaggtgcgaaagagaaagtgttatagtttttttttttaaggtgttttatatttgttttgagaaaagattgggttttaagggttttttagaaaatatttgggtagggattgagtttatgagttagggtttgggaattttttttaggttttaggttaagatttatttttttgtgttttagggaaatatttttaatttgcgggaaagggtgttgtagaatttattgtataatagaggtagaatgagataaagttttttgtgaagatagaaagtttttttatttagagaagagagtttagagggttttaagataaattatttatagacgaagtttttttaaatgttttgagttatagtattgagagtgggaggaagggggttagttaatattataatatatatatatatatatatatatatatatatatatatatatatatatatatatatatatatatatatatatatatatatatatatatatatatatatatatatatatatatatatatatatatatatatatatatatatatgtaaggtttttaattttttagttattgtagtgtttgatagtgaggtaatggtttacgttgattaagtttttgagtttgtttttatttaaggtagtttgtgtgttttttggaaaaaaatggagtcgtagggagagcgtttatatttagttgtttttgtattattttagagatatttttttttagtttaaagtttatgtagagtgtgagattttttttaggttggagtttttaataatatttattatttgttgtatattatttgttagttttttttttggagatagtgagttaggaagattttaagtttttttagttagttgtttgttgagaagttaaaggtgttagaaaatataaagtatttttataagttagggaagagagagagttgggttttaaagtttttaagaatgtaagtttttatattgtttgtgtattggttgtaatgtattttgtaatttattgtttagagtgttttgttgtaataaaaatgtataagttattaaaggggagagggagattaaaaagaaaatttgtgtttttttaagatagaatggttaggttttttggttagtagttattgaggtatttaatttttttttgtaattgtcgtcgttggtattcgagttgtttttttttcgtagttatttttttttcggttttcgttagtttatgtaagtatttcgtggttttgattaggattattattttggaaattttagagtagttggttagggcgggtatttcgttttttagggttaagaatcgcgaacgttgattatttcgttttttgcgttttaggtagttgtggtatttttttttggtttaatttttagtattataatggatgggtttgggttggtaggattgggtagttttattttttataggtgggaggtttataatttttttattttttttattattttttttttttggagtttttttttttagagttttttttgggggtattttttttggagtttttttttggaagtagttttttggaggaaaaggggtagtatagttgtgttgttgttggtggatggagatgtggaagagatttatgcggggatttagaaggtttgtacgtatcgcgatgatgattggttttcgcgtatttaaagattgttttttttttattgttacgtcgatttttttattttcggagtcgtttgggtttttagatttggagtaggtttggattttgggttcgtttaataaataggggaagatgggcgttaggttgtcggtttcgagttcgggagtgtagtcgggggtggcgaattttttgggcgagtatttcgagggcgcgttaacggtaagtaggttatttatcgttttttttagcggtttttgggtggagaagtcgttttatatgtagttacggcggatgagggaggcgtagttcgcgttttaagttttttagtagttttgggatttcgtttcgtttttagcgtattttatcggttacggttttaggagattaaagttgagggttgggttttcggttgcgggatttaagttttagggcggcggtattaattcgaattttttttagatgttttcgttgggcgtcgtggagcggtagaaatttttttcgtcgttatagtcgtagaaatagtgatggtacgagtcgcggtttatgttggtttgtttgtttacgtagtttgttatttggagtagattagtttttttttagttgggggtagtagggtattttatatacgcgtataacgcgttatcgagcgcgcgattcgttttttgtttatttttaagaggtttataattttagtttttatatttaggtttttggtttattttgagttattttttgtaaatggcgtgaggtaagggtttagttttatttttttgtatgtgagtatttaagtattttagtattatttgttgaagagattatttttttttaattgtatggttttgatatttttttgaaaattagttgattttagatgtatgggtttttgatttttaattttattttattgatttatatgtttatttttatgttagtattatattgttttgattagtgtggtttgtagtacgttttgaaattgagaaatgttagttttttattatgtttagttatttttttttttttttttttttttttttttttttttttttttttttttttttttttttttttttttttttttttttttttatttttttttttttttgtgttatttaggttggagtgtagtggtttaatttttgttcgttgcgattttcgtttttcgagtttaagtgatttttttattttagtttttaaagtagttgcgattataggggcgcgtgggttattacgtttggttaatttatttttatttttattttttgtatttttagtagagacgaggtttcgttatgttggtaaggttggttttgatttttgatcgtaagtggtcggtatgttttagttttttaaagtgttgggattataggtatgagttaatgagttttatttgtagtgcggatattttaattataattttttaatattttttttttagattgtttattgttagtgtatataaatataaatgatgatttttgtatgttgtttttgtattttgcgtttttgtttaaattatttattagttttattttttttttttttttttgatatggagtttcgttttgttatttagggtggaatgtagtgacgttatttcggtttattgtaatttttatttttcgggtttaagagatttttttgttttagttttttaagtagttggaattataggcgattgttattatgtttagttaatttttgtattttttgtagagacggggtttagttatgttgtttaggagggttttaaatttttgattttaagtgatttatttgtttcggttttttaaagtgttgggattatagatatgagttattacgtttagtttattagttttaaatttttaaaaaagattttttatatataagattgtgttagtagggttcggtggttcgtgtttgtaattttagtatttggttaaggcgggtaggttatttgaagtcgggagttttagtttggttaatatagtaaaaattcgtttttattaaaaatataaaaattaatcgtatatggtggttagtatttgtgtttttagttatttaggaggttgaggtaggaggatggtttgagatagggaggattaggttgtagtgggttaagattgcgttattgtattttagttttggtgataatgtgagattttgtttaaaaaaaataaataaataaataaataaaaaatcgtttgtaaagatggttttattttttgtaatttgagtgatttttattttttttgattaattgttttcgttagaatttttagaataatgttgaatagaagtattgagagtagatatttttgtgttgttattgatttttttggaaaagtttttagttttttattattgagtatgatgtgagttatgagttttttatatatgttttttattaggttgaggaattttagttttatttttagattgttgagtgtttaaattaattttatatttttgggataaattttatttggttattatattattatataattttgtttatatgttatcggatttattttgttagtattgtaatttgtttagtgttttgttttaataataataaaggatattggttattggttttatttttgtgatgtatatgggtttagttttaggataatatttattttataaaaatgtgttaagaaatgttttttttaaaaaattaaatatcgtatgtttttatttataggtgggaattgaataatgagaatatatggatataggaaggggaatattatatatcggggtttgtggtggggtggggtggggggagggatagtattaggagatatatttaatgttaaatgatgagttaatgggtgtagtatattaatatggtatatgtatatatatgtaattagtttgtacgttgtgtatatgtattttaaaatttaaagtataataaataaaataaaaaaaaaaaataaaaaatgaaacgtttttttttttttattgtttagaagagtttgagaaggataggtgttaatttttgtttaaatatttggtagaatttatttttgaagttgtttggttttgagggttttttttttgtgggaaaatttttattattagtttaatatttttatttgttttaagtttataaagattttttatttttttttgggtttgttttgtgtttttaggaatttgtttatgttatttagagtatttaatttgttggtatttaattgtttatattatttttatataatattttttatttttatataggttggtggtaatgtgtttttttttattttgattttagttattttatttttttgtttttttgttgtttgtttgtttgttttattggttagtttagttaaaggtttttaagttttggtgataaatattaaaatttggttttatttattttttttggtttttttttttttttttttagatttattggggtataattgataaataaaaattgtatgtatttaaggtgtataatatgatttgatatatgtatgtgttgtgaaattattattataaattatttaacgttttaattagtatagttattattgtgtatatgtgtgtgtatgtggtgaagatataaaaagaaatttattttttttgtaaattttaaggaaataatgtagtattattaattataattatgatgttgtttattatattttagaatttatttatttttttattgaaagtttgtattttttcgtgagtatttttttaattttttttattttttagtttttggtaattacgattttattttttgtttaaatgaatgtgagttttttatagtttttttatagttaaatatattttattatatattaagttttatttatttatttatttatcgagggatttttaggttgtttttatattttatttattgtaaataaagttgtaatgaatatgtgggtgtagatattttttgagatattgatttttttttttttggatatatgtttagaggtgggattgatagattatatggtaattttatttttatttttggggggaatttttatattgttttttatagtggttgtattaagttatatttttattaatagtgtgtaagagtttttttttttgtaaatttttattaatatttattattgtttatttttttgataataattattttaataggtgtgaggcgatagtttattgtggttttaatgtgtattattttgatgattagtgttgttgagtatttttttatatatttgttgggtatttgtatgttttttttggaaaaatatttatttggattttttgtacgtttgttaattaggttatttgtttttttgttattgagttgagttttttatatattttggataaaaacgttttattagatatttaagatatttatgttattgaaatatttgtttttgggttaggtatagtggtttacgtttgtaattttagtattttgggaggtcgaggggggtatattatttgaggttaggagtttgattttagtatgattttaatatgattttaatatggtgaaattttgtttttattaaaatataaaaaaaaaaaaattagttgggtatggtggtaggtgtttataattttagttatttaggaggttgaggtaggagaatcgtttgaattcgggaggtagaggttgtagtgagtcgagattgcgttattgtattttagtttgggtaataagagtaagattttattttaaaaaaaaaaaaaaaaaaaaaagaaagaaaaaagaaaaaaaaaagaaatatttgtttttgaatgtttttgagaaatattttttggggaaaaattgttagtattgtgtttttgataaaggtacgttttttaaattagtcgtttagggagtttttgaataaattaaataatgatagtttgaggagaatgagtttttttttgttttttttagtattaggaatgtaattttttatttttaaagttattgttgagttagggaggagggagtggaataggatatattaaaatattataaagtttatttttttaagatttagttattgtttttgaatatgtgttttttaggttgttgtaagattttggttaatttttagagttttgaaatagttgagtttaatcgtttttgttagttttttattgttttaatggaggagtggaattttgtagtttttttttttgttatttttattaatattattttagtaaatgttttaataatgtatttagtaatgggtttagaattttttgtttttgatttttttaatttttaatattaaattttatttttgtttttgggattttgttagagaaagttataaataggtaaaggttacggtatattatttatttatgttttttattttagttatgttttttatattgtagtttttttattttttttttattgattataagtagttgttttaaattttttttattttttttaagttttgtatataatttttgtttattttattttgtttttatgaattttataatttaaaatatatttgtgttttatttgtattttttttagtagcggaggtttgaggttagatttttttaatttaatttttgttttgatttaatttttgtatttatgtttgttagttgcgtgatattgaataatttattattttattttgttttagtttttttatttttaaaggattagtgtaaggattagataaaataattta

SEQ ID NO: 169 - DNA, 8245 bp, Artificial Sequence
  chemically treated genomic DNA (Homo sapiens)
  unsure 3137: n is a or g or c or t
gtaatttataaagaaaagaaatgtattttttatgtttttggaggttgagaagtttaatattaaggtgttagtaattgttgagggtttttatggcgtattattttttggtaggaaaaaggaagagagggtaagagattaaatttttagttttaagtttttttataattagtattaatttatttataagagtggagtttttatgatttaaatattttatattaggttttgagataggaataatataaggtggttgtagaataatagaagattttgggtagtaattttatatgattagtaaaaggaaattgttgaaatggttgtagaggttatgggttaagatcgtgaaaaatagagtgtagattaagttggttaagatttattgaatttagtatggtattggatttgatttaggttttttttaggattttattatacgtttattaatatattaaattatatattttattagtattatgatattttcgagaatatttatatttggtttaaaaataggtggtgttatagttttgagaaatttttttttttttttaggaatgattatgaatattttgttttttggttaaagaaattcgtaaaggtagtaattttaaattttttttcgtgtgagtttttcgagtatatttatattttttttttttgagtgtgtatttttttttttgtaataaatcgtatttttattattttttaattggtttttgaatttatttttttgatggtgttaagagtttggatattggttggggtttaggttttattggtatttggggattttttttttaatattgttgtattgggggttaaatttttaacgtgtttttttttggaggatatatttaaattatggtagtattgaataaaattttggttttgaaattatatgaagatttgttttgtgtgtgtttatatagttgaagtattttaatatttttaagagggatttttaggtttttttataagtagattaagaattagtattagtatgttttttttatgtataaagttttttatttttttatttataaatgaaggtaattaataaatatttgttgaattttattattttgttaatttttagatttagatttgttagtaattattggtttgtattaaaagtaggagattagagattgaggtttaggaagtataaatgatttgtttaaaggtatgtagagtaattaggttttttgtttttttgttttttttttttgttatattttgtttttcgataaagggtgaatgatttagtgatggttatttatttgaggagaaaggataaaggtaggattttgaatcggagtaattgaatttattttggtttatttttatagttttgttatagaagatttggttattttagaaggatttatttagtgattttggttttgaataatattatgagtatttattatatataggtatattgttgtgtcgtaaggattttttttggagtaaaattgatttaggttataggttagtgagggagattgagtttgttttttatagtgttacggaagtgagtattaaataaatatttttaggtatggattattataaatggaggtgagtgttggataggaaaggataggatgttaggcgagaatttagtaggagggtttggtggcgattagggggttagggaaaagtagaagtggggttgtaaaaggtttttgtaaagatgaaggtttttatatttgtgagggaaataataataataaaggtgtttggaagggttgtttattcgtatttatgggtttttttttagaattttgggaatttttttttttagagttttgtaggcgtttagggttagggttggaaaggtttttataaatgttaatttgtgagtattttatgggttgttttttgatttttagtatttttttttttaattagatttaatggtgaggtgaagaggtgggggcgatggagaatggtatttttagtttggagaaaaaagtagggagaggcggggaagtttttttattttaattttagggttaggtttttttttttttaaataagtttaaggaatgttttttaaggtaaaattttattttattgtgtatttggttgtgaagggggttgtttaggagattagggttgtttttggagagtttggagggtaggggtaataatgtttgattttttgtaaataaatatatttgtaagaaaagttagattagagtgaagtaaagttaggatttgatggtggcgggaagggaaggggttaatgttgttgttggatagaggggtgttattttttttagaagaatagtatgtcgtggttattattataataatagttgatataattattatgggttggggatttataagagtttttataatttttaggtaggaggtattacgaattttattttataattgaggaaattgaggtataaagaaacgaagtagtgatagtagtttttttttttttttttaatagtttggaattaagttgtttgagtcgaggttgggttttaggaggtgtggatagtatttttatttcggtaaattagattcgtttgtttataattggggagaatggtggttttgaaaaggttaatttgggagttttggggacggttgtagggaacgtacgtttattttttttaggaagtagagttaggtcgttttttttttcgtagtggtgaggacgcgtggatagtttcgcgggggcggcgggagatttgcggagtggtcgtattttaggttcgcgttaaggtcgggtagtttcgttttttgtttagttttcgcgaggtgtcgttttcggcgaagaaattatcgcggcgttattttcgtagttcgtatttatttatttatttatttttaaataaggggggcgtttttttttttttaatttgaaattggaaatatttagaggttttgtttttaagggggcgcgttttttttttgttattttgtattttcggattatttttttttcgtaattatataggagtaatttttttgtaaggttttgtttaacgttggtttcgcgtttagttgtataatacgtagttaaagcgggggttgggttagaagtagcggttttttttttttaatatatattttcggagtttttcgtaattttttttttttttaatgataancgatgtttaggttcgtaaggtgtttttttttgtaaagaaaagtaagtggtttttggcgcgaaattttggcgttttttttgatttttatggaaattaggagggcggggtaaagtcgtttttttttttttttttttttttttttgtttgcgttatagttttttttttttttcgtttttcgggtgtgttagattttttagttaataatatttttcgagttttaaagcgtaggttgtgatagttatttgtttggacgcgttgggtggatgcggggggtttttgggaattgtgttggagtcgagtaagcgttagttaggcgaagcgcgtatagattgtagttattcgaggatattttcgttttttcggtttattcggagatattcgcgtagaatcgttttcggattttttgtagtcggcgggaggtaaggagtagggtttgtaaatcgttcggcgtttagggaagcgacgagcgtcggggtaaggtaagttttggacgggattgcgacgtgcgtatcgggcgttttaatatgttcgggggattgtttttgttttcgaaataaaattatttttgggtttttttagaaaagttagttttagtttcgaaggtattttggttagaggagattcgttttaatttttttgtagtttttatcggggggagtaatggtttttgcgaaaagaaattttttcggttttagaagatttgtttgtgtttgagttgtcggagagtcggtgcgtttttattttaggttggggtttttttttaaagggtgtttttggaggaagaagagggggggattaggtagggcgaggtcgtcgcggtcgtaatttgggttacggttgttttagtttggaggagaggcggttttttcggcgatttttttcgcgcgggcgtttttgttattttcgggaataggggtttagtttttttttttttggaagaggacgttgtcgtgggtttggaagagtaggggtgggtttagagagtttttaattaagttattggtaggagtatttttgtagcgggtgaatgtcgaggggcgtttgtttaaatttggggaggggaaggatttgtggatatgggtgtttgttgttggtttttgtttagagaaaggtttttttttatttgtaaagttttttaaattttttgttattatttgtatttttgaggttgtatttttataaagggggtagaaggtattttaaatattattttcggtagttgggtcggagagtttgggttttttttgagtagtcggttttatatcgttgcgagtgcggttgtttgcgtgttcgtgagagttagaattttgtagttaggaatagtttttttttttaggtagtgttttgtgtgaatgaaatggtagtttttaaagttgcggagtttcgttattattttttgtatttgtatgtttttttttattttttgtcgtagatagtttgtatataaaaggagggcgggagggagggagcgagaggtataattttttttattttcgggagtagtgggtagagtggggggtttggagggaagattggggaatttggttagagggggcgtttattgtttattttttcggtttgtttcgtttgtttatttttttcggtgtgtttgtcggttgtagtgttggaggtcggcgtcggttttcgtttttcgcgttttttacgggaaggaagtattttcggtattaaaacgaacggggcggaaagaagtttttagtcgtcggtcgggaggcgagtcgatgtcgagttgttttacgtttattatgtcgggtatgatttgtaagaatttagatttcgagtttgattcgttatagttttgtttttattcggacgaagatgatttttatttcggcggtttcgattcgattttttcgggggaggatatttggaagaagtttgagttgttgtttacgttttcgttgtcgtttagtcgtggtttcgcggagtatagtttcgagttttcgagttgggttacggagatgttgtttgagaacgagttgtggggtagttcggtcgaggaggacgcgttcggtttggggggattgggtggttttatttttaattcggttattttttaggattgtatgtggagcggttttttcgttcgcgagaagttggagcgcgtcgtgagcgagaagttgtagtacggtcggggtcgttaatcgcggttttatcgtttagtatacgggagtcgtcgcgttagattgcgggttttcgttacggcgcgtttgcgggatgcggtcgcgttaggtcgttatgttcgtagagttcgtatattcggtcgtcgagtgcgtggatttcgtcgtggtatttttttttttcgtgaataagcgagagttagcgttcgtgttcgtagtttcggttagtgtatcggcggtcggtttttgcggtgtataggggcgcgtattgttttttagcggggtttcgggggtcgttttttcggttaggcggcgttagattagcggcggcgattataaggtttttagttatttcggagaggatattttgagcgatttatgtaaagattcgaattcgggttcggttgtttttttggggtattggatttcgggtcgcgttttttttgttagtgttcgtatgttttggtttggggagtattttggaggtagtgttaggggtagagaggttttgttttttttaagttttttttcggggtaaagagaaggggttgagagaatgtcgttgtaaaaggggtgttttttaattttcgtttttattaaagttttttttatttttttttggggagtttttttttaggttattacgggtttttattcggttttttattttttttttgtagcgtagtttgaggaataaaattggagaaagttggtggttaaatcgggtgggggtttagggggttgttgggtgtattgtttggatagaaatttgttagcgtaggggtgaaagggattttttggtttaggttaggggagggaaagatatttcgagaagatttaagggttgtgtaaagttttgtttaaggcgtaggaatttataggagggttgtatagatggttagagtcgattttttatttttttttttttttttttttttttttttttaaatgtcggtatttttttttttttttattttcggtgggtggtgggttatttgtttttggtgcgtggttagtaggcggcgatatgcgaggttagtaggcgggttcgggatttgaaaggttgggggtggtgggggtattttttttttttttatttagtagttggttgtaagtgtaatagtagttgtgtatatttttagggggttttttttttttagtgtgtagtggaaattggttgtagttttgttttttagtttgaattttaggtttaatatgagatgtgagttgtatttgtaatttagtgtttttgaaggtgagggtaggtatttagtagtttttttaggaaggtttatattttgggaggatttattgattagttttattgtgtttatttgtttgtgttttaagttgaagggaagagttaaaattaagttttttttgggggtcggatgaatagaatttatttaagagtggtatgtttgttttgagtaggagttggattttttttgatttgaaattatgttttagaatgtagtgatatagttaaattattttggtgagagagatttgaggttttgaagaattgtgatagtttagtgaacgttatgtaagttagattagattgtagttgtgtgagagtatttttttttaatagttgtttttttggtagaaaattaaaatattggtttaaaggatttatagattggaatagttttatatttcggttttagaataaattttataattgtttagtttttcgagttttttttagattaagtagaagatatgttttgatttttatgtttgtattttaaataataattttttattttagcgtggtagttaatgaggagagaggggaagaatgcgtatatgatgttatacgtttttgttgttgttgttattattggtggttttgaggagagttgtttttatttgggggtttatattaattgtggattatggttttgttattaagatttgatttttgttaaatgaaaaattgtttattgtataaaatttaggtttgtggacgaaaagttgttttttttttttagttaattaaattgttttttaagtttgtttaaggatttaaaattaaatataattatgtgtaaattgttaaatgaggtttttaaaatgagaggttttaattttttaagtgtggagttagaaatgtaaataagtttatagggtagattggtgattatgataaaagttattatttattgagtatttgtttattaggtttagttttatgttaagtttatatgttatttgttaaagtggtattatttttatttaatagttgaggaaatagaggtttagaaaggttgggtaatttgattagggttatgtaattagtttgcggtggagttaggattttgtttgattttaaaggttaagttttttatatttatttttattatttgttaaagttttgaatggaggttgaaagtatagttggggtatggggaagaaaaatatatatatatatatatatgtatatgtatgtatgtatgtatggggggttgttttgtttttgtttttgataaggagttttgtttttgttgtttaggttggagtgtagtggtatgatttgggtttattgtaattttcgtttttcgggtttaagttatttttttgttttagtttttcgagtagttgggattatcggagtatgttattatatttagtaaagttttgtatttttagtagagatagggttttattatgttggttaggttgattttgaattttttattttaggtgatttgttcgttttcgttttttaaagtgttgggattataggtgtgagttatcgcgttcggtttatagatatatttaatttaaagagatttaaaataaatataaaattgtttatatttatgttgatggatttataaaaatagtagtttgttagggtttgtcggaagagatagataagtatatatattaatatggatatatatgtgaattttatttaaatggtttttatatgagagtaattagtattttttttttaga

SEQ ID NO: 170 - DNA, 8245 bp, Artificial Sequence
  chemically treated genomic DNA (Homo sapiens)
  unsure 5109: n is a or g or c or t
tttgagagaaagatgttagttatttttatgtgagaattatttgaatgaaatttatatatatatttatgttaatatgtatgtttatttgtttttttcggtagattttggtagattgttatttttatgggtttattaatatagatgtggatagttttgtatttgttttagatttttttaaattaaatatatttgtaggtcggacgcggtgatttatatttgtaattttagtattttgggaagcggaggcgggtagattatttgagatgaggagtttaagattagtttggttaatatggtgaaattttgtttttattaaaaatataaaattttgttgggtgtggtggtatgtttcggtaattttagttattcgggaggttgaggtaggagaatgatttgaattcgggaggcggaggttgtagtgagtttagattatattattgtattttagtttgggtaataagagtaaaattttttattaaaaataaaaataaaataattttttatatatatatatatatatatatatatatgtatgtatatatattttttttttttatattttaattgtgtttttagtttttatttaagattttagtaggtggtagaaataaatataaagaatttggtttttagggttagatagaattttggttttatcgtagattagttgtatgattttggttaagttatttagtttttttaagtttttgtttttttagttattaaatggggatgatattattttgatagataatatgtagatttagtatagagttgagtttagtagatagatgtttagtaaatggtagtttttattataattattagtttgttttgtggatttatttatatttttagttttatatttaaagagttgaggttttttattttaggagttttatttagtagtttatatatggttgtgtttgattttaagtttttaaataaatttgaggaataatttaattaattgaagaaaaaaaataatttttcgtttataaatttgagttttatataataaatagttttttatttaataaagattaaattttaatgataaagttataatttatagttggtataaatttttaaatgggagtagttttttttaaagttattaataataatagtaataatagaaacgtgtagtattatgtgcgtattttttttttttttttttattgattattacgttggggtagaaaattattgtttaaaatataagtatgaaaattaaaatatattttttgtttgatttgaaggggattcggaaagttgaataattgtgggatttgttttaaagtcgaaatgtgaggttgttttagtttgtgggttttttaagttaatgttttggttttttgttaagaagatagttgttggaaggaagtgtttttatatagttgtagtttagtttaatttatataacgtttattgagttattatagttttttagagttttaagttttttttattagagtaatttggttgtattattgtattttgaaatatggttttaagttaaggggggtttagtttttgtttaggataggtatgttatttttgggtgagttttgtttattcgatttttaggaaaggtttggttttaatttttttttttagtttaagatatagataaatgaatataatagaattaattagtgagtttttttaggatgtgagtttttttggagaggttgttgagtgtttgtttttatttttaagggtattgggttatagatataatttatattttatattaggtttggaatttaggttggaagataaaattatagttagtttttattgtatattggaaagaggaggttttttgagaatgtatataattgttgttgtatttgtagttagttgttgaatggagggagggagggtgtttttattatttttagttttttagatttcgggttcgtttgttggtttcgtatatcgtcgtttgttggttacgtattaggagtaaatagtttattatttatcgaggatgggggaagggaaaggtatcgatatttgaaaaaaaaaaaaaaagaaaaagaaaaagaatagaaaatcggttttagttatttgtgtaatttttttataagtttttgcgttttaaatagggttttgtatagtttttgaattttttcgggatgttttttttttttttgatttgggttagagagttttttttatttttgcgttaataggtttttgtttaggtagtgtatttagtaattttttaaatttttattcggtttagttattaattttttttaattttattttttagattgcgttgtaaaagagaggtgggggatcgggtgagggttcgtgatggtttagaggagggttttttaggagagggtggaaggaattttagtgaaggcgagaattggagagtattttttttgtaacggtatttttttagttttttttttttatttcgaggagagatttgggggaaataggatttttttgtttttagtattgtttttaaaatgttttttaggttaagatatacgagtattaataaaggggacgcgattcggggtttagtgttttagggaggtagtcggattcgagttcgggtttttatatgaatcgtttagggtgtttttttcggagtagttgagggttttgtggtcgtcgtcgttggtttggcgtcgtttggtcggaggggcgattttcggggtttcgttggggggtaatacgcgtttttatgtatcgtaggagtcggtcgtcggtgtattggtcggggttgcgggtacgggcgttggttttcgtttgtttacgggaaaggggaatattacggcgggatttacgtattcggcggtcgggtgtgcgagttttgcgggtatggcggtttggcgcggtcgtatttcgtaggcgcgtcgtggcggggattcgtagtttggcgcggcggttttcgtgtattgggcggtggaatcgcggttggcggtttcggtcgtgttgtagtttttcgtttacggcgcgttttagtttttcgcgggcggagaagtcgttttatatgtagttttggaggatgatcgggttgggggtgaggttatttagtttttttaggtcgaacgcgtttttttcggtcgggttgttttatagttcgtttttaagtagtattttcgtgatttagttcgggggttcggagttgtgtttcgcgaagttacggttgggcgatagcgggggcgtgggtagtagtttaaattttttttagatgttttttttcgggggggtcgagtcggggtcgtcgaagtagaagttattttcgttcgggtagaagtagggttgtagcgagttaaattcgaggtttgggtttttgtagattatgttcggtatggtggacgtggagtagttcggtatcggttcgtttttcggtcggcgattgagggttttttttcgtttcgttcgttttaatatcgggggtgtttttttttcgtggggggcgcggaaggcgggggtcggcgtcgatttttaatattgtaatcgatagatatatcggagagggtgggtaaacggggtagatcgaggggataggtaatgggcgttttttttaattaggttttttaattttttttttaagttttttattttgtttattgttttcgaaggtggaggaagttgtgtttttcgttttttttttttcgttttttttttgtgtataagttgtttacgatagggggtgggagggggtatgtagatgtagggggtggtggcgaggtttcgtaattttggaaattgttattttatttatataaggtattgtttgggggagggggttgtttttggttgtagaattttagtttttacgagtacgtagataatcgtattcgtagcggtgtggggtcggttgtttaggggaagtttaggtttttcgatttagttatcgggaatggtatttggagtattttttattttttttgtaaaaatgtaattttaggagtgtaaatgatagtaggggatttagaaaattttgtaaataaaaaaaagtttttttttagatagagattaataatagatatttatatttataaattttttttttttttaaatttgagtaaacgtttttcggtatttattcgttgtagggatatttttgttaatagtttaattggaagttttttaagtttatttttgtttttttaaatttacgataacgtttttttttagggagggagaggttgagtttttgttttcgggaatggtaggggcgttcgcgcgaggagggtcgtcgggagagtcgttttttttttaagttggagtagtcgtgatttagattgcgatcgcggcggtttcgttttgtttaattttttttttttttttttttaggggtattttttggagaagaattttagtttggggtggggacgtatcggtttttcgatagtttaaatatagatagattttttagagtcgagggaattttttttcgtagaagttattatttttttcggtaagggttgtaaaaggattagggcgggttttttttagttaggatgttttcggggttggaattggtttttttgggaaaatttagagatggttttgtttcggaagtagaaatagtttttcgggtatattagggcgttcggtgcgtacgtcgtaatttcgtttagggtttgttttgtttcggcgttcgtcgtttttttgggcgtcgggcggtttgtaagttttgttttttatttttcgtcgattgtaggggattcggaggcgattttgcgcgggtgttttcgggtgggtcgggggggcgggggtgttttcggatggttatagtttgtgcgcgtttcgtttggttagcgtttgttcggttttaatatagtttttaggagtttttcgtatttatttagcgcgtttagatagatgattgttatagtttgcgttttgaagttcgggggatattattaattgaaaaatttgatatattcggggggcggggagagaagggggttgtggcgtagataagggggagggagaaaggagaggaaagcggttttatttcgtttttttgatttttataaaaattaggggaggcgttaaggtttcgcgttaaaagttatttgtttttttttgtagagagaagtattttgcgagtttggatatcgnttgttattaaaagaaaaaaaaattacggagggtttcgggggtgtgtgttggggaggggagatcgttgtttttaatttagttttcgttttgattgcgtgttgtgtagttgagcgcgaggttaacgttgagtaaggttttgtagggaggttgtttttgtgtaattacgaaagaagggtagttcgaaggtgtaaaatagtagggagaggacgcgtttttttaggaataagatttttggatgtttttagttttaaattgaaagaagaggggcgttttttttgtttgaaaataaataaataaataagtgcgagttacgagggtggcgtcgcggtggttttttcgtcgaaggcgatatttcgcggagattgagtagaaagcggagttgttcggttttggcgcggatttggagtgcggttatttcgtaggtttttcgtcgttttcgcgggattgtttacgcgtttttattattgcggaggaggaggcggtttggttttgttttttagggggaatgggcgtacgttttttgtagtcgtttttagggtttttaagttaatttttttaaagttattattttttttagttatgggtaggcgaatttgatttatcgagatggaagtgttgtttatattttttgagatttagtttcggtttaaatagtttgattttaaattgttgaagggaaaaaggaaagttgttgttattatttcgtttttttgtgttttagtttttttaattgtgaaatggagttcgtagtgttttttatttgagagttatgaaagtttttataagtttttagtttataatagttgtgttagttattattatgatgatgattacgatatgttatttttttggggaaaataatatttttttgtttagtagtagtattggtttttttttttttcgttattattaaattttggttttattttattttggtttagttttttttataggtgtatttgtttgtagggggttagatattattgtttttgttttttaaattttttaaaaataattttgattttttggatagttttttttataattaaatatatagtgaggtgggattttgttttgaaaaatattttttaggtttgtttggagagaggggaatttggttttgggattggggtgggaaggttttttcgtttttttttatttttttttttaaattggaaatgttattttttatcgtttttatttttttattttattattggatttagttaaggaggaggatgttgagggttagggggtaatttataaaatgtttatagattagtatttgtgaaggtttttttagttttgattttggacgtttatagagttttagggagaaagatttttagagttttaggaagaggtttatgaatgcggatgagtagtttttttaagtatttttattattgttattttttttataaatgtaaaagtttttatttttgtaaaagttttttatagttttatttttgtttttttttagttttttaatcgttattaagtttttttgttgaattttcgtttagtattttgtttttttttgtttagtatttatttttatttgtaatgatttatgtttgggagtatttgtttagtgtttattttcgtgatattgtggaagataggtttagttttttttattaatttgtgatttgggttagttttgttttagagggaatttttacggtatagtagtgtatttgtatatagtaagtatttatggtattatttaagattaagattattgaatgagtttttttaaggtggttagattttttgtggtaagattgtgaaaataggttaggatgggtttagttgtttcgatttaaagttttatttttgttttttttttttagatgaatgattattattaggttatttattttttgtcgagggataaggtgtagtagaaaagggggatagagggataggagatttggttattttatatgtttttgagtaaattatttatattttttggattttaatttttaattttttgtttttaatgtaagttagtaattattgataagtttgaatttgaaggttaatagaatgataaaatttaataaatatttattggttatttttatttgtaagtagaaagataaaagattttgtatatggagaaaatatgttaatgttgatttttagtttgtttatagagaagtttgaaaattttttttaaaaatgttgaaatattttaattatgtgaatatatataaaataaatttttatatggttttaaagttaaggttttgtttagtattgttatggtttgaatgtgttttttaaaaaaaaatacgttggaagtttaatttttagtgtaatagtgttggaggggaggtttttaaatgttagtgggatttagattttagttagtgtttaggtttttgatattattaagagaatgaatttaaagattagttggaaaatagtgaaagtacgatttattgtaaagggaaaagtatatatttaagaaaagggaatatgggtgtattcgagagatttatacgaaagggggtttggggttgttatttttacgggtttttttaattaagaggtagaatatttatgattatttttagaaaaagaaggagattttttagaattgtgatattatttatttttaaattaaatatgggtgttttcggaagtgttatgatgttagtggggtgtgtgatttagtatgttaatgagcgtataatgaggttttaggagaaatttaggttaaatttagtgttatgttgggtttagtgggttttagttagtttggtttatattttgttttttacggttttagtttatggtttttgtagttattttaatagtttttttttgttagttatgtgaaattgttgtttaaaattttttattattttgtagttattttatattatttttgttttaggatttaatgtgaggtgtttaggttatgagggttttatttttgtgaatggattaatgttaattataaaagggtttgaggttaggagtttgattttttgtttttttttttttttttttgttaggggatggtacgttatgaaggtttttagtaattgttggtattttgatattggattttttagtttttagaaatatgagaaatatattttttttttttataaattat

SEQ ID NO: 171 - DNA, 6337 bp, Artificial Sequence
  chemically treated genomic DNA (Homo sapiens)
taaatattttttaaagattttatgtgatttttattgttatagatgatatgttaggttttttagtgaaatttttggtgtgtttgtaattaaaatgtttttgtttgatattaatgatgataatttttattgaggttaaagttaaaataaatagggttgtggaagtagataattaagatataataatttggtaaagataagtaatttgggattaaatttaagtttttttttagaggtaggtataaagttattaagtataaaataatgagtgattttttttattatattattatagaaataatttgtagaaaattaaatgttagtttttatattaattttaatatttggattattgaattttaagtttgaatattggaaatttttttaggtttaatagttttatttatttttttttaaatttttgtatttgttttgggagtggagggaatgttggaatttagggtttgtaattatttttgaaattagtagagaaattttgagatgttgaaagtgatttttatttttattaagattttttttttttattaaagttagaatttatttagttgtgttttttttttagtaatattttattttattttgtcgttttaaaatcgtttttttataatattatagttggaattttttttgatttttttttaagttttgaatatttaattgtttaatttaatgtattgataaattattaataatatagtatttttttaaagagttaaattattaagttatttttttgataggtttttttagttatttttttaaattattatatttataaaagatgattttttattatagaggttttattttgaaaaaagtaatttttttgtaagtttagtttagagttagtttgagatggaatggttatgttatgtgttggaataaagataatgttgtaagaattggttattttttgtatttttaaggttgttaaatgtttttatttaggtttttgattttttttggaagttttttaatttaagtagaggttaatgttttttttagttgtttttataaatttttttagtagttttggtaggtattaatgtgtttatttaggtgtgtttgatttttagagttaatagtaatttgtaattgttgagtatattgtgaagttatttataatataaaaaatattaagaataatttttttagtttaggagttgataaggatttgtaggtaggggtagaagtgaattggaatgtatgtatttttttatatgtatttggtttttttttttaagaaaagtatagagaatttttaataatgtagaaagtttagggtgggtaaaatttattagaagaagaaggtatgagtattattttgttggtgtgatttgtttattaatattagtgtgttgttataatgtttaaattaatatagattttatttaaaaaaaaagttgatgttacgtaaaggttattgtagttagaatttggttataattttaaattgtaagaaaattaaatgtatttatttttttagaatataaaatgaaataaataaataaataaatattttattagagttttagtgggtatttatttatagtatcggaggtgattgggttttttttttttttaattatttatggttagatttttttagtagatagtgttggagtgttatttttaataatttgtttatatatgaaataaatgtgcgtttttttcgtaagtaagaaatttatttttttgtagaaatagtggaaaatttatttttattttttgtgtgaggagtaaaagttaatttaattcgattttgagtataaaagggtgttttgagtagatttttttagagttatttttaaaattttttttatgtttttttggttaatttatttaaaaaaaaaaaaatgtttttttttatgttgtttatttagttttttttttttttttttttaggttttttttgggaaaagagtagggagatcgtttttgaattgggatattgtagttatttttgtggtgttggttgtttattgttttagtatattgtttttttttttttttttttttttttttttttttttttttcgtttttgatagcgttttaaaagttttgttttatttttttttattttggtattttgagattttatttttagtatttgcgttttaagggtttttaagttcggattttgtttttttgttagtaagttttattaagtcgtcgggcgtttgtgttttttcggtttttttagttttattcgttcgcggtattttggtaattttgttttgagattattttattagagatagttttaatttttgagaattatttttattgatagaggtttttgagtgacggcgtttttttaggtataggagttagggaaagatgttgagtagttagtttttgcgagtttttgttttggagttttaaggaagcgtacggagtttaaattaattgaagaagaaaataaataaaattatttttaggagtaggaattataatgataggatgtttagtttttaattttgtatgattttggggtatataatttagtttttggagttcgagtttattttttttttataatgggtttaataatagtttttatagggtggtttggagtattaattgttaagttaatttaaggaaagggttgagaatagtgcggggtaaatagaaaatttttaataattgttagttaaaaatatttcgcgttgaggggtttgagtataaattacgttaagtgtttttagaaattagttgaaagatgagtagaagcgtaatttttaatttttatttaaattttaaagattaagtttatttgtgtttaaagtataagtttgagttaatttgtggattttatagttaaaaaaataaaaaagtggttatatggttgttaatagaaattgtgggatttggttgagaatttttgggggaggatatttatttattattgtattttagaggtagtaatgtgttttgtatttgttgtgtatttgaatgtttttattagcgtggatggtattttagtttttatttgggttttttttgaatttgtttttttttatttggcgtagttttggatatcgtatttattttaaaggtatagatttgttaatagttttaaaaaaggtgtagatggattttttattggttagatgattaagtagtttattggtgtgagagggaatttgatttttaggagagattttttttttagagatgataggatagaagagaggagatagtaatggtgtggttagtaaattttagtgattgatagtgttatttttttatttttggtttttaaggtttttattttagagagatcgtattttgaaaaggttgttatttttttggtttttgaagatgttggattaatgaattagtgttgttttaagaaaatgattttgaaaaaaaagtataaagtattatttattgaaagaaataataataataataggaaggaaaattttttttttttcgtaataatttcggagttattatatttattgaattgggttattttagattgagttgagaatatttttgttttttttaacggggttataagatttagtttaaaattttaagattaattgtgtagattttaagtaattgttttttttaaatataaatagtatttttttaatttaaataatttgaaagtggattaaggttggaggaggattggtaaaagttgattaatagatttatttttatttaaatgataattttttttttttgttttttatttatcgaagttttaaagattttgttgtgattgtttttttggaaggtttttgttattgaagtgtgtgaagttatttttggtttgaggagttggaaattttatacgagttaaggattgtagtggcggtagttgggacgtatttgtaacggtgttagtttgtttgaaagtagaaaattagtaattttaaagtttagtttggttgtttagtttgtagaaatgatagggcggagtagaaagagagggagaaaggagatttatttttggaaagggagtttgtcgtcgaaaattgggttttttttgttggaaattttagagatatttttagtgtaggtttttggtttgtttaggatttagggaaggtttggtataaaggagaaggtgtttaataaatacgtatagaaggggaaaatgaaggaagtaagaacgggaggaatgtttttggttatttggtttttttgtgttttatttttttttagatgagtagatatatagggagaatttagagtaagtttagttatgggaaaaggaatttttttttttatttttaataaggtagagtttagaataaatgataatttgagtaaaattttatttatttgaagttatataaaatagatttggaaaggtaaattttgtatttattttaagattgaaaatgttattttaagtttttagtaatcgttatttaatttaattgtcggaaaaagttttcgagataattgaagtttatgaaaaagagaaataaatatttttaaattaggtgattttttacgtttaggattgggagggtaggtcggtttttggtgttagttgaaagggatttttatttattattattattttaaaatgtgtgtttaattgtaaaaagttggattgttttggttatttttgtgtgaaatattttttaagtgattttttgttttagtttatttagagagtgtaaatgagtaggttggggatttattgtcgttttagtagaaatatagtaaaattattagcgttaaaaggggtagtatatagtagattgtttgtagaggaaaggcggaggtttgtttagatagttttcgcgggggttgcggtgggatatgttaatagtgtttggttattggggtcggtttttttttcgaaagaatatataaagaattttaattttagtttgtttatttaggttaataggcgtttgtttttgttaattatcggagcgatagattagggagtttcgttcgggatttgttcgtcggcggaggcgttaggttttcgtttttttttatttttttcgttgtcgtttaggtgtatcgtttgttttttagtaggatggacgtgatggatggttgttagtttttattttttgagtatttttacgacggtttttgtatatcgtttttcgagggtgaatttggggacgagtttgtgtcgcgagtggttgttttcggagcgtataaagtagagttgtagggtttagatgaggacgagtacgtgcgagcgtttatcggttattattaggttggttattgttttatgtgggtttgtaaagtttgtaagaggaagtttattattatggatcggcggaaggtagttattatgcgcgagcggaggcgtttgaagaaggttaattaggttttcgaaatttttaagaggtgtattacgattaattttaattagaggttgtttaaggtggagatttttaggaatgttattcgttatatcgagagtttgtaggagttgttgagagagtaggtggagaattattatagtttgtcgggatagagttgttcggagtttattagttttatttttaattgttttgatggtatggtaagtaatagatttggtatttgttaggttattttaattttttttaaagtttttatattttatttaatttggtgtggtggggagagtggggtggaggtagatgttgagttgttttaaaagaagagaggggtttatatttagaaagattttttaaatcgttgttgaataagattttagtttaattttttagtaggttttaggtgtatattgtaatcgagtgttgatatggaagatgggtggttgtgaatgattatttagatgttttttttatttttgaatttatttttaaaatatgttatttgtggattatgttttacgttaatatttaaaggtatcgtttttaatttaatgaggaaatggaaagaaatatttatacggttttagtttttgttttaatgaggtttggttgaaagatgttgatgtattttttttagagggcgtttgttttaaggttgttaggttttaatgtgtttttgttttgggaaagtgttttttttttgaattagtgtggtttttttttattttaatttattttgtatggttaatttaatgtatattgttgttgaattttatttttttttttttttgttgttgttttttttttttttaagtatagagattgattttagtgttttgggaatttggagagggttagttttttttaaattaaggtagtgaaggtgattgatagtgttcggttatagagttggtgggtaagtatagttttatttttggttagaatattttttgttaagatttgaaaataaattttgttgtgtgttttgtattatagt

SEQ ID NO: 172 - DNA, 6337 bp, Artificial Sequence
  chemically treated genomic DNA (Homo sapiens)
gttataatataagatatataataaagtttgtttttaggttttggtaaaagatgttttgattaaaggtgaggttgtgtttgtttattagttttgtaatcgaatattgttaattatttttattgttttgatttaggaagggttagttttttttaaatttttagggtattgaggttaatttttgtgtttgaagaagaggagagtagtagtaaagggaagagggggtggaatttagtagtaatgtgtattgggttaattatgtaaaatggattggagtagaagaaagttatattaatttagggaaagaatatttttttagggtaaaaatatattaaaatttggtagttttggagtaaacgttttttaaaaagaatgtattaatattttttagttaggttttattggagtaggaattggggtcgtgtgggtatttttttttatttttttattaagttagaaacggtgtttttagatattagcgtagggtatgatttatagatggtatattttgaaaataaatttaggaatggagaaaatatttgagtgattatttatagttatttattttttatgttaatattcgattatagtgtatatttagaatttgttagaaagttaaattaaaattttgtttagtagcggtttggggagtttttttaaatgtggatttttttttttttttaaagtaatttagtatttgtttttattttattttttttattatattaggttaaatgaggtgtaaggattttagaaaagattagggtagtttagtaggtattagatttattgtttattatgttattagagtagttggaggtggggttggtgggtttcgagtagttttgtttcggtaggttatagtagttttttatttgtttttttagtaatttttgtaggttttcgatgtagcggatggtatttttgaggatttttattttgggtagtttttggttggggttggtcgtggtatattttttgagggtttcgaaagtttggttgattttttttaggcgttttcgttcgcgtatagtggttgtttttcgtcgatttatggtggtggatttttttttgtaggttttgtaggtttatatgaggtagtgattagtttggtggtggtcggtaggcgttcgtacgtgttcgtttttatttgagttttgtagttttgttttgtgcgtttcgaaggtagttattcgcggtataaattcgtttttaaatttattttcgggggacggtatgtaggagtcgtcgtagaagtatttagaaggtgagaattggtagttatttattacgtttattttgttgagaggtaggcggtgtatttggacggtagcgagagggatggggagaaacgggagtttggcgttttcgtcgacgggtaaatttcgggcggagttttttagtttgtcgtttcggtaattaataagggtagacgtttgttggtttgggtagataagttggggttggggttttttatatattttttcgggagggaggtcggttttagtggttaggtattattagtatattttatcgtaattttcgcgggggttgtttggataaattttcgttttttttttatagataatttgttgtgtattgttttttttgacgttaatggttttattgtatttttgttggggcggtagtgggtttttaatttgtttatttgtattttttagataggttaaaataagggattatttaaggagtgttttatataaaagtgattaaggtagtttaattttttgtaattggatatatattttaaaatagtggtaataaatagaaattttttttagttggtattaagagtcgatttgtttttttaattttgggcgtgaggaattatttgatttgggggtgtttgttttttttttttatgaattttaattatttcgaaaatttttttcggtaattggattgaataacggttattaaaaatttgaagtggtatttttaattttggagtgaatatagggtttgtttttttaaatttattttgtatagttttagatgagtaaagttttgtttagattgttatttattttaggttttattttattgagagtagggagggaggtttttttttttatgattgggtttgttttgagttttttttgtatgtttgtttatttaaaaggaggtggggtataggagggttaggtgattaggaatatttttttcgtttttgttttttttattttttttttttgtacgtatttgttgagtatttttttttttgtgttaggttttttttagattttgagtaggttaaagatttgtattgaaagtgtttttaagatttttaatagaagaagtttagttttcgacggtaaattttttttttaggggtgagttttttttttttttttttttttgtttcgttttgttatttttatagattaaatagttaagttgggttttggggttgttaattttttgtttttaggtaaattaatatcgttatagatgcgttttagttgtcgttattgtaatttttgattcgtgtaaaatttttaattttttaaattaggagtaattttatatattttagtgataaaagttttttagaaaagtaattatagtagggtttttagaatttcgatggatagaaggtaagaggggagggttgttatttaagtgggaatgaatttattaattagtttttattaatttttttttaattttaatttatttttaggttatttgggttggggaggtgttgtttatatttaggaaaagtaattatttaaggtttatataattagttttggggttttggattaggttttgtggtttcgttgaaagaagtaggagtgtttttaatttaatttagggtaatttagtttaataaatatagtggtttcgaagttattgcgaggaggagggagtttttttttttattattattattattttttttagtgaatggtattttgtattttttttttagaattatttttttaaagtaatattggtttattgatttagtatttttaggggttagagaagtagtaatttttttagggtgcgatttttttaaagtgaagattttgaaaattagaggtgggagagtgatattgttagttattaaggtttgttagttatattattgttgtttttttttttttgttttgttatttttaagaaaaagattttttttgaaaattaggtttttttttatattaatgggttgtttaattatttgattagtgggaaatttatttgtattttttttagggttattaataagtttatgtttttgaaatgaatacggtatttagggttacgttagataaaaagaggtaagtttaagaagaatttaggtggaaattaagatgttatttacgttggtggaaatatttaaatgtatagtaaatgtaaagtatattgttatttttgaaatataatagtgggtagatatttttttttaggaatttttagttaagttttatagtttttattagtagttatatgattatttttttatttttttggttgtggagtttataaattagtttagatttgtgttttggatataaataaatttggtttttaaagtttgagtgaaagttagaggttacgtttttgtttattttttagttaatttttgaaagtatttaacgtgatttgtatttaagttttttagcgcgaaatatttttaattaataattattgagaattttttatttgtttcgtattgtttttaattttttttttagattaatttaataattaatattttaaattattttgtgggagttattattgggtttattgtagaaagaaagtaaattcgagttttagggattaggttatatgttttaaggttatataggattggaaattaggtattttgttattatagtttttatttttagaggtgattttgtttgtttttttttttaattaatttaggtttcgtgcgtttttttagggttttagagtagaaattcgtaaaagttggttatttaatatttttttttggtttttgtgtttgggaagacgtcgttatttaggagtttttgttagtaagggtagtttttagaggttagagttgtttttggtaaggtgattttaaaataaagttattagagtgtcgcgagcgagtggaattaaagaagtcgagaaaatataagcgttcggcggtttaatgggatttgttagtaggagaatagggttcggatttgagagtttttgggacgtaagtgttgaaaataggattttagagtattaaagtaaaaagaaataagataaaatttttaaaacgttgttaggggcgagagaagaaagagagagagagagagagaaaaaaaaaaggtaatatgttaagatagtaggtagttagtattataaagatggttatagtgttttaatttaggagcggtttttttgttttttttttaggggagatttggaaggggaaaaagaaagaattgggtgagtaatatagagaaaagtatttttttttttttgagtgggttggttagggaagtatgggaaaagttttaaaaatggttttgaaaagatttatttagggtatttttttgtatttaaagtcggattagattggtttttgttttttatataaagaatgaaaataagttttttattatttttgtaaagaagtggattttttgtttgcggagaaaacgtatatttattttatatgtaaataggttattagaaatgatattttaatattgtttgttaggaaagtttaattataggtagttgagggggaagaaaatttagttattttcggtgttataaatggatatttattaaggttttggtgaagtatttatttatttatttattttattttatattttgaaaaaataaatatatttgatttttttataatttagaattataattaggttttaattgtaatgatttttacgtaatattaattttttttttaagtgaaatttgtgttagtttaagtattatggtaatatattaatattgatggatagattatattagtaaaatgatgtttatattttttttttttaataaattttgtttattttaggttttttgtattattgaaaattttttatgttttttttggagggagaaattaaatatatatagaaggatatatatattttaatttatttttgtttttgtttgtagatttttattaatttttggattaagggagttgtttttgatattttttatattatagatgattttataatgtgtttaataattgtaaattgttattagttttgggaattaggtatatttaagtaaatatattagtatttgttagagttgttggaagaatttgtgaagatagttgaggaagatattggtttttgtttgaattagaggatttttaggagagattaaaggtttaagtaaggatatttagtagttttgagagtatagaaagtagttagtttttatagtattatttttgttttagtatatggtatagttattttattttagattgattttgaattaggtttgtaaaaaaattgttttttttagagtgaaatttttatgatggaggattattttttataagtgtaatagtttaagggagtgattggaggggtttgttagagaaatagtttggtggtttggttttttgagaaaatattatgttattgataatttattaatgtattggattaggtaattagatatttaaagtttaaaaaaaagttaaaaaaaattttagttatggtgttgtgggagagcgattttgaaacgataaaatgggataaaatattattagaagaaaaatataattgggtaaattttaattttagtaaaaaaaaaaagttttaataaggatagagattatttttagtattttaagatttttttgttagttttagaaatagttgtaaattttaaattttagtattttttttatttttaaaataaatgtaagagtttgaggaaaaataaatgagattgttagatttaagaggatttttagtgtttaggtttggaatttagtgatttaggtattaaaattagtatgaaagttggtatttgattttttgtaaattatttttgtagtaatataataaagaaaattatttattattttgtatttgataattttatatttgtttttggaaagaggtttgaatttaattttaaattgtttatttttattaagttattatgttttgattatttgtttttatagttttgtttattttggttttggttttagtaaagattattattattaatattaaataaaaatattttaattgtaaatatattaaggattttattggaaagtttaatatgttatttgtagtagtggaggttatatgaagtttttgggaaatatttg

SEQ ID NO: 173 - DNA, 6291 bp, Artificial Sequence
  chemically treated genomic DNA (Homo sapiens)
ttcgtatttttttttagaggttagttttttatttatagtttttgggtagagtagttaagggagttgagaggggaggattggaaagggtagagggagaaggggtagtttaggtagtattttttttttattttttattaaatgagttttttattatgaagatagtagaagttaggtttagggcgaggtgtgtatatgtttttaagtatagagtttattattttggttagatttgcgttgaggggtgagggggttgttaggggatttttttaaagttttttagtttattgttagtggttttttatagaataagtttagtatttgtggataaagggtatttttgattagattttgtagtataagagtttgaatgtttttagtttttaaatttggtatttttttttttttcgtttttaatttagtattgggattaaaaggataatatgttttaggttggatatatttttttttgttttgtgggtagtagggaagagatgatggtgttgataaatttttttttaaagaggagacgtaattagaagggtgattttaggtaggtgtggatgttaggtatggagaggtttgaaatggttatcgagtttagtgagttttaatttttttttgagtaacggaagtttggtagtaaataaaaattttatttgaaagtttaatataaaaatggtattttatttttagaatgtttgtgtgttttaaaatagcgttttttaattatggaagaagatgtagttgtaaattaagtttaaaattgttaaagtagtttagatttataagttataagtgataaaatattaaatgtgtttggtaagtttaaatatataatatttatttatttattgtaaaggtaatttgatgatagttttgaggaagtttttagaaatataaagtataaaaagtaaagttgtatttatttgttttagtatttaatttattttgtagttttttgtttatttagatttggggaaaatttagatttgtatagataagtggtttgaatagtttatttgggaattttagagtattttttaattaagtagatttatttatttatttgtttaagaaatatttattgagtgtttattatgtatttggttttttgttgagttttgagtaagtaggaagaagtatttgtttttaaattattaatataataattatttatattttttattgtgagtatagtgaaaaaataataagaagatatatcgagatgttaaatttttttatagtatattattataatattgtagtatgttatgtataatgtttagtttaagagaatatgttttaggtagatggggtttgagttttttttgggaagagtaagtgtaatagaatatggatgtttaattatgtatgtgattttttagttttgaagaaatttaattatttttattaatgttatagtttaagacgtttaaatatatgtatagagatgtaaagggcgtgaggttatttatttatttattggatatttattaggtgtttattgtgtgattgttattgtgatggtttttggaaatgttattgtgaataaaatatttttgtttttatggggttaagttagttatgaataaattaatgaagaagattataaagagtggtagtgtttggaaggaaattaatagggtggtgtgaattagagtatggggggtagttattttagagggaatggttagtgatgttttaaggaggtaagaagatttattatataaaatgtagttaattttgggaaaagtttaggggataatgttatgagtttagagtagtaaggataaggttttaaggtaggattttgtttagagtgttagaagataagaaaggaggttaggttaattggagtagagtaattaaaacggatggtgtttttaggtgtagtaagagatataggttgaggttagtttatgtagggtttgataggttaggggatggagatgagattttattttaaatgtaagaagttgttggggagtttgaagtaggaggatggtataattttatttatattgtaaaggtttatttaggttgttatgtaacgaatggattatattgaggttatagaggaagtgaggagggtagttaggttattgtggttatttagagtagtagtgtgatagtttagtttaggatggtgatattagggatggattgatttgagataggttttagaggtagaatggatagtttttttttatatttagatttttttttgggaattttagttttaaaaatttttttgtttaatttatatttttatttggatattcgatatgtattttaaattttgtttaaatttggatatttaatttattatttataaatttagtttttttaattttatttttgtaggagttatttttagttttttgtttattttattttttatatgtaatcgtgagtaaatattgttagttttattttgaaaatatatatttagaatttaattattattttttattagttttatttattgggattattgtaatagttttttaattggtttttttttttttgttttttttttttagtaattagtatgtttttgttaaaatgtaaattagatagtgatatttttttttttcgtttaagttttttagtgagatggtttaagttattttagaatataattttgttttttttttttttattttattttttattattttttttatttattttgttgtagatatatgagtttttttgttatattttgaatttgttaaatatggttttgttttaggatttttgtatatgtttatttttttatttggttttatatatttttaggtatttgtttttaattttttttatttaggtttttgtttaaatgtagtcgagaggttttttttaattattttataatttttattattgtgtttttttgttttgttttttttttataaggtttttaattttttggtattatatatttttttgtttatttgtttattgtttattattttgtttatattgataatgtaagtgttatgtaagtagagttttggttttgtttattgttttagttttatatttggattggtatttgttatataatggatatttaataatatgtggattttcgggtgattttttgtagtttgggtggggtgaggttaggattttgttgtttttgttaggatttagagttattgttattgttgttttatgatgtagattttattgaatgaataaatataggtgggttttatggagtaaagcgaggtgagtattttatgaagggagatttttagtattattattagtagtagagaagtgaagaagttaggattttaatagagttttttgagttttgtgggaagggaggattttttagggtttagaacggttagttagaatgttttttagaagttagtgggaaaggtataaagattatttttgtttaaatttttggtttttaggaggggagatttaggtagggatgtatggttaacggagatttttagttagagtgttgagaggattgtgtgaattgtagatttaggaagaggttgagagatttttatgggggtggtcggtatgttgaggtttgtatgggagttagatattttatattttatggggtggttgtttttttttgtttttagtttttttagtgaggttgtaggaaagagatatagttaaggtttggagattcgtggtatttcgttagggtatggtattatagatgagttgtaagtttgcgggatatagtatttaattttgaaagttttttgttcgaataattttatattatcgtttgagggtttttatatttttggtttttttagattgttatttttattataattattttaagaaattattgttatttttaaatttataattggaaattgaggtttaggaaggagatatgatttttataaaattatatagttgggaaattttggagtttgtatttaattggtttgtaaatcgtattttcggagattttaggtgagatgaggttaggtttttaggttaggttttgaagtttgatattttggcgaaatgtattttttttgatttagtatcgcgagtgaggcggagttaagtttcgagtagaagggttttttttttagttgaagaggtagtttagtttagattttaggtatggtattggatatttttgttgtggaaacgtgtagatttagatggaggggatttttaatttgggtaggattcgagtttggagagattggcgcgaagttttagtagtaattttcgatttttgtataattatagttgggtttttaagcgtttagggaagaaggattgggtttacgatttgttgagtaatttttaggtcggggattggcggaatattagagtttttacgattcgtttgtttcgggttcgtttattttaattttcggggttttttcgtttgttgttgtattcgtgcgtttttttgtttttgacgttttaagttttttgttttttgcgtgttttttagtttttttcggttttttttttacggttttattttttagttttgtgtttttaatgttttgtttttttttaaattttttacgatttgatttttatagtcgttttatttatgggttttttataaattaggggatagaggagtattgaaagttagtttagaggtgagcgcgcgtagttagcgtttttcgcggatatagtagtcgggtgttggagaggtttggaaagggcgtgtcggagagttaagtgtagtcgtttagggttgtcggtcgttttttttttttttgttcggtaggggatttagcgcgtacgttagtgtggaggggcgggttggttggttagtttgcgggtttttgcggttatttcggggattttttttaagtttcgtttcgtagtgtttttattggtttcggatttttttttttttagttgttcgtttgggtttcggggcgtttaggttattacggataaatagtttagggcgtttggcgagaagttaggggtgaggaagttttggggcgttgtcgtcgttttttttaattataaattaggtcggataggagagggaggggtgggggatagtgggtgggtatttagattgttagtattttgttatttatagtcggggttttcgagcggtagaaagtttcggttattttttgtcgtttgggttgggcgaagttaggatcgtgtcgcgttatcgttaggatatggagttattgtcgttatcgtttcgcgacgtagatttgacggttttcgacggttttttttgtttttttgttataacggacgatttttatgacgattcgtgtttcgatttttcggatttgcgttttttcgaagatttggattcgcgtttgatgtacgtgggcgcgtttttgaaattcgaagagtattcgtattttttcgcggcggtgtattcggtttcgggcgtacgtgaggacgagtatgtgcgcgcgtttagcgggtattattaggcgggtcgttgtttattgtgggtttgtaaggcgtgtaagcgtaagattattaacgtcgatcgtcgtaaggtcgttattatgcgcgagcggcgtcgtttgagtaaagtaaatgaggtttttgagatatttaagcgttgtacgtcgagtaatttaaattagcggttgtttaaggtggagattttgcgtaacgttattcgttatatcgagggtttgtaggttttgttgcgcgattaggacgtcgcgttttttggcgtcgtagtcgttttttatgcgtcgggttcgttgttttcgggtcgcggcggcgagtattatagcggcgatttcgacgcgtttagttcgcgttttaattgtttcgacggtatggtaaggtcgggattttaggaagtgaggaagttagggcggcgttcgggatattagggacgcgttttcgagggcggggagttggttttgcgggaggtttgggttaggatttttttcgagagagaggatttttttgttttgggtagttgttattggggtagtttgttttggaagtgtgcgggtaagcgttcgagttgttttattgggggcgttattagaatattgtagcgcgaacgtgaagatttttttttttatttatttttatttttaaaatgtaaatttgcgttttttggtgattgttcgtttttggtttggttttgtatgttgtagattttattttttatttattcgtaattatttttttaattaggataggtttgggttcggaattagagttttaggttagagttagggagggggcggttataggaattggtgttcgggtttcgagtcgtttcgcgggtttgatttagtcgtttttgttgtttgtaga

SEQ ID NO: 174 - DNA, 6291 bp, Artificial Sequence
  chemically treated genomic DNA (Homo sapiens)
tttgtaaatagtaagggcgattgagttaggttcgcgggacggttcgaggttcgaatattaatttttgtagtcgttttttttttaattttagtttaaggttttagtttcgggtttagatttgttttggttgggggggtaattacgggtgggtaggagatgaggtttgtaatatgtagggttaaattaagggcggatagttattaaggggcgtaaatttatattttggaagtagggataagtagagaaaaagatttttacgttcgcgttgtagtgttttaatagcgtttttaatggggtagttcgaacgtttgttcgtatatttttaaaataggttattttagtgatagttgtttaggataagggggttttttttttcgggaaggattttggtttaaatttttcgtaaggttagtttttcgttttcggaaacgcgtttttgatatttcgagcgtcgttttaatttttttattttttggggtttcggttttattatgtcgtcggagtagttggagcgcgggttggacgcgtcggagtcgtcgttgtagtgttcgtcgtcgcggttcgggggtagcgggttcggcgtatagaaggcggttgcggcgttagggggcgcggcgttttggtcgcgtagtagagtttgtaggttttcgatatagcggatggcgttgcgtaggatttttattttgggtaatcgttggtttggattgttcgacgtgtagcgtttgagtgttttaaaggttttatttattttgtttaggcggcgtcgttcgcgtatggtggcggttttgcggcggtcggcgttggtggttttgcgtttgtacgttttgtaggtttatagtaggtagcggttcgtttggtggtgttcgttgggcgcgcgtatatgttcgtttttacgtgcgttcggggtcgggtgtatcgtcgcggggaagtgcgagtgtttttcgggttttaggagcgcgtttacgtgtattaggcgcgggtttaggttttcgaagaagcgtaggttcggggagtcgaaatacgggtcgttatagaagtcgttcgttgtggtaaaggagtagagagagtcgtcgggggtcgttaggtttacgtcgcggagcggtggcgatagtagttttatattttggcggtggcgcggtacggttttggtttcgtttaatttaagcggtagagagtggtcggaattttttgtcgttcgggagtttcggttgtagatagtaaagtgttggtagtttgaatgtttatttattgttttttattttttttttttttgttcggtttgatttgtggttaaggaaagcggcggtagcgttttagggtttttttatttttagtttttcgttaggcgttttgggttatttattcgtagtagtttaaacgtttcggagtttaggcgggtagttgggggagggggagttcgaggttaataggaatattgcggggcggggtttggggggggttttcggggtggtcgtaggggttcgtagattggttagttagttcgtttttttatattggcgtgcgcgttaggttttttatcgggtagggagggagggagcgatcggtagttttaggcggttgtatttggtttttcggtacgttttttttaaatttttttaatattcgattgttgtattcgcgggaaacgttggttgcgcgcgtttatttttgagttgatttttaatatttttttgttttttgatttgtgggggatttatgggtagagcggttgtagaaattaggtcgtgagagatttggagagaggtaaggtattgggggtatagagttgaggagtgagatcgtgaaagagggatcgaaagaggttgagagatacgtagaaagtagaaagtttagagcgttaggggtagagaaacgtacgagtgtaataataggcggagagatttcgagagttgaagtgggcgagttcgagataaacgggtcgtagaggttttgatatttcgttagttttcgatttgggagttgtttagtaggtcgtgggtttagttttttttttttagacgtttagaaatttagttatggttgtataggaatcggagattgttgttaaagtttcgcgttaatttttttaaattcggattttgtttaggttaggaattttttttatttaaatttgtacgtttttatagtaggggtgtttagtgttatgtttggggtttaggttgagttgtttttttagttgggaagaaaatttttttgttcggggtttggtttcgttttattcgcggtgttgagttaaggaaagtgtatttcgttaaggtgttaaattttaggatttggtttgagaatttgattttattttatttgaagttttcgagagtgcggtttgtagattagttgagtgtagattttagagttttttaattgtgtgattttgtggaagttatgttttttttttgagttttagtttttagttatagatttggggatgatagtaattttttggagtaattgtggtggggatgatagtttgaagagattaaggatatggaagtttttaggcggtgatgtagggttattcgagtaaggggtttttagagttggatgttgtgtttcgtaggtttataatttatttgtggtattatgttttgacggagtgttacgagtttttaggttttagttgtgttttttttttgtagttttattggaaaggttggaaataggaggaggtaattattttatgggatgtgggatatttggtttttatataagttttagtatatcggttatttttatgggggttttttagtttttttttgaatttgtagtttatatagtttttttagtattttggttaggaattttcgttggttatatatttttgtttggatttttttttttggaaattagaaatttaagtaggagtgatttttgtgttttttttattaatttttggaaggtattttagttggtcgttttgggttttaagaagttttttttttttataaaatttagagggttttgttggggttttaatttttttatttttttgttgttggtagtggtgttgaaggtttttttttatgaagtatttatttcgttttattttatagggtttatttgtatttgtttatttagtaaagtttatattatggagtagtagtgatagtaattttaaattttggtagaggtagtaaagttttggttttattttatttaagttgtagggggttattcggaaatttatatattgttaggtatttattatgtggtaggtattagtttaagtgtggggttagagtaatgaataaaattaagattttgtttatatggtatttatattgttaatgtaagtagggtgatagataatgaataaataagtaaggaagtatgtgatgttaggaggttagaagttttatgaagaaaaagtaaggtagggagatatagtgatgaagattatggagtgattagagaaggtttttcggttatatttaagtagagatttgaatgaagagaattggaagtagatatttggagatatgtagggttagatagagggataagtatgtgtaaaagttttgaggtaggattatgtttggtagatttaaagtatggtaaggaggtttatatgtttgtagtagggtgagtaaaagagatagtgggaaatggggtgagagagagagaaataggattatattttgagatggtttgagttattttattggagggtttgagcggaagagaagaatattattatttgatttatattttaataggagtatgttggttattggagggaaagggtagaaggagggagattaattaggaggttattgtaataattttagtgagtggagttggtgaaaagtggtggttgaattttagatatatgtttttaagatggagttagtagtatttatttacgattgtatgtgggaagtgagataagtaaggagttaaggatgatttttgtaagaatggagttgagaagattaggtttgtgggtggtagattaagtgtttaggtttgggtaaaatttgaaatgtatatcggatatttagatggaagtgtggattaggtagggggatttttaaggttggagtttttaaggagaggtttgagtatgaggaagagttgtttattttatttttaagatttgttttaagttagtttatttttagtgttattattttggattaagttgttatattgttgttttggatgattataataatttggttgttttttttattttttttgtagttttagtataatttattcgttatatagtagtttgagtagatttttataatgtaaatgggattatgttatttttttgttttaaattttttagtagttttttgtatttagagtaaaattttatttttattttttggtttattaggttttgtatgagttagttttagtttgtgttttttattatatttggaggtattattcgttttgattgttttattttagttagtttgatttttttttttgttttttaatattttgaataggattttgttttggagttttgtttttgttgttttaaatttatagtattattttttgggttttttttaagattgattgtattttatataatagatttttttgtttttttgggatattattgattattttttttaagataattgttttttatattttggtttatattattttgttaatttttttttaggtattgttattttttataattttttttattagtttgtttatgattgatttagttttatgaaggtaaagatgttttgtttataatgatatttttaaaaattattatagtggtagttatatagtaggtatttgataaatgtttagtgaatgaatgagtggttttacgttttttgtatttttatgtatatatttgaacgttttgaattgtgatattaatgaagatggttgaatttttttaaaattgggaagttatatatatgattagatatttatgttttattatatttgttttttttaggaaaggtttagattttatttgtttggggtatgtttttttgaattgggtattatatatggtatgttgtaatattgtagtggtatattatagagagatttggtatttcgatgtgtttttttattgtttttttattatatttataatgaggaatgtaagtaattgttgtattgatgatttagaaataaatatttttttttatttgtttaaggtttagtagaaagttaggtgtatagtaggtatttaataaatattttttgggtaaatgaatgaatgagtttatttaattaaagagtattttgagatttttaggtgagttatttaaattatttatttatgtaaatttagattttttttaaatttgaataagtaagaaattataaaataaattggatgttgagataagtgaatataattttgttttttgtgttttgtgtttttaaaaatttttttagggttgttattaagttgtttttataataaataagtaaatgttatatgtttgaatttattaaatatatttaatattttattatttatggtttataaatttaaattgttttgatagttttaagtttgatttgtagttatatttttttttataattaggaagcgttgttttaaagtatatagatattttaggggtaaaatgttatttttatattaggtttttaagtgggatttttgtttgttattaggttttcgttgtttaaaaaaagattggaatttattgaattcggtgattattttagatttttttatgtttggtatttatatttgtttggaattatttttttggttgcgttttttttttggagagaggtttgttaatattattattttttttttgttgtttatagagtagggagaagtatgtttaatttgggatatgttgtttttttagttttagtgttgggttgggggcggagggaaaaaggatattaagtttggaagttgaaaatatttaaatttttatattgtagagtttagttaagggtgttttttgtttataggtgttggatttgttttgtgaggggttattagtaatgggttgagggattttgaggggattttttggtagtttttttattttttaacgtaggtttgattagaatggtaggttttgtgtttgggggtatgtgtatatttcgttttgggtttggtttttgttgtttttatgatgaggggtttatttggtggggagtggggagggagtgttgtttgggttgttttttttttttttgttttttttagttttttttttttagtttttttggttgttttgtttaggggttataaatggagagttggtttttggaaaggaatgcggg

SEQ ID NO: 175 - DNA, 15592 bp, Artificial Sequence
  chemically treated genomic DNA (Homo sapiens)
gtttatattttttttattatatcgttttttttggtttagttcgtttataatatttttttttttttttttttttttttttttttggagatagagtttcgttttgttatttaggttggagtgtaatggtgcgattttagttcgttgtaatttttgttttttaggtagttgggattataggtacgtattattatatttagttaattttgtatttttggtagagatggggttttatcgtgttggttaggttggttttgaatttttgattttaggtgatttatttgttttagttttttaaagtgttgagattataggtatgagttattacgtttggtttttttttttttttttttaaataaatattattatgatgattatttttcgagatagaattttattttattatttaggttggagtgttttggtatgatttcggtttattgtaattttcgttttttaggtttaagtaattattttgttttagttttttaaatagttgggattataggtacgtattattatatcgggttaatttttgtttttttattagagacggggttttattatgttggttaggttggttttgaatttttgattttaaatgatttatttaattcggttttttaaagtgttgggattgtaggcgtgagttattacgtttggtttttttaaataaatattaaataattgaatttggaatttttagaatatattggttatgtgagatttatttatttgtttatttgttgtataatttgtttgggtgtggtagaatataagttttttggaggttgggattttattggtttagtttgttgttgtgtttttaatatttttgtgtatgtttggtatataataggtataataagtatttgttggataaatgaatgattttagataataaatttatggagtatatagtattattaattgtattttatagataaggaaattaaggtttaggtgtgaaataattagtatagagttagagggcgatgtaggaataatgtaaattttgagttttttttgatgagttcgaatggttttttttagttttatatttggaggtgtgaacgtttttatttttattataaaaagagagggattgtgtattaattttttgtttagtgggttggattgggaagataggttttttgtttgtttttattttatttttttagcgagagtgtagaggtttggattttcgttgaggttagattgataggattagaggaaatagttgggttgagttcgtgttttgtaggagggagtttatattttcggattttgggagagagtagttttttatagtttagttatattttaggtcggttatttttttgagtttagatgtttgttaatgagttggggagaggggtttttagttttgagttttagttttgggttttatattatttcggttttaagaggttggtttagggttaggaggttttggttttaggtttatgttttgtgttagttaggtttgtaggggtagttggaatattattgttaattaggtgtatttgttcgagttgggatattttgacgtgataggttttgtttttttcgttggggtttttggggtttatttttagtgtagtatttttgttgtagtttgatggggaggagtattgaggtagtcgagagggtggagagggtgtggtgggtaaggaagtatggattttggtgttgataggtttgggtttaagtttaggttttgttaattattagtaatgtggttttgagtaggtaatgatatattttggtgtttcgattttttttatttgtaaaatgggaataatgatgggattgtggtaaggattagaggagatgaagtagatagagtgattagtataatgtttggtataaaatgggtagatattattattaagttattttttaggttttttgtttatattgtagttttttcgttattagatagatggtgatttaattttaaattttttgtttttgattagggggttggtgttgtttttgaatttttcggtgtttgagagatggtgggttgttttgttaagggtattggttggaagttgtggtttttatttttggttttatgtgtgatttgattagtttattaggttttataattagttttttgtaatgtgggagtggatttttataaaatgtagaattttattttttattttgttcggggtttgtatgaaagatggcgggggtaagttttggttgtaaaatggtaaatattttttgagtgtttattgtgtatagtgtagtgaggttggtttttgtcgtatatggtatatagttatttaatagatattagttggtatgggtttttattgtgtgattttaggcgagttatttaattttttttttgacgtttttttttttattttttttttttttttttgagataaggttttgttggagtgataagtttattaggttttataattagttttttgtaatgttgtttaggttggagtatagtggtataattatagtttattgtagttttaaatttttgggattaagtgattttttagtttcgggattttttttatttttattattttatttgtttgtttgtttatttatttatttatttgagatggagttttattttgttttttaggttggagtgtagtggtgcgatttcggtttattgtaattttcgttttttaggtttaagtgatttttttgttttagtttttcgagtagttgggattataggtatacgttattatatttggttgatttttgtatttttagtagagagagggtttcgttatattggttaggttggtttcgaatttttgattttaagtgatttttttgttttggttttttaaagtgttgggattataagtatgagttattgcgtttggtatttttaaaatagagataatatttattttataggtttattgtgagagtggtaatagtttgtaatgggatgaggtatatggtaaggtgtttaatatgtgtgaattattataacggttatagttattattaagggaagatttatttgtgttatattaatgggggataataattattttattcgttgggcgtggtggtttatgtttataattttaatattttgggaggttgaggcgggaggattatttgaggttaggagttggagattagtttgggtaatatggtaaaattttatttttattaaaaatataaaaattagttgggcgtggtggtgggcgtttgtaattttagttattcgggaggttgagaattgttggaatttgggaggtagaggttgtagtgagtcgagattacgttattgtattttagttagggtaataagagtaaaattttgtttttaataataataataataataataataataataataataataattttatttaattaaatatattgtatattttatttggtttgtttataagtaatggagatattgaaataaatacgatttttgtttttaaggtttaatggaggaaagagatgtatatagttattttagagggaaattgatatgaatagaagtttttattttgtgttttaggattatattggaggagggagatgtttttagagggttttgggaaggttttttaatttggagttggaagaatgtttgtttaagagatgtatatagttattttagagggaaattgatatgaatagaagtttttattttgtgttttaggattatattggaggagggagatgtttttaaagggttttgggaaggttttttaatttggagttggaagaatgtttgttagagatgaaaggaggggaagggaatttcgggtagagggaagggcgtaggtaatagttaggaggcgtagatgtaggttgggtgtggagggtgcgagtaggttggagtatattagggagtttttagtaggttattaggagttatttaggatgttcggtaattttatgagttagataagtagggttgtgtttatttggaagtttttagttaagttaggtaaaatatatggatataggtaattatgttgtaaagtaaaatttttaagttttataatcgtgttttagtggtgtttttgggttattattttttagaagtaaagttatttttttatttcgttgttaagtatatagaatagagaaggtacggtcgtaatttatttaagtgtttattgattagataggaattttcgaggtgaggttggaagttggggttaggagttttattttttttaggagttagagaagtgagtttatttgttggttttttagtttttaataagtttttggggtttttcgggatgtttaagttaagggcgtggggtcgagagcgatattaggataatattaggtaaggttgagtaatttaggttattaatagtacggatttgaatcgggtcgtatgtcggagcggacgggatgaggtgtatcgtagaattggggatttttggtgtcgggacgcggcgggttggggcgttttattttcggggtaagtttgtaatgttcggtgtttataaaaaggatatatttatttttgttatttcgaggtttggtacggtttgacggtttaggttcggtaaaagtcgggcggagagagtggaagcgtagagaaattcggggagggcgtttaagaacgggttagggcgttcggttgggttgttttgtttttcgggcgtcggttaggcgtttcggtcgttttattacgtcgtcggagcgcgtcgaagtttagttcggggcgggcgggttaggagagggttcggggtttttgtcgtcgcggcgtttttttttgcgtattcggagggagaggtcgcgcgcgttcgttcgttttttttgcgcgcggtttttttcgttgtcgtcgttttcgcgttttgtttggagggagttattttgacgtcggagtcgttttttcgcgtcgcgcgttcgttcggggtcgtagatacgcgtagcgtagtttagtcgagcgtcgcggggtcgtttttcgttttgtcggtcgtttcgtcgagttttttggggcgttcgggttcgcgattttcgtatttagtttcgtaggatcggcgggcgcgcgcggtaagtttcgttcgggtcggtacgcgggcgttcggtttttagaggtttcggtcgcgggggtagtgtcgcgtttttagttcggagttgcgtttttcggcgcgttcggcggtcgcgggtatcgggtggaggcgtcgtcgtcgagtttaggagttttgggggatttggcgggcgttttcggacgtcggcgttggggacgtgggcgcggtacggggtggtcggggggtatcgtcgcgttcggagttcgtttttagattcgttttagggtttcgtttttggatcggagttttcgcggtcgggggagagagggagcgagggagggagatgcgtggtcgggcgggtcgggttcgtatgtttttcggtcgtgttcgggtttcgtcgcgtcgcgtttttcggttttggacgttttcgtttttcgcggttttttttgtttcggtttttacgttcgtgtgtttgttttttcgtcgtttcgttttcgtcgtttatttttttttggtttgttcgttttttttcgtttttcgtttgttttcgtgttcggttgttcgcgtttgtgtttttgtttttggtttttttttttttttttttgtttttgcgttgttttttgtgggggtttcgttttgtgtttgcgtttttttttgatttttcgtttttcgatttagataattttttagtgtcggaggttcgtttttttttagcggggtttacgaatagttttttagatcgggtgcggtaaattttttttttgtttttcgtcggtttcgaggtttggttcgggttatttttttggaattgagtttggggtagggagagttagttttttcgggggtttagtttttttaagaattttattttcgcgaggtcggttggacgataggttttgttgcgggttatttgttcggttcgtttttagggcggggcgattttgatcgtttataagcggcggtaaagggggtagtcgtttgttttggcgtggtcggaggttggcgggtattaagggagaaagttatatttttaggttttcggaggttttcgttttttaagttggacgttattagtttgtaattaggggtattttaggaaaatagaggttagggttggaggttaaagatcgggcgttggcggggaagtaatttgttaataaggagttttttattttttgttattgcggaatggggtttttttagatttttttagatgttggggttgtttgggcgtggtttgttttgagttggggttaaagaaaaggcgaggttgtagcgttttttcggtgatttttatttttttttatttatttttgtaagttggatttttttttcgggtttgtgttttggaggggtggataggggagtaggtgttttgtatcggttagggatatcgttttattattttaaagtgaaattttaggttgagtttagttgtttttttttatttataattttaagggtcggaggttgtcggagcgggtagggttgttggtgaggtttgtagtggaatttttgttgagtagatgtgtagtttggttttgtagtagtttattagtatggatttgttttggagattgtttttcgtttgcgggtaggagggtttgcggtaaggagggtcgtggtttgggtttgggggttggtatagaggtggttagggttggaagatgtaggtaggtttgggtggtacggggtcggttttgtgtgttcgttttttggatagttgatttatgttttttttagtgttgaaggaaggaaggaaaagttattttgtcgtgagattggggtcgtggaattatagcggttttaagtagtatgttggagttaggtttttttttgggggatttgttgaaatggacgtttttaggttaggttgtttattttatagatgtaaacgtgaagttgaggggggaagtaaatggttagtggttcgagttataattattagatttttttgattttaggtatatagaaagttaatgtatgagttttggttagaatttatttttaaattttagagtgagtttaggaaattcggttgggttgattagagtcggggtttgatttgggtgagtagggagttttaagtttgatattgttttgtttttttatagagtaataattttagttgtattatttaaggaagtttttgtgtttattttaagatttggagcgatcgtttcgtttttgttaagttttaagtttagggttgtagtttagttattttttatattttttgtatttagtagtatgtttagtttggtagtggggtatagtttgtttttttgaagttggattttggaggaggttggtgtttttacgattttgttttagagtttgagtgggattttttttttagtttttattttagatagggaattatgttgggtggtttttgataatttttaaaatttatttttagttgttattttatttgttggagttttattttaaggttttttttaaatttagttttattggggtagatgtagtttagattgaaatagttttaggatttgtcgaggattttgtgggagcgaggggtagaagggagtaggtagaggttagggaggataagaggtttaagttagtatttaaagtgatatggattgaggaattaattatgatgggcgatttttttagagatttttatgtattttttagtttaattgttatagttgttttgtgagttggatattagtattgtttttattttgtagatgaggaaattgaggtatagaaaggttagaatggggttaagtgattttagtgttttgggaggttgaagtgggagtttaagattagtttggttaataaagggagattttgtttttttaaaaaatataaaaaaattagttgggtatggtggtgtatgtttgtattattagttattttggaggttgaggtgggaggattatttgagttttagagtttgaggttgatgtgagttatgattgtgttatcgcgttttagtttgggtaatagagtgagattttgttataaataaaaatataaagataaaaagagaaagattagaatggttgagttaagatttgaattttagtttgttataattgtggagaatggaggaggagagttagattttgtttttagtgagtgtggggggagaggaaaggtgggagaggtaggggagggggagtatttggtttgaaagttattagttataaacgttgcgtgttcgttgtgtatgcggattgtggtgttatttgaatgttgagtttataggtagaatcgttcgtttttattagttggggttaagtgtggggaggtttttcgaggaggttttggaagtaggaggtgaagatggggagggagagttttgttttttttatcgaggatttgttagttttgttttttacggttttgtatcgagtggttgttggaatcggtaataggaaaggtttggtgtgtgtgtgtgtgcgtgtgtgtgtgtgtgtgcgtgtgcgcgcgtgtgtgtgcgtgtttgtgcggatgtatatttttttgtgtatatataggtatgtttatatatgcgtttgtgtgttttgcgtttatagggggtataggtggtttggggtatgtttgtttttgtgtgtgtgtgggtttggggtgagtggatatattttattttgaaaattttggtatatttggttttgagtgattttgaatatttagatttaatttagaagaggaattggggaggatggtttatttgttatattaaagttaatttattttataaagggttttacggtgggcgggagttaggaagaagtaagtgttttttgaaatttaggttatttttgtgtatttagggtgtatttaggatgtttttttaggtatcggaatttaggtagtgggttggggggttttagtggtagcgttgttaatcgaagttttttttttgggggttgggaggtcgttgtttttggtttggttgggttttagagtttcgtggggagtatatttaggtgtttaggtcgtgttttatatttggcggggttatacgaggagggtcgggtttcggcgttttagttttggtaggtattttaggaaagaggtgttataggtttgatttcggagttggtttttttgggggattttttggattaagatttttaggaaagtaattagggtagggttgttgtgtttgttttttgttttttttttcggagtgggagttacgggtgggttatttttttgatttgtgttttagtttttacggtgttaaaatgggtttgttgttgttattttttggggaattttttttttgtgtgggcggtagtttagaatgtattaggtattggtagagggtcgttgaggaagtggagggtttggatttgggagtggcgggtgggtggggttgggaagatatttatttgtgttaaggatattttttttaaagttttacggcgtttttatgagggaggatcgtgttatatatatttttattagggttttaagagttagggttagttatggttataagacggttggttagggagttaggaatgggatttgaattttggtttgtggagtttttaagtttttagtttaggtagtggttgaacgttagggtgttaataggaatgagaggcgtagtcggttggggtagtggtgggagttttaggttttattttgattttagattttatcgttttttgttttttttttttcggtgaattttttgatttgtaagggtagttgggggttaatttgttattttttaggtttaaatttcggtttttttgtttattaatagtgtaagtttaagtagattttttggtttttttgtgttttagtttttttatttaaaaatgggggaaagaataggattaggtagttattataggatagaataaattaatatttagttatatattatataatgatgaattacgtatataatggtgttgttataaaattattattattattattattattattttgagatgaagtttcgttttgttttttaggttggagtgtagtggtgtaattttggtttattgtaatttttgtttttcgggtttaagtgatttttttgttttagttttttgagtagttgggattataggtatgtgttattatattcggttagtttttgtatttttagtagagacggggtttcgttatgttggttaggttggtttcgaatttttgattttaagtgatttgttatttcgattttttaaaatgttgggattataggcgtgagttattgcgtttggttttttatagaattataatattgtatttttattatatttttttttttttttatgattgtgtagtggtatgattttggtttattgtagttttaattttttaggatcgagtgatttttttattttagttttttaagtagttgggattataggtatgtattattatatttggttagtttttaaatttttgtagagatgggatcgttttatgttgtttaggttggttttgaatttttgagtttaagtaatttttttattttggttttttaaagtgttgggattataggtgtgagttattatgtttagtttattttacgtttttttttttttttttttttttgagatagagtttcgttttgtcgtttaggttggagtgtagtggcgtgatttcggtttattgtaagtttcgtttttcgggtttacgttatttttttgttttagttttcgtgtgtgttatagtgatttatagtatttagtatagttatatgtggtttagatttgtagtttaggagtaatgggttatgttatatagtttaggtttgtaatagtttagattatttaggtttgagtttattttattatttaatggtatattttttagagtgtatttttatggttaattgacgtatgattatagttgcgtttttatatttagtttagaatttagaatttttgttttttttttgagagttatttttgattgtgttaatttaaaataattgttttttatttatttatatttttggatttttttttaggggagtgtttgagtgggtatagggtttgtgtttttagttttttgtttttatttttgtttttttttttatttttttagaagtgagtgagtgtggaattgtagggttttgaacggtttagggtagggtattgttttgtttgatttgttgggggttttgggatagttttttgtagagtagggagatttggttgggagatttttaattttttttttcgttttcgtttttggggagttttatgatttgttgtgtgatttttagggcgggaggaagggttgagaatttgggtgaggtttttaaggtttaggaaggaaagtacgatcgttgtttaaaaaaaaaaaatagattagttgttgtttgaaaaaataaaaaagcgtaaattaataaaaaagtataaattaataaaaaaagaaaatttgttagttaagagtttattttatcggtgggggtagtttgggtttttcggggttgggtaggagggtgggcggaggtaggtgtgtttggatgatagtcgtgtgtgggagagattttatttggtattttcgttgttttttgttttagtttagttttggttttgatgttggtttagttttttttatgattttttggggggaagagagttgattttagtgggtgttttttaggtgttgagtatttttatttattttttttaatttttttttagggaaggtgtaatgttttttatgttagggttgagaaaggtagtttttgaggagtgaatttatttttggagttatatagtttttaaggggaggggttgtagtttaaatattggggattttagggtttacgtttttagggggagttcggggaaaatgttggagttttacgttgttggttcggggaggtcgaggttttagcgtttgcggagagtttgttagggtttggtgggttgggttatagtatttttttgtggatatagttggttttgtgataattttagttgtgtattggaaagggtggaaggtaaggagggggttttttgttttagttcgttttattttttttaatttttgttttagtttgacgttgataattagtttttgatttttgggtttgtaattttttttaaaaagttattattattttattttttagtaagtttttattagttttaattttagttttaatattcggttttagtttagttgtgatttatagtttcggttgtgattttttttaattttaattttaagtgtttattttagtttttttttttttttttgtttttttttttttgtttttttttttttttttttttttgtttttttttttttttttttttttgataggtttttgttttgttatttagtttggagtgtagggacgtaattatggtttattgtagttttaagtttggttttaagttattttttcgttttagttttttatatagttggattataggtgtatattataatgtataatgtgataataaaaaatgtgttattatagtgtgataataaaaaaatattttattttattttattttattttgagattaagttttattttgttttttaggttagttttggatttttgagtttaagtggttttttcgttttggttttttaaagtgttagaattataggtgtgagttattatgtttggtttaggttatttgtattataattttagttttaattttaaatttatattattttttgttttagttatttttttggttttttgtgatttgttgtttttgaggaagtaagatggggttagatataggaggataagagtttttggattttttttaagggtttagggggttagtttagtttagggagttttggttttaaatggatttttaggattttttaggtgtgttgtgggtagatttgatttaggagtgaggaagtcgtttgtatgttaggtttgttgaaaaatttattgggttgttagttagggaggaatttattttattttgttaggatgtggttgtattggaaatatgggttttgttagtaagatcggaaatgcgtgggtgagggtttggatcgtgataggaatttatttgggaggcggcgggggggtagtttgttcgattttatttttagttgttttttttttttagtgggttgggagtggggtttatttcggtattggggttttttgagatggagatttgtaggagaggggtaggagttgggggaatttgttggatggggagcggagtgtttggaggggtttatagttttgtaggagttttatttagttagtttatttttagattcgtgttttttagatattttataaagtatttggttttgggttgggtgtagtggtttatatttgtaattttagtattttgggaggtcgaggtgggtagattatttgaggttaggagtttgagattagtttggttaatttggtgaaattttatttttattaaaaatataaaaattagttaggtgtggtggcgaatgtttgtaattttagttattttggaggttgaggtaggagaattatttgaattcgggaggcggaggttgtagtgagttaagattatgttatgatattttagtttgggcgatagagtgagattttgttttaaaaaaatagataagtaaggtcgggcgtagtggtttatatttgtaattttagtattttgggaggttgaggcgggcggattacgaggttaggagatcgagattattttggttaatacggtgaaatttcgtttttattgaaaatataaaaaattagtggggtatggtggtgggcgtttgtagttttagttatacgggaggttgaggtaggagaaggcgtgaatttaggaggcggagtttgtagtgagtagagatcgtgttattgtattttagtttgggtaatagagcgagatttcgttttaaaaaaaaaaaaaaaaaaaaagtatttggttttgttatttttatggtttatggtaggattgttttaaatgggatgtttagttttaagttatttgatttttggtgttgggtttttgtggggttattgggattaggatttgtttttttttttttttgatttagttttatttaggtttttttagggattgttttaaggtaaagaatttttgattgagcgtatagttgtttaggaagtttgattaaaacgtagatttttatttattttagaatttttattttataagtttttagggaattttgattaaattttaggtttgggaattattggtttggtttattgtatttattttataggtggtggggaaataggtttgagtgtttcggttatttagtatacgtggatttatgttttttttcggttgtgtcgtttttcgagggtttgggggtttttttgaagaaggtattgtttttatttttgaagtttttttttttcgtgttttttgtattggggggtatgggtgaaatttatttggggcgagttttttgaaagcggaattttttgatatagattgttttgtagcgttattttttggtagattttggtattgttttagtattttattttattttatagtaggggaatttgtaaatggttaagtgtttagttttgattggttttcgtttgatttacgtgttagaatggggttggggatagtgatttgtgtagagtttttgtggattcgagtttttggtgaggtattttagagaataatattgtttggtttagggttagtttttttgtttgaggtttggttagttaaggtggtttaggaatttattgtaggttaggtgcggtggtttacgtttgtaattttagtattttggaatgttgaagtaggaagatcgtttgagttttaggagtttgagattagtttgggtaatacggcgaaatttggtttttatagaaattagttaggtgtggtggcggacgtttgtagttttagtaattcgggaggttgaggtgggaggattatttgagtttagggaagtcgaggttttagtgagtcgtgattatgttattgtattttagcgtgggtgatcgagtgagatttttttttaaaaaataaaattaaaaagaaattatagtaacgtgaaggttaaggttaattttttaaatattagaattttgataatggttgtagtagtttttaaggagatatggtgtgtggttagtttttttagggttgtgtggatagttttttgtgtatttttttgggtgatttatagtattaaagggagaaaggaggtagtaattgtttagtatttgatatgtgtttgaatatttcgtaatcgtaattttgtgttaggtagtggtattattttttttttttagatgaagaaatcgaggtatcgagataaaaagtaatttgtttaaggtaatttaggaagttgtaaaattaattaatatatatggaatgtgtattatttgttaggtttatttaatattttatttgattttttagatatttatttgatgtaggtattatttttagttttaattgtgagatttagaggggagaaataatttgtttaaagttgtatttggttagtaagtgggagagttggggttgcgttaaggagtcggatgttagagtttatgttgtaatattattattcggttttttgtattttgttgtgttttatttggtatttgt

SEQ ID NO: 176 - DNA, 15592 bp, Artificial Sequence
  chemically treated genomic DNA (Homo sapiens)
ataggtgttaggtgaggtatagtaaggtgtagggggtcgggtagtggtgttatagtatggattttggtattcgattttttggcgtaattttagtttttttatttattaattaagtgtaattttggataagttattttttttttttgaattttataattggagttgggagtggtatttatattagatgggtatttggaaggttagatgagatattaaatgagtttagtagataatatatattttatatgtgttggttggttttataattttttaaattgttttgagtaagttattttttatttcggtgtttcggtttttttatttaaaaaggggagatggtgttattgtttggtataggattgcgattacgaagtgtttaagtatatgttaagtgttgaataattattattttttttttttttttgatgttgtgagttatttaggaaaatatataaaaagttgtttatatagttttggaggggttggttatatattatgtttttttgaaagttattgtaattattgttaggattttgatgtttgaaaagttagttttaatttttacgttgttgtgatttttttttggttttgttttttgagaaaagattttattcggttatttacgttggagtgtagtggtatgattacggtttattgaagtttcgatttttttgggtttaggtgatttttttattttagtttttcgagttgttgggattataggcgttcgttattatatttggttaatttttgtaaagattaggtttcgtcgtgttgtttaggttggttttaaatttttggggtttaagcgatttttttgttttagtattttaaagtgttgggattataggcgtgagttatcgtatttggtttgtagtgaatttttgggttattttggttggttagattttaggtaaaaaaattgattttgaattagatagtattgttttttaagatgttttattagaaattcgaatttataagggttttatatagattattgtttttagttttattttaatacgtgagttaagcgggagttaattaaagttaagtatttggttatttgtaaatttttttgttataggatggagtgagatattaaaataatattaggatttgttaaaaggtggcgttgtagggtagtttgtgttaaaggatttcgtttttaggagattcgttttaggtaagttttatttatgttttttagtgtaaaaagtacgggagagggaggttttagagatgagggtagtgttttttttaaggaggtttttaaattttcggaggacggtatagtcgagaaagggtatgggtttacgtgtgttgggtgatcgggatatttagatttgtttttttattatttgtaaaatgagtgtagtgagttaggttagtggtttttaaatttgaaatttgattagaattttttaggaatttgtggagtaaaagttttagggtgggtaggagtttgcgttttgattaggttttttaggtagttatgcgtttagttagggattttttattttgggatagtttttagaggggtttggatgaggttaaattaggaggaagaggggataagttttggttttagtggttttatagaagtttagtattaggagttaggtggtttgggattgggtattttatttaggataattttattatgggttatggagatggtaaagttaggtattttttttttttttttttttttgagacggagtttcgttttgttgtttaggttggagtgtagtggtacgatttttgtttattgtaagtttcgttttttgggtttacgtttttttttgttttagtttttcgtgtagttgggattgtaggcgtttattattatgttttattaattttttgtatttttagtagagacggggttttatcgtgttagttaggatggtttcgattttttgatttcgtgattcgttcgttttagttttttaaagtgttgggattataggtgtgagttattgcgttcggttttatttatttatttttttgagatagagttttattttgtcgtttaggttggagtgttatggtatgattttggtttattgtaattttcgtttttcgggtttaagtgatttttttgttttagtttttagaatagttggaattataggtattcgttattatatttggttgatttttgtatttttagtagagatggggttttattaggttggttaggttggttttaaatttttgattttaagtgatttgtttatttcggttttttaaggtgttgggattataggtgtgagttattgtatttagtttagagttaagtattttataaagtgtttggggagtacgggtttagaggtgggttggttgagtggggtttttgtagggttgtgaatttttttaagtatttcgttttttatttagtaagtttttttagtttttgttttttttttgtaggtttttattttaggggattttaatgtcgggataagttttatttttagtttattggggaggaagggtagttggaagtgaggtcggataggttgttttttcgtcgttttttaaatgagtttttgttacgatttaggtttttatttacgtattttcggttttgttgataaagtttatgtttttagtataattatattttaataaaatagaatggatttttttttaattggtaatttagtgaattttttaataagtttggtatgtaggcggtttttttatttttgagttaggtttgtttatagtatatttgaagggttttggaggtttatttaaggttagggttttttgggttggattggttttttagatttttaggagaggtttagggatttttgtttttttatatttgattttattttgtttttttaggaataataggttatagggggttagggaggtgattggggtagaaagtgatgtggatttggaattgagattggggttgtaatgtaagtagtttgggttaggtatggtggtttatatttgtaattttagtattttgggaggttaaagcgggaggattatttgaatttaggagtttaagattagtttgggaagtaaagtgagatttggttttaaaataaaataaaataaaataaaatatttttttattattatattgtgataatatattttttattattatattatgtattgtgatgtgtatttgtagtttagttatgtgggaagttgaggcgggaggatggtttgagattaggtttggggttgtagtgagttatgattgcgtttttgtattttagattgggtgatagagtaagaatttgttaaaaaggaaagggaaaaaaaggataggaaagaaaagagggagggaggtagggagggagggatagagggagggagggaggttggggtgagtatttggagttggaattaggagaggttataatcgaggttgtgggttataattaggttgaagtcgagtgttgagattggggttgaggttaatggaggtttattgggaaatggggtaatggtgattttttggaagaggttgtaggtttagagattaggaattggttattagcgttaggttgggatagaggttaggagaaatgagacgaattgaggtagaaggttttttttttattttttattttttttagtgtatagttgaggttattatagggttagttgtgtttatagaggggtgttataatttaatttattaggttttagtaggtttttcgtaggcgttggggtttcggttttttcgggttagtagcgtggagttttagtatttttttcgggttttttttggaagcgtggattttggagtttttagtgtttgaattgtagtttttttttttaggagttgtgtgattttagaaataagtttattttttagaaattgttttttttaattttaatatgggaagtattgtattttttttggagaagaattgggaggagtaaatgaaggtatttagtatttaggaggtatttattaaggttagtttttttttttttaggggattatgggaaaggttgggttagtattagagttaaggttgggttggaataggaggtagcgaggatgttagatgaagttttttttatatacggttgttatttagatatatttgttttcgtttatttttttgtttagtttcgaagagtttaggttgtttttatcggtggggtgggtttttggttagtaggttttttttttttgttggtttatgtttttttgttggtttacgtttttttgtttttttaagtagtaattaatttattttttttttttaagtagcgatcgtatttttttttttgagttttgagagttttatttagatttttaattttttttttcgttttgaaggttatatagtaagttatgggattttttaaaagcgagggcgggaaggaaagttggagattttttagttaagtttttttgttttgtaaggggttgttttaaggtttttagtaagttaggtaaagtaatgttttgttttgggtcgtttagggttttgtagttttatatttatttatttttaggagggtggggagaaaggtaagggtgagggtagggagttgggggtatagattttatgtttatttagatatttttttgaggggaggtttagggatgtgggtaaatagggggtagttgttttgagttggtatagttagagatggtttttaggagggaagtagaggttttgaattttgaattaaatataagagcgtaattatagttatgcgttagttagttatggggatgtattttgagaaatgtgttattaggtgatagagtgaatttaaatttgaatagtttaggttattataaatttaggttatatggtatagtttattgtttttaggttataaatttggattatatgtgattgtattaaatattgtaggttattgtaatatatacggaggttgaggtaggagaatggcgtgaattcgggaggcggagtttgtagtgagtcgagattacgttattgtattttagtttgggcgataaagcgagattttgttttaaagaaaagaaaagaaaagaaaacgtaaagtaggttaagtatggtggtttatatttgtaattttagtattttgggaggttaaggtgagagaattgtttgagtttaggaatttaagattagtttgggtaatataagacgattttatttttataaaaatttaaaaattagttaggtgtggtggtgtatgtttgtggttttagttatttgggaggttgaggtgagaggattattcggttttgggaggttgaggttgtagtgagttaggattatgttattatataattatgaaagaaagaaaaggtgtagtaaaaatatagtattataattttatgggaggttaggcgtagtggtttacgtttgtaattttagtattttgggagatcgaggtggtagattatttgaggttaggagttcgagattagtttggttaatatggcgaaatttcgtttttattaaaaatataaaaattagtcgggtgtggtggtatatgtttgtagttttagttatttaggaggttgaggtaggagaattatttgaattcgggaggtagaggttgtagtgagttaagattgtattattgtattttagtttgggggatagagcgagattttattttaaaataataataataataataataataattttatggtagtattattgtgtacgtggtttattattgtgtggtgtgtgattggatattaatttattttgttttatgataattgtttgattttatttttttttttatttttagatgaagaaattgaggtatagagaggttaagaaatttgtttgggtttatattgttagtaaataggagaatcgggatttgaatttggagggtagtaggttaatttttagttatttttgtaggttaaaaggtttatcgaagagaaagaagtaagaaacgatggaatttggagttaggatgaggtttggagtttttattattgttttagtcgattgcgttttttatttttgttaatattttagcgtttagttattgtttggattggaagtttgggggttttatagattagagtttaaattttatttttgattttttagttaatcgttttgtggttatggttgattttggtttttggagttttggtaaaggtatgtgtgatacgatttttttttatgggggcgtcgtgaggttttaaaggaggtgtttttggtataggtgagtgtttttttaattttatttattcgttatttttaaatttaagttttttatttttttagcggttttttgttaatgtttggtatattttgagttgtcgtttatatagaaaggaaattttttaggaggtgataatagtagatttattttggtatcgtggaaattgaggtataggttaaggaagtgatttattcgtagtttttatttcggggaagagggtagggaataaatatagtagttttgttttggttgtttttttgaaagttttggtttagagggttttttaggaaggttagtttcggggttaggtttgtgatattttttttttgagatgtttgttaaaattgagacgtcggggttcggtttttttcgtgtgatttcgttaggtatgaggtacggtttgggtatttgaatgtgttttttacgggattttgaggtttagttaggttaggagtaacggttttttagtttttaggaaaggggtttcgattaataacgttgttattgaggttttttagtttattgtttggatttcggtatttggaaaggtattttaaatgtattttaaatatataggagtggtttagattttaaggaatatttatttttttttgattttcgtttatcgtgaaattttttgtagagtggattagttttggtataataagtgaattattttttttaattttttttttgggttaagtttgaatatttaaggttatttaaggttagatatattaggatttttaaggtagagtgtatttatttattttagatttatatatatataaaagtaggtatattttaaattatttgtgttttttatgaacgtagaatatatagacgtatatataagtatgtttatatatgtataagaaaatgtatattcgtataagtacgtatatatacgcgcgtatacgtatatatatatatatacgtatatatatatatattaggttttttttgttatcggttttagtaattattcggtgtagagtcgtggagggtagggttgataaattttcggtggaaagggtagggttttttttttttatttttattttttgtttttagaattttttcggggaatttttttatatttggttttagttgatggagacggacgattttatttgtgggtttagtatttaggtgatattatagttcgtatgtataacgagtacgtagcgtttgtggttggtggtttttaaattagatgtttttttttttttgttttttttattttttttttttttttatatttattaagggtagggtttggttttttttttttattttttataattatgatagattggggtttaaattttagtttagttattttaatttttttttttttatttttatgtttttatttgtaataggattttattttgttatttaggttggagcgcggtggtataattatagtttatattagttttaaattttggggtttaagtgatttttttattttagtttttagaatagttggtggtataggtatatattattatgtttagttaatttttttgtattttttgaagagataaggtttttttttgttgattaggttggttttgaatttttattttagttttttaaagtattaggattatttggttttattttaatttttttgtattttagtttttttatttgtaaagtggggatagtgttaatatttagtttataggatagttgtgataattaaattgaagaatatatggaaatttttggagagatcgtttattatagttaattttttagtttatgttattttaagtgttagtttgggttttttattttttttggtttttgtttgtttttttttgtttttcgtttttataggattttcggtaggttttgaggttattttagtttgagttgtatttgttttagtgaaattggatttagggaaaattttgaggtgaaattttagtaagtgggatgatagttgggaatggattttagaaattgttaagggttatttaatatgattttttatttaaggtgggaattgagaggaagattttatttagattttaagatagggtcgtggagatattagttttttttagaatttaattttaagaaaataggttgtgttttattgttaggttgagtatgttgttgggtgtagagggtgtggagggtggttgggttgtagttttaggtttggggtttggtaagggcggggcgatcgttttaggttttgaaatgagtatagggatttttttgaatggtgtaattgaaattgttgttttgtgaaggggtaaggtagtgttaggtttggggttttttgtttatttaggttaggtttcggttttggttagtttaatcgggttttttgggtttattttggggtttgaggatgagttttggttaaagtttatatattggttttttgtgtgtttggagttaggagagtttaatggttatagttcgagttattgattatttgtttttttttttagttttacgtttgtatttgtaaaatgggtagtttggtttgggaacgtttattttagtagattttttagggaggagtttggttttagtatattgtttaaggtcgttgtgattttacgattttagttttacggtagggtggttttttttttttttttttagtattggggagagtatgagttaattgtttagagggcggatatatagggtcgatttcgtgttatttaggtttgtttgtattttttagttttgattatttttgtgttagtttttaaatttaggttacggttttttttatcgtagatttttttgttcgtaaacgaaaaatagtttttaaaataaatttatgttaatgagttgttgtagggttaggttgtatatttgtttagtagaagttttattgtagattttattaataattttgttcgtttcggtagttttcgatttttgaggttgtgggtggggggaagtagttaaatttagtttgaaattttattttaaaataatgaggcgatatttttggtcgatgtagaatatttatttttttgtttatttttttaaaatataggttcgggagagaggtttagtttgtaggggtgggtggagaggggtaggggttatcgaggaaacgttgtagtttcgttttttttttggttttaatttaaggtaaattacgtttaagtagttttagtatttgggggagtttagggaggttttatttcgtagtaataaagggtgaggggttttttgttgataaattgttttttcgttagcgttcggtttttggtttttagttttgatttttgtttttttggggtgtttttagttataggttggtggcgtttagtttggggagcgagggttttcgaaagtttggaagtgtggtttttttttttgatgttcgttaattttcggttacgttaaggtaggcggttgttttttttgtcgtcgtttgtaaacgattagaatcgtttcgttttgggagcgggtcgggtaggtggttcgtagtagggtttgtcgtttagtcggtttcgcgggggtggaatttttaagaaaattgagttttcggaaaggttggttttttttgttttagatttaattttagggagatgattcgggttaggtttcggggtcggcgggaggtagggggagggtttgtcgtattcggtttaggaaattattcgtgaatttcgttgggggaaggcgagttttcgatattgggggattgtttggatcggagggcgggggattagggagaggcgtagatatagggcgagatttttatagagggtagcgtagagatagagagagggagagaaaagttagaggtagagatataaacgcgggtagtcgaatacggaggtaggcggggaacggaaagagacgggtagattaggggaaagtgagcggcggaaacggagcgacggagagatagatatacggacgtggggatcgaagtagagggggtcgcgggaggcggaaacgtttagagtcgagaggcgcggcgcggcgaggttcgggtacggtcgggggatatgcgagttcggttcgttcggttacgtatttttttttttcgttttttttttttttcggtcgcggaaatttcgatttagaaacggaattttggggcgagtttggggacgggtttcggacgcggcggtgtttttcggttatttcgtgtcgcgtttacgtttttagcgtcggcgttcggaggcgttcgttaggttttttagggtttttgagttcggcggcggcgtttttattcggtgttcgcggtcgtcggacgcgtcgggggacgtagtttcgggttgggggcgcggtattgttttcgcggtcgaagtttttggaagtcgggcgttcgcgtgtcgattcgggcgggatttatcgcgcgcgttcgtcggttttgcggagttgggtgcgggggtcgcgggttcgggcgttttaggaggttcggcgaggcggtcggtagggcggggggcggtttcgcgacgttcggttgggttgcgttgcgcgtgtttgcggtttcgggcgggcgcgcggcgcgggggagcggtttcgacgttagggtggttttttttaaatagggcgcgagggcggcggtagcggggagggtcgcgcgtagaaagagcgggcgggcgcgcgcggttttttttttcgggtgcgtaggagggggcgtcgcggcggtaggggtttcgggtttttttttggttcgttcgtttcgggttgagtttcggcgcgtttcgacggcgtggtggggcggtcgggacgtttggtcggcgttcgagaggtagggtagtttagtcgggcgttttggttcgtttttaagcgtttttttcgggtttttttgcgtttttatttttttcgttcgatttttatcgagtttgggtcgttaggtcgtgttaggtttcggggtgataaagatggatgtgttttttttgtgggtatcgggtattgtagatttgtttcgagagtggggcgttttagttcgtcgcgtttcggtattaggagtttttagttttgcggtgtattttatttcgttcgtttcggtatgcgattcggtttaagttcgtgttgttggtagtttgggttgtttagttttgtttagtgttattttagtgtcgttttcggttttacgtttttggtttaagtatttcgaaaagttttagggatttattaggaattaaaaagttagtaaatgaatttatttttttgatttttgggaagagtggagtttttggttttagtttttagttttatttcgggggtttttatttaattagtgggtatttgggtggattgcggtcgtattttttttattttgtgtgtttaataacggggtgagaaaataattttgtttttggaaagtggtggtttagggatattattgggatacgattgtaggatttggggattttgttttatagtatagttatttgtgtttatgtgttttatttagtttggttggaaatttttagatagatatagttttgtttgtttgatttatgaggttgtcgggtattttgggtggtttttagtggtttgttgggaattttttggtgtattttagtttattcgtattttttatatttagtttgtatttgcgttttttagttgttgtttgcgtttttttttttgttcggaattttttttttttttttttatttttggtaaatatttttttagttttagattggaaagtttttttaagattttttgggagtattttttttttttagtgtgattttggagtataggatgagaatttttgtttatgttaatttttttttagaataattgtgtatattttttgggtaaatatttttttagttttagattggaaagtttttttaagattttttgggagtattttttttttttagtgtgattttggagtataggatgagaatttttgtttatgttaatttttttttagaatagttgtgtatattttttttttttattagattttgagggtaggaatcgtgtttattttagtgtttttattgtttatgggtaggttaggtgagatgtataatgtatttggttgaatgaagttgttgttgttgttgttgttgttgttattattattattattagagatagaattttgtttttgttgttttggttgaaatgtaatggcgtgatttcggtttattgtaatttttgttttttaggttttagtaatttttagtttttcgagtagttgggattatagacgtttattattacgtttagttagtttttgtatttttagtagagatggggttttgttatgttgtttaggttggtttttaatttttggttttaagtgattttttcgttttagttttttaaagtgttgggattataggtatgaattattacgtttagcgaataaagtaattattattttttattaatgtagtatagataggtttttttttaatggtaattatgatcgttataatagtttatatatattgagtattttattatgtgttttattttattgtaagttgttgttatttttataataaatttatgaggtaagtattgtttttgttttaaaagtgttaggcgtagtggtttatgtttgtaattttagtattttgggaggttaaggtaggaggattatttgaggttaggagttcgagattagtttggttaatatggcgaaattttttttttattaaaaatataaaaattagttaggtgtggtggcgtgtgtttgtagttttagttattcgggaggttgaggtaggagaattatttgaatttgagaggcggaggttgtagtgagtcgagatcgtattattgtattttagtttgggaggtagagtgagattttattttaaataaataaataaataaataaataaataaataaaataataaaagtgaaaaaaatttcgaggttggaggattatttgattttaggagtttgaggttgtagtgagttatgattgtgttattgtattttagtttggataatattgtagaaggttaattgtggaatttaatgagtttgttattttagtaaggttttgttttaaaaaaaaaaaaaaaaagtgaaaaaaggaacgttaagagaaaggttaagtaattcgtttaaagttatatagtaagagtttatgttagttagtgtttgttggataattatatattatgtacggtagaaattagttttattgtattgtatatagtagatatttaggaaatatttattattttgtagttaaagtttattttcgttattttttatgtagatttcgagtagggtagaaagtagagttttatattttgtaagaatttatttttatattgtagaaagttaattgtggagtttgatgagttggttagattatatatagagttaggagtagaagttataatttttagttagtgtttttgatagggtagtttattattttttaaatatcgggaggtttaagaataatattaattttttaattagggataaagggtttggagttgagttattatttgtttggtgacgggaaagttatagtgtgggtagggggtttgggaagtaatttggtagtaatatttatttattttgtgttaggtattatgttggttattttgtttgttttattttttttaatttttattatagttttattattgtttttattttataggtaagaaaaatcgaggtattaaaatgtgttattatttgtttaagattatattgttagtgattaataaagtttggatttgagtttagatttgttaatattaaagtttatgtttttttgtttattatattttttttattttttcggttgttttagtgtttttttttattaggttgtagtagggatgttgtattgaagatggattttaggggttttagcgggaaaggtagaatttgttacgttagagtgttttagttcgagtagatgtatttggttggtagtggtgttttagttgtttttataggtttggttggtatagggtatgggtttgaggttagagttttttggttttgggttagttttttggggtcgaggtaatgtggggtttagagttggggtttagggttaaaagtttttttttttagtttattagtaaatatttgggtttaggaaaatgatcgatttggaatgtgattgagttgtggggagttgtttttttttagagttcgggaatgtgagtttttttttgtagggtacggatttagtttagttgttttttttaattttgttagtttggttttaacgggggtttaaatttttgtattttcgttggagaaatagaatgaaaataagtaaaaggtttgtttttttagtttagtttattgaatagagggttggtatatagtttttttttttttatgataaagatgagagcgtttatatttttaggtatggagttgggaggagttattcggatttattaggggaggtttagggtttatattgtttttgtatcgttttttgattttgtgttagttgttttatatttgggttttggtttttttatttgtaaaatgtagttagtagtgttatgtattttatagatttgttgtttggagttatttatttatttaataaatatttattgtgtttgttatgtgttagatatgtatagaggtgttgaggatataataatagattagattaataaggttttagtttttaaggagtttatgttttgttatatttaggtagattgtgtaatagataaatagatgagtggattttatataattaatgtgttttgaaggttttaggtttagttgtttaatatttatttaaaagagttaggcgtgatggtttacgtttgtaattttagtattttaggaggtcgagttgggtggattatttgaggttaggagtttaagattagtttggttaatatggtgaaatttcgtttttaataaaaagataaaaattagttcggtgtggtggtacgtgtttgtaattttagttatttgggaggttaaggtaggataattgtttgaatttgggaggcggaggttgtagtgaatcgagattatgttagagtattttagtttgggtgatggagtgagattttgtttcgaaaaataattattataataatatttatttaaaagaaaaaaaggagaggttaggcgtggtggtttatgtttgtaattttagtattttgggaggttgaggtaggtggattatttgaggttaggagtttaagattagtttggttaatacggtgaaattttatttttattaaaaatataaaattagttgggtgtggtggtgcgtgtttgtaattttagttatttgggaggtagaggttgtagcgagttgagatcgtattattgtattttagtttgggtgatagagcgagattttgtttttagaaaaaaaaaaagaaaaaaaggagaaaaagtattatgaacgaattaagttagagggggcgatgtgatgggggaggtatgaat

SEQ ID NO: 177 - DNA, 6271 bp, Artificial Sequence
  chemically treated genomic DNA (Homo sapiens)
  unsure 4779: n is a or g or c or t
agtggtataaatatggtttattgtagtttttattttttgggattaagtaattttttagttttagttttttgagtagttgagatgatagttgtttatcgttatgtttagtaaatttttttattttttgtaaagatacgattttattatgttggttaggttggttttgaatttttgggtttacgcgatttatttgttttagtttttaaagtgttgggattataggtttgagttatggtgttcggttatatttatggatttaattgtttttggaattaatatcgtgtaggaaaggagtaggattgagtagaaaaagttgaattaaatgtagttatagtaaatgttttagttttcggattttaagggagttttggtgttaggagagttttttagagtagttttattttgagttttgtatttgttagttagtgtagacggatttggtgagaggtagttttttttagttgaaggtaatttttggaaagggatttagttgataggtgttgataagtaatgcgtttagtagttgaggaaatgagtattttagttttgaagagtggtgtgttttttggtatgttgggatggttggttgtgttagtggagatgggggtggtgggtagaatgaagggaatattattgtaaaagttttttattttttatttatatttatttatttatttattttttaagataaggtttaattttgatgttcgggttggagtgttggaatgtaatgatattattatagtttattgtagttttgattttttgggtttaagcgatttttttattttagttttttaagtaattggaattataggtatatgttattatgtttagttaattaaaaaaaaaaattttgtagagatgaggtttcgttatgttgtttagggtggtttggaatttttgggtttaagtgatttatttattttggttttttaaagtgttgggatgataggtatgagttacggtttttagtttggaataaaatttttcgaagaaaaaattggtagagtttgttgtttgattaaaaaatagaggttgaatgagagagatgtatttaaaataatacgaaatattaagggttttttgaatattgttggatagtgtaaaatgggggaagttaggatataaatttaattttgttttattgtaaggtttatgtttttttattagattagtgttggttaaattggtgttttatgggttatatttagatagtagacgtattttgtttggttatatagtatttaaaaaatgtaaattggttgttattatgtaaaaattggaagagtttatatgtaagtttagatttttagttttttttgagtaattagaagatttagtaatattgggttaatatttttgtatggtagtaattggagttgagtgatagatattttttaaatggagagagtattttttatttggataaatggaggtgggtatatgttttttaatttattatagtttttatgtattattttttttggtattttttttttgagatggagttattttgtcgtttaggttggattgtagtagtataatttaggtttattgaaattttagttttttgggtttaagtaatttttttgttttagttattttagtaagtagttgggattatagttatgtgttattatgttcggttttttttttttttttttttttttttagtagagatggagttttattatattggttaggttggttttaaatttttgattttaggtgatttgtttgtttcggttttttaaagtgttgggattataggtatgagttatagcgtttagttttttttggtatttttgtttagtatttttgttatatgtattatgtatggtttaataaagtatataatatataataggtatttgggtatttttatttttatttattttttagagatagggttttgttttgttgtttaggttggagtgtagtggcgagattatagtttattgtagttttgatttttttagtttaagtgatttttttattttagttttttaagttgttgggattatagatgtatattattatgtttaattaatttaaataattttttttggtagaagttgggattttattatgttgtttaggttggtttgaatttttaggtttaagtaatttttttatttcggtttttaaaagtgttggtattataggtgtgagttattacgatcggtttatttggatatttaatattggtttagtagaattgaatgaatttaattggagaggaagttggggtgaagtttaggtttttgattataatgagaggtttggtattgaggggaggtaatagaatagggagtataaattaggatgaattaatgatatgttggtaggagtttgagtaaaggaagaagagtagagggttagggtttgaagtttgggtgttttattatagagttaaagaagagtgggtaatggtagattaaattagagaagaagaggagagaaaggtatagaggaattttagtaacggaatgttagggaaggtaagggagttgagggtttgggtagttgtatttagtgtagggaagaagattagggagatagataggtaaaaagttatggtaataaggaagtagttagggatttttagaggaagtatgagaaaaggagaggaaggttataggtttgaagtttagtagtgtagtagggggtattggaatattattttgggggtatgagtgagtgtttttttaggggttttatttgggagaaatatagatagatatttatttaatatttatttatttttttttagtatagttattattttgatattatttaaaagaaattagtatttgtattgtatttttaaagaagaagggataaaagatatgtttaaattgtttgtttgttttagtggaataaaatattaatttaatatgtattttggataattattaatttagagattggaaattttttttaaggatatatttttttgtatgtgggttattggttttgtggtttttttgtaggaaaattaaaattttagttttgtttttttttattatttagtgtttgtgtggtttaattggttgattagcgcgtgtttggaatgtgtaaatttattttaatattggtttaggggtttgtgtggtagtttatttttgttattttagtattttgggaggttaaggtagggggattatttgaggttaggagttttagattagtttgggtaatatagtaagattgtgtttttattaaaaaaaaaaaaaaaaaaaaaattagttaaagtagggtgatatttatttgtagttttagttatttaggagtttgaggtgggaggattatttcggtttaggagtttgaggttggagtgagttatgattgagttattgtattttattgtatagagttagattttgtttttgaaaaataaaaatatttgtttaggtaaaatgtatcgaggaagataaattttaaaattatttattttaggttaggtgcggtggtttatatttgtaattttagtattttgggaggttgaggtgggcggattatgaggttaggagtttaagattagtttggttaatatggtgaaatatcgtttttattaaaaatataaaaattagtcggttgtggtggcgtatgtttgtagttttagttattcgggaggttgaggtagaagaattattttaatcgggaggcggaggttgtagtgagtcgagatcgcgtttttgtattttagtttgggtgatagggtgagattttgttttaaaaaaaaaaaaaaaaaaattagttattttaaagtttaatgttagatatagattattcgttgttttggatgtaattttttttttggaaaattggtataatttaattatatatgaaatttttttaattttggtattggaggtatagggaaggattttgttttaggagatttatagtttatttttattgttttaggagttaaattacgttggtttatattttgattttgttatttgttaatttagattttgggtaaattaaaggtttgagggaggagtgtaggtttttagcgtttttacgggggtggggacgtgacgtatttattagtttatgaagttaatgatatgtattgaaaaggtttgtttaaggatttaaataagacgatgaatatattgaattaataatgaatgtaaggttttaaaggtgttttgagggtggtgaaatttgaattttttattaattgtgtaatagttatattaatttggatggttatgagttttgtagaggaaagttgggtttaaattttaatgttagatttggtggttagattttgattgttatcgggtttagtattgggatttaagcgatttttaaaaaaaaaaaattacggaatttttttttggttttttttttttgttttttagtagtttattaagttacgaagaatttgaaaatcggaggtcgtgtattttattttttttgagagtttaagttgagagtatagtttttttaggagattagcggtagagattcgcgcgttgggagaaaggttagttttagggcgttttaatttttaatttcgggagtaatttaaattcggaggtcggcgggggaggggatagttgtagggggcggtggggatgggagtggatgttttcgggttagttttggtattcgttagttgagtttagcgttagtttaggtgagttttacggcggtgagggacgttcgttagacggtttagaggagttagatgacgttatttttaggaggattcgtttttttattaatgaaatcggtcggcgcgggcgtatgcgcggnaggtcgttttttttttcgtttttttttttttttttttagtcgcgtttttaatttttagttcgttcgcgtttttttttttcgggtcgtggaaaggattttattttcggtggggtgttatggcggcgtttcggattgtgatggttgtggggagacggcgttagtggggagagcgattaagaggttttttttttttttcgggttttttttttttatttttttttttttagtttttttgttaacgttttttttttttttttttttttcgttcggcgttgattttttatttttattttcgtgggaatattgggagtttgtattttatagattttttttttgtttttttttttattttagttttcgtttttcgtttttttttcggtttagggcgtcggtttattttttttttcgtcgtttttcggtcgcggggaggatatggtcgcgtataggtcggtggaatgggtttaggtcgtggttagtcgtttcgacgagtaggtaatcggttcgtggcgggcgggaggtgggagcggagtgggggtggggatagagtaggtgaggggaggtaggagcggtcgtttttttcgcggttgttttaggttttggaggaaaggaagggaagggaagagaagggaaggggggataagtgggggtggttaaggcgggaggtgaggggtaggaggggatagttgggagtttgggtatttttttttttttaagtcggggggtggggttttgtttttgattagttttcgattttttattttttttattttagttttttcgtttggaaatggggatgagtgatttgggggcgtttttaggggcgcgttatttggatttaataattatttttttatttttgtttttgagtagaggtgggtaacgtttaggggttttttttttttttttttttcgtgatttttttaattggggacgagcgaattttaaggtttgttttatatattttttataggagaacgataatatttcgttttttttttagtttttttagtttttttttttggagggggaagagtagaagaaagtaaggaaggtataggtttttttattttttgttttatcgttttattttgtttcgagagttttaagtgtatatttattgtatatttttgtgatgttttataacgtcgttttttatattttgatgatatagattgttttttttttttattgtcgtttgtagtggaaatcgtggttttgaaatattttttttttttttgataattgtagttttttttttttttttttttttttttgttagcggtttgaggatgtgatgtattttcgagtgagaatgttggggagtaaaggggagaagggtgaaaggaaagtgagaaattgttttagagttatcgataatagagtaaagttagttgggatgtggttttggagcggattattttgttagtgtttgtggttgtttttgatttttttttggttgataagagaatttttattgagaatatttgggatg

SEQ ID NO: 178 - DNA, 6271 bp, Artificial Sequence
  chemically treated genomic DNA (Homo sapiens)
  unsure 1493: n is a or g or c or t
tattttaaatatttttaatgaaagtttttttgttaattaggagagagttaaaaataattataaatattagtagaatgattcgttttaggattatattttagttggttttgttttgttgtcggtggttttgaagtagttttttattttttttttattttttttttttttattttttaatatttttattcgagaatgtattatatttttagatcgttggtaaaaaaaaaaggggggggggaagagattgtaattattaaggaaggggaaggtattttagaattacggtttttattgtaaacggtaataaaaaaaaaaggtagtttgtgttattaggatatgggggacgacgttgtagggtattataaagatgtgtagtgagtgtgtatttgaagttttcggggtaggatgagacgatggagtagaaagtaagaaaatttgtgttttttttgtttttttttgtttttttttttttaggagaggaagttgaagaaattgggggaggggcggaatgttatcgtttttttatagagggtatataagataggttttagggttcgttcgtttttagttaggagggttacggagggaagaggaagagagaatttttaaacgttatttatttttgtttaaaaataaaagtaagggggtaattattaaatttagatggcgcgtttttaaaggcgtttttaggttatttatttttatttttaagcggaagggttgggataaaggggatggagggtcggaggttggttagggataaggttttatttttcgatttaggagggaaagggtgtttaagtttttagttgtttttttttattttttatttttcgttttggttatttttatttatttttttttttttttttttttttttttttttttttttttagagtttgaggtagtcgcgggggaggcggtcgtttttatttttttttatttattttgtttttatttttatttcgtttttatttttcgttcgttacgggtcggttatttgttcgtcgaagcggttgattacggtttggatttattttatcggtttgtgcgcggttatgtttttttcgcggtcggggggcggcggagggaagggtgggtcggcgttttgggtcgggaagagggcggggagcggaggttgaggtgagggaagaggtaaggagagggtttgtggagtgtaggtttttagtgtttttacgggggtggggatggggggttagcgtcgagcgggagggggagagggaaagggggcgttggtaaggaggttggggggagggggataggggaaggggattcggggaggggagggggttttttggtcgttttttttattagcgtcgtttttttatagttattatagttcgagacgtcgttatgatattttatcggaagtgggattttttttacggttcggggagagggagcgcgagcgagttagagattgagagcgcggttgggaaaggggagggggaagcgagagggaaggcggtttntcgcgtatgcgttcgcgtcggtcggttttattaatgaaaaagcgagtttttttggaggtgacgttatttaatttttttgggtcgtttggcgagcgttttttatcgtcgtggggtttatttagattggcgttgggtttagttggcgagtgttagagttgattcgggagtatttatttttatttttatcgttttttatagttgttttttttttcgtcggttttcgggtttggattgttttcggagttggaagttagggcgttttggggttagttttttttttagcgcgcggatttttgtcgttaattttttggggaggttgtgtttttagtttaagtttttagaaaaaataaggtatacgattttcgatttttaggtttttcgtagtttggtagattgttgagaaataaaaaaggaaggttaaagagagatttcgtgattttttttttttagaggtcgtttaaattttaatgttagattcggtggtaattaaggtttagttattaggtttagtattgggatttaagtttagtttttttttgtaaaatttatagttatttaagttaatataattattgtatagttgatgagagatttaagttttattatttttaaaatatttttaaggttttgtatttattattaatttaatatatttatcgttttatttaaatttttgaataaatttttttaatatatattattaattttatgaattgatgaatacgttacgtttttattttcgtgggaacgttgggagtttgtattttttttttagatttttgatttgtttaaggtttgagttgataggtggtaaagttaggatgtaaattaacgtggtttaatttttagaataatagaggtagattatgggttttttaaaataaagtttttttttatatttttaatattagagttgaaaggattttatgtgtaattgggttgtgttagttttttaggaagaggattatatttaaaataacggataatttatgtttgatattggattttggaatgattaatttttttttttttttttttaagatagagttttattttgttatttaggttggagtgtagaggcgcgatttcggtttattgtaattttcgtttttcggttgaagtgatttttttgttttagtttttcgagtagttgggattataggtatgcgttattatagtcggttaatttttgtatttttagtagagacggtgttttattatattggttaggttggttttgaatttttgattttatgattcgtttattttagttttttaaagtattgggattataggtgtgagttatcgtatttggtttggaatgagtaattttaaaatttgtttttttcgatatattttatttaggtaaatgtttttgttttttagagataaggtttgattttgtgtagtggagtgtagtggtttaattatagtttattttagttttagatttttgggtcgaagtgatttttttattttaagtttttgaatagttgggattataggtgagtgttattttgttttggttaattttttttttttttttttttttggtagagatatagttttgttatgttgtttaggttggtttggaatttttggttttaagtgatttttttgttttggttttttaaagtgttgggatgataggggtgagttattatataggtttttaggttaatgttaaaatgaatttatatattttaagtacgcgttaattagttagttaagttatatagatattgggtgataagggagaataaaattagaattttaatttttttatagaaaagttataaagttagtagtttatatatagagagatatatttttgagaaaagtttttaatttttaggttggtggttgtttaaaatatatattaaattaatgttttattttattagaatagatagatagtttggatatgttttttgtttttttttttttaaggatgtaatgtagatattaattttttttagatgatgttagaatgatgattatgttggaaagaaatggatgaatattaaatgaatgtttatttatgttttttttaagtaggatttttgaaaaagtatttatttatatttttaagatagtattttagtgttttttattgtattgttaaattttagatttatgattttttttttttttttttatattttttttgaaagtttttaattatttttttgttgttatggttttttgtttgtttatttttttgatttttttttttatattggatgtaattgtttaaatttttagtttttttgttttttttggtatttcgttgttgaagtttttttgtgttttttttttttttttttttttagtttagtttattattgtttatttttttttagttttgtggtaagatatttaaattttaggttttggttttttgtttttttttttttatttaagtttttgttagtatgttattaatttattttaatttgtattttttgttttgttgtttttttttagtgttaaattttttattatagttagaggtttagattttattttaattttttttttaattaaatttatttagttttgttgaattagtattaagtgtttaaatgggtcggtcgtggtggtttatatttataatgttagtatttttagaggtcgaggtgggaggattgtttgagtttagaagtttagattagtttgggtaatatagtgagattttagtttttattaaaaaaaattatttaaattagttaggtatagtggtgtgtatttgtggttttagtaatttgggaggttgaggtgggaggattatttgagttagagaggttaaggttgtagtgagttgtgatttcgttattgtattttagtttaggtaatagagtaagattttgtttttaaaaaataaataaaaataaaagtatttaaatgtttgttatgtattatgtattttgttagattatatatagtatatatggtaggaatgttaaataaaagtgttaaagaagattggacgttgtggtttatgtttgtaattttagtattttgggaggtcgaggtaggtagattatttgaggttaggagtttgagattagtttggttaatgtggtgaaattttatttttattaaaaaaaaaaaaaaaaaaaaaaaaagtcgggtatggtggtatatggttgtaattttaattatttattagggtgattgaggtaggagaattgtttgaatttaggaggttgaggttttagtgagtttagattgtgttgttgtaatttagtttgggcgatagagtgattttattttaaaaaaaaaatgttaaagaaggtaatgtatagagattgtggtgaattaagaagtatatatttatttttatttatttagataagagatattttttttatttaaagagtatttgttatttaattttagttattgttatgtaggaatgttgatttagtgttgttagattttttagttatttaagagaagttagagatttgaatttatatgtaaatttttttaatttttatatagtggtagttaatttatattttttaaatgttgtgtagttaaataaaatacgtttgttgtttgaatgtagtttatggaatattagtttgattagtattagtttagtgaaaaggtatgagttttatagtagaatagaattagatttgtattttaattttttttattttgtattgtttaatagtatttagggaatttttagtgtttcgtattgttttaaatgtattttttttatttagtttttgttttttggttaggtaataagttttgttaatttttttttcgaagagttttgttttaagttgggagtcgtggtttatgtttgttattttagtattttgggaggttaaggtgggtggattatttgagtttaggagttttagattattttgggtaatatggcgaaattttatttttataaaatttttttttttaattagttgggtatggtggtatgtgtttgtggttttagttatttgggaagttgaagtgggaggatcgtttgagtttaggaggttaaggttatagtgagttgtgatggtgttattgtattttagtattttagttcgggtattagagttagattttgttttaaaaaataaataaatgaataaatataaataaaaaataaaaagtttttatagtagtattttttttattttgtttattatttttatttttattggtataattaattattttagtatattaaagagtatattattttttaggattaaggtgtttatttttttagttgttgggcgtattatttgttaatatttattagttaaatttttttttaggagttgtttttagttgaagaaagttgttttttattaggttcgtttgtattgattggtagatgtagggtttagggtggggttgttttgaagggtttttttggtattagagtttttttaggattcggaagttgaggtatttgttgtaattatatttagtttaattttttttgtttaattttattttttttttgtacggtgttgattttaagggtaattaaatttatgagtgtggtcggatattatggtttagatttgtaattttagtattttaggagttgaggtaggtggatcgcgtgagtttaagagtttaagattagtttgattaatatggtaaaatcgtatttttataaaaaataaaaaaatttgttggatatggcggtgagtagttgttattttagttatttaggaggttgaagttggaggattgtttgattttaggaggtagaggttgtagtgagttatgtttgtattatt

SEQ ID NO: 179 - DNA, 6334 bp, Artificial Sequence
  chemically treated genomic DNA (Homo sapiens)
ttttattgtggggagttgttttgcgtattgtggaatgttgaacgttattattggtttttatttttagaggttaggaatattttttagttgtgataattaaaaaagtttttagatattgttaaatgttttttgtagggtagggattattatttgagaaatattgatttggaagagtaaagtgtaaattaggagagatatggatgaaattatttttagatgtaaattgtagttttattaattatggttgtgggtaaattatttttttttagttttatttagtttttttagatataaattgaggatattatatttattaaatgtggttttgaaaaaggttaaaatagtttgggcgcggtggtttatgtttgtaattttagtattttgggaagttgaggcgggtggattatttgaggttaggagttttagattagtttgggtaatatggtgaaatttcgtttttattaaaatataaaaaattatttgggcgtggtggcgtatttgtagttttatttattttggaggttgaggtaggagaattgtttgggttttagaggtagaggttgtagtgagtcgagatcgtgttattgtattatagtttgggttatagtgtaagattttatgttaaaaaaaaaaaaaagaagattaagataaataaagtatgtaaagtattttgtagagtgttgtatatggtaagtatttaaaatatggtagttattaatattgtttagattatagttgatatcgtaagtatttttttatgatcgttatttatttatttaatagatatttattaattggggtttgtgtgttagattataataagttttatttgaatttttttttagatttttatttggtgtatataattattatttgtgtttatttatttattattattttttgttttgagatggatttttatttttgttgtttaggttagagtgtaatgacgcgatttcggtttattgtaatttttgttttttgggtttaagagatttttttgttttagtttttcgattagttgggattataggtatttagtattaagttaggttaagtttttgtatttttagtagagacgggagttttattatgttgtttaggttggttttgaatttttgattttaggtgatttatttatttcggttttttaaattgttgggattagaagtgtgagttattgtgtttggtcgtatttatttttttttttttttttttttttttgagacggagtttcgttttgttgtttaggttggagtgtagtggcgcgatttcggtttattgtaagttttatttttcgggtttacgttatttttttgttttagtttttcgagtagttgggattataggcgttcgttattacgttcggttaattttttgtatttttagtagaggcggggttttattgtgttagttaggatggtttcgattttttgattttatgattcgttcgtttttgttttttaaagtgttgggattataggcgtgagttatcgcgttcggttcgtatttattttttatgaatggtattttttggggagttgggggttttattttgttatttaggttggtatgtaataatattattatggtttatgtggattttaatttttggtttggtgtgattatttcgttttagttttattgagtagttgagattgtaggtatattttattatataggttaatttttttttttttttttttgagatgaagttttgttttgttatttaggttggagtgtaatggtatggttttagtttattgtaatttttgttttttgggtttaagcgattttttttttttagtttttggagtagttgggattataggcgtgcgttattacgttcggttaattttttttgtatttttgtagagacggggttttattatgttggttaggttagttttgaatttttgattttaagtgatttatttgttttcgttttttaaagtgttgggattataggtgtgagttattatatttggtatatattggttaaatttttatttttttttgtagagatggggttttattatgttgtttaggatggtttcgaatttttggttttatgtgattttttaattttggttttttaaagtgttgtgattataggtgtaagttattgtgtttaatttgtgaatggtatttttaatattagtaaaagattttattatatcgatttttatttttggttttgattttttttttgggatttaaatttatatgtttagttggatgtttttttaggaatattaaatttggtatttggggttaattagtttagtgtttagtatttggtaagtttttttataaaaatgagttattattaattattagtgtcgttttttagtttttgttagttgatttatttttttttgttattttttattgggtttttagtgttacgtatttttttttttttttttttttgagacggagtttcgtattttcgtttaggttggagtgtagtggcgttatttcggtttattgtaagtttcgtttttcgggtttacgttatttttttgttttcgtttttcgagtagttgggattataggcgttcgttattacgttcggttaattttttgtatttttagtagagatagggttttatcgtgttagttaggatggtttcgattttttgattttgtgatttgtttgttttttaaagtgttgggattataggcgtgagttattgggttcggttcggtgttacgtatttttattagtagttatttgttgtttttgtggggagtttagaaaatttagttcggtttttttatttgcggggaagaaatgaagtaatgataatgaagatatttttatgttaagtttatattgttttgagtaattagttttggtggggagaatttgttagtagaaggtaggatataaagtttttatagtagttttattgggtgtggtagtaaattatttttgaggtttggtcggtgttattaggtatagtaggggttcgtgtagaagaattagatttattttattaatatatcgttatagtaataatgtttgttgagtatttcggaattgtaatttatattttttgaggttgtagtagggagaatttggaagtagggtagtatagtgttaattagtaggttttgggtgggatagatttgggtttgagttttagttttgttttttattatttgtattatagttagcgagtggttttattatattttttagtatttttatttgtggagttgggggggtgatgttaatgttagttaatatttatggggtgattattgttgttaaaatttagtatatcgggcgcggtggtttacgtttgtaattttagtattttgggaggttaaggtgggtagattatttgaggttagaagtttgagattagtttggttaatatggtgaaatttcgtttttattaaaaatataaaaattagtcgggcgtggtggcgggtgtttgtaattttaattattggggaggttgaggtaggagaattgtttgaattcgggaggcggaggttgtagagagtcgagatcgttttattgtattttagtttgggtaataagagcgaaattttgttttaaaataaaaaataaacgaaaaaatatagtaaattgtttttatttgattattaagagttattttaaaatagaatttattatttaagtatagaaaggtgtaattattttttttatattcgttagaatttttgatgatattaaataaataatatatgaatacggtttaaaaatgggtattatagagtataaaataaagaatgtttttatttttaatttaaatttagtaattttataggatgttaggtttagttttaaagttttatatgtatttagtgcgttgaaatttaataattttacgaggtaggtataattaataataattttaggcggggcgtggtggtttacgtttgtaattttagtatttcgggaggtcgaggcgggcggattatttgaggttcgagattagtttgacgaatatggagaaatttcgtttttaataaaaatataaaattagtcgggcgtggtgacgtatatttgtaattttagttattcgggaggttgacgtcggaaaatcgtttgaattcgggaggcggaggttgtagtgagtcgagatcgcgttattgtattttagtttgggtaataagagcgaaatttcgttttaataataataataattaataataataataataataataataataataattttaaagggaagtagagggatttggcgggaaagtgttagtaaatttaataggtttttataagtgtttttaaagttttataggggtcggtatatgtgattaattgttaaagaagaatattcgtcgtgtgttcgaaacgtagttttttggggcgttatattcggagtttatttgaatcgaagagtttttttttgggttaacgaaggatttaatttttttcgtttcggatttagtttttaagtggtttttcgggtaaggttagtagaggttcgtcgttttaattagttttgttagagtaggtataaaagtatttagagtgattgttattgtagttatttaacgtcgagtttaggtttgttttttttgtagttagagtgaaattttttattggtggagttattttaaaggaggcgggacggagcgggaaagttttgtttattttggtttttttagttaatcgtagtatttatgcgttagttttcggttcggttgcgttgcgcgtagtggtttgggcgatttgagggcggggtcgggagtaggtttcgggttgtggggagggtgcgtttttcgcgggcgcgcggagtgaggacggtgatagttacgcgcgcgcgtacgcgttcgatgtagcgcggtttcgtgattttagtcggtcgttgagaggcgcgcggagtttgggtcgttgtcgtttaggggtttcgtttcgaggcgttttcggtattttcggttcgaatttcggagtgtcgggtcgcgtttgtatcgaaggtttcggtttttgtgttttttttgtagtcgttagggttcgttttttaattttttttttcgtttaggtagggttttcgcggtttatgttggtcgttggggattcgcgtagtttagatcgttttcgggtcgggtagtcggttattatggtggttttgaggtttgtgtagtaattttaggggggttaaagggtttagagtgtaggtcgtggggcgcgagggtttcgggtttgagtttcgcgttatggtcggggttatcgtttttcgtatgagttttagtttttttaagaggaagtaatttaagacgtttatcgtgaggatcgttattatggacgtcgagatggagtttaattgcgaggtaatcggtcggtagtttcgattgttgcggtgatagtcgaggtggaagttcgagaggttttttttatattattttatgggtgtagttagagacgggtagaatcggaagggttaattaggtttaaaattttatgttaaagatgattgttgtttttttttataggatttttgggttttggtattttttgaaggttatttttatttattgttattggaagaagttggatgtttttgtgatagaaaatttaggattttagtgttaggtttaagttaggtttacgtttaaaagtttgaaagtttatttttttattaggtaatattgttatgtatttaggtattagaagttgcgttttgtttattggaaagttaatatttgttttttttttttaaagtttgtatattttgggaaaaaaaattttttgaagaacgatataatattttatatttattttttatatagtttttaatatgatgataatagttattaattgtttagtatttttaaagtgttagatatttgtatatttaatttttagaataaatttatttatttagtaaatggtaaggtggggttttgaattaagtttatagttcgtatagtattgttttttaagtaatttaagtttttgttgttaaaagtgtggtttgtggattagtagtattggtagtagtaagtaagggttggtatgttttttttgtataggattatatagtaaatatttttaattttgtagattagagaatttttgttggagttatttaattttttaattttattattgtaatataaaagtagttttagataagattagtttttagtatgatagtttaaggaatttatttttttgtaaaattggtgaaaatttttttttgttttgtttcgttttgagatagaattttattttgttatcgaggttggtatgtagtagtgtgattatggtttattgtaattttgattaatttttttggtttaattagtttttttgttttagtttttcgag

SEQ ID NO: 180 - DNA, 6334 bp, Artificial Sequence
  chemically treated genomic DNA (Homo sapiens)
ttcgagaggttgaggtaggaggattgattgagttagggaggttggttagggttgtagtaagttatgattatattattgtatgttagtttcggtgatagagtgagattttgttttaaaacgaaataaaataaaaaagaatttttattagttttatagaggaatgggttttttaagttgttatgttggaagttgattttatttaaggttgtttttgtgttataatggtagagttgaagagttgaataattttaatagagattttttagtttataaagttgaaaatatttattatgtggttttgtatagaaaaagtatgttaatttttgtttattgttgttaatgttgttggtttataaattatatttttagtagtaagaatttaaattatttgagaagtagtattgtacgggttgtgagtttggtttaaaattttattttgttatttattagataaatgggtttgttttgaggattaaatgtgtaaatgtttagtattttgaaaatattgaataattgatagttgttattattatgttggaaattatgtggaaagtaagtatgagatgttatatcgttttttaaagggtttttttttttagaatatgtaagttttagaaaagggaaataagtattggttttttaataaataagacgtaatttttaatatttgggtatataataatattatttaatgaaagaataaatttttaagtttttaagcgtaagtttaatttaagtttgatattgaaattttgaattttttattataggagtatttagttttttttaataataatgaatgaaaataatttttaggaaatgttaaaatttaaaagttttatgaaaaaaagtagtaattatttttaatatgaggttttgggtttagttggttttttcggttttgttcgtttttagttatatttataagatgatataaagagaatttttcgagtttttatttcgattgttatcgtagtagtcggggttgtcggtcggttatttcgtaattgaattttatttcggcgtttatggtgacgatttttacggtgaacgttttgggttgtttttttttgagagagttgaagtttatgcgggaagcgatggtttcggttatggcgcggggtttaggttcgggattttcgcgttttacggtttgtattttgagttttttagtttttttggagttgttgtataggttttagggttattatggtggtcggttgttcggttcgggaacggtttgggttgcgcgggtttttagcggttagtatgggtcgcgaggattttgtttgagcggaaaggggagttgggggacgggttttgacggttgtagggagggtataggagtcgggattttcggtgtaggcgcgattcggtatttcgggattcgggtcggagatgtcggggacgtttcgggacgggatttttagacggtagcggtttagatttcgcgcgttttttagcggtcgattagggttacggggtcgcgttgtatcgggcgcgtacgcgcgcgcgtggttgttatcgtttttatttcgcgcgttcgcgggaagcgtattttttttatagttcggggtttgttttcggtttcgtttttaggtcgtttagattattacgcgtagcgtaatcgaatcggaggttgacgtatagatgttgcgattggttgggaaggttaaggtaggtaggattttttcgtttcgtttcgttttttttggggtgattttattaatggaaagttttattttaattgtaaaaaaagtaggtttaggttcggcgttgagtggttatagtggtagttattttgaatgtttttgtgtttattttaataagattggttgaggcggcggatttttgttgattttattcgggaaattatttagaggttggattcggggcgaggggaattgggtttttcgttggtttagggagggatttttcggtttaagtaggtttcgagtgtggcgttttaggggattgcgtttcggatatacggcgaatatttttttttggtagttaattatatatatcgatttttatgaaattttaaagatatttgtggaggtttgttaggtttgttggtattttttcgttagatttttttgtttttttttagaattattattattattgttattattattattattaattattattattattgggacggagtttcgtttttgttgtttaggttggagtgtagtggcgcgatttcggtttattgtaattttcgtttttcgggtttaagcgatttttcggcgttagtttttcgagtagttgggattataggtatgcgttattacgttcggttaattttgtatttttattagagacggggtttttttatgttcgttaggttggtttcgaattttaggtgattcgttcgtttcggtttttcgaagtgttaggattataggcgtgagttattacgtttcgtttagaattattattggttatatttatttcgtgaggttgttgaattttagcgtattgaatatatataaggttttagagttgagtttggtattttatgaaattgttgaatttgggttgaaaatgaaagtattttttattttatattttatgatgtttatttttgaatcgtatttatgtattatttatttagtgttattaagggttttaacgggtgtaggggggataattatatttttttgtatttagataataaattttattttaaaatagtttttagtagttaaatagggataatttattgtgttttttcgtttgttttttgttttgagatagagtttcgtttttgttgtttaggttggagtataatggggcggtttcggttttttgtaattttcgtttttcgggtttaagtaatttttttgttttagtttttttagtagttgggattataggtattcgttattacgttcggttaatttttgtatttttagtagggacggggttttattatgttagttaggttggttttaaatttttgattttaggtgatttgtttattttggttttttaaagtgttgggattataggcgtgagttatcgcgttcggtgtattgagttttaataataataattattttataaatgttagttaatattagtattatttttttaattttataggtgaagatattgagagatatgatagagttattcgttgattataatgtagatagtgaaaggtaaagttaggatttaaatttaggtttgttttatttagagtttgttggttagtattgtgttgttttgtttttaaattttttttattatagttttaggaaatgtgaattatagtttcggagtatttagtagatattgttgttgtaacggtatattaatggaataaatttagtttttttgtacggatttttgttgtgtttggtagtatcggttaggttttaggaatgatttgttgttatatttagtgaggttgttgtggggattttatgttttgttttttgttagtaaattttttttattaaaattgattgtttagggtagtatgggtttggtatgggagtgtttttattattattgttttatttttttttcgtaggtgggagaatcgggttgggttttttgggttttttatagggataataaatggttgttgataaaaatacgtgatatcgggtcgggtttagtggtttacgtttgtaattttagtattttgggaggtaggtagattataaggttaggagatcgagattattttggttaatacggtgaaattttgtttttattaaaaatataaaaaattagtcgggcgtggtggcgggcgtttgtagttttagttattcgggaggcggaggtaggagaatgacgtgaattcgggaggcggagtttgtagtgagtcgagatggcgttattgtattttagtttgggcgagagtgcgagatttcgttttaaaaaaaaaggaaaaagaaaatgcgtgatattgggaatttagtgaggagtagtaaaaggaggtggattagttagtagggattaaaaagcgatattgatgattggtaatagtttatttttatgaaaagatttgttaggtgttaggtattgggttaattggttttaaatgttaaatttaatgtttttgggaggatatttagttggatatatgggtttgaattttagaagggaggttagggttaggaataaaaatcgatgtgatagaattttttgttggtattaaaagtgttatttataggttggatatagtggtttatatttgtaattatagtattttggaagattaaggttggaggattatatgaggttaggagttcgagattattttgggtagtatagtaagattttatttttataaaaaaaagtaaaaatttagttagtgtgtgttaggtgtggtggtttatatttgtaattttagtattttgggaggcggaggtaggtggattatttgagattaggagtttaaggttagtttggttaatatggtgaaatttcgtttttataaaaatataaaaaaaattagtcgggcgtggtggcgtacgtttgtaattttagttattttagaggttgagagaggaaaatcgtttgaatttaggaggtagaggttgtagtgagttgagattatgttattgtattttagtttaggtgatagaataagattttattttaaaaaaaaagaaaaaaaaattagtttgtgtggtggagtgtgtttgtagttttagttatttagtggggttgaggcgggatggttatattagattaggagttggagtttatatgagttatgatggtgttattgtatattagtttgggtgatagagtgagatttttagttttttaaaaaatgttatttataaagaataaatacgggtcgggcgcggtggtttacgtttgtaattttagtattttgggaggtagaggcgggcggattatgaggttaggagatcgagattattttggttaatatagtgaaatttcgtttttattaaaaatataaaaaattagtcgggcgtggtggcgggcgtttgtagttttagttattcgggaggttgaggtaggagaatggcgtgaattcgggaggtggagtttgtagtgagtcgagatcgcgttattgtattttagtttgggtaatagagcgagatttcgttttaaaaaaaaaaaaaaaaaaaaaagaataaatacggttaggtatagtggtttatatttttaattttagtaatttgggaggtcgaggtgggtggattatttgaggttaggagtttaagattagtttggataatatggtgaaattttcgtttttattaaaaatataaaaatttagtttggtttggtgttgggtgtttgtaattttagttagtcgggaggttgaggtaggagaattttttaaatttaggaagtagaggttgtagtgagtcgagatcgcgttattgtattttagtttgggtaataagagtgaaaatttattttaaaataaaaaataataataaataaataaatatagatgataattatatgtattagataagggtttgagggggaatttagatagagtttattatgatttggtatatagattttagttaataaatatttgttgaatgaatgagtgacggttataaagaaatatttacggtgttaattatggtttggataatattagtagttattatattttaaatgtttattatatatagtattttgtaaagtgttttgtatgttttgtttattttgatttttttttttttttttttgatatggagttttgtattgtagtttaagttatggtgtagtggtacgatttcggtttattgtaatttttgtttttggggtttaagtaatttttttgttttagtttttagagtaggtgggattataggtgcgttattacgtttagataattttttgtattttagtagagacggggttttattatgttgtttaggttggtttggaatttttgattttaggtgatttattcgttttagttttttaaagtgttgggattatagatatgagttatcgcgtttagattattttgattttttttaaaattatatttggtaggtgtaatatttttagtttatatttgaggaaattgaataaggttgaaaagaggtaatttatttatagttatgattggtagagttgtaatttgtatttaggagtggttttatttatattttttttgatttatattttgtttttttagattagtgttttttagatagtggtttttgttttataggggatatttggtaatgtttggagatttttttggttgttataattgggggatgtttttggtttttaagggtaaaagttaatgatggcgtttaatattttataatgcgtaggataattttttataataaag

SEQ ID NO: 181 - DNA, 6397 bp, Artificial Sequence
  chemically treated genomic DNA (Homo sapiens)
atgtttttataagacgaaatgatttggacgtggatatagagggataattatatgaggatagggagaagatggttatttgtaagttaaggagagaagtttttaagtaaattaatgttgttaatatattgttgttgaatttttagtttttagaacgataaaaaatatttttgttgtttaagttatttagtttgagatattttgttttggtagttttaataaatatattttttaagggtttatttttatttttggtttagtgtattttagttgatgattatagtttaattttttttttttttttggggttttttttttttgtattttttttttttatattttatataggtagatttgtttttgtttttttatttatattacgagtttcgtatagtttttttttttttggtttcggtttttttattaatttttttgttattaacgttattaattcgttaaattatttttttatttttttaaatttttattaattttggtattttataagtgttagttaaataaatgaagaattatattaattttttttttttttttttttattttaaatttttggtgagatttttttgtatttatgttttcgtttttttattttttatttatttgttagtttttttatttttggttttttttattatattgaaatatatttgaaaaagttatgtaagattatagttattgcgtattagtgttatttgagagttaataaagttttttttttttttaagatagcgagtagagtgaatagaagaaagattggtttttgtttttggttgtatagttatgtttcgaggtcgggtttaggattttataatttataaagttaattgtttttttttttttttattttttaggaattgtttgtagtatttgatattgttgagagtttttatattttttaaatttttttttttttggttttttgagttttttttttatttttgatggtattgtaggagtttttaagtattttttttttatattaattttagaaataaagttatttttcgaatttttgtatttagttttttgttttttaattttttgattattaatgttttagaaatatttttttgataattatcgtatttttgtagttgtttttatttttaacgttatgtttttttgagtagtagttttgagtttttaattgtatatttattagttatttttatatggatattttattaaatttgttatattaaatatgtttaaaatatgtatgtttatatgttatatgtatgtttggtatgtgggaatgtattatatttttatagatttttttttagttatagtgttattattttaattatttagattagaatatttagagttatttatgagttttttttttatttaaattgtatatataatttataaataggttttgttgattttattttttaaaaattttttatatgtttttttttatattattggataatagtttagtgtggtggttaatattatgtatattggagttaaatttgttaggtttaaattttgattttttttttatttattaattatgaaattttaggaaaattatttaattttttatttgtaaatatggggattataatggtgatttattttatatgattgataattaaataagtgaatacgtgtatagtaggtattaattatatgtttagtcgatttattttaattttttaattaattagaagaattgtagttttttgtttttttgtatttaagtggggttatggaatgtgggtagaagtgttgtgttatttttatttagaggtaattaaaaagaagatatattttttttatgtttttattgttaatgaatatattatatagattttaattttagaattttttttatattggtatttttaaaatagttttatgagaagggaaatttgtgtagttttaatgatttagtgatgttatggtttgggtatttgttttttttaaattttatgttgaaatgtgattttaattttggaggtggggtttaatgggagatgtttcggttatggaggtggattttttataaatagattgatgttattttttgtaaggaggagaggatgagtgagtttttattgtattagtttttatgagagttggttgttaaaaagtttggtattttttttttttttttcgttatacgatttttttgtatatattattcgtttttgttttttattgagtggaagtagtttgaggtttttattagacgtatatgttggtgttatgttttttgtatagtttgaagattgtgagtttaataaatttttttttattataagttatttagttttgtgtattttgttatagtaatataaatgaattaagataagtgataaatataaaataatttgttttttagataatattgatgtttgaaattttatattgaggtatttttttttttttcgtagtttgataatggtaaatattttttgatattttaggatggatgaatttgtaagagatatttttggaagtaggtttgtatagtgtagagaaaatgttgggtaataaagtaggaatggaggagggttaattagtaagttaaaaagtttttatagttttgtttgttgtgttgtatggaattatatttttttaaaatatatgtttaagttttaattataggtatttgtgaatatgagtttatttggaattaggatttttgtaaatgttattaagttaagatgaggtaatattggattggggtgggttttaaatttaatgattggtgtttttataaaagaaaggtgagggagagttgaatatagcgatataaaggaaatacggggaaggagattatgtgataatgtaggtatagaatggagtgttgtagttaagttaagaatggtaaggattgttggagttattagaagttaggaggaggtaaaggatttttttttagagtttttagagggattatggttttaatggtattttgagtttagaattttaggttttaggattgtgatagaataaattttcgttgtaagttgtttagtcggtggtaaatttttatagtagttttaggaaaatatgtttgtttaatattttattttgaattttaagtttattttatggaattattttgagtttggagtttgatttaattttttttagtaattaacgttttttattttttatttttaaatatgttatattggttttatttttataataattgtatttatttattttttggtaatggggttgttattttttgtagaatgaaaagtagagtgtgtatgtttatattttttttttttttttttttttttttttttttttttttttttttttttttagagtatcgttttgtttcgtttaggttggagtgtagtggcgtaattttggtttattgtaatttttgtttttagggtttaagcgatttttttgttttagtttttggagtagttgggattataggcgttcgttattacgttcggttaatttttttgtattgttagtagagatggggttttattatattggttaggttggttttaaatttttgattttaggggatttattcgttttggttttttaaagtgttgggattataggtgtgagttatcgtattcggtttatagaattttttaaaaagttattgtgtttagtttttatggattttttaaattttagttgtttagtttttcggagttaaatgagattatttaaaggtcgattgttggggtttttaaggtcgtttcggagatttattttataggtaattaaatggatcgttgggtttttgtgtgtgtgggttttttttgtttattttttttttttagaaaaatattttattaagaaggtttttataatttattggaggaggaggatggagagtgggtacgaaaggattaggatgaatatgttataagtaatttaaatgttattgtaatattgtttggtgaggatttgattattgatgttttaaagttaagtttttagttgttattttatttagtagtgaaataatgagttttaaaatatatatttcggtttaagtttttttatgtggggaggtaatttattcgaaggtatttttagtttgtatttaatatagtgtttagtattaaagtagtttagatgttagtgaatggtggttattgggaggtttgttagtgggtgttagtagcggtttttttagagaaaaagaaaatttttttttgttagattagtattttatgagttgtgaattaaaattattgttattattattattataattttatttatagtaattattataaaggtttaataatgttttgtagatgaatattttgagtaattgttttataattaggagatttaagatcgtattaaaaattagtagagggttatattttattgggtataagtcgtttatgataacgaaattgtagtttaatttgtgaagagatgtgaatgtaattgagatacgtttaaatggaatatatagatgagttttatttttatatttggtatgtttggatttatgtcgattttttagttgttcgggtttgtttttaggggttatggatcgtatgattttattagcggtattgttatcgtcgtcgttttcgtgttgtttgcgtttttcgattattgattgggttcggtaggcgttttttgggggtttttttatcggttttagtttttgggattcgggagcgttttgttaggaagttagagtttcgtaggggtcgcggcgtttaggtcgtttaacgcgcgtttttcgttcggcgtttcgaagcggtttcgaggggcgggagtcgaggcgagcggtaaggtcgggtcgggggcgtatagcgtttttagaagtgcgggttttttttattttcggtagcgattttatttttcgttttcgttgcgtgcgcgcgtgtgttcgtttgtttgtatgttttttcgacgttagtgggaatttttagttaggaagtgagagagtgagcgagatagaaagagagagaagtgtattagcgagtcggggtaggaagaggaggtttcgttatcggagcggttcggcgacgcgttgatagttttttttgtttttttcgtcggtcgggtcgttagtcgtcgtagttttcggtttgtacgtagttatcggtttcgttttcggagtttagcgtcgtcgaggtcgtagtcgttcggttagtaaggcggcgtcgtcgttcggttatcgcgcgttttgcgttttttttcgttcgcgttgcggttatggcgcggcgttgattggtttggttcggtttcgtcgcgttttcgttcgtttcgattcgtattcgggttcgttcgggtttcggtttgtcgtcgttttttttttttttagtcggtaggttcgcgtcgtttaggagggagagtttattcgcgttaggaggtcgaacgcggattcgttattcgggtaagttaaattcgggcgagtgggggttcggtaggggacgcgtggtttaagttttgtcgtttagtttttcgtattttttttagttttattcggatttttttatttttgcgttaatcgttgggttagatcgtgggaggaggttgatagtagttgagaggtatatgggattagcgatagcggggaaagatatattcggatttcgtaggggttagtcggtcgaagggtcgcggtcgttcggcggttatttttttttacgttttttcgcggggcgggaacgcgaatcggaggggaatttttataaatttttaaaatttttaattttagttttatttgggggatggtgagaaggttggagtgcgttgcggcgcggaggagagagggaaggtggttggtgtagtgtagaattagattttatttaagggcgttttatgaaatgaaagtagaagtgtttgttagtttttttggttgggaaagttttttttagttttttagaattgaataggagagtttatttattttttttttatttttaaaagaaatttggttcgttttttgtttttttttttttttttttttttttttttcgtgcgcgcgcgcgcgcgtatatatatatatatatatatatatatatatatatacgatatagttatttgttataggatttgattttgatttttcggggtttggtatttgagagagaaaataaattatttatttggatatttagagtattttttagatttgattatgtaaaatttttggatagtgttattatgtattatgtatgatcgttgaaataaaaataatgtaaaaataaggtttattttaaatgtaagtttttttatggtttttaaaaatagatattagggaatgtttgttttgatttgttggtttattttgaaatttaaatgggatttaatgatataggatttaattattaagattgatatgtttatggattttgttaagtagaggtttttagtattatagtttatgaaataatta

SEQ ID NO: 182 - DNA, 6397 bp, Artificial Sequence
  chemically treated genomic DNA (Homo sapiens)
tggttattttataaattgtaatgttgaaaatttttatttaataaagtttatgaatatgttaattttgataattaaattttgtattattaagttttatttgagttttaggataaattagtaagttagggtaaatattttttggtgtttgtttttaaggattatagaaaaatttgtatttaggataggttttgtttttatattatttttgttttagcggttatgtataatgtatggtggtattgtttaagagttttatataattaagtttaaaaagtgttttaagtatttaggtaggtaatttatttttttttttaaatgttaggtttcggaggattagaattaagttttatagtaggtgattatatcgtgtgtgtgtgtgtgtgtgtgtgtgtgtgtgtgtgtgcgcgcgcgcgcgcgtacggagggggggaggggggagagagagagagatagagagcgagttaggttttttttagaagtaggagagggatgaatagatttttttatttaattttggggagttggggagggtttttttagttaagaggattgataagtatttttgtttttattttatggaacgtttttaggtgaaatttggttttgtattgtattaattattttttttttttttttcgcgtcgtagcgtattttaatttttttattattttttaggtggggttggggttggggattttaaaagtttgtaagagttttttttcggttcgcgttttcgtttcgcggagggacgtgaagagaaatgatcgtcgggcggtcgcggtttttcggtcgattagtttttgcgaggttcggatgtgttttttttcgttgtcgttaattttatgtgttttttagttattgttaatttttttttacggtttagtttagcggttagcgtaggaatgaggaagttcgagtggggttggagggggtgcggagggttgggcggtaggatttgggttacgcgttttttgtcgggtttttattcgttcgagtttggtttattcgggtggcgagttcgcgttcggttttttggcgcgggtgggtttttttttttaagcggcgcgggtttgtcggttggagaaggaagaggcggcggtaggtcggagttcgggcgggttcgagtgcgggtcggggcgagcgggagcgcggcggggtcgggttaggttagttagcgtcgcgttatggtcgtagcgcgggcggagggaagcgtagggcgcgcggtggtcgggcggcggcgtcgttttattggtcgggcggttgcggtttcggcggcgttgggtttcgggagcggggtcggtggttgcgtgtaggtcgagggttgcggcggttggcggttcgatcgacgggaagggtaggggaagttgttagcgcgtcgtcgggtcgtttcggtggcgaaattttttttttttgtttcggttcgttggtgtatttttttttttttttgtttcgtttatttttttattttttggttggaaatttttattgacgtcgagagagtatatagatagacggatatacgcgcgtacgtagcgggggcgggaggtagggtcgttgtcgggggtgggggaagttcgtatttttaggggcgttgtgcgttttcggttcggttttgtcgttcgtttcggttttcgtttttcggggtcgtttcggggcgtcgggcgaggggcgcgcgttaggcggtttggacgtcgcggtttttgcggggttttggttttttagtagggcgttttcgaattttaagggttggagtcggtagggaagtttttaggaagcgtttgtcgggtttaattaatggtcggggaacgtaggtagtacggaggcggcggcggtggtagtgtcgttgatagagttatgcggtttatagtttttaagggtaggttcgagtagttggagggtcggtatggatttaagtatgttagatataaaaataaagtttatttgtatattttatttaagcgtgttttagttatatttatatttttttatagattaaattataatttcgttattataaacgatttgtgtttagtaaagtataattttttattggtttttggtgcggttttaaattttttggttatagagtagttatttagaatgtttatttataaggtattgttaggtttttatgataattattgtggatagaattatagtgatggtggtagtaatggttttggtttatagtttataaaatattgatttggtagaggggagttttttttttttttgaagagatcgttattggtatttattgataggttttttagtggttattatttattggtatttgagttgttttagtgttgggtattgtattaggtataggttggggatattttcgggtggattatttttttatataagaaagtttgagtcgaaatatatattttagagtttattgttttattattgggtggagtgataattgaaagtttagttttaaaatattagtaattaggtttttattaggtaatattgtagtggtatttagattgtttatggtatgtttattttagttttttcgtgtttattttttattttttttttttagtaggttataaaaatttttttggtggagtgtttttttggaaaaaaaaaataaataaaaaaaatttatatatataaaaatttagcgatttatttgattgtttatgaggtgagttttcgaggcgattttggaggttttaatagtcgatttttaagtgattttatttagtttcgggaggttgagtagttggaatttagaggatttataaagattgaatataatgattttttaagaaattttgtgagtcgggtgcggtggtttatatttgtaattttagtattttgggaggttaaggcgggtggattttttgaggttaggagtttgagattagtttgattaatatggtgaaattttatttttattaataatataaaaaaattagtcgggcgtggtggcgggcgtttgtaattttagttattttagaggttgaggtaggagaatcgtttgaattttggaggtagaggttgtagtgagttaagattgcgttattgtattttagtttgggcgagatagagcgatattttgagaaagaaagaaagagagagggagggagagagggagggagggagggaggtgtgagtatatatattttattttttattttgtaaggggtggtagttttattattaaaagatagataaatataattgttataagagtagagttagtgtgatatatttgggagtaaaaaatgaagagcgttaattattgaaaaggattaaattaaattttaaatttaaaatgattttataaaatgaatttaaaatttagggtagggtgttgagtaggtatatttttttggggttgttgtaaaaatttattatcgattgaatagtttataacgggaatttattttgttatagttttggagtttaaaattttgaatttaaggtgttattaaggttatgatttttttgaaggttttagggaagaattttttgtttttttttagtttttggtagttttagtaatttttgttatttttggtttggttgtaatattttattttgtgtttatattgttatatggttttttttttcgtgttttttttgtgtcgttatatttaatttttttttattttttttttatgaagatattagttattggatttagagtttattttaatttagtattattttattttaatttgataatatttgtaaagattttagttttaaataaatttatgtttataggtatttgtggttaggatttgaatatatgttttggggggatgtaattttatgtagtatagtaggtaaaattataaaagttttttggtttgttgattaatttttttttatttttgttttgttatttaatattttttttatattgtataaatttgtttttaggaatattttttataaatttatttattttaaggtgttagaaggtatttgttattattaggttacgaagaggaaaaaaatgttttaatgtggaattttagatattaatattgtttaaaagataagttattttgtgtttgttatttgttttagtttatttgtgttgttatggtagaatatataagattaggtagtttataatgaaaagaggtttattaggtttatagtttttagattgtataagaagtatggtattagtatatgcgtttggtgagggttttaggttgtttttatttaatggaaggtaaaggcgggtggtgtgtgtagagagatcgtatggcgagagagaggggagagatgttaaattttttagtaattagtttttataggaattaatgtagtgagaatttatttatttttttttttttgtagggaatagtattaatttatttgtgagggatttatttttatgatcgaaatattttttattaggttttatttttaaaattggggttatattttaatatgaggtttagaggagataaatatttaaattatagtattattaaattattgaaattatataaatttttttttttatgaagttattttggaaatattagtgtggagagaattttgaggttgagatttgtgtagtgtgtttattggtaatgagaatataggaaaagtatgttttttttttaattgtttttgagtaaaggtgatataatatttttgtttatattttatggttttatttagatgtaagagagtagggaattatagtttttttggttggttaggaggttgaaataggtcggttaagtatatggttaatatttgttatatacgtatttatttatttggttgttagttatataaagtggattattattataatttttatatttatagatgaaaagttgaataatttttttaaggttttataattagtaaatagaaggagagttaggatttgaatttaatagatttggttttagtgtgtatgatattaattattatattaaattattatttaatgatataaaaaggagtatgtaagagatttttagaagatgaggttaataggatttgtttatagattatatatgtagtttgagtgagaggaagatttatagatagttttgagtgttttagtttgagtgattagaatagtaatattgtaattgggaaaaaatttgtgggaatgtaatgtatttttatatattaaatatatatgtaatatgtaaatatatatattttagatatgtttagtatgatagatttagtgagatgtttatatggaaatgattaataaatatgtaattgaaaatttaaggttgttgtttagagagatatggcgttggaaatggaaataattgtaaagatgcgatagttgttaggagagtgtttttaaaatattagtggttaaagagttaggagataaggggttaagtataggaattcgaggaatgattttatttttggggttggtatgagagagagatgtttaaaaatttttgtagtgttattaaaagtgggaggaaagtttagaaagttagagaagagagagtttaaagggtatgagagtttttaatagtgttagatattgtagatagtttttaaaggatggagaggggaagagatagttgattttgtgaattataaaattttaagttcggtttcggggtatggttgtgtagttaagggtagaaattagttttttttttgtttattttgttcgttgttttggaggaaaagggaattttattaatttttaaatagtattgatacgtagtggttgtggttttatatgatttttttagatgtgttttaatataatgaggaaaattaagaatgaggagattgataagtgagtgggaaatggggaaacgagggtataagtgtaaaagaattttattaagagtttggagtgagagggaaggaaagaggagttagtgtgattttttatttatttgattaatatttatggagtgttagagttaatggaagtttggaaaggtggagagatagtttaacgagttaatagcgttaataatagaaagattaatgagggagtcggagttagaagaaaggagattgtgcggagttcgtaatgtaggtgaggaggtaggaataaatttgtttgtgtgagatatgaggaggaagagtatagagaagagaggttttaagaagagggggaggattaggttataattattagttgaaatatattaaattaaaaatgagaataaatttttagagaatgtgtttgttagggttgttaaaataaaatattttagattgggtggtttaaataatagaaatattttttatcgttttagagattggaagtttaatagtaatgtgttggtagtattggtttatttgagggtttttttttttggtttgtagatggttattttttttttgtttttatgtggttgtttttttgtgtttacgtttaaattatttcgttttataaggatat

SEQ ID NO: 183 - DNA, 5686 bp, Artificial Sequence
  chemically treated genomic DNA (Homo sapiens)
atttttggggagttttaggttttgtatggtgaaggggaaatataggattttgggggaggagtttaggtggtacggtgaggagttagtttgttgcggaagggtagagggtatgagttaaggttaaatttagagtgatttttttttttttttttggttttaggtaattggttttgaaggtatttaatgagcggttgaagagagtggaagattagtttatttggtttagtatggatgatgatgaagaggagtttggggttaaggtggatagttttttgtttttagataaagtttttatatttttagggaagggggttgttttagaatttagtttaattattttcgaggtagttttttcgacgttgtaattttagattattttgagtgtggtatttttttttttaagttttttttgatatttttttagttattttagggtatttgattgttttgaggagagggaagaaggtttgttggggttttttatggttttttgttgtttttcgttaatattatttaggatttttgttatttggttttaattttagataattattatgttaggttcggagtttttgaggtatcggttagtttaggtttttatttgaggtaagaatgtatattagttggtagttttaagtaagtggttgtagggatattgatgttatagtttttgggtcggtttttatatttgaaattggttgtcgagagttttgagttaaggtaaggatttgttaaaaatgttttgggggtttagtaaatgtaggagtcgatttggggttgtatatttttgtttatttttagaaagattgtttttgttaggatttgtttttttttgttgtggcggtgattgtttttggattagaatagttttagtttttaggtattttttataggattatttgagtgggtagttaagtttaggttcgtagtattaataaagtagttttttgaggaatgatttttgggtttttgttaggttattttgtgtagtttttttattacgtttaattgtaatgttagatagggatttgattgtttttatggtaattttagttggataagaagtttattgttttagttttttattatcgttattattattattatatgcgtattgttaagtagttttttaagagttattgttttagatttttattttttttttttttttttttaaattttaatttgggaggttttttgtttttgtttagatttgatgataagggtttttttattataaggcgttgtttttatttatggtttatttttaagatagaatgtttagtttttgttatttttggagataatttatttttagtttttagttattgtatgtatttaatttttatagtttggagattttagtatagtagatagttggggggatagaaaggatatatagttgtattatttatagttatagttttagggtttgttagggttcggagtggtttgggaggtttagtagttagattttggggatttgtgtgttaggagagttttagttttttagggagtagttaggggtcgggggtggggggtttttattttgtttagttgtttatttttttgtgttgatggtattaataagaattatttttaattttgggttgttttttttattaatttttttagttattttttataaattttttattttttttttttttaaaatttttgaatatatagtataagtatgagttgttttgtaggagaggtagttttgtagttttagttttatttagatatatgatgtttatgtttttttgggatgatagagaaaggggaaggaaatgggaggtattttagtatgaggagtaggaatttatatacgggtttttaaatgtttaattgttttagtgtttgaggtgttttttgatttagttgagagagtttaataggtttttaggtttagtttttatatggaggggtaaatttaggttttttttaggttgggaagagtttatggttggatttttttgcggtataggtaggtattgtttatttggtttataatgattaagttggtgaggatagggtataatatagttaggtattaggttgtattagtgatagaggtagtgaattagagtgagtatatgtttagtaagaggttggtattatttagtaggtagtttattagtttagaagtagtatggtatagtttgagtttcgttaggggttatcggggtagtagtttggggtagagtagttttattttatttgagtattgtagttttgtttatagtatagttagtagttttgtttgtttatgtcgcgtaattaggtgggttttgttaagttgttttttgtggaggatgataaggtcgaggtttagtagtgtatatagtagggttagtagttgtagtatttagtggtagcgtgttcggttttttcgtgagagggagtgtagtagcgaatttttaggagaaaatattagtagtgtttcggttattaggaaggagaattgaggaaataggggatgggaagtttaagtgagggtgttgttttagaagaggagaagagggttttatgtaatttttagttgttagtgagtttgggttgatttttttttttttttttttttttattgataagattatttatttggtggggtaagagtggaaaattttatttgggatgatatatgtgttttgaataatttttatatttttttttaggtgttagtttgaaatgttatttgtcgtatgttattaagtaaatatagggtttgagatgtggtagttataaatgatttataagttttgtttttttaacgtggggttggatataattttttggtaagagttggttatatgggtgtattgttttagggaaagttaggtgtattattagaaattaaagtaaaaagggatagaggtatatttaaatgtaatgttttagttttttgtttagaggtgggtgaagttttattgtgtttagataaattttatttatttgatttgggttttgggtttttattattttgatttaagtttttttttttttttttttttttttttggagatagtttttttttgttatttaggttggagtgtagtggtttgatttcggtttattgtaattttcgtttttcgggtttaagtaatttttttgttttaggtttttgagtaattgggattataggtatttgttattatatttagttaatttttggttttttggggggtttttttgtttttgggtttttttttttttttgggatagagtttcgttttgtcgtttaggttagaggttagagtgtagtggcgtaattttggtttattgtaattttcgttttttgggtttatgcgatttttttgttttagtttttcgagtagttgggattataggcgcgtgttattatgttcggttaattttttgtatttttagtagagacggggttttattatgttggttaagatggtttcgattttttgattttaggtgatgtgttcgtttcggtttttaagtgttgggattataggtatgagttatcgtgtttagttttaagtttgaaatatatattatgggtaggagtagttggagtatgtaatttttttaaatagatattaaatgtggataaagatttagaggttgttagggttattaattatgtttatgtttttatttttaagaattgtttaggtttattatttatagttaaagatataagtatcgggtgttaggagaataggtttggaatgagaagaggaggttttatggggttgaggtaagaagaaattagttatattaatttttaagggttgaggaatattagtagtttattatttaaggaggtgttgttaaattgtgagtttttttttgttttgtaataagttgattttatatttattttttttttttggtttttttttggattagaggttatgttttgttatttttttggtagtttttttttttttttttatattttttgagaggtagttaaatggagtatttagagaaggaaagataaattaggaattttgtgtgttttggttatatttatttgttttattttatttatcgttttagtatagaatttttttaattagttaggtttgttttcggaagttttattgttttttttttttaggaatagtggtttttttttttttagaagttagttatgaattttatttattggagttaggtttggtaagtatagttataaagatggtaaagtttagggttataaggtgggcggtagcgttagaagtagtacgtagagttcggtagatgtgtgattcggttttcgtagaaagggttatcgttagtcgtgttagtggttgtagtttgaaagtatagtagcgtgggttaggattttaggtgtttattgtttattttttattggagaaaaggttgtaaggtaggaatgttatttttttttaataagttatggtaggaaagaatagtattaagattagtattaggaatggttataatatgttagtcgacggtcggcggtttgttaacgtgtatttatgtttgaattggtattaatcgttggttcgttttttaggtaggaggcgtaaagttatgtaagattataaattttagcgtgtattacgtcgtcgtcggtagtagagttagttgggagggcgcggagtattatggaaattgtagttttttgttgcggttttagttatagcgtgaattttttagcgtatcgtttttttaagtgttgttagtatgttgtttttttacgttagggatttgtttgtttttgtcgtagcgtagatttgatgcggtggttttttttaaagaaagcgggatatttcgggttttgtcgcgcgtatcgtcgtttcgttacggagtcgttttattttcgggtgcgacgtttatttatttaggattttttgggacgagtcgtttttcgttttagttacgtttttgagtcgcgttgcgtaggcgttattgggtagagggattggtaagtttgcgtgttttagcgatataggtttcgaggttgtttttgataagtgtttataggaggtggggacgtttttgcgcgaggaacgaggagttacgggtttgggttcggttattgttatgggtagcggttgtcgtatcgaatgtatattttttagcgagttttattttacgttgggatttaagattatttattaggtgttattcgggttcgcgggattgggcgggaagagggacgttttcgagagtttaattggttgtttgaaggtagtagtttttcgtgttgtacgtaggtatgttgttttattcgtagataattgtgaggttagaggatagttagatttaggttttcggtttttaatgtggtagggaagatatacgttatattggtagtgtttgtaggatatcgggttgtagggattcggttggggggttttaggttttatagaaggtgagttgggtgatttatgagtatttttgaattgagtgaagagtaaatgatgtataggaagtttaggtaaggtaggagaaagtgttttaggtagagggaatagtatatgtagaagttaggaaggaggtgagattatagcgtatgtttggaaatagaaagaagtaataggtttgagtggatgggagagaggggaacgttggagaagaggatttgggtttggggggtatgaggaggttattatttgtattatatttagtatagatgtttattgaggggtttattgttatttttttttttagg

SEQ ID NO: 184 - DNA, 5686 bp, Artificial Sequence
  chemically treated genomic DNA (Homo sapiens)
tttggggaggggagtggtaatgggttttttagtggatatttgtattgggtgtagtataaatggtgatttttttatgttttttaagtttaagtttttttttttagcgttttttttttttttatttatttaggtttattatttttttttgtttttaaatatacgttatgattttattttttttttggtttttgtatatgttgttttttttatttggaatatttttttttgttttatttaaattttttatgtattatttattttttatttagtttagggatatttatgggttatttaatttattttttgtgggatttggaattttttaatcggatttttatagttcgatattttataaatattgttaatgtgacgtatgttttttttgttatattgggagtcgggggtttgggtttgattattttttagttttatagttgtttgcgaatgaagtagtatgtttgcgtgtagtacgggaaattattgtttttaggtagttagttgagttttcgagaacgttttttttttcgtttagtttcgcgagttcgggtggtatttgataggtgattttgggttttagcgtggggtggaattcgttgaagaatatgtattcgatgcggtagtcgttgtttatggtaataatcgggtttaggttcgtagtttttcgtttttcgcgtagaggcgtttttattttttgtgaatatttgttagagatagtttcgaggtttgtgtcgttggggtacgtaagtttgttaatttttttgtttaatggcgtttgcgtagcgcgatttagaggcgtggttggggcgggggacggttcgttttaggaagttttgggtgggtagacgtcgtattcggaagtaaagcggtttcgtgacggagcggcggtgcgcgcggtagggttcggagtatttcgttttttttggaggaaattatcgtattagatttgcgttgcggtagaggtaggtaagtttttagcgtggaggggtagtatgttggtagtatttggggaggcggtgcgttaagggatttacgttgtaattgggatcgtagtagggaattataatttttatagtgtttcgcgtttttttagttggttttattgtcggcgacggcgtggtatacgttgggatttgtagttttatatggttttgcgttttttatttggaaggcgggttagcgattggtattagtttagatatgggtatacgttgataggtcgtcggtcgtcgattggtatgttgtgattatttttggtgttggttttggtattgtttttttttattataatttattggaagagggtggtatttttgttttgtagttttttttttagtgaggagtgaatagtgggtatttgagattttggtttacgttattatgtttttaggttataattattagtacggttgacgatggttttttttgcggagatcgagttatatatttatcgagttttgcgtattgtttttggcgttgtcgtttattttgtggttttgggttttattatttttgtggttgtgtttgttaggtttggttttagtaagtagaatttatagttgatttttgggaagggaagggttattgtttttggggaggaagggtagtgggattttcgggaataggtttggttggttgagggaattttgtgttggagcgatgagtgaggtggagtaggtaggtatggttagggtatatagaatttttggtttgtttttttttttttgggtgttttatttggttgttttttaggaggtgtaagggaaggagggaggattgttagaggagtggtaaagtatggtttttgatttaggaagaggttaggaagagaggataggtgtggggttagtttgttgtagagtaagaaggggtttatagtttggtagtatttttttgggtgatgggttgttggtattttttaatttttaaggattggtatggttggtttttttttgttttagttttatgaggttttttttttttattttaggtttgtttttttggtattcggtgtttatgtttttggttgtaagtagtgggtttgggtagtttttaggggtgggagtatgggtatggttggtggttttggtagtttttgaatttttgtttatatttaatatttgtttggaagagttgtatgttttaattatttttgtttatggtatatattttagatttgaggttgggtacggtggtttatgtttgtaattttagtatttagaggtcgaggcgggtatattatttgaggttaggagatcgagattattttggttaatatggtgaaatttcgtttttattaaaaatataaaaaattagtcgggtatggtggtacgcgtttgtagttttagttattcgggaggttgaggtaggagaatcgtatgaatttaggagacggaggttgtagtgagttaagattgcgttattgtattttaatttttaatttaggcgatagagcgaggttttgttttaaaaaaaaaaaaaaatttaaaaataaaaaaattttttaaaaaattaaaaattagttgggtgtggtggtaggtgtttgtaattttagttatttaggagtttgaggtaggagaattgtttgaattcggaaggcggagattgtagtgagtcgagattaggttattgtattttagtttgggtgatagagagagattatttttaaaaaaaaaaaaaaaaaaaaaaagagatttgaattagagtaatgaagatttaggatttaggttaaatgggtaagatttgtttaagtataatgaggttttatttatttttaggtagaaagttgagatattgtatttggatgtatttttgtttttttttattttaatttttggtgatgtatttaattttttttgaaatagtgtatttatgtggttagtttttgttaagaaattgtatttagttttacgttagggaaataaagtttgtgaattatttataattgttatattttaaattttgtgtttgtttggtaatatacgatagatgatattttagattggtatttaggaggaagtgtggagattatttagggtatatatattattttagatggggttttttatttttgttttattaaatggatagttttgttagtggggagagaaagaaaaaggggaattagtttagatttattggtagttaagggttatataaagtttttttttttttttttggggtagtatttttatttgagttttttattttttgtttttttagtttttttttttgatgatcgaggtattattggtgtttttttttgagagttcgttgttgtatttttttttacggaaaggtcgagtacgttgttattgggtgttgtagttgttggttttgttgtgtgtattgttgggtttcggttttgttattttttataaagagtagtttggtaaagtttatttggttacgcggtatgggtaggtagggttgttggttgtgttgtgggtagggttgtagtgtttaggtggggtggggttgttttattttaagttgttgtttcgatggtttttggcgaagtttaagttatattatgttatttttgggttggtgggttatttgttgggtagtgttagttttttgttgggtatgtgtttattttggtttattgtttttgttattggtgtagtttggtatttggttgtattatgttttgtttttattagtttggttattatgaattaggtgagtaatgtttatttatatcgtaagaggatttaattatgagttttttttagtttaggggaagtttggatttgtttttttatgtaggagttgggtttagggatttgttgaatttttttagttgagttaggggatattttaggtattgggatagttgggtatttggaggttcgtgtgtgaatttttgttttttatgttggagtgttttttattttttttttttttttttgttattttagaggaatataggtattatgtgtttggatgaagttggggttgtaagattgttttttttgtaaggtagtttatatttgtattgtatgtttagaaattttaggagagaaaaaagtaaaaaatttgtaaaaaatgattgaaaagattgatgggagaagtagtttagagttggggatggtttttgttaatgttattagtataggaaaatgggtagttgggtaagatggggattttttattttcgatttttggttgttttttgaggggttgaagtttttttagtatataaatttttagggtttagttgttgagttttttaggttatttcgggttttggtaggttttagagttgtagttgtgaatggtatagttgtgtgttttttttgtttttttaattgtttattgtgttggagtttttagattgtgggggttagatatatataataattgggagttgggggtgagttgtttttaggggtggtaagaattgagtattttgttttagagataaattatgggtaagaatagcgttttatgatggagaggtttttattattagatttaggtagggatagaaggttttttagattggggtttggagggaaagaaaaaaggagtaagagtttgaggtaatagtttttggaaggttgtttggtagtgcgtatgtggtggtggtggtggcggtggtggggagttggggtaatgggttttttatttagttggagttattatggagataattaagtttttgtttaatattgtagttgaacgtgatgagggggttgtataaggtggtttgataagagtttaggagttattttttagagaattgttttattgatattgcgagtttgggtttggttgtttatttaagtggttttgtagaaaatatttgggagttggagttgttttggtttagaagtagttatcgttatagtagagggaaataaattttgataggaatagtttttttggggatgggtagggatgtgtagttttaggtcggtttttgtatttgttgggtttttagaatatttttggtaaatttttgttttggtttagggttttcggtaattagttttagatgtgagggtcggtttaggagttgtggtattagtgtttttgtagttatttgtttggggttgttagttgatgtatatttttattttagatgagggtttggattggtcgatgttttagaggtttcgggtttggtatagtggttgtttggagttggaattaggtagtaagagttttgggtagtgttggcgagaaatagtagaaggttatggaaagttttagtaggtttttttttttttttttagagtagttaggtgttttggagtagttgagaggatgttaaggggggtttgggaggggaggtgttatatttaaggtggtttggagttatagcgtcgggggagttgtttcgaaggtgattagattggattttggggtagtttttttttttgggggtgtgggagttttgtttgagggtagggggttgtttattttggttttagatttttttttattattatttatgttgggttagatggattggttttttattttttttagtcgtttattgagtgtttttagggttagttgtttggggttagaggagagaggaaaggttattttgggtttggttttggtttatgttttttattttttcgtagtaggttgattttttatcgtattatttagattttttttttagaattttatgttttttttttattatgtagagtttgggattttttagagat

SEQ ID NO: 185 - DNA, 5718 bp, Artificial Sequence
  chemically treated genomic DNA (Homo sapiens)
aaaaaaaaaagttaggtgtggtggtttatatttgtaaatttaatatttcgggaggttaaggtgggtagattatttgagtttaggagtttgagattagtttgggtaatatggtaaaattttgtttttataaaaaatgtaaaaattagttagttatggtgtgtgtttgtagttttagcgatttaggagttgaggtgggaggattattcgagtttaggaaattaaggttgtagtgagtcgttgatcgttattgtattttagtttgggtagtagagcgagattttgttttaataataataatgataaaaattttttatttattttgtaattattaagaggatggttagaagtttttgttttttatttgttttttttatgttttttattattgttgattgagtatatttgtttggatgttgaaaattgttaggtagttgaattttttggtatagtttttatttgtagtttgtatcgggttttaggtaattttatattgtagggtagggtttagtatatatggtggtttttttttgtgattatagttataattatttgtttatatattgtttttcgttgtttttttattataatagtagagttggttagataggatgatttgtaaatttaaaataatatttttcggttttttaggaaaatggtttttggtttttgatttggaaaaaggaatttatgtgagggagttagaattcgaataaaaaaaaaggaggtggggtgttaaatttatttaaattgtttttgtttgtgttcgtttagttgtttattggtttattgagtatgggataaaagtatttttggttggtttatattgtgaatttgggaagaagatagttttgtgaatattggtaatttatagtgtttaaaatttaggtaatgggattgtaaatgatagtattttttgttttaatttataaatgtagtttaaaattgtttattagttaataaagtattgatgggagttgtgatatttttatttggttttatggtagtatttaatatttaggattttatttaagttttaaggtgaaatttttgagtattgaaaatgtaaatatattttaagtaatataatatatttttagtagttatataaattttttagggttattagtagaggattgttgtgaaatattagtttttagattttgtatttgttttataggcgatatgaaaggtgaggtttatttatttggtatcgttgggatggttaataaaggggattgtttgtagaaaggggagagcgttaagttttaattgtgtgttttgggttaaaatgtataaattatggtttataatattatatttttgcgtagggttatagtggaatgtgtgaaagattaggtaagtgttagtatttttgtatttgaatttgatttttttatgagttggtaattaaaatttttaaatatttttagttaaggggaaattattaatatttattcgtttttttatttttattttatttttttttagttatttgaggtagtttaataaaaatagaaaattatataaaaagtgattatattagtaatgagaaagtaagattggtattagtaattaatattatgtaatggggaaaataagttaggggtgagatttttagaatagaaggattatatggttttgtatatttttgtttagagttttttttgtatattatataaatatagaaattacgtttaaaagtatttaaaaaataagtttagggtaaataaatttagttttatttttgagattttagggaaatttgagtttttagaatgttttttattagtatagagaataataatattttgtatggttgttattataatttagtttaattttagaggggatttaaataatatatatgttgaagtaatagttttttgatgagtttgtttaatttaaaaagtttagtttataatatacgaaggaataaggtaagttttatttgtttggtttaagtttgtgatatagtgaatggtatttttagagatatattttttttttgataggttttgttataggtagttggattggagtattaatattaatattatgttttatatatttttttagataggggtaggtattgtgttttatttagagtgaggtgtggtatgtttttttttttttatttattttttttttttagtttggttttattaattatgaagtaggagatagtaagaagttttttttttatgtgaaagaagtttaggatggtattgagttataggtaggagatgaggtggagtttttagtgatttttaattagcgtattggtaagtgtagcgtttgtaatgtttggcgagtttggtgagttttgttgttgtggtttgattagtaattattttggagtgttttaattttatagtttttgttttgttatattatttttttgtgttttgttttttgttatttattattttttgatattttttatttttagttgaatataaaaagattgtttagtatatgttttttaaaatttttgttaaatttttttttttttattaagttatttttaggttatatgttatttaaaattttaatagtttagttatgttgatttataatgtcgttttgtttttttagagatagttttatagtttgattcggttatttaggcgttattacgatttattgtagatttaattttttgggtttaagtaatttttttacgttagtttttttagtagttgggattataagtatgcgttattatatgtagttaattttattttttgtagagatatggttttattgttttgtttaggttgatttcgaatttttgggtttaagtgttttttttgttttgtttttttaaagcgttgggattataggtgttagttattatatttgttattttgtttttttatgtatttgtggaattggttatttttgattgtatttaagtttagggtttgtaaatgattttttttatttttattaagttgggattttgagttggggataataatatataaataaatttgtttgttttgtttttttagttaggtatatgaggtaagagttttattataaaaagtgagttatttgggtagttaggtggaaaatatatttttttgtaagtgtttgttgtttgtttattaagtgtggtttttttttattttttgatttaattatagtgagggttttaaggttgttgtagtttttcgatttgatcggttggttaatcgtttgaagaatattattttggatgatgttagtgtttttcgtttaatggtttttcgttagttaaggggattagataatttaatggtatgagggtatataaggtttgggggaggttaattgatagattaatataaaatatgtggttttatttaaataataggttaggaaatttaatgaagtagggagatttttatattgtttataattagttaggattttttatatattggtttagttttttaatttaatggttgtttatagtaagaagtatatttttttttttgatgttttgaagatagtttaggtaatgaatgggttaggagtgtttattgtggatttttttttttaggaaagaattagtattgtataagatgattaaaaataatgtttttgtagttttatttcggaatagtgaatgtattatgattgttgtgcgtttaaattattaattgtagggtttttttttttttttttttataggggtttggtgtagaaagaaagattcgttaagttggtgttattgattaattatatttataaagtatattattaatttattatgattaagttggggggaatttggtgaagggttttgaatatttttttttttatttttttcgaaatttggaatatttattttattgagttattatattagttttaatatttttttcgtgttatgtttaaaaaaataaataaatttaagaaaattattttaaataatgtatagttgtagtttggaaaaatttaaggtggcgttttatagtattaattttaggagttttatttggtgtatttaacgtaattggtaattgtagaatttattttgtttgtgtaagtgaaaaatatagattgttattttgttggttttatgaaattttgtattttttattatatattttatttttattaattatttttggtaagatgttttgttttagtatttagttgtattttttttttttttttttttgtttattatgttttaattttgaggattatatgagggtagaatatattattttttaaaaattataaaaatttgtataggtaaattattttttaaagttgatggttaaattttaaaatgttattttttatattatttataattttgttataatttatttaaagaagtttggttatattttagtgaaaatttttttttagagtaggttttttttcgtgggttggggggtaattttattataattagtaagtatggtgtagaattttatgtaaatgaggagtgttagtagtgtgataatttaaatatatttaaataaaaataaaaaaaatgaatgtataaatttgttgttgtttagattattgtagtttttaggattcggttttttttattgatttaaaaataaaataaaaaaaaataaaaaagttgtgtttgaaatgaattttgtttttttttataagtagtcgtttggttattgtgttttgtaaaatatagatatttgatttttggtgtagtttttgtttaattttatattacgggaatggatgggtttgattttttggttttttttttgaattggttatatatagggtttttggttagtggattgaaggttttgtttaagatgataagggttagtttaggggatgtgggggagggcggttttatttttttttttgtcgtttgaggttttgatttttgggtaaagaggtcgtttatttttgtaaatacgaaatatttttgttttttttagttttttgttaatggcgaaagaatggaagcgaataaagttttattgatttttgagatattagtatttagcgtttttattattgaaacgtttcgtgtgggaggggcgggtttgggtgcggtttgtcgtatgattcgtggttcggaggtttacgtggtcggggcggggatttaggcgtttggggcgtcgattgattacgtagcgggcggggtcggaagtgtcgttttttggtgggggttgtttatggcggtttcggggtttttaatatttttttcggttgtggttttaaatttgtttaaagtagaggtagtggagtttgaggtaagtttattttatgtatagtgttcggttttgggttgtggaatgtttaggcgttttattgatgttagaaatggagtagaatttattagttggagataaaggttttgggcgggggtttttttatttggtgtttacgtggggagatttttggagatagaagggagaatgggaaggagttgcggtttggaggttttttgttagagttgagaagttttcggggagtaataggaagggggatttttattgtttaggttgagggcggggtttaaggattgttgaaaaatagttaaggatgggggttgttagaaaattattttagaagtgtgaggtcgatattaattcggtgtttttgcgttttttagttattttaagaattaaatggaaggttatattagggtttttatttttattgattatagaaagttttaaagtattgtagatgtggttcgttaattaattttgattattggtttttaatagg

SEQ ID NO: 186 - DNA, 5718 bp, Artificial Sequence
  chemically treated genomic DNA (Homo sapiens)
tttgttggaaattagtaattagggttaattggcgagttatatttatagtattttaaagttttttataattaatggaaatgaaaattttagtgtgattttttatttggtttttaaagtgattagagaacgtaaaaatatcggattaatatcggttttatatttttggagtagttttttagtaatttttatttttagttattttttaatagtttttgggtttcgtttttagtttaagtaatggaaatttttttttttattatttttcgaaggttttttagttttagtaggaagtttttaggtcgtaatttttttttatttttttttttgtttttaaagatttttttacgtaggtattaaatggaaggattttcgtttaaggtttttgtttttagttgatagattttgttttatttttggtattagtgaaacgtttgaatattttatagtttaaagtcgaatattatgtatgagataaatttattttaagttttattgtttttgttttggatagatttaggattatagtcgggaaaaatgttggagatttcggaatcgttatgaatagtttttattaaggagcggtattttcggtttcgttcgttacgtaattagtcggcgttttaggcgtttgagttttcgtttcggttacgtgggttttcgaattacgagttatgcggtaggtcgtatttagattcgttttttttatacgggacgttttaataatgaaagcgttaggtgttagtgttttaaaaattagtaaaattttattcgtttttattttttcgttattaatagaaaattggagaaagtaaaaatgtttcgtgtttataaagataaacggtttttttatttagagattaaaattttaaacgataagggggaagataaaatcgtttttttttatattttttgagttgatttttgttattttagataaagtttttagtttattggttagggattttgtatatggttaatttaagaagagggttaagaaattagatttatttattttcgtgatataaagttgaatagaagttatattaagggttaagtgtttgtattttataggatatagtaattaggcggttatttataaaaaaaaataagatttattttaggtataatttttttatttttttttgttttgtttttaaattagtaaaagaaatcgggttttagaagttgtagtgatttaagtagtagtaagtttgtgtatttattttttttgtttttgtttaaatatgtttaaattattatattgttggtattttttatttgtatgaaattttgtattatatttattaattgtagtaaagttattttttaatttacgaaaaaaaatttattttggaagaaaatttttattgaaatataattaaatttttttaagtggattgtgataagattataaatgatatgaaaaataatattttaaaatttggttattaattttaagaaatggtttgtttatataaatttttgtaatttttaaaagataatatattttatttttatatggtttttagaattaaagtataatgaataggaagaaaaaggaaaagaatgtaattgagtgttaaggtagaatattttgttagaagtaattaatgaaggtagagtatataatgaaaagtgtagaattttatagggttaataagataatagtttatattttttatttatataggtaaagtggattttgtaattattagttgcgttaaatgtattaaataaagtttttaaaattgatattataaggcgttattttaagtttttttaggttgtaattgtgtattatttaaaatggtttttttaaatttatttatttttttaaatataatacgaggaaggtgttaaaattggtgtaatagtttaatagaataagtattttagatttcgggagggatgaagagggagatatttagaattttttattagattttttttaatttgattatagtggattaatggtgtgttttgtggatgtggttagttaatgatattagtttgacggatttttttttttgtattaaatttttgtgggggggagaaaaaaaaaattttgtagttaatgatttgagcgtataataattatagtatatttattatttcgaaatgaaattataaaagtattatttttaattattttatgtagtattaatttttttttagaggagaaaatttatagtaagtatttttgatttatttattatttaaattgtttttaaagtattaagaaaagaaatgtgttttttattgtaagtaattattaggttagggggttgaattaatgtgtagaaagttttaattagttataagtaatatggaagtttttttgttttattaagttttttgatttattgtttaaataggattatatattttatgttggtttattagttggttttttttaagttttgtatgtttttatattattgagttatttggtttttttggttgacgaagaattattaggcgaggagtattggtattatttagagtgatattttttaagcgattgattaatcgattaggtcgaggagttgtaatagttttggggtttttattgtaattaagttaaaagatgagaagaaattatatttggtgggtagatagtaagtatttgtaaaggagtgtgttttttatttaattgtttaaatgatttattttttatgatgggatttttgttttatatatttagttagaaagataggatagataagtttgtttatgtattattatttttaatttaaggttttaatttaataggaatggaaggaattatttgtagattttagatttgaatgtaattaagagtgattagttttatagatgtataaaaaaataaggtagtagatgtggtagttaatatttgtaattttagcgttttgagaggatagggtaggaggaatatttgagtttagaagttcgagattagtttgggtaaaatagtgggattatgtttttataaaaaataaaattggttgtatgtggtggcgtatgtttgtagttttagttattggggaagttgacgtgggagaattgtttaggtttagggggttgagtttgtagtgagtcgtgatagcgtttgggtaatcgaattagattgtgagattgtttttggggaagtaaagcggtattatgaattagtatggttaaattattagaattttaagtagtatataatttagaaatgatttaatggaagaagaagaatttggtaaaaattttaaaaaatatgtattaaataatttttttgtatttaattagaagtaggaagtattaagaaataataagtggtagaagataaggtatagaaaagtgatgtgataaaatagagattataaagttgagatattttagggtagttattaattaaattataataataaaatttattagattcgttaaatattataggcgttgtatttgttagtgcgttgattaagaattattgagaattttattttattttttgtttgtagtttaatgttattttgaattttttttatatggaaaaagagttttttgttattttttattttatagttaatgaagttaaattgaaaaaaaaaagtaggtaaaaaagagagggtatgttatattttattttgaatgaagtataatgtttgtttttatttaaaaggatgtataaaatatggtattaatgttgatattttagtttagttgtttgtggtaaaatttgttagggaagaaatgtatttttgaaagtgttatttattatattataaatttgaattaaataaataaaatttgttttgttttttcgtatattatgaattaagttttttgaattaagtaaatttattaggaagttgttattttaatatatatattgtttggattttttttagaattaagttgggttatagtagtagttatataaaatgttattattttttgtattgatgaaaaatattttgaggatttagatttttttgagattttaggagtaagattaagtttgtttgttttaagtttattttttaagtatttttgaacgtggtttttgtgtttgtgtgatatgtaaaagaagttttaagtaaaagtgtataaaattatatagtttttttattttggaaattttatttttaatttattttttttattgtataatattagttattaatattaattttatttttttattgttaatatagttattttttgtgtagttttttgtttttattaagttattttaaatgattgaaaaaaggtgaagtagaaataaaaaaacgaatgaatgttgatgatttttttttggttgaaaatatttgaaggttttggttattaatttatagaaggattaaatttagatatagagatgttggtatttatttgattttttatatattttattgtggttttgcgtaggggtgtgatgttgtaagttatagtttgtgtattttggtttaggatatataattggaatttgacgtttttttttttttgtaggtaattttttttgttggttattttaacgatgttaaatggatagattttattttttatatcgtttgtaaaataggtataaagtttaaaagttagtattttataatagttttttgttgatgattttaggaagtttatataattgttaaaaatgtgttatgttatttaaaatatatttatatttttagtatttagaagttttattttaaagtttaaatgaaattttaaatgttaaatattattatggaattaaatgagaatgttatagtttttattagtattttattagttgatgaataattttaaattgtatttataaattaaaataaaaaatattgttatttataattttattgtttaaattttaagtattatgggttgttaatatttataggattattttttttttaagtttataatatgagttaattaaaaatatttttgttttatatttaatgagttagtaaataattaggcgggtataggtaaaaataatttagataaatttgatattttattttttttttttttgttcgaattttggtttttttatataggtttttttttttagattagagattaaaaattatttttttaaagggtcggagagtattattttaggtttgtaagttattttgtttaattaattttgttgttgtagtgagaaagtaacgaaaaataatatgtaaataaatggttgtggttgtgattataagaaaaggttattatatatgttgagttttgttttatagtatgaagttgtttggagttcggtgtaggttatagataaaaattatgttaaagaatttagttgtttaataatttttagtatttaggtaaatgtatttagttaataatagtggaaaatatgagaaaaataggtgggaagtagaagtttttaattatttttttgatgattatagggtaagtgaagaatttttgttattgttattgttgagatagggtttcgttttgttatttaggttggagtgtagtggcgattaacggtttattgtagttttgattttttgggttcgggtgatttttttattttagtttttgagtcgttgggattataggtatatattatgattggttaatttttgtattttttgtagagatagggttttgttatgttgtttaggttggttttaaatttttgggtttaagtgatttgtttattttggtttttcgaagtgttgggtttataggtgtgagttattatatttgattttttttttt

SEQ ID NO: 187 - DNA, 6565 bp, Artificial Sequence
  chemically treated genomic DNA (Homo sapiens)
tattaataggaattgttgttttttttttttgtaatgtttttgtatattagtattaaggtaatgttggttttataaaatgaattggaaagtatttttttttttttatttttttagaagagtgtgtatgaaattggtatttttttttttttattgttttgtagaatttattaatgaagttatttgggagtggagttttttttgtggaaagttttaaattagatatttaagttttataatagatataggattatttaggtaatttgttttttttatagtgagttttattggttttttattttttatagaatatgtttattatatttaagttgttaaatttatttgtataaagttgtttataatatatttatagtatttaatatttatgaaatatttagtgttttaattgtttttattattgttattggttttttgtgtttttttttttttatttttgattagttggattagttgtttttattgatttttataaagaattagtttttgatttaattaattttttttattggttttatgttttttattttattattttttattttgttttgtattatttttttttttttgtttatttcgtgtttaatttgttttttttttttttttgattttttaaggtggaagttgaggttattggttagagatttttttttttttttgatataggaatttagtgttataaaattttttttaaaaattgttttagttgtattatataaattttgatatatagtgttttatattttttttttgatttgttttaattttattcgttttaattttttgcgtgtttttttttttggttttaggtagttttattatttgtatgtgttaattagtattatgttgaatatttgagaggaattttttgtagatgtttatagttttttttgggtaatatttttttttttgttattttgttttgtgaattttgtattttttgattttttttgagttagtttttttaatttaggtagatggtttttgtttgggttttttttttttgaacgatgatttttattgttttatatttattgttttaattttaatatattttgtttagtgttttggttatatgattgagagaataaattcgttttttattattttattttaattagaagttggtagtatttttgtttatttttttataatttagtattggatgttaaaattaatgtattgagttattatatgtatttagaaatgaaatggtgtagaagagaaaaggatatattagtttatgtattaagggtaagtaagttttgtattatgatattttttttttagttagtatatgtttttatgtatgtgtttattgggttgtgatataaaaggtattttttattgtggattatggttaaaagagtttgagaaatattgttttaggtatattatggtttagtgtaggtaggaatttgtagtatttaatttttatgtttgtatttaagggatttagaaaaaagttatttttatattgtttatttgaaaaatgtttattattttttataaaggtgtgatttgagaatttttgaagtgatttttgggatatattttataggttttaaaatcgaggtagatttataattttattagttaagaaatagttattgattattagtgtgttttagatattgtttatggaggtgtttagttattagtatgaataagtgggaggttttttttggtttagtattgaagtttatttggttattaaatgagatagaaagtaaggtaaggttttaagtagtgttaggagtatttagaacgtaaggaagatttgaaattgtgaaggtgagaaggagcgtgtttgggggaattatttaggtttttgtagatttagaggttaagaaagtgagattttttttattttattttatttatttattaaaaatatatatatattttaatatttattatgtttttgagagatattaatgaataaaatagataaaaatttttgtttttatggagtgtatatttttttgggagaaattttaaaaatatatataataagtaaattatttgtttaaaggataaattgttatggttgaaatagtagagtagaagtagggtgattagaagtaggatcgtaaattttaattttaagtgggagatagtggaatatatttagaatttaattataatagtagtatatatttattttaatagaaattttataaatattttaatataattagatttttttggtgtataaattatcgtaagattgtttattttttatatcgtattgatatgttgtagttattagggcgaaaatgggtcgttttttagaaaaatgggtttagagtatgggagtgtgagagaaatgtgggtgattacgtatatattttttttttttttaagtgttttttaggggttttttcgtttaaggtttattgataagataggcggagttttacgtgcgtttgagattaggttatttttgtttttggcgttttttttttggcgcgtttttatttagtagagaatagaggcgtagtttaggagtaaattttagtttggtcgtttattattcgatgtgtgttatagtcgagtgatagtggtgagatagatttgttggttttgttttcgggatttgtagtaagatttttgggtgttgtttaagaattttcgcggttatatttagcgtttaggatttgtataaaaaagttttaatagatgttttacgtttttttcgtaataattaacgtttggtttagattcgagtatttattttaacgttcggttttttgattttttttatttttaaattttgcgggtagattagtgattattattatattttgaacgagattttaatttattgttttttttcgagagaaggattgttcgtttttttttttcgggtaggagttcggcgaggttaggagagtcgcgtatcggtcgggtagggacgcgtaggcgtcgggcgtcgttggttgcgtatttggcgttagagcgcgtttttagcgttgtgttcgtcgcgatcggggttatgggttggtgtttcggagcgtgtcgggcgtttttttttcgcgcgggggtattagagttttcggaagtgttaggtattgcggtgtatttttttagtttttttttaaatgattgcggaaaaatagatttcgagtcgtaaaagggaagacggatttttagataaggtttgtaaatgtttcgtagttattatttaattgtattcgtagaatagttacggtttgttattcgattttttcggatcgtttaatttgtttttagtgagatttcgaggttttgttcgcgtttggttttttcgtagttggatgtatatcgtgtttcgggtagcgcgggcgtagggtacgcgttcgcgtatattttagtatatatgaatacgcgtaaggtacggtaggggagtaagggtttgggatgttttacgtgggggtgggtatcgcggggagtgaatttacgatttgggaatggttatatttcgttaggttaaaggatgagagaaaatgacgcggcgttatatatcggataggttagggtggttatcgagtatttagaatacgtattaggcgcgtttttttttttttatatgtttttatttttcgggcgtgtgatggtagaaaacggtaggaaaaagatttatttagagagttagaattgtgtttggagatttttttttttttgtaaaagtattaataggaagtttttttaaaattatcgatttttaaataggtggttcggaatgggggcggtgatttttggttattaatgtagaatacgttttggtgtttataatatttatttatttttaggatagtttgtttttttttttaggtagggtgggaaaggagaacgcggggagggagaagggagggaggatttttataataagaattagcgtattttttagagttgaattaagtacggtttttattttaaaaagggagatagtttttatcgcgattgtagaagagattgtggtgtgaattagggatcgggaggcgtcgaacggaggaacggtttattttagaggtatttggatgtaaatgtatatatatatatagatatatatacgtacgcgcgtgtatgtttatacggttaggatgtgtgcgtgtgtgcgcgcgtgtgtgaatttttatatgttgttgttgtttgtttttggttagtggtatcgatgttttttttttttttgttcgtttttagattttttttttttttttggtgtttttgtttggagggtgttatgggtttgtgtgtgtatgagcgtgtgtgtgtttttggattttagattaattttttggagtttttgtttttgttttgcgttagtttttacgttatttcgttagtagtagtagaggcggcggcggcggttttcggattgggttggagtaggagtttcgttggttgtttcgttcgcgttttacgcgtttagttttcggcggtagtaggagtttggatttaggcgtcgtcggcgggcgtgaggcgtcggagttcgggtgagtagcgtagatagtgttttcggtcgtttcggtttttattgtttttttttggggcggtttcggttattttttaggtgggacgtgtcgcgttatttgttcgcgttatcggtatttagcggtcgtggcggattttgtagtattattcgggggtttcgtcgcggagttaaagtcgtcggtagttttcgtatttttttttaaagggtttttcgttcggtttgtattatggaattttgttttggggattttttttttatttttttttttttgggtttaggttcgaagagagagtgggtatattggtggttttagcggcgttagtgttatcgcggggtaagttgatttttgggtcggagttgggtatttatttatttatagttttcgggttggggtcggggtggggatgacgcgagtagagagggagagtgttttaattagtggtgttgggggttttacgtttagttttacgcgtgtttgtttgtttttagtttcgaggtgtatatcggatttttattcgtatttaataaggaatttgcgttttagagagtttcgggagcgtcgtcggtcggtgttcggcgcgtcgggttatgtatcgacggtcgtcgcggagtttcgagtagcggtagcgtttttttgtaaagcggttcgttatgtcggggttattgtgaattttgtcgtttgtcggaatatttttcgtttcggattagtttagtttttgataagttggattcggtacgttcgtaataagtatcgaggaattaagagagtcgtaagcgtagggaaggtttttcggtacgggtgggggaaagcggtcggtgtagcgcggggataggtattcgggttggtattggttgttagggatgtcgttttggataaggtggtatggattcgttatggcgcggttttggggtttttgttggttggttgtgggtttttggagggtcgttttcgtttgttttacgttttgtaaatgtagtgtttttcggatttggtgtagcgattttttttttggtatcgtggtattttcgagattggagtttaatagtgtagattttgagaatattatcgaaatgtgagtttttggagtttttttttttttttttttttgtttttagggttcgagttggttaggtgggtaggttttggaagtgaatgttgttttaagagtggggagaagttaaagataagagatgtaggatagggttatttgttagttatttgttgttttattggtttgggattgttagtgtagggagaagtgtgatattttagaataagttttaaatatagatatatatatgtcgattatatatttatttttcgtgggaaggaatttattatgttttttatattttaaagttttgttgggtgtgttttaggtttttagtatgtattaatttagttttgggtatttttgttttataaagtgttgtgtgtatgttgtgttagaagttttattaatatttattagaaaagaggttaaaataattaatttttttaaatttgttgagggaagtgatagttttttttttaatattttttttgagatttaagttaattaatttttttttttattttatatatcggattttgtttaggagatggtatttagagatggttttgaaaatgatttgtaagaggagaagttttgagtgttgaaatgtattcgtttaaaagaaaaaaatatgatagttggaagtttaaaagtttggtttaatttaatttggatttgattttttagagatatgattttgagattatttggattataatttttaattgtttattgaataattttttaggattaggttggatgataaagtattgggtagaattttgatgaaggttggttttagtattggatttttgtgtttttggaaatgtttgagtttgttgtggtttgaagaaatagaattgtgtatttttattttttttttttgatgttttgtgataaatgtattattaagtaagaatttgttagttttttttttagtatttttgtgttatttttattggattgttattgttattattttttttttgaaggatgttgttattttatatattttatt

SEQ ID NO: 188 - DNA, 6565 bp, Artificial Sequence
  chemically treated genomic DNA (Homo sapiens)
aatgagatgtatggaatgatagtattttttaggaaaaaaatgataataataatagtttagtagaggtgatataggaatgttagagaaaggattggtaagtttttgtttggtgatgtatttgttataaagtattagaaaaggagaatagaaatatatagttttgtttttttaagttataataagtttaaatatttttagggatatagaggtttaatgttaaagttagtttttattagagttttatttagtgttttattatttaatttagttttgggaaattatttaatgggtaattaagagttataatttaagtggttttaaaattatatttttgggaagttaagtttaaattaaattagattaggtttttaggtttttaattattatattttttttttttgagcgagtgtattttaatatttagaatttttttttttatagattatttttaaggttatttttggatgttattttttaagtaaaattcgatatataaaatgaaaagggaaattggttaatttaaattttaaaaaagatgttaagggagagattgttattttttttaatagatttgggaaagttaattattttaattttttttttagtgaatattaatggaatttttaatataatatatatatagtattttatgaaataaaaatgtttaaaattaagttagtgtatattgaaagtttaaagtatatttagtagagttttgaaatataaaaagtatagtgagtttttttttacgaggaataaatatataatcggtatatgtatatttatatttgaaatttattttaaagtgttatatttttttttgtattagtagttttaagttagtgaaatagtaggtaattgatagatgattttgttttgtattttttgtttttgatttttttttatttttgggatagtatttatttttaggatttatttatttggttagttcgggttttaagggtaaggagaaaaaggaggaaaagttttaggaatttatatttcggtgatgtttttaggatttatattgttaggttttaatttcggaaatgttacgatgttaggagaagggtcgttgtattagattcgagaggtattgtatttgtaggacgtgggataggcgaaagcggttttttagaagtttataattagttagtagaagttttagagtcgcgttatggcgggtttatgttattttatttaggacgatatttttagtagttagtgttagttcgagtgtttgttttcgcgttgtatcggtcgtttttttttattcgtgtcgggaggttttttttgcgtttgcggtttttttaatttttcggtgtttgttgcgggcgtgtcgagtttagtttattagaggttgagttggttcggagcgaagagtgtttcggtaggcggtagggtttatagtggtttcggtatagcgaatcgttttataggggggcgttatcgttgttcggagtttcgcggcggtcgtcgatgtatggttcggcgcgtcgggtatcgatcggcggcgttttcgggattttttggggcgtagattttttgttagatgcgaatgggggttcggtatgtatttcgaggttgaggataaatagatacgcgtaagattgagcgtaggatttttaatattattaattggggtattttttttttttgttcgcgttatttttatttcgattttagttcggagattgtggatggatgagtgtttagtttcggtttaggaattaatttgtttcgcgatggtattgacgtcgttggagttattagtgtgtttatttttttttcgagtttgagtttaagggaggggaggtagggaaagggtttttaagataggattttatggtataggtcgggcgaaggattttttaaaggggaatgcggagattgtcggcggttttggtttcgcgacggggttttcgaatgatgttgtagaattcgttacggtcgttgggtgtcggtggcgcgggtaggtggcgcggtacgttttatttggggagtagtcgaggtcgttttagggggagatagtgagggtcgaggcgatcgagggtattatttgcgttgtttattcgggtttcggcgttttacgttcgtcggcggcgtttgggtttaggtttttgttatcgtcggggattgagcgcgtagagcgcgagcgaagtagttagcgaggtttttgttttaatttaattcgggagtcgtcgtcgtcgtttttgttattgttggcgaagtgacgtgagggttgacgtagagtaggggtagaaattttagaaaattagtttgaaatttaaaaatatatatacgtttatatatatataaatttataatattttttagataaaagtattagggaggggaggggaatttgggggcgagtagggaggagggaggtatcggtgttattggttagaagtagatagtagtagtatgtgggagtttatatacgcgcgtatatacgtatatattttggtcgtgtagatatgtacgcgcgtgcgtgtgtgtgtttgtgtgtgtgtgtgtatttatatttaggtatttttaagatgaatcgttttttcgttcgacgtttttcggtttttaatttatattatagttttttttataatcgcggtagaggttgtttttttttttgaaatggaaatcgtgtttggtttagttttgaaaaatgcgttgatttttattataggaattttttttttttttttttttttcgcgttttttttttttattttgtttaaaagggagggtaagttattttaaaaataaataaatgttgtaaatattaaaacgtgttttgtattggtaattaaggattatcgtttttatttcgggttatttatttggggatcggtggttttggaggggttttttgttggtgtttttgtagagggaagggagtttttaaatataattttagttttttaagtgggttttttttttgtcgttttttgttattatacgttcgggaaatagagatatgtgaggggaagggagcgcgtttgatgcgtattttaaatgttcggtggttattttggtttgttcgatgtgtggcgtcgcgttatttttttttattttttaatttgacgggatgtagttatttttagatcgtggatttatttttcgcgatgtttatttttacgtagggtattttaagtttttgtttttttgtcgtattttgcgcgtgtttatgtgtgttagggtgtgcgcgaacgcgtgttttgcgttcgcgttgttcggagtacgatatgtatttagttacgaagaagttaggcgcgggtagagtttcggggttttattagggataaattaggcgattcgggagggtcgggtgataaatcgtaattattttgcgggtgtagttaaatgatggttgcggggtatttgtaagttttgtttgagaattcgtttttttttttgcggttcggaatttgttttttcgtagttatttaaaagagaattgggaaaatatatcgtagtgtttgatattttcgagggttttggtgttttcgcgcggggagagagcgttcggtacgtttcggagtattagtttatggtttcggtcgcggcgggtatagcgttgggggcgcgttttggcgttagatgcgtaattagcggcgttcgacgtttgcgcgtttttgttcggtcggtgcgcggtttttttggtttcgtcgagtttttgttcgggggaaaaaggcgggtaatttttttttcgagagagagtaatgggttggagtttcgtttaaaatatagtaatagttattgatttattcgtagagtttggggatgggaaggattaagaaatcgaacgttagagtgaatgttcggatttaggttaagcgttaattattacgaagggaacgtaaaatatttattggggtttttttgtatagattttgggcgttgagtgtaatcgcgggaatttttggatagtatttaaaaattttgttgtaggtttcgaaagtaaggttagtaggtttattttattattgttattcggttgtaatatatatcgagtggtgaacggttaggttgaagtttatttttgagttgcgtttttattttttattaggtgaggacgcgttaaggaagagacgttaagggtaaaaatgatttggttttagacgtacgtaaaatttcgtttgttttgttagtgaattttaagcggagaagtttttgaggaatatttggggaaggaaggagtgtgtgcgtaattatttatattttttttatatttttatattttgagtttatttttttaagaaacggtttattttcgttttagtggttgtagtatgttaatgcggtatggagaataggtagttttacggtggtttgtatattagaagaatttaattatgttggaatatttgtagagtttttattagagtaaatatatgttattattatagttggattttaaatatattttattattttttatttaaaattaggatttgcggttttatttttaattattttatttttgttttattattttaattatagtagtttgttttttggatagataatttatttattatatatatttttaaaattttttttagaagaatgtatattttatgaaggtagggatttttatttattttatttattgatattttttaaggatatagtaggtgttaaaatatatgtgtatttttaatgaataaataaaataaaataaaggagattttatttttttaatttttaagtttgtaagaatttggataatttttttagatacgtttttttttatttttataattttaaattttttttgcgttttgagtgtttttagtattgtttaaaattttgttttattttttgttttatttagtagttagataggttttagtattgggttagagagggttttttatttatttatgttagtaattgaatatttttatggatagtgtttagaatatattggtgattagtagttattttttaattgatagaattgtggatttatttcgattttaagatttataagatatgttttagagattattttaaggatttttagattatatttttgtaagagatgatgaatattttttagatgaataatatagagatgatttttttttagattttttgaatgtaggtatagaaattaagtgttgtaggtttttatttgtattgaattatgatgtatttagagtaatgttttttaaatttttttgattatgatttataataagaaatgttttttatattataatttaatgaatatatatataaaggtatatattaattaaaaaagaagtgttataatataaaatttatttatttttagtatataaattaatatattttttttttttttatattattttatttttgaatgtatgtaataatttaatatattgattttaatatttaatattgagttgtaaaaaaataagtaagaatattgttaatttttgattaaaatggagtaatagggaacggatttgtttttttaattatatgattaaaatattgaataaaatatattaaagttaagataatggatataagataatgaaggttatcgtttagagagaaggaatttaggtagaggttatttatttaagttgaggagattagtttaagagaaattaaggagtgtagagtttataagatagagtagtaaagagaagagtattgtttagaaagaattatggatatttgtagagggttttttttaagtatttagtatagtgttgattgatatatgtaggtaataaagttatttgaggttagagaaagaagtacgtaaaagattaaagcgaatagagttaaaataaattaaaaggaaaatgtaaaatattatgtattagaatttgtgtgatataattaaagtagtttttagagggaattttatagtattaaatttttgtattaggaaagaagaaagatttttaattaatgattttagtttttattttaagaaattagagggaaaaaaagaataaattaaatacgaggtaagtagaagagaagaaataatatagagtagagtggaaaataatgaaatagaaaatataaaattaatagagaaaattaattaaattaagagttggttttttgtgaagattaataaaaatagttagtttaattgattagaaataaaaaagagaaaatataaaggattaataatagtaatgagagtaattaaaatattgaatattttatagatattaaatattatggatatattgtgaataattttatgtaaataaatttaataatttaaatgtaatgaatatattttatgagagataaaaagttaatgaaatttattatagaagaaatagattatttaaataattttatatttattgtaaaatttgaatgtttggtttaaaattttttataaagaaaattttatttttagatggttttattggtgaattttataaaataatgaaggaaaaagaatattaattttatatatatttttttagaaaaatgaagaggaagaaatattttttaatttattttatgaggttagtattattttgatattgatatataaaaatattataagaaaagaaaataatagtttttattaatg

SEQ ID NO: 189 - DNA, 5263 bp, Artificial Sequence
  chemically treated genomic DNA (Homo sapiens)
ttagagaagagaggggtagtgagtagttttttgggtggtttgtagaaaagaggtgagatttttttttgagggtttaggtggtagtattagtacgagggtggtagttttagggtgttggtttcgttatgttaaagttaaggatatttaaggaatggagttgtttgagaatagagtcgaaggttttggagtggttggtaatgagttttttgttattgaaggtgtttaagtaggatattattagtaggtagttttaattttttggtaggtgtttgtttaagatattgggatttgagtgggagttttgagttggtttttttatggttgaatttttttgtttttttggattattttggtgtttgattgtttttttttgtgggtgggtttttattttttatgtatggttaaaattttttttttggatttagagtttttggatagtattatatatttttagtttttaattaggtttagatttgttttttttttttgtaatttatgtttgggttatttaagaaatagaattttttttttagtttaagtttagatttgttagttttagatagtttttttagaatagtaagttttttaggatttagtattttttttgtagttcgttgtgttttttagttattttttagtattatagttttttgattagttgagatttgtagaagtagattttatttttgtttaaatttgaaagttgtgaagtatagtttttggatttagaatgatattataggagtagggtatggtgggtgaatttatggatttgtttggtgtgtggtttatatttcggtaatgtggttattgatttaggagtatgggttttttggaaaaagggatgtggttgggttagaaaggtagataggtgattaatagattggtagggttttgttttgagtttttatttttttttttttttgttaggtggaggggaatgtgggttgttggaaattttttataaatagttgatattaattttaggtgtttgtacgtttggaatatgttttttaagaaagatacgtgtttaatttttttaggtgttaggggagttgggttattgtgttttagtaagtggtttttattttgatttgtttggtgaaagattgtattcgaattttgggaatatttttgttttttttaaatttttggtattggaaggtgtttgttcgtttgtaaagggtttttaaagttttattttttgtttaaaaaataaaataaaataaaaaattttgtttatttttgttttttattgattagtaaggggtatacgggtgagtttttttttttttaagattttagttggtagtaaaggagatgaggaggttggggggtgatttttggttggttggatgttgagtttggttatgatatttttaggattttatgaagcgataggtattttttttttttaattaggatatttttattaagaggtgagatattgtaaatgttttggatttttattgaggggagggtgtttacgttggagatttttttttgtttttatatttaaatttggtttattgtagaggttaagaattagtaaattttgagtgtgtattattattgattttgtattatgatttttgtgagtagtgtatgagtaggttatttttatttttttaagtttagaatgaaattttaaatgtttttttttgataaggtttttgtttttgagatatttagtttattttattttaattttattgtaattgaataatattatgaggatttatttttattattttttatttttttttttttttttttttttaatagtttttttggtttagatttatgtagaattagagaatttttaagttgggagggatgattatggggttgcgatgtgtttatgaattatttgggagtttgttttgatggatattttggtttgggaggtttgtgatggggttttagatgttgtattttttgtaagtttttaggtgatatggatgttattggatagagggttatattttgggttttgaggatttggttttaacgtggttattttatagatgggaaagcggagttttagaaagtttgttatttttttgtggttagaaatgaaattttgtttttttttattttagtttattatttgttttttttttttaaatttttaagtttaggggtacgtgtgtaggatgtgtagttttgttatataggtagatatgtgttatggggtttgtcgtatagattattttattatttaggtattaagtttggtatttatgagttattttttttgattttttttttttttttattttttattttttggtagatttttatgtgtattgttttttttatgtgtttatgcgttatttgtttttgaaagggttttttttttttttagttgtcgttttttgtttaggtttagagtgtgagtataaacgtagtattttattttaattttattttattgttaggatgaaagattttttgtttattagggttttttgttttataatttgtatttttattaaatttagaggggtttttaaaggttttttgttgttgttgtttttgttgttttaatttatggatgtttttttttttttgtttgatatgttaaaaatttttttttttttttttttttttttttttttttttttttttaaaaaagtgggttgggtattttttggatataattattttagttttaggttggagtattgatgttgggttgaatttatttggcgttttttgtttaggagtggtttgagagaggttgtgtttttttgttgttatttgttattttttaagagaggttaagtgttaggatttgattatattttagttttttgatttttagatattttaaagttaattttagaatggtatttgaagtgatagggaaatttttagtggtttaaggatagttaggattggtttagggttagtagtaagtggtttgagagtttaaggaggtttttatattttgttttcgtttgttggtgggagggtaaaatgttagtttggagataaggttataatggcgacgggggtaaaaatttttttggggttaagggaaggtggaacgtgacgggaagtcgggaaaattgttttgtataggtatgttttttttttttatttttttcgtttaagtttttattttaagcgatagtgttattcgaaggcgatcggtttgtttgtggttgcgtttggggtaggcggtgatatcggtatatttttttttttattttgtttgtaagttgtatgatttgtatcggaatttataggggggcgggggagattttttttagatattggatgtagttgaattgaatttaatgtattttgttttttcgtttgtttttttttaagttcgggaaggagaattttgtttttttttgcgtgtgaatgttgtagtgtgtttgtttgttcggatttttttaatttttttttttttttttttatagcgaatgttcgttttttttttttttagtaaatagtttatatttggtatttttatgttttattaagaaaaaaatttttattagcgtaaaagcggggttttttttatatatatttttttttcggatgagatttgagttttcgtcgaaagttgtatttgttttgcgtttttattaggaaggggtgtttgtgtgggagggaaggaggaggttttgcgttttcgaattcggagaaagtagttcgttcgtttttttattcggtagttagtttagtttattcgagagttgagttcgagaagtcggtttttgacggtgttggcgtggcgtttgttaaaatatgttttttgtattttaatttttttcggttattttttttgtacgtatagttcgttcggggttatttcggttttttagcgtagttttttcgatttttgtttttttttttttcgatttatgtttgtttaaggtcgaatgtaaaatttatttttaagaaagcgtagcgggtacggggggtatttagcgtgttatgtttcgtagtttttttttagttaagattagagttttagattttagattacggaaatgagtgttatttagattaaggattgcgcgtttgcggtttcggttttcggttttgggtgtttttttggggtgtttgtgcgtttcggtatttttcgtcgtcgttcgtgagtttgcgttttttatttatttaggtttgggagcgttttttatttaaggtttgggagtattttttaattattttcgttacgtttattttattttttatcgcggttcggattgtagtaaaatcgggtagcgcgagggttaaaaagtggaaaggagagcgttttttcgtgtcgtgtagttagttcgttaattttttttttttagtttcgattttcgtaattttaaatgtaatttttttttttcggtttcggtttttttcgggttgcggttagcgggcgtcgcgttgcgaggcgtggagcgggcgggttgtcgcgaggttgcgggtggcggtgtcggttatagtcgcgagtcggcgagtgggtgggtgggtgggtggggaggagggagaggataggcggggagagagacgggtgtggggaggggagggagggggagatttcgtttttttgtcgtttttagttcgggcggggggcggggggaggaggtcgcgacgagggaggggaggagggagggaggaagggagggagggagtcgaggaagacgtttcgataattcgtgcgtttcgtaaggttcggagtatttgtatatttttgtagtcgcgcggcgagttattcgcggcggttgttgtagtttttattgtatttttttttttttttttttttcgggtttcgggtgtgtgtatgtgtgagagtgagtgtgtgtgttttgtaggtgcgtggtgtgttcgttttaattttgtttagtaggtgggatttggtgattttagtattattttttttttttttttttttttttttgtttttttatcgtttgttgtaattttgtaaagtttcggagtcggagagcgcgtttcgtttttagagttttcggattcggcgagttagcgatcgtcgagtcggttattatgttcggtagatcgcgttattaggcgtttttcgcggtttttattcggcggcggcggcggcggcggcggcgttcgcgatggttttagacgttgaaggattttgtatttgatcgttcggcgttttaaaggtagaggttttttttttttttttttttttttttcgtcgtttttgtttttttttttttttgttatttttattttttttattttattttttttttttttttttttttttttttttaga

SEQ ID NO: 190 - DNA, 5263 bp, Artificial Sequence
  chemically treated genomic DNA (Homo sapiens)
tttaaaaaagaggaggaggagaggagaggggggtggggtggggggagtggggatagtagggggggaaggaaataaagacggcgagggaggggggaagggggagggggggtttttgtttttgaaacgtcgagcgattagatgtaaaattttttagcgtttgaaattatcgcggacgtcgtcgtcgtcgtcgtcgtcgtcgggtgggagtcgcgaggagcgtttagtggcgcggtttgtcgggtatggtggtcggttcggcgatcgttgattcgtcgggttcgggggttttggaagcgaggcgcgtttttcgatttcgagattttgtagggttgtaatagacggtggggaggtaaaaaaaaaaaaggaaaaggaaaaaatggtgttaaagttattaagttttatttattgggtagaattaaaacggatatattacgtatttgtaaaatatatatatttatttttatatatatatatattcggagttcgaggaaaggaagagaaggaagatgtagtaggagttgtagtagtcgtcgcgaatggttcgtcgcgcggttgtagaaatgtataagtgtttcgagttttacgaaacgtacgggttatcggagcgtttttttcggttttttttttttttttttttttttttttttttttttttcgtcgcggtttttttttttcgtttttcgttcgggttgggagcggtaggagagcggaattttttttttttttttttttttatattcgttttttttttcgtttgtttttttttttttttttatttatttatttatttattcgtcggttcgcggttgtagtcggtatcgttattcgtagtttcgcggtagttcgttcgttttacgtttcgtagcgcggcgttcgttagtcgtagttcgggggaaatcgagatcgaagggaaaaagttgtatttgagattgcgagggtcggggttggggagggagagttggcgagttggttgtacgatacggaaaggcgtttttttttttattttttggttttcgcgttattcggttttgttgtaattcggatcgcggtaggaagtgaaatgaacgtggcggaggtgattggggagtgtttttaagttttgggtggggggcgtttttaagtttgggtgggtggggggcgtaggtttacggacggcgacggggggtgtcggagcgtatagatattttagagaagtatttagagtcggggatcgggatcgtagacgcgtagtttttggtttgaatgatatttattttcgtaatttagagtttggggttttggttttggttgggaggggattgcgggatatggtacgttaggtgtttttcgtgttcgttgcgtttttttggaggtgggttttgtattcggttttgagtaggtatggatcggggaaggaagaaataggggtcgaaagggttgcgttggagagtcgaggtggtttcgggcgagttgtgcgtgtaagagaaatggtcgggggaaattgagatgtaaggggtatattttggtaagcgttacgttagtatcgttagaggtcggtttttcgggtttagttttcgggtgagttgagttggttgtcgggtgagggggcgggcgggttgtttttttcggattcgggggcgtagaatttttttttttttttttatataagtatttttttttggtagggacgtaaagtaggtgtagttttcgacgagagtttagattttattcgggaaagaagtgtgtgtggggggggtttcgtttttgcgttggtagggattttttttttaataaaatataaagatgttaagtgtgagttgtttgttgaaaaaaaaaaaaacgagtattcgttgtgggaaaggagaagaaagggttaggggagttcgagtaggtagatatattatagtatttatacgtagaagaaagtagggttttttttttcgagtttggaggagggtaggcgaggaagtaaaatatattgaatttaatttaattgtatttagtatttgaaaggagtttttttcgtttttttgtggatttcgatgtaggttatgtaatttgtaggtaagatgggggaaggggtatgtcggtgttatcgtttgttttaggcgtaattataaataggtcggtcgttttcgggtggtattgtcgtttggagtaaaaatttggacgaaaaaaatggaagaaaagaatatgtttatataaggtagttttttcgatttttcgttacgttttatttttttttggttttagggagatttttattttcgtcgttattatggttttgtttttagattggtattttgtttttttattagtaggcggggatagagtgtgaagatttttttggatttttaaattatttgttattggttttaggttaattttggttgtttttaggttattgggaatttttttgttattttaagtgttattttgggattggttttagaatatttgagagttaggaaattgaggtgtagttagattttaatatttggttttttttgggaggtggtaggtggtagtagagaaatatagttttttttagattatttttgggtagggaacgttaagtggatttagtttagtattagtgttttagtttggaattgaaatggttgtgtttaaaagatgtttagtttatttttttgagagagagagagagagagaaagaaagagagagagagaggatttttaatatgttaagtagagaagaagagatatttataagttagaataataaaaataataataataaaaaatttttaaaaatttttttggatttggtaaaaatgtagattgtggagtaaggggttttgatgggtaagaagttttttattttgatagtaaaatgggattaagatggggtgttacgtttatgtttatattttgggtttgagtaggaagcgatagttgaaaaagagggaagtttttttaaaagtaggtgacgtatggatatatagaggggataatgtatatgagggtttattagagggtagaaggtgggaggagggagaggattaggaaaaataatttatggatattaggtttaatatttgggtgatgaaataatttgtacgataaattttatgatatatgtttatttgtataataaagttgtatattttatatacgtatttttgaatttaaaggtttaaaaaaaaaaagtaggtgatagattagagtggggaagagtagaattttatttttaattatagggaaatgataagttttttgggatttcgtttttttatttgtaaaatgattacgttaagattagatttttaaaatttaaagtgtggttttttgtttagtagtatttatattatttggaagtttgtaagaagtgtagtatttgaggttttattatagattttttaaattagaatgtttattagaataagtttttaggtgatttataagtatatcgtagttttatagttattttttttagtttgaagattttttgattttatatggatttgggttaaagggattgttgagggagaaaaaaaaaaaaaaggtggggaatgatggggatgggtttttataatgttatttagttatagtgaagttagggtgaaataaattgggtattttagaggtaggggttttgttagaaaaagatatttgaagttttattttaagtttaagaagatgagaatgatttgtttatgtattgtttatagaaattatagtgtagggttaataatagtgtatatttagagtttgttagtttttaatttttgtagtaggttaaatttaaatgtgggagtagaagaaagtttttagcgtagatattttttttttagtaagagtttagagtatttatagtgttttattttttgataagaatgttttggttgaaaaggaaaaatgtttgtcgttttatggagttttggagatattatgattaagtttagtatttagttaattaggggttattttttaatttttttattttttttgttattagttggagttttagaaaggaggaaatttattcgtgtgttttttgttgattaataagaggtaggaataggtaaagttttttgttttgttttgttttttgaatagaaagtaaagttttagaaattttttataggcgagtagatattttttagtattaagggtttggagaagatagaaatgtttttaagattcgaatgtaattttttattagataggttagagtggggattatttgttggagtatagtggtttaatttttttgatatttagagaaattgaatacgtgttttttttaaaaggtatgttttaggcgtgtaagtatttgagattaatattaattgtttatgggagatttttagtagtttatatttttttttatttagtaagggagaaagggagtggaaatttagagtagagttttgttagtttattggttatttgtttgtttttttaatttagttatatttttttttttaaaggatttatatttttgagttagtggttatattatcgggatgtaggttatatattaggtaggtttatggatttatttattatgttttgtttttatggtgttattttgaatttaagagttgtgttttataatttttaagtttgagtagaaataggatttatttttgtaagttttagttggttaagaaattgtgatattgggaggtgattggggagtatagcgggttataaagggaatattaggttttgaaggatttgttgttttaaaagagttatttggagttggtagatttgggtttgggttagaggaggagttttgttttttgggtggtttaagtataagttataagggaaagagataggtttgggtttggttggaggttggggatgtataatgttatttagaagttttgggtttaaggaaagaattttgattatatatggaagatgaaagtttatttataaaaggggatagttaagtattaaagtggtttaggaaagtagaagaatttaattatggaagagttagtttagggtttttatttaagttttaatattttggataaatatttgttaggaggttgggattatttgttggtggtgttttgtttgaatatttttagtggtaggaagtttattattagttattttagagttttcgattttgtttttagatagttttattttttgggtatttttgattttgatatagcgaagttagtattttaaagttgttattttcgtgttagtgttgttatttagatttttagggaaaagttttattttttttttgtaagttatttaggaggttatttattgttttttttttttttga

SEQ ID NO: 191 - DNA, 6535 bp, Artificial Sequence
  chemically treated genomic DNA (Homo sapiens)
tattttttatttttaagatattatggttatattaggagttgtcgagaggaaagttgaagagatgaatttagattatttaatgtaattgttgttatatataaaagtgtaaggtgtttttttgtttttgaggaatttatagattagattaggagtcgagagagatgtagggagtaaagagaaaaatattaggtgttaaattttggggtattgtttgttttaggagtttagggaagggagagttggtgtggttatagaggttgagaagggttttttagtaaggggattttttaattagaggtttaagtttatatagttggaaaatttgggtttatgtaggaagttgtgaataaggaggtttattggggttgtgggtgtatggtgagaaacggtggaagttaaggttgatgaggtaaggagagagtgtttaaaggtttattagaaaggtaaagtgttttttttttttattatgggtttttttttatttttattttgattttgggagattttagaatttgaattttagaaattttggattaaaagatttgattttaagttttggttttgttatttattagttgtttgattttgggtatgttatttaaggtttgatttttagttgggttatttgtaagatggggataatgttatttaagtcgtttgggtgttgggaggattgagggaaataatatttataaagtatttaatattttttagtatattgtaacggtttaatatatggaggtgtttttattgttttggggtaggttttgttataaatgttagtgtagaattttggttggttttattaagaagatagttttaagttttaggatttaggtttattagttaatttagatagtgatttaggttatttgtcgggggaggattttgaggatatttatgtttaggtagtagagtcgtgttttttttttgagattaatatgttttttattttgtggagtggttatttttttttattaattcggaggtagtttgatttcgtgtttaattttttgttgtttttttttttttttaggaatttttgtttttgtatttgtttagaatatggggttttgattttaaatttatttatatgagtatttattattttttttagggggtttgtattgttaaattagattttaggggttttggttttaaggcgtgaagggggttaagaagggaaagtataagaagggaagttgttttggggtgtggggtttttttagttttttttaaggaagattatatatgtaggtattagttagttatttttgtatttagtgaggatttgtaaggaggatttttttaaatggagggtatgtttagaagttgttttagattggagaagaggtggtaatgatgagggggaaagaaggagaaaggaaagaaaaatttagttttattttttttttttttttatgtttttttagggttttgtagttttgagtttgggttttttttgtttggatattaattaagtttttaattggattggattttagatttttttgtagtaatttttttcgtaggatattgatgtgggttttttttttttatttttttttttttgttttttttttttttatttttttttttattgtgggaagaattttagtttagaagttaggggatgtggatttaatgtttagttatggtattggttggggcgttattttttttttgtttgagtttttatattggtaataataatagtaggtgtaataatatttgttttgtttattataatgtttagtttaagagtaaatgagaaaatggatatgaacgatttttgaaacggataatggaatgtataaatgtagagagtatggttgttacgtatttattgagggtttatatgtgtttagtttaaaggtttataatttaattggggaggtaagataggagtatatgaaataatttgaggaaatgtaagaatgggaagtgatattgagtttttagtttattgggaataaggatttaatggtgatagggttaagtgttgtgggtttgttaggatttgattgatgatatttttagtggggtagggtgagattgaggtggtttttttgagtttttttttttttttatttttttttttatgttattatttttggtatttttttgaggttttataatttttttttgatttagtagttaagtttttttttttttaattaatgtttaatgttttttgttggagtttttttagtaattgtagaggattgtttttgtaggagcgttattgtttggtttttggggaggaggagcgggtcgagttgtagtttttttgtgttaggcggaagtaggaagttttgggatagggggtagttcgtttggtattttttaagtttgaaggatatatttgtgagaaggtatgtagtatttttttttttaaatttttttttttttattttttgtttttttatttttgtagaaggggttgggttagtttttgggattttggttgggaaataggaaaaatagaaattaagtttgtaagtttttggtataggttgtagtggatgtgggtttgttagggtatggcgagaataggttgggatcggattgtaagagtaaggagggaagttaggatggtagtgtttatttcgattattttagtattttttttttgatagtgtagggagttgttgaagttaggggagtacggagtgtttgtagttcgggtaggggaatagcgttgttggtattagttttgttttgtttgttaggtttgtggttaggttttgataaattttatttatttttattatgatggataattttattgcggtcgttattatgtagagttgttgcgttcgcgttgttcggtttgtgattaggtatagtttggaggggaggaattgggggtttgtttagagtttagagtggtaggatataaagggatatttttttgggttatagttttttttagtattagggagtggggagaagtaggaattagtttgggattattaagttttttgtgttttgatttgagttttgggtatgtaggatttagtgtttttttttttggttttttttattgtagagttttttaaatgtttttggatttatcgaatttttttagagtagggagttttggatatatgtttattttagtagatgtcgagtgtttagtgttgtgttttattatgttagaaatttttttgatgttagtataaaaggaagtttggagttttgggttgggagtttagatttttaggtcgtattggggattgttttatttgttagttgggattttggttaagttaattagttttttttgcgtttaaaagtggttgagtgaattaaatgggaatgtgtgtagacgtgttttagcgttaattgggtaaaaggcgtggttattggatgaatgaatgagggaatgaatgaatgaaacgttttttttttttttttttttttttatttgatttttttttggcgttgtatcgagtcggagggatagcgttggtatgagaattatttttgttgttaggattgcgtcgggtttttgggcgggggacgttatgttttgtttgggggaagtttttgttgttttagttgtttcgagaatcgttattcggatgtaggttcgagttgggtcggggtattggaagggtaggtattttttggtaagggagaggatgtagagtaaagcgggagggagtttgggttgggttgtgggggttttttcgggttgggattttcgtttcggttttacgtcgtttcgtttttttaggagcgtttttatcgtattttttagatttaagtttcggggttcgtagtttttatcgcgtatttttggtcggagcgttttaagggtcgttcgaatttatttcgcgtcgcggtcggggttgcggcgttagatttttttttaggcgcgggaggcggacgttttttggtggaggcgggggattttggcgaggattttcggcggcggcggcggcgcgtacggtttaggggttgggcggggcgggaggttgggttttatttttattagttgcggtgtaggtttagtttcgcggttttgagattagcgttttcgattcggttcggaataggggagattggattcgatcgaattgaaggaagggattaaatttcggtgaattttgtaattttttttcgaatatttttcgttgttgtcggcggttttagtttgtaaatttagagggggttgtttggatttagtttttagtaggagaatcgatttggggataaagcggaggtatttaaagggtaggagtaatgtcgtttggagattattcgtgattttaaggatatttttttttttatttgtttttttttttttgattcggaatttgaaggattttttttaggcgagcgttttttttagttttggaagattttcggaagtttttaagtagaggatagtaacgtttttaagacgtattgtattatgtgttagtggcgtagtttagagaggggatgtgagtgggaggaaaggggtttgtaaagcgggagaataaggttagtttttttttaataattttagattgagacgtagttaggcgtacgttcgtaagaggcggcgaggtgataagtttggagtgcgttttttttagtattgcgcgttttaagatttttggcggagatttttttggtaaaatttattttttaaagttacgttttttttgttgagatagtttttatttttatttttataggttgggatagtttcgtttttattattttttttttaagttaattaaatgattatagtacgcgtgatagttatcggttggagagtcggaggtgggatcgggagtaggggatcgtagaatcgggtcgcgtttttttttttttagagttcgtggaggcgtagtagagggtcgtttttttttcggatgtcggattaagcgaatagcgtttttattgtcggtcggtagtagtcggaagtgttagatcggaggtgcgttatttatcggcgacgtcgatacggtttttttatcgaggtttatgcgaagttttttattatggtttttagtattgtttcggtgagcgttgttggttcggttaatgaaattttcgaaatatcggataacgtgggagattggtttcggggcgtttatcgttttgttattgataggaatgattttcggaggtaatcgagttcgaggaatttggtttttttttggtttttaaattcgtatttttttttttttgcgaggttggcgttttagggttttttgtttttgttttttaatattattagtattgtggcgttttcgtagttttggttgtgttttattgagatttttggttaggagagttttcgtgtggtaaaagcgatttttttgttatgtggttgtatttgtaatgttattttgattaagggaagaagtgttagtacgtaaataggttttttcggttttggattagtgttttagttgggttttgcgtttgattttatattttttttttgttttttttttttttttgagacggagttttattttgttgtttaggttggagtgtagtggcgcgatttcggtttattgtaagtttcgtttttcgggtttacgttatttttttgttttagtttttcgagtagttgggattacggtcgttcgttattacgttttgttaattttttgtatttttagtagagacggggttttatcgtgttatttaggatggtttcgattttttgatttcgtgattcgttcgtttcggttttttaaagtgttgggattataggcgtgagttattacgttcggtttttttttttttttttttttttttttttgagacggagttttattttgtcgtttaggttggagtgtagaggcgtaatttcggtttattgttttttttgtttttcgggtttaagcgatttttttgttttagtttttttagtagttgggattataagcgcgcgttattacgtttagttaatttttgtatttttagtagagacggggttttattattttgggtaggttggttttaaatttttgatttttcgatttattcgattttgttttttaaagtgttgggattataggcgtgagttatcgcgttcggttatatttatttttttttgagatagtttcgttttgtcgtttaggttggagtgtagtggcggattttagtttattgtagttttcgtttttcgggtttaagcgatttttttgttttagtttttttagtagttgggattataggcgcgtattattacgtttagttaatttttgtatttttagtagagacggggttttattatgttggttaggttggtttcgagtttttgatttcgtgattcgtttgttttggttttttaaagtgttgggattataggcgtgaattatcgcgtttagtttgattttatatttattaggtataaaaatgaattttaaatttttacgtgggttttgagtaatttgtcgttataattacgtattaacgtttcgggaaggtggtgatggaagtttttttttttagtatatttcgttaattgtataattgatttagtgattatagggttaataaaatatattgtttttttagg

SEQ ID NO: 192 - DNA, 6535 bp, Artificial Sequence
  chemically treated genomic DNA (Homo sapiens)
tttggaaaaataatgtgttttattaattttgtggttattgagttagttgtatagttaacgaaatgtattggggggaaaggtttttattattattttttcgaggcgttgatacgtggttgtgacggtaggttgtttaagatttacgtgggaatttggagtttatttttgtgtttagtaagtgtaaggttaggttgggcgcggtggtttacgtttgtaattttagtattttggaaggttaaggtaggcggattacgaagttaggagttcgagattagtttggttaatatggtgaaatttcgtttttattaaaaatataaaaattagttgggcgtggtggtgcgcgtttgtaattttagttattggggaggttgaggtaggaaaatcgtttgaattcgggaggcggaggttgtagtgagttgaggttcgttattatattttagtttgggcgatagagcgaggttgttttaaaaagaaataaatgtggtcgggcgcggtggtttacgtttgtaattttagtattttgggaggtagagtcgggtggatcgagaagttaggagtttgagattagtttgtttaagatggtgaaatttcgtttttattaaaaatataaaaattagttgggcgtggtggcgcgcgtttgtaattttagttattggggaggttgaggtaggagaatcgtttgaattcgggaggtagaaggggtagtgagtcgagattgcgtttttgtattttagtttgggcgatagagtgagatttcgttttaaaaaaaaaaaaaaaaaaaaaaaaaaaggtcgggcgtggtggtttacgtttgtaattttagtattttgggaggtcgaggcgggcggattacgaggttaggagatcgagattattttggataatacggtgaaatttcgtttttattaaaaatataaaaaattagtagggcgtggtggcgggcggtcgtagttttagttattcgggaggttgaggtaggagaatggcgtgaattcgggaggcggagtttgtagtgagtcgagatcgcgttattgtattttagtttgggtaatagagtgagatttcgttttaaaaaaaaaaaaaaaataaaaaagaaatgtaagattaaacgtaaagtttagttaaagtattagtttagggtcgaaaaagtttgtttacgtgttagtatttttttttttgattagggtgatattatagatatagttatatgatagaaagatcgtttttgttatacgggaatttttttggttagggattttagtgaggtatagttagagttacgaagacgttataatgttggtaatgttaaaaaataaaaataaaaaattttgaggcgttagtttcgtaagaaaggggaaatacggatttaagggttagaaaaggattaagtttttcgggttcggttattttcggaagttatttttattagtggtaaagcggtagacgtttcgaagttaattttttacgttgttcggtatttcgggagttttattagtcgagttagtagcgtttatcgggatagtgttggaagttatagtggaaagtttcgtatgggtttcggtggaggaatcgtatcggcgtcgtcggtgaatgacgtattttcggtttggtattttcggttgttatcggtcggtagtgggggcgttgttcgtttagttcgatattcggaagagggacggttttttgttgcgtttttacgaattttaggaggggaggagcgcggttcggttttacggttttttgttttcggttttattttcggttttttagtcggtaattgttacgcgtgttgtgattatttaattggtttgggaggaggatggtggggacggggttgttttagtttgtggaggtgggggtaggggttattttagtaggggaagcgtagttttggggaatgggttttgttaagaaagttttcgttaaaagttttagaacgcgtagtattgaagggggcgtattttaaatttgttatttcgtcgttttttgcgggcgtgcgtttgattgcgttttagtttaggattgttagggggaggttagttttgttttttcgttttatagatttttttttttttatttatattttttttttgagttgcgttattagtatatggtgtagtgcgttttagaggcgttgttgttttttgtttggaggttttcgggggttttttaggattggggaaggcgttcgtttaagaaaaattttttaggtttcgagttagaggaggaggagtaggtggagaaaggggtgtttttgggattacgaatagtttttaggcggtattgtttttgttttttgggtgttttcgttttgtttttaggtcggtttttttgttggggattggatttaggtagttttttttgagtttgtaggttggaatcgtcggtagtagcgaggagtgttcgggagagggttgtagagtttatcgaggtttggtttttttttttagttcggtcgagtttagttttttttgtttcgggtcgggtcggaaacgttggttttagagtcgcggagttggatttatatcgtagttagtgggggtgaggtttagtttttcgtttcgtttagtttttgggtcgtgcgcgtcgtcgtcgtcgtcgagagttttcgttagggtttttcgtttttattagagggcgttcgtttttcgcgtttgggagggagtttggcgtcgtaatttcgatcgcggcgcggggtgggttcgggcggtttttggaacgtttcggttagggatgcgcggtgagagttgcgggtttcgaggtttgggtttggggggtgcggtgggggcgtttttggagggacgggacggcgtgggatcggggcgagggttttagttcgggagaatttttatagtttagtttaagttttttttcgttttgttttgtatttttttttttattaaggaatgtttgtttttttagtgtttcggtttagttcgagtttgtattcgagtagcggttttcgaagtagttggggtagtaggggttttttttaggtagggtataacgtttttcgtttagaggttcggcgtagttttggtaatagaagtggtttttatgttagcgttgttttttcggttcggtgtagcgttaggagaagattaggtgggagagggagagggagaggggaacgttttatttatttatttttttatttatttatttagtaattacgttttttatttagttaacgttaaagtacgtttgtatatatttttatttaatttatttagttatttttggacgtagggaggattgattggtttagttaggattttagttagtaagtgggataatttttagtgcgatttgggggtttggatttttaatttagggttttaggtttttttttatgttgatattaagggaatttttagtatgatgaggtatagtattgggtattcggtatttattgagatgagtatgtgtttaagattttttgttttagagaaattcgatgagtttaggaatatttgagggattttgtagtgggggaggttagagagaagggtattgggttttatatgtttagagtttaagttagaatatagggaatttggtagttttaggttggtttttatttttttttattttttgatattgggagaaattgtggtttaggagagtgtttttttgtattttgttattttggattttgggtagatttttagttttttttttttaggttgtatttggttataagtcgggtagcgcgggcgtagtaattttgtatgatgacggtcgtagtagagttgtttattatggtagaagtagatgaggtttattagggtttggttataggtttggtaggtaaagtaaggttggtgttagtagcgttgtttttttgttcgggttgtaaatatttcgtatttttttggttttagtagttttttatattgttagaggggaggtgttgaggtggtcggagtaagtattattattttaatttttttttttgtttttgtaattcgattttaatttgttttcgttatattttagtaagtttatatttattgtaatttatattaagagtttgtaaatttggtttttgttttttttgttttttaattagaattttagaagttagtttagttttttttgtagaaatgagagggtaaagaatagaggaaggggaatttggggggaggggtgttatatatttttttataggtgtgttttttaagtttgggaagtattaggcgggttattttttgttttagggttttttgttttcgtttggtatagaagagttgtagttcggttcgttttttttttttaagggttaggtagtagcgtttttgtagaaatagttttttataattattgggagagttttagtagaaaatattgagtattggttggaggaaaaagggtttggttgttgggttagagaaaggttgtagaattttagggagatgttagagataatggtatagaagaggaaatggaaaaggaaaggagtttaagaaagttattttagttttattttgttttattaggaatgttattaattaggttttgataggtttatagtatttagttttgttattattaggtttttgtttttaatgagttaagagtttagtattattttttatttttgtatttttttaaattattttatatatttttgttttgtttttttaattgaattgtaagtttttaggttggatatatgtagatttttaataaatacgtaataattatattttttatatttgtatattttattattcgttttaaaagtcgtttatgtttatttttttatttgtttttgaattaagtattgtggtgggtagagtagatgttattgtatttgttattgttattgttaatgtgaaaatttaggtagggggagaatgacgttttaattagtgttatagttgggtattaaatttatattttttaatttttggattgaggttttttttatagtaagaaaagagatgagggagggaaaggtaagagagggaagatggggagaggagatttatattaatgttttgcggagggagttgttgtaggagggtttgaagtttagtttagttgggggtttggttggtgtttaggtaaagggaatttaagtttagaattgtaggattttgaggagatatggaagaaggggaggagtgaaattaggtttttttttttttttttttttttttttttttattattgttattttttttttaatttagagtagtttttaagtatgttttttatttgggagggttttttttgtagatttttattgagtgtaaggatagttgattgatgtttgtatgtgtggttttttttgagggaggttggggaggttttatattttaaaatagtttttttttttatgttttttttttttaattttttttacgttttggggttaaagtttttagagtttggtttgataatatagattttttaggagagataatgaatatttatgtgaatgagtttaaagttaaaattttatgttttaagtaggtgtagagataggaatttttgaaaagagaaaaaggtaataagagattaggtacgaagttaaattattttcgggttggtggaaaagggtggttattttataggatagaggatatgttggttttagaggaagggtacgattttattatttgagtatgggtatttttagggttttttttcggtaggtggtttgagttattgtttgagttggttggtggatttggattttggggtttggggttgtttttttggtggggttagttagagttttgtattgatatttgtggtaaagtttattttaaaataataagaatatttttatgtattaggtcgttataatgtgttaggaagtgttaagtgttttatagatattattttttttagtttttttaatatttaaacgatttaggtagtattatttttattttatagatggtttaattgaggattagattttgagtagtatgtttaaggttaaatagttagtaagtggtagagttaggatttgaggttaggttttttggtttagaatttttgaagtttaaattttggggttttttaagattaggatggaggtaagaggaggtttatggtagaaggagagggtattttgtttttttggtgggtttttggatattttttttttattttattagttttaatttttatcgttttttattatgtatttatagttttagtgagtttttttgtttataattttttatatgggtttaggttttttagttatataggtttgggtttttggttaaaggatttttttattaggaagttttttttagtttttgtgattatattagtttttttttttttgagtttttgaagtaagtagtgttttaagatttagtatttaatgtttttttttttgttttttgtatttttttcggtttttaatttagtttataagttttttaaagatagaggaatattttgtatttttatatatagtagtaattgtattggataatttaagtttatttttttagtttttttttcggtagtttttgatatgattataatattttgggggtaagaagtg

SEQ ID NO: 193 - DNA, 12269 bp, Artificial Sequence
  chemically treated genomic DNA (Homo sapiens)
ttgaatttgaatcgagggttgggttgattattaatattgtagttttttaataagtttgtagaggggaagggtagtttagtattttagtagtatgaatattataaaaaaaaaattagggtaggcgtagtggtttatgtttgtaattttagtattttgggaggttgaggagggaggggttatttgatattaggagttttagattagtttagataatatggtgagattttgtttttacgaaagaataaaaaattttaggaggtatggtggtatgtgtttgtagttttagttattcgggaagttgaggtgggtggattttttgagattaggaatttaaggtcgtagtatgatttgatggtatttgtgaagagttgttgtattttagtttgggtaatagaataatattgttttagataaaaataaaagaaattagaaaaattagtatgtattattgtgagaatataggtgaataatttttgtttaagaaaaagttaaatgtgaattatagttgagttatttatattacgatggttgagtgaatttgtgtttgatttagttatagtttagtttttttgtagaggtagaaagtagagcggttgaagtgtgtgtaggttttttatttttatgttttaggtttaaattttgggtttttattttttttagtgattgcgagtttaggttttagttttttaatttgtgaaatagggattataatagtatttgttttaagggttgttgtgagtaatatatgaagtaattattataaggtattgagtatagagtttgagagtatgagttcgtaaatttattgtgagttttagttgttaatttaaagtagttttttgttgttaagtcgttggttaaagatgtttaagggttatggtttagagagaagtatttgaatttatttaagtagttgggttgggggatttcgtttggttgtttcgttagtttttgttttgtagaggtttttatttcgtaggttagatgtgtggtttattttttgtttagtttttttaggtttgcgtaggagtttattatttgtttattggtttgtaagttatttaggggttgggcgtttatagagttatttaaggcggtgatttatatttgtaattttagtattttgggaggtcgaggtaggtggtttatttgaagttaggagtttgagattagtttggttaacgtagtaaatgaaaattcgtttttattaaaaatataaaaaattagttgggcgtggtagtatatgtttttaattttagttattcggggaggttgaggtagaggttgtagtgagttgagatcgtattattgtattttagtttgggtgataagagtgatattgttttaaaaaaaaaaaaagttattggatttttttaagttagttttttatattttatattaggagggttatttatggtgttttttgcgtcgggttgtggtgggtttttatacgaatttttatatttttattttttatggtagttagaggagtttttaaaaagggtaaatttgtcgggtacggtggtttacgtttgtaattttagtatttttggagggggaggtaggaggattgtttgaggttagtttgggtaatagagtgagagtttattttttaaattaaatttaaaaatataaaaataaaatggttgggcgcggtggtttacgtttgtaattttagtattttgggaggttgaggtaggtggattgattgaggttaggagttcgagattagtttggttaatatggtgaaattttgtttttattaaaaatataataaaattagtcgggtgtggtggtgtgtgtttgtaattttagttattcgggaggttgaggtaggggaattgtttgagttagggaggtggaggttgtagtgagtcgagattgcgttattgtattttagtttggacgatagagtaagattttatttttaaataaataaataaataatttttattaaagggtaaattagttaaatttttaaaagaattttgagaatttagagtttattgttttgataattaaatttaatatttggatttagtttggtaagtgttttgtgatttagttcgttatttattttttattttatttttcggttatgttttaagaagtgtttgttttttaagtgtataagtttatgtttttaggtttatgtttttgtttttttttttgtttgggatattttttttttagatttttatatttttgtttttttttttagttttagtttaaatattatttttttttagaggttttttttgattattttagggatagtagttttttcgtttttttaggtatttttatattattttttttattatttttttttagagtttttaggatgatttgaattttttttataaattggtttatttatttgtgaattgtttgtttttttcgttataattgaagtattggaagaggttttgtatttagtaggtatttaatgagtatttgaggaatgagtgaatgaaatgtttagtgtataattaatttttataaaagtagtttttttttttatatataatttatcgttattatagtttttttttttgtttattcgtttcgttgaggggtttttgagaattttcgtagaggtttttattagttaaaaagtatttgtatcgttagagagggttttttattgtcgttcgtagtgttttttgttgttacgtgtagttttttgagtatgagtttgttgatataggttggtatacggtgtttggtttttgtaaatgttttttgtttttaggtgtgtcgtgttttattgaaggatagtatttatatttttttaggtattaattgattttttttttagtaatgtttgttttagggattaaagtttgtggaggagtttataatttttagatttatttgttttttttttggtagttagtatatttgttattttattttttttaagtttttgataatatcgttttagatatgttgatttgatggtattagttaacggaaagattttttggggtttgtcgtaggttagaggataggtttttcgggttatatttaggggcgattgagttaattttttacgttatttttttttttttttgtttaggacgattttatagtttatgatcgtttttttttttttttttttgtttgttttttttttttgttttttttttaagtattatagtgattttttatttatttagtaaagaaatggattattttatagtagtgaatttttaaaataatgttttttaagtattaaaattttaaataatatatttttaaaatagttttgttgaggtataattgatatattataaacggtatggatttaaagtgtataatttgatatgttttgatatatggatatatttatgaaattattattataattaagataatgaatatgtttattatttttaaaagttttttttcgtttttttttgtttttttttttaagtaagtattgatttgttttttaaatacgtttttaatgttataagggtttatatatttttttattttagaaaatggagtatgattaatatgattgattttttttttgatttagtattattattaatacgatggaaagtgattttagatgttatgaggatgtatgattgtttgttttgattattaaacggtttattgttgtgttggtatattgggtagttttaagtttgggagtttttttttttattgttagttgttttagagtttagtttttagtagataatttttgttgtttcgaattttggtatattaattattattttgtgacgtttttattttttattttgcgatagtggttttttgttgggagagatttttgttttttaagggatatttggtaatatttggagatttttttggttgttattatgggagcgggaatgttattagtagttaatgtttagtgattagggatgcgattgaatattttgtaatgtagagtgtagtgttttttatagagaattattcgatttaagatgttgataatgttaaggttgagaaattttgtttaggatgataaattgattgaaaatttaataaggggatcgggcgtggtggtttacgtttaataattttagtatttagggaggtcgaggtgggtgtattatttaaggttaggagtgcgagattagtttggttaatatggtaaaattttatttttattaaaaatataaaaaaaaaaaaaaaaaatacgagtggcgtaagtttgtaattttagttatttgggaggttgaagtatgagaatcgtttgaatttagaaggtagaggttgtagtgagttgtgattaggttattgtattttagtttgggtaatagagcgagatttttgtttagaaaaaaaaaaaataaatttataaaataaataaataaaaaaaattatgaggattgagtgatttatatttttgaatcgagagagagaaggatgggtagtaggtttgttgaagttggaaggttagggaggtcgtagattgaggaagattttggtgtgttttaggtatttttatgtaattttattagagaggtggtttttggttttttatggataagttttaagggatttagttatggggtattagagtttagcgtttagtagttgtttaatgaatgtttgttaggcgagattgtatttaaagtatttattaggtatataattgtggtagtattggttggttatggaaggtaaggtagaatataaggagttggagttggcggaaggaagttattaagttagttagtggttgggatgtagtaaagttaggtagaaggtaagtgtagatttattttaataaatgaggaaaatgagaagggttggttggttatgttaggatttagttttagtgcgattagatatgttattattatattatttttagtttttttttttatttatagatattttgtttgtttgttatataaagaaggtttttttaaagtggtttagttagaattggaagggtttcgttttgtgaagggataggagtttgattgttgtagttgtagtgagtggcggggaagtagtagcggttaggatgaattttaggtgttttggagttggatggtgaagtatggatatgttttattcgattttgtattgatttaaaggtttaattattttaggagtttttgtagatatttttgaaaaatgtaggtaggtaaaaagaagaaaataaagatcgtaaatgtgatttttttattcggagagaatattaatggaattttgttgtgtatttttttatgtacgtttgaatgttgtgtagatattttgtttataattaggtgtgggtgttgttgtcgaaggttttatttgttgtgtttgaggtggattagagattttagagaagatttttagagtattttaaggagataataggagtgtttggagttaggatgattgggtggatttaggattatgtgatttttaggagtttttttggattagttttaaattaaggataaagagaggtttagttggatttttttttttagagttttgttgggaaaatggagtttttttatagtttttatttatttattaggttttgttttttttatttatttttagatttttgttatatgtttaagttttgttaattgttgtgtaaaattggtaaggtgggatttagaggattttgggtttttagggttttaggttaggagatttgggttttagggttagttgagagtgataaagagaataatatttgtttataggatttgttgtaatgagataaaggtagaagttattagttgtggttaaatgggatttttttttagagaagttttatagagagtggtttttaaattttttttagtagtagaattgttgtaaaatataattttatgtgaaattttaaaatgtgagatattttgggtgaagtagagagaggtgtttaattgtttaattttgtttttattttttttttttagggaggtatttttgagaatttattttaaagaattttgttttatgtagattgaagaggtaagttggttggaagaaattgggaagttttattttttatcgtttttgtttgggtggtagttatttgagtttaggttagtttttttttttttaaagatttattgcgggtttttttggggttagtttttaggatgggtggggtatttgaagtagtaagtattgttatttttttgggttgattttttttttaggtttgaggataagtgggtaggtggggttagttttgtttttgtttttttttaatggagtttttttgtttatagtttaaggaagaagcgtgagttattttttgttttagtttgattgttggagtattgtttttttaattgtggttggcgttatttagtgtggtttttataagttttagttttttggcggaggggaagtttttattttgggataaggttaattggatttattttttcgtttaattttgaggatttagtattgtttttttagtttttagtttttgtagtgtttgtaaaggtgttcgaatcgtatttgattttatttattaaatattatttttattttatagaggggtaaattgaggaagtttttgagaaattaatttgtttaaggtgttttagtaaaaaatagtgttttagggatttgaatcggtttgttgattgattttttattagttgttttaagaattattatgatttaatttttttgggttttagtttttttttttataaaatgtagatagtgatatattaaaggtatttaaaggaaaatgtattgtatttattttatggggtatgtggtgaggataaaacgggttgatataggaaaagagtttttaatggtgtttggtttatagaaaatatttagtggatttttttttttttattattcgggaatttgtgttaaggaggttataggttgattttgtgtagttaggttattttatagggagcgagaagagatgggtataggttattttgcgattttggaataatttagtttgggaagtttttggttatattttttttttttttttttttagtttaagtagcgtcggttttagttaagtagtataaacgttttttagggtttagggagggagaggtttcggttggtatattgtaagtagtttggatttaggttttgttaaatattttagttttttgtaggatttgaggtttgttggttgtgggattttgcgtaaattatttaaacgttgtgcgttttagtttttttatttgtaaaatgggattaataattttagtttgaaaggattatgtggattaaattatgtatataagaaggagataatgtaaagtgattggtttggtgtttggtaagcggttggtgtttaaaaagaaaaaaaagttaaaaatattaaaaggaggtgggttatttttgtttatatatttatttgtttatataaatgtagacgaagtcgtgatttttttaatagtaggttaagaggaggttggttttgtcgtcgtgtagttttttttcgatttgggagtggaggattttaggttcgtcgtttttgggtatttaattcggttaggtttaaattcgtcgtttaggagtggggaagcgggggacggagagggttagttttttaagagttcggttgaggtagggttcggagtgttttttttaagtttttttttttggtttcgagttcgggttttcgcggtcgttttttcggggagttcgcggggcgaagagtcgagttcgggggcgggggtacggtagcggggtttgagggacgcgtcgggcggtcgcgaggattttgggatcgtttgttttattttttatttgtttttattaggagtcggagtacgcgggcgttttagaaggtttcgtagggtagtcgcgcggggtcggacgcgttggggtttacggcgttgggaacgcgggttcgtagtcgggttcgggcggtatgggcggcgggcggacgagtcggagtcggcggtggtggcggcggcggcggtcggggaagcgcggaggtggcgtcgcgagggggaggggcgcggcggcggaggaggaggtgttcgggtcgttgtcgtcgtcgtcgtcgttgatagcggttcgagtaaataagtcgcgtcgtcgcggttcggtcgttgttttcgttcgcgtcggagttggagtttaggtcgagttttgttttggtcgtcggtcgggtcgaggtcgcgtcgtcgcgttttttcgttttcgcgtcgtgacgttgtcgtcgggcgcggggatcgcgtcgagtttaggttttcgtcgtcgggtttttcgttcggtcgaggggcgttcgagtcgtcgcggcggtcgtttggaaaagttttttcgttagggttttttagggtaagtagcgagggcgcggggttcggggttcggggaaggtaagcgcgtttgggagtcgggttcgaggggagtcggtcgggtcgggtcgtggagttttgttttaggagcgggtttcgcggttcgggtgttcgggtcggggagggtcggggtattggcgtcggtgtagttttgattcgggtttttcggggttcggttgttcgtcggtttttcggaattggtttcggggtcggtttcgagggtggagttgtcgggagtagatagggcgtttcgtagtttatttgagcgcgtcgggttcgtttcggtttttcggtcgtggttggtattttttcgcgtggggttagggcgagttttttgattttaggaagcgtttgcggggtttttgttgggggcgggatggggagaaaatttcgtaggcgtcgggtgttttagttttttcgtcgttatcggggttgtcgtcggttcgtttatttcgcggtcgaggagggtttgcgtttcgttcggggaggggaggagcggtcgggggcgaggcgggggttttttcgtttgggtttcgttttcgtacgtatatttgtgcggttaggattcgggtgcgggattcgcgggcgtcggcggtcggcgtaggtaggtttttgggttgttttttgtcgcggtttggtcgaggtttttgtgttttcgttgtgtggttggattaaggggcggtttgtttgttagataggtttgacggtagttatttgtttggttagaattcgtttttttattattttttattttttggtttttggggtgtagatttttatttatcggagagtgttgggatttttattttgatttgggaagtgcgaggagaattcgggtgatatggtttggtgagggcgggtgttgagtaggtgtggatatagtataggagattagttaagtttgatttttttttaagtagggtagttttcgttttattattttttatattgggtttttacggagtatttgatttttaaaaaggattttgtggttttttaaaaagtttgaaagtcgttggtttagtagtttttattattaaggaaattgaggtttagggagaggaagtgatttgttaagattatttagtaaatagtgggtagggattgggagcgataaatttacgggagttttttagggttggtaataggatttcgcgtggtgtttttgttagagggagagattgattgggtgttcgagtggttttttcgtggtttgttttgtggttgtgttagagttagatttttagtgtttgggaaatagtagtcggttttggggtgaggcgtaatttgagtggtttagagtggttttttgtgttaggaggttttggtgttggagaaaagggttttgtttaagaatatagttaggaagagtatttatagttttttttggttatagtttggaatagagttttatgtgaaataagattatgagaaatatagtaagtttttaggtttgagataaattgggattagagggtgagttagagtttgggatgggggtggggagaaatttatttatttattgtttttagtttttatttttttcggggatttttttttgttttatatgttgtggtagagtcgtttgtgggggttttattttttggaagttatttttattttttattatggttggggttgttggatagagggaggttggttttttttttttggggggattgtttagttgcgtttgacgtttgtttttttttcgagtgttgtaaggtaattaaatagttggttaattatttttaacgttaaatagttgcggttttatttatagtgtgttggaatttgggttagatttagatgaatttagtttcgatttgggggttttagtaggatttatagtacggtggttggtggtggtgggggtaggggggtggttgtatgatatttggatttaagaggtagttgttgtggtagtaagagagaggagagagatgaggtttcgtttttatatggttttgtttttagggttttatattttttgttaaatgagggatttggggtggggggggcggtttttttattttttagggttggggcgtttagttgtttagttattgattaggttagttttttggaattaattatttaaagtattatggggttgtggtttcgaggtttgttttggaagttttgtggagtttgttcgtagggatgtgtaggagttgtattgtagatgttttttgttattagttgttaggttattttggtttaaattgaaaatattttaggaattgtgtgtggagtatttttagtttgtagggtgggattgtagtagttagggaggtcggttgtgtttaagggtagtttttggagaagtaaggagttttttgtggtgagtttgtttttttagttttttagggtttacgtgagttggggtgttttttttttggtattcggtagagtggttttggttatggaagtgttaagggtatttagggttttgttgttgtttagggagtttggtattgatatgggatatttttagtagtattgttgggattttttttagtttttttttttttttttagggttttggtttttggttagttaggggtattatgtggggatagttatgtggtttcgggtagagagaggtttcgtcgtttgtttgttgaaggagtaaaaataatattcggattattgatttagttttattttggcgtttttggtttagtagttagtgtttgttttggttgtttgggttcggattacgtaaggttggtgggcgtggagtaagtaagggggtagttgggggtttttaggtttaggtagggtagggtttggcggttttagcgttttttaggaaattgtaaaaacgagtttggggttttgattttgttgatagcggttattttagttatagagggaggtgaagtttttgtgatttttattttcgtatttttttaggatatggtttttaaaagtattattttatttagggttatttattttttttttaggagttgtggggttttgcgaataattttttatggttgaatttgttttgttgaattaggaaattttagtgagttgtatagatgttatttatttaagaattttgaaaagttaatattttatttttatgtaaaatatatttaggtgatttggagaatatagtgatataaagaagaaaataataattatttgtaatttttattattttgagagaattatcgttaatattttttagcgtgtgtatttttttagatttcgttttagtttgtataaatatatatgtataaatagtttttaaaaaataaaatgggattatgtgtatatattgttttataatgtattttttttattttgattatggtgaatatttatttatttgttgtttttgattttgagtgatttagggtttgatagtttttattttgttttttttgttatatttttttttttttttttttttttgagagggagtatcgttttgtcgtatagattgggaatgtagtggcgcgattttggtttattgtaatttttattttttgggtttaagtaatttttgtgttttagttttttaagtcgttggtattataagtattcgttattatatttggtttatgtttgtatttttagtagagacgaggttgtattatgttggttaggttggtttcgaatttttgattttaggtgatttattcgttttagttttttaaagtgttggatgatagaagtgagttattatgtttggtttttttgttatattttttatatttttgtatggagaaaggattgggggggattgtgagggtatttatttgtttatttatgtggttggttttgggggttagattttttttggggaggattaatttttttattttttttttttagattttattttaggttttaattgaaatttggggtgggtagggtagttttagtgcgtagtaggggaggaattgattttttttttttttttttttttttgttttttttagg

SEQ ID NO: 194 - DNA, 12269 bp, Artificial Sequence
  chemically treated genomic DNA (Homo sapiens)
tttgagaggaataagaggggaaaaggggagagagggttagttttttttttgttacgtattaaagttgttttgtttattttaagttttaattggggtttgaaatgagatttgggggagaagggtaaaaaaattagttttttttagaagaaatttagtttttaaggttagttatatagatggatagatggatgtttttataattttttttaattttttttttatgtaagaatataagaaatgtaatagaagggttaggtatggtggtttatttttgttatttagtattttgggaggttgaggcgggtggattatttgaggttaggagttcgaggttagtttggttaatatggtgtaatttcgtttttattaaaaatataaatatgagttaagtgtggtggcgggtgtttgtagtgttagcgatttgggaggttgaggtataagaattgtttgagtttaggaggtggaggttgtagtgagttaagatcgcgttattgtatttttagtttgtgcgatagaacgatatttttttttaaaaaaaaaaaaaaaaaaaaaagtgtaatagaagaagtaggatgaagattattaagttttgagttatttaaaattagaaataataaatgaataaatgtttattatgattaaggtaaagaagatgtattataaagtagtatgtatatataattttattttattttttaaaaattatttatatatgtatatttatataaattaaagcgaaatttggaaggatatatacgttaaaaaatgttaacggtggtttttttaagatggtgagaattataagtaattgttatttttttttttgtgttattgtattttttaaattatttaggtatgttttatatgggaataagatgttggttttttaaggtttttaaatgaatggtatttatataatttattagggttttttagtttagtaaagtagatttagttatagggagttattcgtaaagttttatagtttttaggaagaaaatgggtgattttaaatgggatggtgtttttaggggttatgttttgagggggtgcgggggtggagattatagaggttttatttttttttatggttgagatggtcgttattagtaaagttagggttttagattcgtttttatagttttttggggaacgttggggtcgttaagttttgttttgtttgggtttggaggtttttagttgtttttttgtttgttttacgtttattagttttgcgtaattcgagtttaggtagttagggtaaatattggttgttgagttaggagcgttaaggtgagattgaattaatagttcgagtgttgtttttgtttttttagtaaatagacggcgggatttttttttgttcggggttatataattgtttttatatagtgtttttgattagttagaagttaaggttttggaggaagggggggaagttaggggaggttttagtagtgttgttgggggtattttatattagtgttaagttttttgagtagtagtagggttttggatgtttttagtatttttatagttaaggttattttgtcggatattaaaaggaaggtattttagtttacgtaggttttggggagttagagaggtaggtttattatagaaaattttttgtttttttagaagttgtttttagatataatcggtttttttgattgttgtagttttattttgtaggttgggggtattttatatataatttttggagtatttttagtttggattaaaataatttgatagttgatggtaggagatatttataatatagtttttgtatatttttgcgggtagattttataggatttttagggtaggtttcggaattatagttttatggtgttttgggtggttggttttagaaagttggtttgattaatggttgggtagttaggcgttttagttttaggggatggaaggatcgttttttttattttaagttttttatttaatagaggatgtgggattttgggagtagagttatataggaacggggttttatttttttttttttttttgttgttataatagttgttttttgggtttagatgttatgtaattatttttttgtttttattattattaattatcgtgttgtgagttttgttggagtttttaaatcgaggttgggtttatttgggtttagtttagattttagtatattgtagatggagtcgtagttgtttggcgttaaaagtgattaattaattatttaattattttgtagtattcggaaagaaagtaggcgttaggcgtaattgaatagtttttttaaagaaagagggttagtttttttttatttaataattttagttatggtgaggggtggggatggtttttagaaaatgagatttttatagacggttttgttatagtatgtgggataagggaggattttcgaaaagagtaagaattgaaaataatgaatgaatgggtttttttttatttttattttagattttgatttattttttagttttagtttgttttaaatttggaggtttgttgtattttttatggttttgttttatatgggattttgttttaggttgtggttagagagagttgtgggtgttttttttggttgtgtttttgggtaaagtttttttttttagtattagaattttttgatatagagagttattttgggttatttaaattgcgttttattttaggatcgattgttgttttttagatattgggggtttggttttgatatagttatagagtaggttacgggagggttattcggatatttaattagtttttttttttagtagagatattacgcggggttttgttattagttttgggaggttttcgtgaatttatcgtttttagtttttgtttattatttgttggatgattttaataagttattttttttttttgggttttagtttttttggtggtaaaaattgttggattagcggtttttaaattttttaaaaagttatagaattttttttaaaaattaaatgtttcgtagaagtttaatataggaaatagtaaaacgagggttgttttgtttgagaagaggttaggtttggttaattttttatgttgtgtttatatttgtttagtattcgtttttattaggttatattattcgggtttttttcgtattttttaagttagaataggaattttaatatttttcggtggatgagggtttgtattttaggggttagggggtagaggatgatgggaaagcgggttttgattagataagtgattgtcgttagatttgtttggtaagtaggtcgttttttggtttagttatatagcgggggtataggggtttcggttaggtcgcggtagaaggtagtttagggatttatttgcgtcggtcgtcggcgttcgcggatttcgtattcgagttttggtcgtataggtgtgcgtgcgggggcgaggtttaagcgaaggagttttcgtttcgttttcggtcgtttttttttttttcgggcggaacgtaggtttttttcggtcgcggagtgggcgagtcggcggtagtttcggtggcggcggggaggttggagtattcggcgtttgcggaattttttttttatttcgtttttagtaggggtttcgtaggcgttttttgaggttagagggttcgttttggttttacgcggaaaagtattagttacggtcggggggtcgagacgggttcggcgcgtttaggtgggttgcggagcgttttgtttgttttcggtagttttattttcggggtcggtttcggggttagtttcggaaagtcggcgggtagtcgggtttcgggggattcgggttagggttgtatcggcgttagtgtttcgatttttttcggttcgagtattcgggtcgcggagttcgtttttggggtagagttttacggttcggttcggtcggtttttttcgggttcggtttttagacgcgtttgtttttttcgggtttcgggtttcgcgttttcgttatttattttggggagttttggcggggaaatttttttaggcgatcgtcgcggcggttcgggcgtttttcggtcgagcggagagttcggcggcgggggtttgggttcggcgcggttttcgcgttcggcggtagcgttacggcgcggaggcggggaggcgcggcggcgcggtttcggttcggtcggcgattagggtagggttcggtttgggttttagtttcggcgcgggcgggggtagcggtcgggtcgcggcggcgcggtttgtttattcgggtcgttgttagcggcggcggcggcggtagcggttcgggtattttttttttcgtcgtcgcgtttttttttttcgcggcgttattttcgcgttttttcggtcgtcgtcgtcgttattatcgtcggtttcggttcgttcgttcgtcgtttatgtcgttcgggttcgattgcgggttcgcgtttttagcgtcgtgggttttagcgcgttcggtttcgcgcggttgttttgcggggttttttggggcgttcgcgtgtttcggtttttggtaggggtaggtaggaagtggggtaggcgattttaaagttttcgcggtcgttcggcgcgttttttaggtttcgttgtcgtgttttcgttttcgggttcggtttttcgtttcgcgagtttttcgggaagacggtcgcggagattcgaattcggaattaaagggaaaggtttgggggaggtatttcgagttttgttttagtcggatttttgggggattggtttttttcgtttttcgtttttttatttttgggcgacgaatttgagtttgatcgggttaagtgtttagggacggcggatttggggttttttatttttaggtcgagggaggattgtacggcggtaggattagtttttttttggtttattgttagaggagttacgatttcgtttgtatttgtatagataggtggatatatgagtagaagtagtttatttttttttaatatttttagtttttttttttttttagatattaatcgtttgttaggtattaggttagttattttatattattttttttttatgtatatgatttaatttatataatttttttaggttgagattattaattttattttatagataaggaaattgaggcgtataacgtttaaataatttgcgtaaagttttataattagtagattttagattttgtaagagattggggtgtttggtagagtttgaatttaagttatttgtaatatattagtcggagtttttttttttttgggttttagaaaacgtttgtgttatttggttgaggtcgacgttgtttgagttgagaaagaaaagaaggaaaatgtggttaggagttttttaggttgggttattttaaggtcgtagagtagtttgtgtttattttttttcgttttttgtgagataatttggttgtataggattagtttgtggtttttttaatataggttttcgggtaatgggaaaaaaaaaatttattgagtgttttttatgagttaggtattattgagagttttttttttgtgttaattcgttttatttttattatatgttttatgaggtgggtatagtatatttttttttaagtatttttgatgtattattgtttgtattttatagaggaggaaattgaggtttagagaggttaaattatgataatttttaaggtaattggtgaaaaattaattagtaaatcggtttaaatttttggggtattattttttgttgggatattttagataagttaattttttagggatttttttaatttatttttttataaaatggagataatatttagtgaatgggattaggtacgattcgggtatttttataaatattgtaagaattggaaattggaggaataatgttgggtttttaaagttgagcgggaagataagtttagttggttttgttttaaagtggggatttttttttcgttaaggaattaagatttgtaggggttatattgggtagcgttagttatagttgggagaataatattttagtagttagattgaggtaggaagtgatttacgttttttttttaggttgtgagtaagagaattttattgaggggaaatagggatagggttggttttatttatttatttgtttttaggtttagaagaaaggttagtttagaaaaatagtaatatttgttgttttaggtgttttatttattttggaggttggttttaggggagttcgtagtgggtttttggagggggaggggttagtttaggtttagatgattgttatttaggtagaggcggtgggaagtggagttttttagttttttttagttagtttgtttttttaatttgtataaggtaaaattttttaaagtgggtttttagaggtgtttttttgagagggaggaatgaggataggattgggtagttgagtatttttttttgttttatttagagtgttttatattttagggttttatatgagattgtattttataataattttgttgttaaaaagaatttgaaagttattttttgtgagatttttttggaaaaaaattttatttgattataattggtgatttttgtttttattttattgtaataagttttgtgggtaggtattgttttttttattatttttaattggttttggagtttaggttttttgatttggggttttaggggtttaaggttttttggattttattttattagttttatatagtagttagtaggatttgggtatgtgatagaagtttggagatgagtgagaggagtagggtttgatgggtaagtgggggttgtaaaggggttttatttttttagtagggttttgggaggaagagtttagttaggtttttttttatttttgatttggggttaatttagagaggtttttgagaattatatagttttaaatttatttagttattttgattttaagtatttttgttgtttttttggggtgttttgggagttttttttgaaatttttggtttattttaggtatagtaaataaagttttcggtagtagtatttatatttagttgtaagtagaatgtttatataatatttagacgtgtatagaagggtgtataataaaattttattggtgtttttttcgaatgaaagggttatatttgcgatttttgtttttttttttttgtttatttgtattttttaggaatgtttataagaatttttaaaataattaaatttttaagttaatgtaaaatcgaataaagtatgtttatattttattatttagttttagagtatttgggatttattttggtcgttgttgttttttcgttatttattgtagttgtaatagttaggtttttatttttttatagggcggggtttttttagttttggttaaattattttgggaaaattttttttatatgataggtaaatagggtgtttgtgggtggggggaggagttaaaagtgatgtggtggtgatatatttggtcgtattggaattggattttaatatggttagttagttttttttattttttttatttattggggtgggtttgtatttattttttgtttggttttgttgtattttagttattggttgatttaatgattttttttcgttagttttagttttttgtgttttgttttgttttttatggttagttagtgttgttataattatgtatttaataaatgttttgggtgtagtttcgtttggtagatatttattgagtagttgttgaacgttgggttttggtgttttatagttgggttttttagagtttgtttataggaagttagagattatttttttagtagggttgtatggaggtatttgggatatattagggttttttttagtttgcgatttttttggttttttagttttaataagtttgttgtttatttttttttttttcgatttagaaatgtgaattatttaatttttatagttttttttgtttgtttgttttatgggtttgttttttttttttttagataagagtttcgttttgttgtttaggttggaatgtaatggtttgattatagtttattgtaatttttgttttttgggtttaggcgatttttatgttttagttttttaagtagttgggattataggtttacgttattcgtattttttttttttttttttgtatttttagtagagatggggttttgttatgttggttaggttggtttcgtatttttgattttaagtgatatatttatttcggtttttttaagtgttgggattattaggcgtgagttattacgttcggtttttttgttgagtttttaattagtttgttattttgaatagggttttttaattttggtattattaatattttgggtcggataattttttgtaggggatattgtattttatattgtaggatgtttagtcgtatttttagttattaaatattagttgttagtagtattttcgtttttatgatgataattaaaaagatttttaggtattgttaaatgttttttgggagataaaaattttttttagtaaagaattattgtcgtagaatgaggagtgggaacgttataggatggtggttagtgtgttagggttcgaggtagtaagagttgtttgttgggaattaagttttgagatagttagtagtgagggagaaaatttttaaatttgaaattgtttagtatgttagtataataatgggtcgtttagtgattagggtaaataattatgtatttttatgatatttgagattattttttatcgtgttggtgataatgttgaattaaggaaaggattaattatgttgattatattttattttttaaggtggggaggtgtgtgagtttttgtagtattaaagacgtatttggaaaatagattagtgtttgtttggggaagggggtagggaggggcgggaggaaatttttgggaatgatggatatgtttattattttgattgtggtgatggttttatgggtgtgtttatatattaaaatatattaagttgtatattttaaatttatgtcgtttatagtgtgttagttatattttagtaaagttgttttgaagatgtgttgtttaaagttttagtgtttgaagggtattattttgaaaatttattattgtggagtagtttatttttttgttgaataaataaggggttattgtagtatttaaaaagaaaataggaagaaaaaataaatagaagaagaagaagaaaagcgattatgggttgtaaggtcgttttaggtagggaaggaaaggaatggcgtgaagagttggtttagtcgtttttgagtgtggttcggagagtttgttttttggtttacggtaggttttagagagttttttcgttgattgatgttattaaattaatatgtttggaacggtattattagggatttgggaaaaatagaatgataaatgtgttggttgttaggaaaggaatagatgagtttggaaattataggtttttttataaattttaatttttaaaataaatattgttggggaaaaagttagttaatatttggaggagtgtgagtgttgttttttaatggggtacggtatatttgggagtagagagtatttatagaagttagatatcgtgtgttaatttgtgttaataggtttatgtttaaggggttgtacgtggtagtagggagtattgcgagcggtagtgaggggttttttttgacggtgtagatgttttttggttgatggagatttttacggaggtttttaggagttttttagcgaggcgggtgagtaaggagaggggttgtgatagcgatgagttatatgtgaaaagaaaaattgtttttgtggaggttgattgtgtattgggtattttatttatttattttttagatatttattgagtgtttgttgggtgtaggattttttttagtgttttagttatagcgagggaagtaggtagtttataggtgaataagttagtttatgagagaagtttagattattttaagagttttggaagaaaatgataaagaaggtaatgtgggagtgtttggggaagcgggagggttgttatttttggggtggttagggaagatttttgggaggaggtgatgtttgagttgaggttgaaaaaagaggtaaaagtgtaaagatttggaggaagagtgttttaggtagagggagaggtaaggatatgggtttgggggtatgagtttatgtatttggggagtagatattttttggagtatggtcgagagatgagatgagaggtaggtaacgggttggattatagagtatttgttaagttgggtttagatgttgaatttaattattagagtaatgggttttggatttttaaaatttttttggaaatttgattgatttattttttaataaaaattatttatttatttatttagagatggagttttgttttgtcgtttaggttggagtgtagtggcgtaatttcggtttattgtaatttttatttttttggtttaagtaatttttttgttttagtttttcgagtagttgggattataggtatatattattatattcggttaattttattgtatttttagtagagatagggttttattatgttggttagattggtttcgaatttttgattttagttagtttatttgttttagttttttaaagtgttgggattataggcgtgagttatcgcgtttagttattttatttttatatttttaaatttaatttaaaagatgggtttttattttgttgtttagattggttttaagtaatttttttgtttttttttttagaggtgttgggattataggcgtgagttatcgtgttcggtaaatttattttttttaaaggtttttttgattattatggggagtagagatatgggggttcgtgtgggaatttattatagttcgacgtaggaggtattataggtgatttttttgatgtgaaatgtaggggattggtttgggggagtttagtgattttttttttttttgagatagtgttatttttgttatttaggttggagtgtagtggtgcggttttagtttattgtagtttttgttttagttttttcgagtagttgggattagaggtatgtgttattacgtttagttaattttttgtatttttagtagagacgggtttttatttgttacgttggttaggttggttttaaatttttgattttaagtgaattatttgtttcggttttttagagtgttgggattataggtgtgagttatcgttttgagtgattttataagcgtttagtttttgaatgatttataaattagtgagtaggtggtaggtttttgcgtaggtttgggaaggttggataggaggtgaattatatatttgatttgcgaagtgggggtttttgtaggataagagttggcggagtagttaggcgggattttttaatttaattgtttaggtgggtttaggtgtttttttttagattatagtttttgggtatttttagttagcgatttggtaataaaaagttgttttgagttaatagttgaaatttatagtgagtttacgggtttatatttttaggttttgtgtttaatgttttataatgattgttttatatattgtttataataatttttgaggtaggtgttgttatgatttttgttttatagattaggaaattgaggtttggattcgtagttattaaggaaaataaagatttaggatttgaatttgggatataagaatagaaagtttatatatattttaatcgttttgttttttgtttttataagagagttgaattgtggttaaattagatatagatttatttagttatcgtgatgtgggtggtttagttgtgatttatatttgatttttttttggataagaattgtttatttatgtttttatagtagtatatgttgatttttttggttttttttgtttttgtttgaaatagtattgttttgttgtttaggttggagtgtagtagttttttataggtgttattagattatattacggttttgaatttttggttttaaggaatttatttattttagtttttcgagtagttgggattataagtatatgttattatgttttttgaaattttttattttttcgtaaagataaggttttattatgttgtttaggttggtttagaatttttggtgttaaatgatttttttttttttagttttttaaagtgttgggattataggtatgagttattgcgtttgttttgattttttttttgtaatatttatgttattgaagtgttgaattgttttttttttttgtaaatttgttgggaggttgtagtgttggtgattagtttagttttcgatttagatttag

SEQ ID NO: 195 - DNA, 5203 bp, Artificial Sequence
  chemically treated genomic DNA (Homo sapiens)
agggaatttaacgttttttcggggtagaagggggtagcgcgcgcgaggcggaaggatagttattttcgttgtataaattttttcgcgggtcgcgtcgcgcgtgtaggggttggacgttattcggcgttagagtcgggtttgaggagcggggtttggtcgggaacgagggttgttagtttgggtggtgttatttgttgttttattttttatttttttttttttcgtgaggaattagaggtatcgggtcgcgcgggttgagaatttttaaatttttttcggtcgtattcggttgagttaattcgtagtttttgttagtttttttgtttttcgggtagcggtttttttcgttagttaggtttggaagttattttttgtgagattgggttaggaagtgacgaaaagcgtcgaattgtttttaaattgaaaatatttttttttttttttttggagatagcgttgataaatatatgggatttcggtttttgatttttggttgtcgtttttgtttttttgtcgttaataaaattcgtattgagttttttagtgttttgattaataggtagattaatttttattggggttgggaatagtttgttttaattaatgttattttaaaagttcgttaggatgcgtttagtttcggttttttggatgtttgagcgagttagttatgatatttgttttttttttttttttagttttaaattttttagtaaagtttttagttttcgtttgtttgtttttaggtttataacgggataaatcgtaggatcgggtcgttggtttttagaataggtagcggtttagagaggggatatttagggagaagggattgaggtggttttgatttgtttgttttttttttgaagttgaatttttgttttttgggggtagaggttatagggaaaagagagatggggggatcgttatagggtgatgaaatggaaagtaaatttttttaggaattttatttgtaaaaatcggagagtgtcgttgattttagttgttttatatgttaggagttttaaatttaatttttatttggataatagtatggagggattgggaggtaaagttttgggagtttgattcgttgggttgttaggaatttttttgttgggagattttattggataatgttattttaaaggtattttgggggtgggtagggagaagatagagagagaaagagagagagagagagagagagagagagagagagagagataggttggttttttagagcgaacggaagaggattgaggattgaatttagggagtttttagtattggttatttggtaggaggcgaggaagggcgagggtatcgcggtttttttttaagtcgagtagtggttatagtttgaaggtgttacggggcggttttgggatttttttggtttttttaggttttgggttcggcgaggttgtcgggttagcgggaatcggtaggttgttggagaaaggagagggataaaggtttggaagtgggggaggtattagggattgggcggtcgggatgggagtttttgtttttagggtttattggattcgtttgttagtttcgcggataagggattttatttttttagggtttgtaaaaagagagacgtttggggtattataaagtgacgtaggtgtttgttaagattttttttttttaaaaaatgttagtttttattttttttagcgcgtcggcgttgcgtttttgtttgatcggggaaagagagagtttggaggtgttagaattgttagaatttcggatgggaggtttttggttttgaagttgggagttggaggtatttttttttagaagtgggtatttttttgttttttcgaaggtttgatggggtgggtataggggaatgttagggatcggtgcgggtgagatgtttgttttattttatgttgacgtattaatattggttagaagttttgggtaggttttggcgagttacggttttttagcgggattttttttacgtagatagtttcgttatcgggtgggacgatttcggcggttttcgcgggaacgtattcgtcggtttgagaggttttttttttggttatagggggcggagggtaggggggaataggggtttgtggggaggcggggaaaggagatagaatttaaagcgtaattttcgtcgttttttcgcgttttggagggtagtaagtgggtttcgggcgtgttggtagtcgtaattaaaatggcgatttgcgagttgtttcggttttgtatatatttttggtaatcgcgttcgtattttagtttcggtttttatatttttaggtcgtttcgtttttagagtcggtatttggtagagggagtgaggttttttacgaggtagaatagtatttttattttttttgagattagtttagagagaacgaggaaattttatttttatttttttttttttaaattttgaaaattcggttttattttggggttgaatttttttttttaaatattgatatatgggaagtagttaagttttttttgttttttgtttgtgcggaggagtttttaggagtttttttcggagtttttttttttatttaatgacgttagtggtatttatttttcgttttttgttttttttgattttttgttaaaattttttttcgtagcgagatgggggttggaggggtgggagaaggagttgatttaaagagttagtgttttggggggaaatagtaataagattacggttgttttttttcgaggtaaagtttaagaaggtgttaatttattcggtcgttaattgagaggttgtaaaaatgatattcgtttttagttcggatagaattatttttttttttttcgttttttcgtaagtttttcgtttatgtatagcggatttgagttttgagtttaagtttttttaatgttcgtttggaaagtaaaaggagagagaaagagaaagtcgattttcgttggtttgggatttagggtcgcggttttatttgtcggtatttttcgaaagtcgcgtttttgcgaaatgaaatttcgtttaggaggtcgcggatttggatattcggcgttattttttttatttttgatttaggttttttttcggcgttgcgagttttcggggaagggttagagtcggtagttttttttagttcggggaggggagagggttatgcgattttatttttggttagggtcggggaggtttttgtttttcgggagttttgttcgggttttttggtcgtagggttgttgggttttaggtaggaacgagagggtgaggtttatatgtggttcggcggtttagggcggtttgtagcgtttttattgtttcggttgttaggggttgcggcgacgcggttagttagtagcgagtttaggtcgcgtagattttattgatgagttttgatttttagtattttttttaagttaagaagagtttagcgtatttttcggttgttttattttagtttttttgttttagttttttagttttattttttttcgttttgttttggggtgtgtatagtagtttaggttttttttttttttttcggtttcgtggttcgaagtcgtcgagagagttcgggatagcgtaggattaggtagtcgttcgtttttttgttattttaattgtaggtttcgaggggcgtttttggagtgtattgaggtgtgttttaatcgtgcggtatttaataaatggatttttggtgtgtggttagaagagaaaagttatttatttattttttttttcggttttttggtaatagttgaaggggagttgttttcgtggattgagtagatttaggagagggagtcgtggtgcggagatatacgtattatatatagatgatcggtggtatatacgatatacgttgatatatcgatatcgttagtgggatatatatatatatatatatatatatatatatatatatagagagagagagagaattttttttagtattggttattcgtttttttatttaggtttttattttttttttttttttattttttttggtttttttttttttcgggcgttgcgaaaagtagtcgtatttagttaataaatggtacgtgggagaagttggtgagtgtttggtgaggattttttagggttttttataagaattttttgtatataaagtaagtggcgtgtttattcgggtttttttagttagagttgtgtttttgtttcgttgcgtatcgcggttttcgaaaggagaaaggagagaagaaagggcggggagagcggggtggaggatttggataggttttggaggtttgggttggggaggtttttggtttcgtttagttttcggttcggtaattttttttcggtttaggtttcgtcgcggttttcgtagttggaatggagttgttaggatttagtgacgttttcgttttttttttttttttttaaggggttaggtgggttggggtgcggtcgtcgttgtgttttgtgttttggggtttcggttgggatggggtgggggcgggcgggggcggggcggtaggttacgttgttttggagttggtaagaaaggatagtatagaaatttgtatttttcgaggattgggagtttcgagtttagtttagggggagtgggggcgcgatttttaatttagaaatttttatttgatcgtttaagttcgcggtagtagggcgggtcgcgtcgaatttcggcgtgcgcggagcggggagatgtaggcgagcgttagagttcgggttcgggggttttgcgtcggggagaggagtcgggatttatcggcggagtcgaaaataagtgtatttatatttaaataaacggattaattgtattaggcggggagagggagtatttaatcggttggcgcgaggtttcggcgttgttttgtataaagtaatattttgtgtgagagcgagcggtgtatttgtatgttgcggagtgattagtgggtttgaaaagggaatcgtggttcggttttatttttcgttttggtttaggcgtaggaggaagtgttttgttggaggatgatgatagaggttaggtttcgttaatgggttagtgaggagcggtggaggcgaggtcgggcgtcggtatatatatattaatatatttgagttattattaattagtataggtgtgttggttgtagttattttttttatttatattttttattttttattttttagtcgttgatagtttattttattgttaatttttgttttttttttagg

SEQ ID NO: 196 - DNA, 5203 bp, Artificial Sequence
  chemically treated genomic DNA (Homo sapiens)
tttgggaaggagatagagattgataataaaatgggttgttagcggttggagagtgagagataaagagtgtgggtgagggaagtggttgtagttagtatatttatgttgattggtgatggtttaagtgtgttaatgtgtgtgtgtcggcgttcggtttcgtttttatcgttttttattggtttattagcgaagtttgatttttgttattattttttagtaaaatatttttttttgcgtttgaattagagcgggaaatgaggtcgagttacggttttttttttaaatttattaattatttcgtaatatgtaaatgtatcgttcgtttttatataaaatattgttttatgtaaagtagcgtcggggtttcgcgttagtcgattggatgtttttttttttcgtttggtgtaattggttcgtttgtttgaatatgaatatatttgttttcggtttcgtcggtgggtttcggttttttttttcggcgtagggttttcgagttcgggttttggcgttcgtttgtattttttcgtttcgcgtacgtcgagattcggcgcggttcgttttgttgtcgcgaatttgagcggttaagtgaaggtttttgggttgggggtcgcgtttttattttttttaagttggattcgggatttttagttttcggagggtgtaagtttttgtgttgtttttttttgttaattttaggatagcgtggtttgtcgtttcgttttcgttcgtttttattttattttagtcggggttttaagatatagagtatagcggcggtcgtattttagtttatttggttttttggaagaagaggaaaggggcgggagcgttattgggttttggtagttttattttagttgcggaggtcgcggcgaagtttaggtcgagaggaggttgtcgggtcgagaattaaacgaggttagaggtttttttagtttaagtttttagggtttgtttaaattttttatttcgtttttttcgtttttttttttttttttttttttttcggaagtcgcggtgcgtagcggagtagaggtatagttttggttggagaggttcgagtaaatacgttatttattttgtgtatagagggtttttgtgaaaagttttgaagagtttttattaaatatttattaattttttttacgtgttatttgttgattaagtgcggttgtttttcgtagcgttcgagaggaggggaagttaggggagataagaggggagggggagtggaagtttgggtgggggggcggatgattaatgttgggagggattttttttttttttttgtgtgtgtgtgtgtgtgtgtgtgtgtgtgtgtgtgtgttttattggcgatgtcggtatgttagcgtgtgtcgtgtgtgttatcggttatttgtgtgtggtgcgtgtgttttcgtattacgatttttttttttgggtttgtttagtttacggaggtagtttttttttagttgttgttagaaaatcggggaggaaagtaagtaaatggttttttttttttgattatatattagaagtttatttgttgaatgtcgtacgattaggatatattttagtatattttaaaggcgtttttcggagtttgtagttaaggtgataggagagcgagcggttgtttggttttgcgttgtttcgagttttttcggcggtttcgggttacggagtcgggaaggagaaggaaggtttgggttgttgtatatattttaggatagggcgagggggaatagggttgaagagttgaggtagggaggttgaaatgaagtagtcgaagggtacgttagattttttttgatttagggaaagtgttgaaagttagagtttattaataaaatttgcgcgatttgaattcgttgttgattggtcgcgtcgtcgtagtttttggtagtcgggatagtgaggacgttgtaagtcgttttgggtcgtcgggttatatgtgggttttattttttcgtttttgtttgggatttagtagttttgcgattaaggagttcgggtagggttttcgggaagtaaaggttttttcggttttagttagaggtggggtcgtataattttttttttttttcgggttggggagggttgtcggttttaattttttttcgggagttcgtagcgtcgggaggaaatttgggttagaggtgaaggaggtggcgtcgggtgtttaggttcgcggttttttgggcgaggttttatttcgtaggagcgcgattttcggaggatgtcggtaagtggggtcgcggttttgagttttagattagcgaaagtcggttttttttttttttttttttttattttttaagcgagtattaaagaagtttggatttaagatttaagttcgttgtgtatgagcgagggatttgcgggggggcgggggggggggaagtgattttgttcgaattggaggcgagtattatttttataattttttaattagcgatcgagtggattagtatttttttaagttttgtttcggaaagaagtagtcgtaattttgttgttatttttttttagggtattggttttttgaattagtttttttttttatttttttaatttttatttcgttgcggagaaaagttttaataaaaaattagaaaaggtaaggagcgaggagtgaatgttattgacgttattgggtggggaagggggtttcgggaaagatttttggaaattttttcgtataaataaaaaataaaaaggatttggttgttttttatgtgttaatatttggggaggggagtttaattttagaatgaggtcgagtttttaaagtttaaggagagaggggtgagagtgagattttttcgttttttttggattggttttaaggaaggtgggggtgttgttttatttcgtggggagttttattttttttgttaagtatcggttttgggggcgaagcggtttaggggtgtgggggtcgagattgaggtgcgggcgcggttgttagaggtgtgtataaaatcgagataattcgtaggtcgttattttaattgcggttattaatacgttcgaggtttatttgttgttttttaagacgcgggggggcggcggggattgcgttttaggttttgtttttttttttcgtttttttataggtttttgtttttttttatttttcgttttttgtggttagagggaggattttttaggtcggcgggtgcgttttcgcgggggtcgtcggggtcgttttattcggtagcggggttgtttgcgtggagggagtttcgttgggggatcgtggttcgttagagtttgtttagagtttttagttagtattgatgcgttaatatgaggtgaggtaagtattttattcgtatcgatttttggtatttttttgtgtttattttattaggttttcggggaggtaaagaagtgtttatttttggggggaagtgtttttagtttttagttttagaattaagagttttttattcggagttttgatagttttgatatttttaaatttttttttttttcggttaagtagaggcgtagcgtcggcgcgttggaaagggtgaagattggtattttttggagaaggaaagttttggtagatatttgcgttattttgtagtgttttaaacgtttttttttttgtagattttgggaaggtgggattttttgttcgcggagttggtaaacgggtttagtgagttttaaaggtaaaggtttttatttcggtcgtttagtttttggtgttttttttatttttaggtttttgttttttttttttttttagtaatttgtcggttttcgttaattcggtagtttcgtcgagtttagagtttagaaaagttaagaagattttagagtcgtttcgtggtatttttaggttgtggttattgttcggtttggggggaagtcgcggtgttttcgttttttttcgttttttgttaaatggttagtgttaggggttttttgggtttagtttttagttttttttcgttcgttttgggaggttagtttgtttttttttttttttttttttttttttttttttttttttttttttttttgttttttttttgtttatttttaaaatatttttaaaataatattgtttagtggagttttttagtaaagggatttttagtagtttagcgggttagatttttaaggttttgttttttagtttttttatgttgttgtttagataggagttaggtttaaaatttttgatatgtaggataattgaaattagcggtatttttcgatttttgtaaatagggtttttagaaaagtttgttttttattttattattttgtgacgatttttttattttttttttttttgtaatttttgtttttaagaggtaagagtttagttttaaaggaaaagtaagtaagttaaggttattttagttttttttttttggatattttttttttaaatcgttgtttattttaaaggttaacgattcggttttgcgatttgtttcgttgtagatttgggaataggtaggcgggaattgggggttttattgggggatttgaggttggggagggggagggagtaaatgttatggttggttcgtttaagtatttagggaatcgaagttaagcgtattttgacgggtttttaaaatgatattgattaggataagttgtttttaattttagtaagagttaatttgtttgttaattaaggtattaaggggtttaatgcgagttttattagcgataggagaatagaggcggtagttagggattaaaagtcgggattttatatatttgttagcgttatttttaaaaaaaaaaaaaaaagtatttttaatttgaaaataattcggcgtttttcgttattttttaatttagttttatagagggtgatttttaaatttggttagcggggaaaatcgttgttcgggggatagaggggttgataggaattgcgggttggtttagtcgaatgcggtcggggagaatttaagaatttttagttcgcgcggttcgatgtttttgattttttacgagaggaaagggaatgaaaaatgaagtaataaatgatattatttaggttggtagttttcgttttcggttagatttcgttttttaggttcggttttggcgtcgggtggcgtttagtttttgtacgcgcggcgcggttcgcgggaaagtttgtgtagcgagagtgattgttttttcgtttcgcgcgcgttgtttttttttgtttcggaggggcgttgggtttttt

SEQ ID NO: 197 - DNA, 13377 bp, Artificial Sequence
  chemically treated genomic DNA (Homo sapiens)
agagaggggattttattatgttagttaggatggtttcgattttttgatttcgtgattcgttcgttttggtatttttaagtgttgggattataggtgtgagttattgtatagggtttttttttttttttttttaaatgggttaggtatgatggtttgtgttagttatttgggagattaagatgggaggattatttgaatttaggattaaggttgtagtgaattatgattgcgttattgtattttaatttggaatatagagtaagattttgatttaaaaagtaatatataaataaaagaaagaaagtaaaaagaaaattaaatgttatgtggaattttagattagattttggattagaaagagggtaggaatggggaaacgggggaaatttaaataaggtttatagaatatttaatagtattatattagggtttatgaatgtatttggttaatagaaaaaaaaagtaatttattagggttaattttttgggtttggtaattatattatggttatttatataagatgttgatattggggatgttggatggaaagtatgtgggaattttttgtattatgtttataattttaagtttagaattttgttaaaataaaaattaaaaagtataaatttttgaatttgagaaaaataaattttaggtttaatatgtttttaataggtttagttgaattaatggtataagtataaaagatatatataatatttaagggaaaaaattataaaattaaggtaatagttgaaattgtatttaaaaatttatgtagatagtcgttaaagatttaaggtttttagattatttgttttttgagttaaggtaataaatttaggggttagaatatatagggaaaatttagatacgaggtttaattttatattttttgtaagagattttattattagtattttttaaaaggtggttttttgatttttgtttgagtgattttgagaatggagggtttattattgtatttttttgggtgatttttagtttgtaagtttaagtgttattgatagtagtgagaaattggaaataatttaaatgaatagagttaggtaattttagttattaagatgatagagtattgcgtggttattgaaagtgataaaaatgtggtttattttaatgtatagaaatgtgtatatgtagtaatttaaagtgataagggtaaaatagaagttgtttttatataacgattatagttatgtttaaattttagtgtgtataataagagttggaagataatttagaaggttataaatagttgtaattttgagttgttttgattttttataaagtgatttatgtatagaattttaaatgaaatttagtaggtagaattttatttatttatttatttatttatttttgagattgagttttattttgttgtttaagttggtgtgtagtggtatgatttcggtttattgtaatttttgttttttgcgggtttaagtgattttcgtgttttagtttttcgagtagttgggattgtaggtgtttatcgttatgtttggataatttttgtatttttaatagagatagggttttattatattggttaggttggttttaaatttttgaatttaaatgattcgttcgttttggttttttaaagttttgggattataggtatgagttattatgtttagtttagtatgtagaattaaaaaaaaaaattttttattaagggatttggagattgttatgttaagatttattgagtatgtttttatggaatattagttagggaaggattttaaggttatgtttgagttttgtgggaaagtgatatgattgattagtgatgtttgttaatgatgatgaatgagtagtggtagtgtgtatgttatgtagttgttattttttttaaagatatttttatttttattgttattttgttatttttgtagattttttgaaagatgagtttgtgatatcgaaggtattatgtgtaggaagaaattttttttagttaaaagttataggattttgggtaagttattgggatataagatggtatgaaataaatatttgaagggaataaaagtaaaattttttataataatagttagtttgagaataggtgggtttaatagagaagattttgtggtattcgtgttgggttttgaaggatgaggagattttataggtgattatgttcgggaagggtattttatatggagggtatagtatggataaaggtatggaggtgaggaaataagaggttttttggggagaaaggaaagtgtaggttagttgtagaagatgattttggaaacgtaggaaatggagaatgttttgaatgttaagataataagtttgagttttatttagttagtagtgggtttttgatgagttttgatgtaagtgatgtttaaaggaaatgagattagaaggcgataagaaaaagtttgggtattattattatgaggggatttgaggatttagaatttgataaaattttttgggggtgtaggttagtaattagagttttgggataacggggtgtgggagttataattaagttttagtaagataattttttgagttttatttattgtttagagattttttgagttttgagttaggtatagggatgtaaaagttatgggttttgttttttgggagtttttagttatgtgggtttttttagatatggggggtagtagatagggtagattataggtaggagaggatttgggatttgatcgagttgttagaagattaattgagtaggtaggggttgtaggttttagggtttggtagttaagttgggatgttttagtttgatgtagtcgattagggattttcggaagggatttgttgtgattttttgggtgtttgcggaaggttagtttggtagtagttagatttttggagttttattagataagaaaagggtttttgaagtttttgttggggaatttggaggttttatatgatttaggggattttatgaattttgttatattaaaggatttggtaagattttaatgatttgggttaggcgcgtggtttatgtttgtaattttaatattttgggaggttgaggttggcggataacgaggttaagagattgagattattttggttaatatggtgaaaatttgtttttattataaatataagaaaattagttgggcgtggtggtacgtatttgtagttttagttatttgcgaggttgaggtaagagaattgtttgaattttgaaggtggaggttgtattgagttaagatcgtgttattgtattatatattggtgatatagtaagattttattttaaaaaaaaaaaaaagattttaatgattttataattttatttatttgttttttaaatatagggggattttttttaatttagggaaggtattttttattttgttttttattttatagtttaatgtatttttggggattatagggaggaatggaagttaagttggtttgagatattattaggtagggatttttttttttgtgttaggtttagttgatttttagttttttttttttttttttattataaggtttggggaagttttagggttttggttgggtagtgggtagtagtggttagagtggaaaattttttattagttggatgatattagtgtttatagatttggttttggttttttgtttggggtttgaggatttgataaatttgtttggagttttgagtgtggggtacgaggtcgtagagaggttattggtacggggattttttttttatttattttaaaatggagagttgttttgggttaggtgagtaggtattgggttagttttaggttattttaggtaatgggaagttggtagttgggaagtggggtgggagttgggggaggtgggggagggggtgtcgagatgagggatagaggaattaataaattagatttgggggttgtataagggtttgggagtgggttatgggagatataggtattttaggagaattgaagatagaagtagggacgtagcggggtagaagagagaacgaggaatagtagtagggcgtaggtttgtttttttttatatgtttttgttttaggtttttgatttaggtcggtataagaggtataattagaagttggtgtggtttattttgtgagtgtgttttgagtatttgttgaattatgataagtatttttttaaatgttttgtttgattttgaaagtttttgaagttgtttaaatagttgtgattttagttattgttattttagttttattattagtattagaattttcgatattgttattagtattatttttattattattattattgtaattagtattttagttattagttattgattttttgattttttgatatttttatttttttttttgagggtttgagggtgttaggagttaggagtggagttaaagttttaagtatataatttagagataagtagtttttaatgattttgtttatttagaagatatttagtagtgtttggagatatatttggttggtataatgggtggattgtttttggtatcgagtcggtagatgttaggaatgttgttaaatattttatagtatataggatggggtttataataaagaattatttgttttaaaatgtcgatagtattgaggttgcgaaattttggttatagattttatttattttagtattttgtttttatttttttttggttttcgtttttaaatgtatatattatgtttttggtttgggaataagacgtaatttttattattttattttacggtaatttttttttttatcgtttgtattttttggttttcgatgtttgaattaaaaagttaataagatgaaagtttgttgcggttatttttaagaaggaaaaatatatagaaacgatatacgaagtatagggtatattttgggttgaggttatggttgtttagggtagggaggtagcgattagattaattttgggcgtataaaagaggaaagagtgtttaggtttttattttattgcgattgtagaatttagagttgttttttttttgtggttagttggggattagtattatgaagtggatggtggtggttttggtttgtttttagtttttggaggtagtagtggttaagtgagtttgggatttggttgttggtgtagggagtttggatgggagtttaaagttttgtaaagggtaattgggttaggggatattttgtttgtttttattttgggatttttgttaggggaagggaagtttttttttgttgatgttagataggatatatgggtggaaggagatatagtttttgtttttaggaaattttttattaaagggaaaagtacgatttttttttttatttgatgaggaaagatggatttgaaatagaggtggtaagggtgattattgtttaagtagtttttgaatggtaggtgtggattttttttatagaagggagtaattttttttggataagggatattttatttattattttttttaaaagttgttttaaggttgaaaatttattggtagatgttaaaattatttaagtagaaatattagtaaatgtaaatttttatatttgaggggttaggagaaaattttggagtagatggtatggtttataggttattaggaaggcgtttagtttgttattttgtttgttatttttttatttaagagtattttttgaggttaagagttggttttttttagaaatttttattaatatgtatatttggtagaggtggttaattagtttttatagtttagggtgaaggggtttagtagagaatttttggagaatgtagagtttttagggaatggggattaagtagaattttggagtttagagtaaggttagagtggatttttagagatttttaagtaatggtagtaagtaagtttgggaaggagagtgtcgagggtgtgattgagtttataggatgggatagaaacggtgatttataagttttaattttagagttgatttgtgttttagattatttaggttaatttttcgtggttttggtgttttgagaggagtagtgatggggtttaggttatgcgattagtagttgggatagaattaggattttgtgttttgagttttagttagtgttgttgtcgttgttttatgttttgttatatttagttggtgttaggtgtttgagggttgtcgtagaaaggaattttggggtgaattttgttatttttgaaattttttttgtttttttttttgaaatagagtttcgtttttgttgtttaggttggagtgtaatggtacgattttaatttattgtaattttttgttttttaagtttaagcgattttttcgttttagtttttggagtagttgggattataggtatgtattattacgtttagttaattttgtatttttagtagagacggggtttttttatgttggttaggttggttttaaattttcgattttacgtgatttgttcgtttggattttttaaagtgttgggattgtaggtatgaattattgcggttcgttagtattagtttttaaaaaataattgtttttttttttattaattttttttttggttttttatatatttataattaatgaacgatttattgatagttagagtttgattttgaatattgttataatttaggaagaattttataattattatgtttttattttttttttttatgtttatttttattaattgaaattagatttttttttttttttttgagttgaagtttttgttatttaggtttgagtgtagtggcgtgatttaagtttattgtaatttttgttttttgggtttatgtgatttttttgttttagttttttgagtagttgagattataggtatatgttattacgttatttatttttgaatattagtatttgattattggtgataaatgagtgatagtatattttataagggttttggtatatttagtatgttaggttttgttgattgtggttaagagttgttgtataagtggatattttagtttttgggttagagagttaagaatatattttgttagagttttcgaattttttttagagaatttagtttttttagggggtttttgaattgtattatgatttataggttattttttatttattttttatttagagataatggtattgatagggaaaatgggaaaatgtagtagtttgtgaggatattgtttatttagtaatttttttttttatttattgttttttagtaaaggatttttgaatagtttttttaattttattttttttagtttttgttttttattttttttttttttttgagacggagttttattttgtcgtttaggttggagtgtagtggcgtaattttggtttattggaagtttcgttttttaggtttacgttatttttttgttttagtttttttagtagttgggattataggtgttcgttattatgtttagttaattttttgtattttttagtagaaatggggttttattatgttagttaggatggttttaatttgttgattttatgattttttcgtttcggttttttaaagtgttgggattataggtgtgagttattacgttcggttttttttttgtttttgttttgatttttagtttgatttttaaattttttttttaattatatattgatattagattatgtttttttatattttttggaaatgttggtagaaaatgaaatttatttttaatatttattatttgtaaatgtgtatttattgtgtttttttaagtagtttatgtaggttttgtggtagatgtaattttaggtatatttagtaagttaaagggttaaaatatttagtattgtcgtatatggtagtgagtagaattatagatgttgatgatattacgtaattagtatttttttatgtaaatgaaggttgttagtatgttattatagtgtttattttttgaagttggaatttatgttatttggttttattaagattaagtaggattattttacggtttttagttaataattgaggagaaattaatatgatgagagagcgagaagaaatggaattttttttaaagtagatttattttttttttttttttttattttgttttttttgatttttttttaatttttagaaattttatttttgatgatgtagttatatagttaagatttgttgagaaatttgttatttgagaataattgaaatattttaattaaaaggtattatatttttaagttatagattttttgaaatatttagaattttaatgttgttattttttatatggagagttttttaaaaaattatatgataaatttagaagttttttattagaataaaagataaatgttgaaaagatttaattatttttttatttaatatttagtgatatttatagaatgtttttaaatattgattatggtttttagttttagttgatttagatttttaaaataaaattattatggtaattaaaaaggtaaaagttgatattttgttaggtttattttttttatatgtagatcgattaagggtgtgtaggatatttatttaaagttgttgatttatttaaaatttgttgatgtagaagtatttagatatattatgtttttttttaattatttgtaagtttattagttttgggtattaggtgtttgttatattggatgatgtatattttaagtggaaatgttagaatgatggtttttgagaatacgaagggaaatttgtatatattagaaaaatataaaatagaatttttttttttgttaaatgggtgttaggttttattttgaaataaagtggttagagtatgtgtgagaggtgatttaaatatatttttttttttgattcgagtatatttgaggtggtattttttttattttttattttgtttgttggttaaggtgatttttattttttgtgttatttttaggagatttttattttatgattatatatgttttttttttagagaagttggtttgtttagtttaaattagtatggtgaggtgtaaagtagttttgtgttttttttgaatggatttattttgtttatatggtaggttagtgagtcgttatgataaatttgtaatgggaaaagggttgtgtaggagaggatgtgcgtgattagtagatttatagattagaaaatgaaattagaagaaagaatttttaaagtgttttttttatttgatagttttttatggagaggatgtggaatggttttttagtgttttttttttttggtttttggttgttttagtatatttttttttagtagaggagttgattttgcgaggtattagtgttttgggtgtggtgttgttatatttatttatagaaataattttttttttgtaggatttgaagttttgttgtattttatatgataagattttggtagtaattaaatttttgaagatatattaaggttaaaatggggatttgttaggtattaggttttgagttgtaagaggaggttatttagatgtgatttagttagtattgaatttttcgaaggaaaggatataaaaagtaaagtagagtaagttaaagatagtgttttggtgtgtttaagtttatgttgttttaatataatattataattattagttatatgtgatttaaaattaattaaaattaaaagtgtagttttttagttttattagtatattttaagtgtttagtagttacgtgtgattagttattatagtattggatagtattgtaatatatttagatagagaatattattaataataatgtgtaataataatgaattttttatttgtatatattttttatagttttaatatattagtgatatatatgattgatgatatatagagaatatatatagatagaaaatattgatattttttttattgatatatagagaatatattattgtagaaagttttgttggatagtgttagtttaagtggaagaatttgagaaataaaattttttttttgatttttatgaagagttttttatttttatataatttattggattaatgtattaaagttttttttgagacggagattagtcgttgggtttagtcgttattttaagattattggtaatttttattgttatttaagtatttttaatgatgatatgttgaattttcgtataaatgggggttaattaatgaagggagaaattatgatttgtaaataatttttagaagttttgtttaggattaggattgataagatatagtagaagtatgaatggtattttatgttttaggagaaaatatagggaaatatatatatagattttttagtatagagtgagataatttgttaaagatgttagggtaagagttataattttattaagggtttaatttgtattaggtttaatgataagtgttttgtatgttttatttttttaatttatagttttcgaaattagtataaatatttatatttattttatatgaggatgtataaaggtataaggatgtttggtattattaattttttttttttttaaaattttttaaaaattatttttaaaaaattttttttaaagagaatataatgtaaaaggaagaagagtttatgagaaaataaattagattttattttagattttgatattttttagttagagaatataattttttattgggaataaaagagttttaagttaatatatattttttaattatgatattgtatgatgttgttattttttttttaaaatgataataaaaatattatgtggataatagttttattatttatagtgtttttaatgtttattatatgaatttatttatttatttgtaaataatttttagttttagtttttttagttataatatgatattaatgaaaaatatttgtttttggaatatggaaattggatttaaattaaaggaattattgcgtgtggaagggttgtatatttaaggatattatattattttattttttattataaatttaggatatattttatattttatattttaatagtttattttttgttttattttttaaataaaaataattgtttgtaataaaagtattttggaatttgttttttttaaaataataataaaaaaaaaataaaagtttaaattttaaattagtttttttgaataattaaaattaatttttttattttatttgaatttattatttaaaaattttttataatgaattaatttgtttttatatttaagttaataaaattacggttgaagtaatatttacgtattatgtaaagtgaggttacgggtaaataaattattttaaaatgatgttgtaattatatttttatgaggtttatggttaggtaagttattttgggttttttattaatttatttgtgttaaataaaattaatattttaaagtaaaataatttaaataaaatttatatttggaaattaatatttaagaatagtagtatgaaattatagtttaattattttaattaagtaaaggtaagtataggtatataggatattaacgatagattattattattgttgtgaattatagatgttaattattaaagggaataaaaaaatttaagattatataagtttttatatgttagtgtgaggtatgatagtaaaaagttaattttaaatacgtgttatgtgtaagagtttttagtgatttggaagtggttgttgtatttaataattttgatgtttagatagaaaaaataaataaaatgttaaggataataaaaatgattaacgatatgatttttaatagatattttttttttaataggtttaatatatatatattatttaaattttataatagttttaagaggtaatattattatttttatttgataaatgaagaaattgagttttagaaaagtaatatttttaacgttttatagttggtatttggtagaatttaaatttatatttaagtattttgttattagtgtttgagtttttagtaattgttttagagtagattaaattgaaagaaaagattgatttttataaaattaatatattatgaaaaatttggagtattatttatattttataaaaattatggtttttatttttaattttttatttttattttttttttaaaaagggtaggtaatatattttagtttttgtatgtgtattttattagtataataagttggtaaatataaggtaaatgtttaataatatattaaagcgaaaaaggtttttatgaatattaagtgtattatcgttagtatttatttatttcgagtatggtttgaagtaaagcgggtttaattattttagaataattgtttatttatagtgattttttttttaaaagatcgaatatcgttttttttagttttttgtgtaaggtacgagtattttttgggttgggcgtagcggtttacgtttgtaattttagtattttaggaggttaaggcgggcggattatttgaggtcgggagtttgagattagtttgattaatatagagaaattttatttttattaaaaatataaaattagttgggtatggtggtttttgtttgtaattttagttatttaggaggttgaggtagaagaatagtttgaattcgggaggtggaagttgaggtgagtcgagattaagttattgtattttagtttgggtaataagagcgaaattttgttttaaaaaaaaaaaaaaaaattatatattttgggttaggtgcggtggtttatatttgtaatgttagtattttgggaggtttaggtaggcgagttacgaggttaggagattaagattagtttggttaatatagtgaaattttgtttttgttaaagatataaaaaattagttaggtatggtgataggcgtttgtaattttagttattcgggaggttgaggtaggagaattttttgaatttaggaggtagaggttgtagtgagcggagattgtgttattgtattttagtttgggtgataaaagtgaaattgcgttttaaaaaaaaaaaagtatatattttgaaaagggtaaagtttaaagttttttttttttttttggggaggaatttatgggatatttgatagtaaagggttagggagataggaggatttttgagatgaggtgaggagtgtatgtatggtgaaatgaatggttttttgaattttagagtaagtgttgagaagagttttgtaagaaagaggggaagaggtaaagggaggaagaaatacgcgcgcgcgtatatatatatatatatatagagagatagatagatagagatagagagtaaaaggttgagagagagaaaaagatatatatagataagggggaataaatagagtggtagggaggttgaagtatgtagttaagagaaggagagagagaaagagaggagtgggaagagaggaaggagggagggttttgttttatatgtaatttttttgtaga

SEQ ID NO: 198 - DNA, 13377 bp, Artificial Sequence
  chemically treated genomic DNA (Homo sapiens)
tttatagaaaggttgtatatgaggtaaggtttttttttttttttttttttttattttttttttttttttttttttttttttaattgtatgttttaatttttttgttattttgtttgtttttttttgtttgtgtgtgttttttttttttttttagttttttgttttttgtttttgtttgtttgtttttttgtgtgtgtgtgtgtgtgtgcgcgcgcgcgtgtttttttttttttttgttttttttttttttttttataaagttttttttagtatttgttttaagatttagaaaattatttattttattatgtatgtattttttattttattttaagggtttttttatttttttggttttttgttgttaaatattttatagatttttttttaggaaaggaagagggattttaggttttattttttttaggatatgtatttttttttttttgagacgtagttttatttttgttatttaggttagagtgtaatggtataattttcgtttattgtaatttttattttttgggtttagaaaatttttttgttttagtttttcgagtagttggaattataggcgtttgttattatgtttggttaattttttgtatttttagtagagatagggttttattatgttggttaggttggttttgattttttgatttcgtgattcgtttgtttaggttttttaaagtgttggtattataggtgtgagttatcgtatttggtttaggatatgtagtttttttttttttttttgagatagagtttcgtttttgttgtttaggttggagtgtaatggtttgatttcggtttattttaatttttatttttcgagtttaagttatttttttgttttagttttttgagtagttgggattataggtaagggttattatgtttagttaattttgtatttttagtagagatagggtttttttatgttggttaggttggttttaaattttcgattttaaatgattcgttcgttttggttttttaaagtgttaggattataggcgtgagtcgttgcgtttagtttaggaaatgttcgtgttttatataagagattaggaggagcgatgttcggttttttgagagaaaaattattgtgagtgagtaattattttagaatggttgggttcgttttgttttagattatgttcggaatgaatagatattaacggtgatatatttaatgtttatggaaatttttttcgttttaatatattattgaatatttattttgtgtttgttaatttgttgtgttagtgaaatatatatataaaaattgagatgtattgtttgttttttttggagaagagatgaaggtggaaagttggaggtgaaaattataatttttataagatatgggtaatgttttagattttttataatatgttaattttatagaagttaatttttttttttaatttagtttattttaggatagttattaaagatttaggtattgataatagaatgtttggatataagtttggattttgttaaatattagttgtaagacgttgggaatattatttttttgagatttagtttttttatttattaaatagaggtaataatgttattttttaaagttgttgtgagatttagataatgtatatatgttaagtttgttaaaggaagagtgtttattaagaattatgtcgttaattatttttattatttttagtattttgtttattttttttatttaaatattaagattgttgagtgtagtaattatttttaaattattggaaatttttatatatagtacgtgtttggagttgattttttattattatgttttatattaatatgtgaaaatttgtataattttgaatttttttattttttttaatgattaatatttgtaatttatagtaatggtaataatttgtcgttggtgttttgtatgtttgtatttatttttatttggttgaaataattaaattgtagttttatattattatttttaaatgttaatttttaagtgtaaattttatttaagttattttattttaaaatgttagttttatttagtatagataagttgataaaaagtttaaaatgatttgtttaattatagattttatgaggatgtaattatagtattattttaaaatagtttgtttattcgtaattttattttatataatacgtaagtattgttttaatcgtaattttattagtttggatgtaaaggtagattaatttattgtgaaagatttttgagtgatgaatttaggtagagtaagaagattgattttagttatttaaagaaattggtttaaggtttgagtttttgttttttttttgttgttgttttgaaaaaaatagattttaaaatatttttgttatagataattatttttatttaaaaaatgggatagaaaataagttattaaaatatgaggtataaaatatattttaggtttataatggaaaataaaataatataatatttttagatatatagtttttttatacgtagtagtttttttggtttaaatttaatttttatgttttaagagtaagtattttttattaatattatgttatagttaaggaaattgaggttaagaattatttgtaaatggataaataagtttatgtaatagatattgagagtattataaataatagagttattatttatatagtatttttattattattttaaaggaaaaataataatattatatagtgttatagttgaaaagtgtgtgttaatttgaaatttttttgtttttagtaagagattgtattttttgattaggaagtgttagaatttagagtagaatttaatttgtttttttataaattttttttttttttgtattgtattttttttgagaaaaattttttgaggataatttttagagaattttggagaaaagaagagttagtaatattaggtatttttgtgtttttgtatatttttatgtaaaatggatgtaaatatttgtattaatttcgaagattgtagattaaaagaataggatatataaaatatttattattgggtttgatgtagattaagtttttaataaaattgtaatttttgttttgatatttttaatagattattttattttatattgaaaaatttatatgtatatttttttatatttttttttgaaatataaggtgttatttatgtttttattatattttgttagttttaattttaaataagatttttgaaagttgtttataagttataatttttttttttattaattggtttttatttgtacggaaatttaatatattattattaaaagtatttaaataataatgaggattattagtggttttagaatagcggttaggtttaacggttagttttcgttttaaaaaaaattttagtatattaatttagtaaattgtatagggataaaagattttttatagaaattaaagaaagaattttattttttaaatttttttatttagattaatattgtttaatagaattttttgtaatgatatattttttatatattaatgagagggatattaatattttttatttgtatatattttttatgtattattaattatatatattattgatatattgagattatagagaatatatatagatagagaatttattattattatatattattattgataatattttttatttgaatatattatagtgttgtttagtattatagtaattagttatacgtgattattgagtatttgaaatgtgttagtgagattaagggattgtatttttaattttaattaattttaagttatatgtggttagtggttatggtattatattaagatagtatagatttaaatatattaggatattatttttagtttgttttgttttgttttttgtgttttttttttcgaaagatttagtattagttaaattatatttgaatagtttttttttataatttaaaatttgatgtttggtaaatttttattttagttttgatgtgtttttaggaatttaattgttattaagattttattatatgaaatatagtagagttttaaattttataaagagagaattatttttgtaaatgaatatagtaatattatatttagaatattgatgtttcgtaaaattaatttttttgttaaaaaaaaatatgttggaataattaaaagttaaaagagaagaatattaaaaaattattttatattttttttatggagagttgttaaatgaaaagggtattttggaaatttttttttttgattttattttttgatttataaatttgttgattacgtatatttttttttgtatagttttttttttattataaatttgttatggcgatttattaatttgttatatgggtagagtaaatttatttaggaaaaatatagggttattttgtattttattatattgatttaagttaggtagattagtttttttagaggaaaaatatgtatgattatgaaatggaaattttttaagagtgatataaaagataaaagttattttaattaataaataaaatagagaataaagagaatattattttaggtatattcgggttaagaaagaagatgtgtttaagttattttttatatatattttgattattttattttagaatagggtttagtatttatttggtaaaaagaggaattttattttatatttttttgatgtgtataggttttttttcgtatttttaaaggttattattttaatatttttatttaaaatgtatattatttagtgtgataggtatttagtatttaaaattgataaatttataggtaattgggaaagaatatgatgtgtttgaatatttttatattagtaagttttaaatagattagtagttttaaataaatgttttgtatatttttggtcgatttgtatatgaggaaagtaaatttgataaaatattagtttttgtttttttaattgttatagtagttttattttaaaaatttgaattaattggagttaagaattataattaatatttaaaagtattttataaatattattaagtattaaatgaaaagataattaaatttttttaatatttattttttgttttgatgaaaaatttttagatttattatataattttttaaaaaattttttatatgagagatgataatattaggattttaaatattttaaaaaatttatagtttgaaaatatgatgttttttaattggagtattttaattatttttaaatagtaaattttttagtaggttttaattatataattatattattagaaataaaatttttgggggttgaaggggaattaagaaaaataaaatagggggaaaaaaagagggtaaatttattttagagagaattttattttttttcgtttttttattatattgatttttttttagttgttaattaaggatcgtagaataattttgtttggttttggtgagattaagtggtataaattttagttttagagagtagatattatggtaatatgttgatagtttttatttatataaaagaatattaattacgtggtattattaatatttgtgattttgtttattgttatatgcgatagtgttgggtattttaattttttaatttattaagtgtatttagaattatatttattataaaatttgtatagattgtttaaagagatatagtgaatatatatttataaataataaatgttaaaaatgaattttattttttgttagtatttttaagaagtatgggaaaatataatttaatattaatatatagttaagaaaaagatttaaaaattaagttagaaattaaaataaaaataaaaagggggtcgggcgtggtggtttatatttgtaattttagtattttgggaggtcgagacgggaggattatgaggttagtagattgagattattttggttaatatggtgaaattttatttttattaaaaaatataaaaaattagttgggtatagtggcgggtatttgtagttttagttattagggaggttgaggtaggagaatggcgtgaatttgggaggcggagtttttagtgagttaagattgcgttattgtattttagtttgggcgatagagtgagatttcgttttaaaaaaaaaaaaagagtggggggtagagattgagaagggtagggttagagaaattgtttagaagttttttgttaagggatagtgggtgggagaagagattgttgaatgggtagtgtttttataggttgttgtatttttttattttttttattagtgttattgtttttgaatagggggtggatgaggggtaatttataagttatagtgtagtttaaagattttttggagaggttgaattttttaagaagggttcggaagttttgataaaatgtgtttttagttttttgatttaagagttggaatgtttatttatgtagtagtttttggttatagttaataagatttgatatgttaggtgtgttagagtttttgtgaggtgtgttattatttatttgttattagtaattaagtgttgatatttaagaatgagtggcgtggtggtatgtgtttgtaattttagttatttaggaggttgaggtaggagaattatatgaatttaggaggtagaggttgtagtgagtttagattacgttattgtatttaagtttgggtgatagagattttaatttaaaaaaaaaaaaaggaatttgattttaattggtaaaagtgaatatgaagagagaaagtagagatataatgattatagagttttttttggattgtggtagtgtttaggattagattttagttattaatagatcgtttattaattgtgggtgtatagagaattagggaaggagttagtggaagagaaaatagttattttttaaaagttagtgttggcgggtcgtagtggtttatatttataattttagtattttgggaggtttaggcgggtagattacgtgaggtcgggagtttgagattagtttgattaatatggagaaatttcgtttttattaaaaatataaaattagttgggcgtggtggtgtatgtttgtaattttagttattttagaggttgaggcgggagaatcgtttgaatttgggaggtagagggttgtagtgagttgagatcgtgttattgtattttagtttgggtaataagagcgaaattttgttttaaaaaaaaaaataaagaagattttagagatggtaaagtttattttagagtttttttttacggtagtttttaggtatttggtattagttggatgtgatagagtatggagtaacggtaatagtattagttgggatttaggatatagagttttagttttgttttagttgttaatcgtatggtttaggttttattattgttttttttaggatattaggattacgggaagttggtttgggtggtttggagtatagattagttttggagttggaatttataaattatcgtttttgttttattttatgggtttagttatattttcggtatttttttttttagatttgtttgttgttattgtttgggagtttttaggggtttattttggttttgttttaggttttagaattttgtttaatttttattttttggggattttgtattttttagaaattttttgttaaatttttttattttgagttatgaagattaattaattatttttattaaatatgtatattgataggagtttttgagaggagttagtttttggttttaggaagtatttttgggtagagaaataataggtaggatggtaggttgggcgtttttttgatggtttgtgagttatgttatttattttagagtttttttttgattttttaggtgtagagatttatatttattggtgtttttgtttagatgattttggtatttgttagtaaatttttagttttaaagtaatttttagagaggatagtggataagatattttttatttaaaaaggattgtttttttttgtgagaagaatttatatttgttatttaagggttgtttgggtagtagttatttttattatttttgttttaggtttatttttttttattagatgggggaagggatcgtgtttttttttttgataggaagttttttgaaggtaggggttgtgtttttttttatttatgtgttttgtttaatattagtaaagggagatttttttttttttagtagaagttttagagtagagataggtagggtgttttttggtttagttgttttttgtagggttttaggtttttatttaggttttttgtattagtagttagattttagatttatttgattattgttgtttttaagagttggaggtagattaagattattattatttattttatgatgttggtttttaattggttatagaggaagagtagttttgagttttgtagtcgtagtggagtgaagatttgggtattttttttttttttatacgtttaagattagtttaatcgttgtttttttgttttgggtagttatgattttaatttagggtgtattttgtgtttcgtgtatcgtttttgtgtattttttttttttgagggtggtcgtaatagatttttattttattgattttttggtttaagtatcggaggttaggaggtgtaagcgataagagagaaagttgtcgtaagatggagtggtgaagattacgttttgtttttaaattagaggtataatgtgtgtatttagggacgagggttagaaaaaggtagaggtagagtgttgggatagataggatttatagttagggtttcgtaattttagtgttgtcgatattttggaataaatagttttttgttgtgggttttattttgtgtattatagaatgtttaatagtatttttggtatttatcgattcgatgttaggagtagtttatttattgtgttaattaaatatatttttaggtattgttaagtgttttttggatgggtaaaattattgagaattgtttgtttttaggttatgtatttgaagttttgattttatttttaatttttagtatttttaaatttttaggggaggagataggggtgttagggggttaagaggttagtagttagtagttaggatgttggttataatgatggtgatggtgagggtggtgttgatggtagtgtcgggagttttggtgttggtggtggggttgggatgataatggttgaagttatagttatttgagtagttttagaggtttttaaggttaaataggatatttggagaaatgtttgttataatttagtaaatgtttaggatatatttatagagtaagttatattagtttttggttgtgttttttgtatcgatttagattagaggtttggagtaggggtatatgaagagggataggtttgcgttttgttgttgtttttcgtttttttttttgtttcgttgcgtttttgtttttgtttttagtttttttaaagtgtttatgttttttatgatttatttttaagtttttgtgtagtttttaagtttgatttgttagtttttttattttttatttcggtatttttttttttattttttttaatttttattttattttttagttattagttttttattgtttgaggtgatttggagttggtttagtgtttgtttatttggtttaggatagttttttattttggagtgagtgggaaaaaaattttcgtgttaatagtttttttgcgatttcgtattttatatttagggttttaggtagatttgttaggtttttaggttttaggtagaaggttaggattagatttgtaaatattgatattatttagttggtgggggattttttattttagttattgttatttattgtttagttagagttttggagtttttttaagttttataatgggggaggggagggaggattagaagttagttgggtttggtatagagagggaggtttttatttgatggtgttttaagttaatttagtttttatttttttttgtggtttttagaggtatattggattatgaggtgaaagataagatagggagtgttttttttgggttgaggggagtttttttatatttgggaagtaggtaaataaaattataggattattggaattttttttttttttttgagatggagttttgttgtgttattagtatatagtgtagtggtacgattttgatttaatgtaatttttatttttagagtttaagtaatttttttgttttagtttcgtaagtagttggaattataggtgcgtgttattacgtttagttaatttttttatatttgtagtagagataggtttttattatattggttaggatggttttaattttttgatttcgttattcgttagttttagttttttaaagtgttgggattataggtatgagttacgcgtttggtttaggttattggaattttgttaaattttttaatatagtagaatttatgggattttttaagttatgtgaggtttttagattttttaataaaagttttagggattttttttttatttggtaggattttaggagtttggttgttgttaggttaatttttcgtaaatatttaagaagttataataaatttttttcgagagtttttgatcgattgtattaagttagggtattttagtttggttgttagattttggggtttatagtttttgtttatttaattgattttttgatagttcggttagattttaagtttttttttgtttgtggtttgttttgtttgttgttttttatatttgaaaaaatttatatgattagaagtttttagagagtagagtttatggtttttgtatttttgtgtttggtttagagtttaggaaatttttgaataatagatagagtttaggagattgttttgttggggtttagttatagtttttatatttcgttattttagggttttgattgttagtttatatttttaggagattttgttaaattttgggtttttaggtttttttatggtggtggtgtttaggtttttttttatcgttttttagttttattttttttaagtattatttgtattaaaatttattagaagtttattgttaattaaataaaatttaaatttgttattttggtatttaggatattttttattttttacgtttttaaaattattttttataattaatttatatttttttttttttttaggaggttttttatttttttatttttatgtttttatttatgttatgttttttatgtgaaatatttttttcgagtatagttatttgtaaaatttttttattttttaagatttagtacgaatgttataaagttttttttgttgagtttatttatttttaaattgattgttattgtggagaattttgtttttgttttttttaggtatttattttatattattttatattttagtgatttgtttaaaattttatagtttttaattgaaagaggtttttttttgtatatggtattttcggtattataaatttattttttagaagatttataaaaatgataaaatgataataggaatgggaatgtttttggaagaggtggtaattatatagtatgtatattattattgtttatttattattattggtagatattattaattaattatgttatttttttatagggtttagatatggttttagaatttttttttagttaatgttttatgaagatatgtttaatgaattttgatatgataatttttaagttttttaatggaggatttttttttttaattttgtatattaggttgggtatggtggtttatgtttgtaattttagggttttgggaggttaaggcgggcggattatttgagtttaggagtttgagattagtttggttaatatggtgaaattttgtttttattaaaaatataaaaattatttaggtatggcggtgggtatttataattttagttattcgggagattgaggtacgagaattatttgagttcgtaggaggtagaggttgtagtgagtcgagattatgttattgtatattagtttgggtaatagagtgagatttagttttaaaaataaataaataaataaataaataaaattttgtttattaaattttatttaaaattttatatatagattattttgtaaaaaattaaggtaatttaaaattataattatttgtggttttttaaattattttttagtttttattgtgtatattgagatttgaatatagttgtgatcgttgtgtaaaggtaatttttgttttgtttttgttattttggattattgtatatatatatttttgtgtattaagataggttatatttttgttatttttagtggttacgtagtgttttattattttggtagttaagattatttggttttatttatttgggttatttttaattttttattgttattaatagtatttgggtttataagttaaaaattatttaaaggagtataatagtgagttttttatttttagagttatttaagtagaggttaaaggattattttttgaggaatattggtagtggggttttttgtagagggtgtgagattgggtttcgtatttgagttttttttgtatattttaatttttgagtttgttattttagtttaggagataagtgatttaaaaattttaagtttttggcggttgtttatataaatttttaggtataattttagttattgttttggttttatagtttttttttttaaatgttgtatgtgttttttatatttatattattagtttaattgaatttattggggatatattggatttgaggtttgttttttttaagtttaaaaatttatgttttttaatttttattttgataaaattttagatttaaagttataaatatagtatagagagtttttatatattttttatttaatatttttaatgttaatattttatgtaaataattataatataattattaaatttaggaaattaattttgatagattattttttttttttgttaattaaatatatttatgaattttgatataatgttattaagtattttgtaggttttatttaaatttttttcgtttttttatttttgttttttttttggtttaggatttggtttaggattttatatggtatttggttttttttttgtttttttttttttatttatgtattgttttttgagttagggttttattttgtattttaggttggagtatagtggcgtaattatggtttattgtagttttgattttgggtttaagtgatttttttattttagttttttaagtagttggtataaattattatgtttagtttatttaaaaaaaaaaaaaaaaaggttttgtgtagtggtttatatttgtaattttagtatttggggatgttaaggcgggcggattacgaggttaggagatcgagattattttggttaatatggtgaaatttttttttt

SEQ ID NO: 199 - DNA, 14112 bp, Artificial Sequence
  chemically treated genomic DNA (Homo sapiens)
tggtatttataggttagtggttagagttttattagggtgagaaggtttgagagaagtggcgggagttttatgtaagaataatttttattttttttaggtgaagatttgtggttttttttttagcgttggttttggagtttagaggtgaatttgtaagtgaggtaggggtgtgtgtgtgtgtgtgtgtgtgtgtgtgtgtgtgtgtgcgcgcgcgcgtagagtttgtagtaataattattattgtgatgattaatatttgtggggtgtttattttaggttttattattttaggtgaattaatttatttaatttagtgaggtagggattattgtttttacgatttatagaggaggaacgtgaggtttaggaaggttaaggaatttgtttaaggttatagagttagtagatggtagggtagggttttgaatttaggtggtttttgacgggaagtttagttttttgtttttttttagttttattttttttatttgtataatgggtatatacgatggtaatgttttttttttgggcgattgtgagggtgaggtaggtagaggggaaggaagtgttttgtggatagttaaaggttttgtagatagggaggtaggggatggggtagtaaggggtatgggggagttgatgagggttacgcggagtggggtagggtttggagttttagattatttgtggtatggttttggacggtttttagtttagagttttattttttttttattaagtatggagaagtagagttgtttggtttaggtgttgttggttttttttagtggcggggaggtttttagtgattatcgtttttatttttttggatttgagggcgtgagtttgttttcgggatggaatttaattttttttttggtatttttttattttagttagtgttttggatttttacgtttagggtgtaagatgttttttatggatgagggtttggatagttttgagtatatagtttaaaaagtttttaattttgggtagtatttttattttttacggttgtggttattttttttttttttggtttagatttgttttggagtggagggtggagagttacgggggtgtgggcgtttttatttttagttttgttggagaattttattttttagtggtttgaacgcgaagatgggcgggggtttttttagtttttttatttaagtgttttttagatttagttttgatgaagtttcgaggttagatgagattacgtgtatttagggtggtgtggttttagattttttttagttttgatatttttagaaggggtgttttttaggggttttgtgtttttaagtttagaggtttatgttataagtttttttttaattttttttattttttaggaagggtttggtatttttgtaataattggttaggatttagaaagagaaattggtaggattttaattatttatttatttttttagcgagcggtattttttgagtagttattgtatgttaggagttggtaggaggtttttgaatattttggatttagtttagtgttagattgatgattaggttatgacgatgttaggtgtgtatgttgtggagtttggaataagtgttaagtttggtgggttttttggaggaggtgtttgttatatttagtttggtaggaggtagacgattaggtgttattaaaaaaaaatttttaggttgggtgtggtggtttatgtttgtaattttagtatttcgggaggttgagtggggtagattatttgaggttaggagatcgagagtattttggttaatatggtgaaatcgtttttattaaaaatataaaaattagttgggtatggtggtaggcgtttgtggttttagttattcgggaggttgaggtaggagaatcgtttgaatttgggaggtagaggttgtagtgagaagagatcgtattacggtattttagtttcggcgatagatcgagatttcgtttttgagatggtttattgtagttttgaatttttgggtttaggggatttttttttttgatttagttttttgagtagttggggttatatttagatatatatatatatatatatatatatatatatatatatatatatatatatttttttttttttttttttttttttttggtaattttttttaagagatgggatttcgttatgttgttgaggttggtttcgaatttttggttgtatatgattttttggttttagttttttaaattgttgggaatataggggtgagttatcgtgtttggggaggtgttttttatagattgtttttttgtatagagaaggtataagaaaggagtttttagtataatatttaggtttaggtgttacgtaggtgttacgtagtatttaggtttaggtgtttgttgggtttttttttgttatttttaatttatgtattggtatttgtattgtaatgatttgggtttattttattgagagtatgggaagtttttgagtgtcgaggttgggattttttttttattttattttttagcgttttatatagggtttgtaaatagtaggcgttttacgatgttgttttgagtagtttttttttttttttaatttgtatttaagttagagtttatatgggtttattattttttagttggtagagtaggtttttatatattaatgtatgtggcgtttattaaagcgttgtgttaaaagtgttattattgttattagtattatttgttagaaaattgtatagtacggtggttttagtatgtgggttttgtagttggattgtttagatttaagttttggttttattatttacgggttgtgtgattttgaataagtgtattggtttttttgtgtttttatttttttatttgtaagataggaataatatattttataggagtatggagaggttataggtagagtaagaaaaatattagttattatatagttagtttattaattatggtagttgttattattttatttatagaagatatagaaggttaaggttaaatgatttagttgttcggtggaagagggtttttatttttgagtcgttagattttaaatttagtgtttgggggttattttttcgtttcgttgttttattttttttgttattttgttttttaatttatttgtttatatatttggttgttttttttaatggggttttttaaaggtaggggtttgtattaggttggtttatatttgtttttttagtgtttggagtagtgcggggttattagtgaatttgaaggttgtatggaaggttttaggcgtttgttttttgttaaggtgttttgttgagcgtttttatatggaggattttatgggagtttttagattattttaggagtagggtaaaaattttttataattgtattgaggtataataaattgtatatattttgttgtgatgtacgtatatatttataagtttattattataattaaaaatgataaatatttttattattattaaaattttgttatgtttttttgtttttttttatttttttttattatagatttatttttatttttttagagatagggttttgttttgttgtttaggttggagtgtagtggtatagttataatttattgtagttttaaatttttgggtttaaaacgatttatagttttttgagtagttgggattataggagtttgttattatatttagttttagtttataaatttatttttagtttataaaggaggaaatcgaggtattgagaggttaaaaaatttttttgtagatatttgtttagtaagtggttattttaggatttggattaaggtgatgtgtttttaggttgtgtttttgttattgtgttacgttgttgggtggtaggtagtagtgggtgggtgtttgtagtggtttgtaaagattatttgagatgtttttttttttttgttttattttgtttaggtttaagaagatagtttatgaagagagagtaggtgtgatttttttagtgtgtttttttgtgagaagtaggttgatattttaaagggaagggcggataatagagatagtgtaagcggaggagatgagggtgttttaaagtcgggaggttgggtgatgtaggagtttgcgtgtttcgaggggggtgttgggtttagtgtgagtacgtgtgattgtgattgagatagtgtgattgttgaaggtagggatatagtagttttttgattgggggtagaaggcgttaattgtgtgaaggttggttgtgggtgggtgggttttgggtttcgaattcgggggttgagggagatagtaaatagtagggtgattgacgggaagattatgttggtagttttgcgaagatgttgtagggttgtgggggtttgtgtgattttgtagtttaataaatttaaatttagttaacgttggtagggtttgttgtgttaggtaattagttaggaggaggagattcggatttagtttgtagttgaagggcgttggttgtcgggttttgtgggtttattttgcggtgtttttttttgttaatattgagtttttataatagttttatttttaggttgaggttagatggaggggatagagggaagtgatttgtttaaggtgatttaagttttcgagtgttagggtaggatttgaatttaggtttttagattgtagagtttgagtttttttttgttatgtttgtgttagggtggaaatgtttggttttggaggggagcgtggatttttggttttggttttggagatatttttttagattacgtgggtttttaatttgtttatggttattgtgttgaggggcgggacggtgggttatttttagtttttttttttttagggttagatttatggattgaagggttgttcggtttttagagattttttaagcgtttcgttttggttttaagtttttttttagttttcgcgtttttttttttttggcgttgatttcgggttagaagaggaaaggttgtttttatttatttttcgtattttttttttttttttataaaggtcggaatagttgaaagggtggtaatttttttttttgtagtcgggagcggtttgtttgtttttttgcgtattcgtagtttttttcgttgtttttttagggttttttttcggtcgttagcgtttattttttattttttagatagagatattttgcgcgtatatatatatatacgcgcgtaaaaaggaaaaaaaaaaaaaaaagtttattttttagtttcgttgtaaagagaaaatcggagtagtcgtagttcgtagttcgtagttcgtagttcgtagttcgtagaggacgtttagagcggcgagcgggcgggtagacggatcgacggattcgcgtcgcgtttatttgtcggtcgggtttagtcgagcgcgtagcgggtacgtcgcgcgcgcggagtagtcgtgttcgtcgttcgggtttcgcgttagggcgtatacgttttcgtttttttattcggttcgggcgggagtttgtatttttttttgttcgggtgttcgagttgtcgttgtaaagttaattttggaaaaagttttttgggggagatttgggttttgaggtgtttagtttcgcgtttttcgattttgggggtttttttagaaaatgttgtaaaaaagttaagtcggcgggtagaggaaaacgtttgtagtcggcgagtgaagacgaattatcgattgtcgtgttttttttttttttggaggttggagttttttgggcgtttttatacggttagacgtttcggttggttcgcgacgtagtttttcggtcgtggatgtttattcgggttcgggattcgtttaggtagcggtttcggatttaggttttgcgtttaggtttttttttgttttttagcgacggagtcggggtcgggggcggcggcgttcgggggttatgcgggtgagtcgcggttgtagaggtttgagcgtttgatcgtcgcggattcgagtcgagtttatttttttttttagttttttattttggtcgcgggggcggcgcgttcgatttacgcgttcggggtttcgcggggtcgggttcggagtcggtatgaatcgttgttgggcgttttttttgtttttttgttgttatttgcgtttggttagcgtcgaggtgagttgttacggcggttggggttggttttttatttattattttcgttttttttttttgatcgtttttttttttttttgtagtgaattttggatttttgtagttcgcgagtttgacgtcgggcgttgggtgattttttcgggttgggagcgaggttcgggggtgataggttttaagggaaggtaatagcggtggttttttttttaatcggcgggcgaatttggttttttaagtcgtttcgtgtcgggggagggtgtgtgtggttttgttttttattttttgggaattcgagaataagttttttttcggtcgggggagagggggtggggtggtgtttagggtgtagaaggtagcgcgttttttcgagtttatttcggcgttagtttcggtttaggttttgttttgttatcggtttgtttaggaggtgtaagtttgcgtatcggtgttatttacgtcgatttttgacggggttcgggttttattttggttttcggtcggggttcgggtggacgtttttcggtacgcgtagggtatgttcggttttagagtacggtttggaagtagtttgtgtttcgggcgcggggtttggggtgggagtaatagggagagagagagagagagagagaaagagagagagagagagagagacggagagagagacggagagagagagggagagaaagatagagacgtaggtaggtttcgggtattcgggtagggggaggattaggggttttgaaggaatttagttttcggggcgttgtgtgtttgaggttttgtcgtatttgtgttcgcgttttgtaggaggaagtatttttttttttcgtatgtagggtgcggagcgcgtcgtttgtaaaagtttagttgtacgggagatggggtataaaaatatttgagggagcgttggggtcggagtcgtttttattttttttagttttacgtagtcgtgagttggtaagtttattcggaatttaggtgggaaagggggcggggtaggacgacgcgcgcggtggaggggaggagagggtagtcgggagcgcggcgtgattgggtatcgttttattttcgttcggttgcggtcgggagttcgtatttcgttcgtatttcgtcggttttcggggagggtcggtttttgcggtttttagttaggcgtaggaaggaggtagcggcggcgaaggggttaaggcggagggttcggaggtcgcggttcggttttgggttgtcgttagcgtaggttgttttgattacggaggagtcgtcgtcgtttttttttgttttcggggtttttcgagggtcgtaggtcgttcgttcgggggtttcgttttttcgcggtcgtttttcgcggttcgtattcgggagggaggacgcggggttcggtcgggtcgtttttaggtttttttcgacgtttttttttcgtttttttcgtagtttttcgggtcgcggttagttgttggggagggggtggtcggtcggttttagttgtcgtttcgtttcgtcgtgggatttgggggttgggttcggtgttagggcgttttgggaacggcggcgtttcgtggttgtttttcgtagtttatttcgttcgggttttcgattcgtttatttattttacgtatgtatatttttggtcggaggcgatgttgcgtttcggcgggcgggcgcgtagagcgacgggtacgtattatcgcggttaggtcgcgcgttcgtttttgttacgttcgtgtatacgcgggatatacgcgcgcgtatcgtatataaacgtacgtacggtttttgtacgcgcggtttgagtatacgtgcgcgtatatttacgtacgtatataggtacgtacgggttttcgtgtatttagcgtttggtgttcgttttcgcgtaataggtgggtttttcgtgggttttggtattttattatttttgtagcggttttattttttttttggcgttttgtgagggagggagaattttttattagtattatagtatttatttttttttttgtttcgttagttcgacgttttttaaattttatttatttgtgattttttttttttaattattttcgcgtggtggaaaatggtggtgatgtgattttgaggggtattgagttgtttagagcgattttttttttatataagtttttatttgaatttgtaagattggagggatttggcgtgtgtaatcgcggagggggtttttatttttggttgttgtatttttttggttgattttagcgtgtttcggggaggtcgttgatagttggatgtttttttagtttttttttattatttttagtttcgtttagtatttttttttttttttttatagttttacgggttcgtgtatttggggtggaggttgtggtatagaaattgtttttttttttattttagttatagtatttttgaatatatggttataggcgcgatgtatgtggtattttgtagtttatgaagtattttgttgttaagtttgagtgagttttaggttggttttgggggaggggatttgtatggggatggaattacgtaggggttagtttaggaaggagttgtaatggttagtgttgggagagttagggtaggtttgttggtggaggtggttttggagttgtttacgttttggtcgtgttcggattaattttttagtagacggtaggtagtcgtgaggtagggttgggtggagggtttgtcgaggtttttgaggtgttatttttattagttgagttggtttttaggagggcgagttttattgttacgtgacgcgtttggttttagtatatttttttcgggaaagagtgaagggttttattgttttttgttatttagttttttttggttttgttaatggttttagggggtaggagattaattgttggaattttagagttttggaggtgtgtaagggtaggttaaatagaatttggaggatttggtgtaagagttaggaagagagagagagagagagtgtgtgtgtgtgtgtgtgtgcgtatttgagagagagagagagagagattgattgagtaggaatggtgagatgtttattatgggtttcgtaagtatttttttacgttttgtttttttttttttatattgaggagttttttttgtgataattttttttatgttttggtttattttattgtttattatttgttttttttattggagtgttaattttattagagagttttttttttggtttttatttttagaatagtgtttagagttttgtggataattagtaattattagtgtaaagaatagttagtgttgggttggtggggagggtaggatttggttttttgttgttttatggttttattgagttttcgttttgttttgtttcgagggtagtttttttttttagttttttggtaggtattagttttttaaagttttttattttgagagagaagtatgtttgttttttttttgttttgggatttgggttattaggattagataggatagaggagaagaaatagaaagaaaattagattgtaaaggttttgtgtatttttagttggggttaagtttttgttatttaaaaaaaaaaagagagagagaagattggattagtgtagagtttttaaagaatggtagaattttttggtttcgttttttggttgggatggggatgggtagtgattgtcgtggttgttagtattataaatggttggattggtttttttttttttgttttaatttttttttgtttttgtaagaggtggggaggttagggttttgggtttacgtgaaggagtagaggttgagcgggagggttttaagagtaataaagaaggggaatgttaggtgggaaatattggttttaatggtttttgtggtttgtttcgagagggtttttttaaaggggttggttggttttggtattcgatttaaataaggtttgcgatttttaggtaggtaggttttgggaggttttattagtttttttttttgttagttatagataacgtttttggttgtttgggtttgtgtgttttttggtgggaatggtaggcgggtcggggagtgtgtatttgtgtgtgtgtgttgggtttaggaggagggtggggtttaagtttttttgatttgttagtttggttgggagtagattatttatttggttttacgttcgttcgtgttttttttatttgttgtagttggcgttgggggcggggtcggaggaggttgtttattttggtttttacggttggttttgttttagttgttttttcgttacgtttttattttgttagaaatttcgggtttgagattttgggatagtttttttagggtgttaggtttttttttttatttttgaagtgagttgtttatttggaggtttgcggaatttgtgtttaggaaaattaggtttcgggcggtttatttttttatattaagaagagtttgtgatttttaataggtgtttatgttcgttatttttagagtattgtattttggagttgagtacgtgttgagtgtttttttatttttatttatttttagtttcggaagggttttgtaagtttatacggtttaggttttgttagtgtggaggtagggtattattttttgtggtttagtataagggataatgtaaagttacgtatttttttatgggtaggtagttttttatttattttttgttatttttaaaaatgttttgtgttgttggttttgagtacgtgtgttattcgttgttgtttataaaggagttattcggaaagaattaatgatgatgatagtgataatttattaagtttttattatttgttggtagttttgttttgtgtaattatgttttttagtaatttcgggcgaggtattattagttttatttaaaagatgtagaagtcgaggttttagattgtgataagattttaagaatttaggttgttttggtatttggagtttttgttttttttttcgttatagggttttttagtttttgtatttttgatgtttgggaaggtcgttttgtgttttgaagggtggtgagcggtattttcggttttttttaatttaagatgtagtgtatattttaagttgtggttattagcgatgtttttatatattgttattgttttttgggggtttattgggttttggttgagagtttttgacgtgggatatgttgtagagtaaagagttaatacgaattttgtgtgatgttgagggttagtggttttagaatataggagagggaggttgagacgttttatggtgggttggaataggtgggtagtttggagtttgggaacgatttagttttgttatttgttaattgtttggatttgttgttgtttgtttaattttttttaagttttagtgtttttatttggaggatggggatataaatattgttagttttttaggattggtagtttatacggtgttttttttagcgtgtggtttgtagttggtatttatagatgttagttgtggtattattattaaattcgggggtttatgggtagttttgggtatttagtggttatattattaaaagtatttttagggacggtttttttgtttagattaaaagggattttagttgtttatttgtttagggttggggaagaatattttaggtggtttttttggtggaggaggtagaagaattatattggatagaatttggaaaatggtagatttttttatgtatttgattagtatttatcgaggatttattatgtgttttttttttttttttagattttattttgggtttttttatatttagttttggaggggtattttttatgtgtcgtgggtttggatttggggtgtttattcggtttgtttaggggtttgttttttttgtcgtggttggtagttgtagtcggttttttagtgggtagggagattttggtataagtattaaatgttatttgttattaggtttttgggttttttttttggggggttaattgaatttttattttataaacgttttttgttttttttttgttagtgatttagggaggtttggttaggtattcggttttggcgttttttttgttttttttaacgttttttggtagaattagaattgaatcgaatgttttttaagtttttcgatttatagatgagagttaggattataggggtagtgattagtcgaggttatacggtagttggtttaaaggcgtgggatttagttttttggtttgttagttttgggtttgatagaatttttaggggaagcggttttcgttggtgtttattggagattaagttttttgttttgtgggttgggtattttgttaatatttggagagtatcggaggcgtggttttttttttgaggtggaaagaatgaatttgtttgagggcgggaggaggtagagttcggaggagatggggtcgaaagtgaggggtagcggggtttatatttttttttgttttgtacgtgtagtttttggttgttcggatattgaaggaaagattttagtttttagttaagttttgttatttttttttttttaagttgtttagtagtttttagatattgggcggagttgtaagttttatgtttaaataaagatatggagatttaggggttttagggaatgatgtagttttaaaagtggttatttttatttttcgttttgagttttttggtttttggatcgatgtgggtggttagagttggttatggatgaatttttggaggtgttgttagattttatgataagttggaggaaatagagttttcggggagagttttttgaggttggttatagggttgagacgatttttttttttttttttcgtttttttttcgtcgttaggtagcgagaaagtagtattttttttgtgaaggtagtttgtatcgattttttttgagtttttcgattttcggtttcgggaatgtggagcgaattaagaagggaagttttttttttttaatttagggaaattgaggtagaaaatagtttaatttaaggttttatagtaatgtgttaagtttattgatgttttttttaggattgtttgtttagatcgtgtagttcgagtgtttgtgtttgtacgtgtgtgtttgtatacgtggaagttcggttttagtttttgaacgtgtagcgatattttaggaattttttttgttttttagtggttggtggtttggattgtgatttttagttttttatttgttttcgttttttttttgggatttttggtattcgttttttgggttttttgggattgtgggggacgtggttgtgatttttttacggggttgtttttgtgttattgtgggatttgcggtttttttggaggaagtttagtttcgaatgaggtttgttgaagtgttattaggtttcgagtatgtttggtaataggttaaaggggttttaaaaatagggtttggttgggtatagggtacgggtaagtttttaggtttttcggtcgtgttcgaggatttttttttcgtttttttcgagtgagagattttatagatatcgttaggatttggggttttttgaggttatcgtattttgtacgcgtttattaagtattttttgtatttaggagtttgggagtataggttttgttattttaaaggtatgggtttgaatgtagtttttgttaataattgagtttttttttgaacgtttgtttttttttttgtaaaatgggggttagattggttatgggagatgttggttgtttttagttgttaggtgtgttgtgagatttagggagaaattagattttggtgtatttttagaatatgtagtttggtgggggagatagatatagagataagtaggtttaatttaaagtaagttggggtttttgttgggggttgagggtgtagggattgagttgggttttagaggtttcggtaggtttaggtttcgaggtttttgtgtttttgattattaggtttggattttgtttgttcgtttttttgtgattttggagttttttataggagaaagcgagaaagcgtgtggtgggggagatagttatgttggaaagtttttatttttagtttatttagttttttggtgtttgttcggtagg

SEQ ID NO: 200 - DNA, 14112 bp, Artificial Sequence
  chemically treated genomic DNA (Homo sapiens)
tttgtcgggtagatattaaaaggttgagtgagttgggagtgggggttttttagtatggttgttttttttattatacgttttttcgtttttttttgtggaaagttttaaggttatagggagacggataggtaggatttaggtttgatgattaggagtataaaggtttcggggtttggatttgtcgaagtttttgagatttagtttagtttttgtatttttaatttttaataggaattttagtttgttttgagttggatttgtttgtttttatgtttgttttttttattaaattatatgttttgggaatgtattaaaatttgatttttttttgagttttataatatatttgatagttgaagatagttagtattttttatggttaatttaatttttattttatagaggggaaaataaacgtttaaagagaggtttaattattggtaaaagttgtatttaaatttatgtttttgggatgatagagtttgtatttttaggtttttgggtataagaggtgtttaataaacgcgtgtagagtgcgatggttttaggaggttttaggttttagcggtatttatgaagttttttattcgaaagaggcgaaaagggaattttcggatacggtcgggaaatttgaaagtttattcgtgttttgtgtttaattaaattttatttttagagtttttttggtttgttgttaaatatattcgaaatttgataatattttaataggttttattcggagttgggttttttttagggaaatcgtaggttttataatgatataagagtagtttcgtaggaaggttatagttacgttttttatagttttaggagatttaaggggcggatgttagagattttaagaaagaggcgagggtagatgggagattgagaattataatttagattattagttattgagaagtaaagaaaatttttaagatgtcgttgtacgtttaaaggttggaatcggatttttacgtgtgtaaatatatacgtgtaggtataggtattcgggttgtacggtttggatagatagttttggagagggtattaataggtttggtatattattatagaattttgggttaaattattttttgttttagtttttttggattaagaagggaggatttttttttttggttcgttttatattttcggagtcgaaggtcggggggtttagagggggtcggtgtaggttatttttataaaagggatgttgttttttcgttgtttgacggcggagggggagcgagggagaggagaagaggtcgttttagttttgtggttagttttagggggtttttttcgaaagttttgttttttttagtttattatgaggtttagtaatatttttaggggtttatttatgattaattttggttatttatatcgatttaggagttagaagatttagggcggggggtgggggtgattatttttaaagttatattattttttgaaatttttgagtttttatgtttttgtttgaatatggagtttataatttcgtttaatgtttaagggttgttgggtaatttgaggaaaaaaaggtggtagggtttggttgagaattagggttttttttttaatattcgggtagttaggggttgtacgtgtaagatagaggagggtatgggtttcgttgttttttattttcggttttatttttttcgggttttgttttttttcgtttttaagtaagtttattttttttattttagaagagagattacgttttcggtgttttttaaatgttgataaagtatttaatttatagaatagagggtttggtttttagtgaatattagcgaaagtcgttttttttgagagttttgttaaatttagaattggtaggttagagagttgaattttacgtttttggattaattgtcgtgtgatttcggttggttattgtttttatggttttggtttttatttgtgaatcgaggggtttgaagaatattcgatttaattttaattttgttaggaggcgttagaaggggtagagaaaacgttaaagtcgggtgtttagttaggtttttttggattattggtagaaggagaataagaagcgtttgtggagtaaagatttaattaattttttaggggaggggtttaaaggtttagtagtaaatggtatttagtgtttgtgttaagatttttttgtttattggagagtcggttgtagttgttagttacggtagaggaggtagatttttgaataggtcgagtggatattttagatttaggtttacgatatataggagatgtttttttaaggttgagtgtgaaagagtttaggatagggtttgaggaggagagagaggtatatagtaggttttcggtaaatattggttaaatgtatgaaggagtttattattttttaggttttgtttagtatgatttttttgttttttttattaggagggttatttgggatatttttttttaattttaggtaaatgagtaattagagttttttttaatttgagtagggagatcgtttttgaagatgtttttggtaatgtggttattagatgtttagaattatttataagttttcggatttggtaataatattataattaatatttatgaatgttagttataagttatacgttgagaaaaatatcgtataaattattaattttaagaggttggtagtatttgtatttttattttttagatgagaatattgaagtttagaaaaaattaaataagtagtaataggtttagataattagtaagtggtagagttgggtcgtttttaggttttagattgtttatttgttttagtttattatggggcgttttagttttttttttttgtgttttaaggttattggtttttagtattatataaggttcgtgttggttttttattttgtagtatgttttacgttagaggtttttaattagggtttagtgggtttttaggggatagtggtaatgtatgaaggtatcgttggtggttataatttggggtgtgtattgtattttaagttgggggaggtcggggatgtcgtttattattttttagggtataggacggtttttttaaatattaggagtgtagaggttgagaaattttgtagcggaggaaagagtaagggttttagatgttagggtaatttggatttttggaattttgttataatttaaaatttcggtttttgtattttttaaatggggttaataatatttcgttcggggttattgggaggtataattgtatagagtagagttgttagtagataatgggagtttaatgagttgttattgttattattattaatttttttcggatggtttttttgtgggtagtagcgagtggtatacgtgtttagggttagtagtataggatatttttgaggatgataaggagtgggtggagagttgtttgtttatgaaagagtgcgtgattttgtattattttttgtgttgggttataggaaatggtattttatttttatattggtagagtttgggtcgtgtgggtttataaggttttttcggggttgggggtgggtgagggtggggggatatttagtacgtgtttagttttaggatgtaatgttttggggatgacgagtatgagtatttgttgggagttataggttttttttggtatgggaaggtgagtcgttcggagtttggtttttttgggtataggtttcgtaggtttttaggtggatagtttattttagagatgggaaaggaggtttggtattttgaagaagttgttttaagattttaggttcggggtttttggtagagtgagggcgtggcgaggaggtagttggggtaaagttagtcgtgggagttaaggtaaatagtttttttcgatttcgtttttagcgttagttgtagtaggtaggaagggtacgagcgagcgtgaggttaggtgagtgatttgtttttaattaggttggtagattaaaggggtttgaattttattttttttttgggtttagtatatatatatagatatatatttttcggttcgtttgttatttttattaagggatatataggtttaagtaattaggggcgttgtttgtggttggtagaggaagaagttgatgaggttttttagagtttgtttgtttgagagtcgtaggttttatttagatcgaatgttaaagttaattaatttttttgaagaagttttttcggggtaaattatagaagttattagaattagtgttttttatttagtattttttttttttattgtttttgggattttttcgtttagtttttgtttttttacgtgggtttagaattttggtttttttattttttgtaggagtagaggaaaattaaagtaggaagagaggaattagtttagttatttataatattggtaattacggtaattattgtttatttttattttagttaggggacggggttaggggattttgttattttttgggaattttgtattaatttaattttttttttttttttttttttttaggtggtagaaatttagttttagttaaagatatatagaatttttgtagtttgattttttttttgtttttttttttttgttttgtttaattttggtagtttaagttttaagatagaggagagatagatatgttttttttttaagatggggggttttgaaagattgatgtttattagagggttgaaaaggggggttgttttcggagtagagtaaagcgaggatttagtggggttatggagtaatagggggttaggttttgttttttttattaatttagtattaattgttttttgtattaatagttattgattgtttatagggttttgggtattgttttaaaagtggggattaggaggaaagttttttaatggggttgatattttagtagagaaagtaggtaataaataatgaaataaattagaatataggaagagttgttatagaagaggttttttaatgtggggaggggaagataagacgtggagaggtatttacgaggtttatgataaatattttattatttttgtttagttagttttttttttttttttttttagatgcgtatatatatatatatatatattttttttttttttttttttttggtttttgtattagattttttaaattttgtttgatttgtttttgtatatttttagggttttgggattttagtagttggttttttgttttttagggttattagtaaagttagaggaagttggatggtaaagggtagtggggttttttattttttttcggaagaagtgtgttgaggttagacgcgttacgtgatagtgggattcgtttttttggaagttagtttagttggtggagatggtattttagaggtttcggtaggttttttatttagttttgttttacggttgtttgtcgtttgttgaaagattagttcgagtacgattaggacgtggatagttttaaggttatttttattagtaggtttgttttgatttttttagtattggttattatagtttttttttggattgatttttgcgtggttttatttttatgtaggtttttttttttagggttagtttgaggtttatttaggtttagtagtaaagtgttttataaattgtaaagtgttatatatatcgcgtttgtggttatgtgtttaagaatgttgtgattaaagtgaggagaaaggtagtttttgtgttatagtttttattttagatatacgagttcgtggagttgtgggaaagaaggaggaggtgttggacgaagttggaaatggtaaggggaggttggggaaatatttagttgttagcggttttttcggggtacgttgggattagttaagagaatgtaatagttaggggtgggagtttttttcgcggttgtatacgttaggtttttttagttttgtaggtttaaatgaaggtttatgtgaagggggaatcgttttggatagtttagtgttttttagagttatattattattattttttattacgcggaggtggttgaaaaaaaggagttatagatgggtaaggtttgaggggcgtcgggttgacgaggtaaaaaaaaaagtaggtgttgtggtgttgatgggaggtttttttttttttataggacgttaggaaggaaatggggtcgttatagaggtggtgaggtgttagggtttacggagggtttatttgttgcgcgggggcgagtattaggcgttgggtgtacgggggttcgtgcgtgtttgtgtacgtgcgtgggtgtgcgcgtacgtgtgtttaggtcgcgcgtgtaggggtcgtgcgtgcgtttgtgtgcggtgcgcgcgcgtgtgtttcgcgtgtgtacgggcgtggtagaggcgggcgcgcgatttggtcgcggtagtgcgtgttcgtcgttttgcgcgttcgttcgtcggagcgtagtatcgttttcggttaggagtgtgtatgcgtggggtgagtgagcgagtcgggggttcgggcggggtgggttgcggagagtagttacggggcgtcgtcgtttttaggacgttttggtatcgggtttagtttttaggttttacggcgaggcgaggcggtagttggggtcggtcggttattttttttttaatagttggtcgcggttcggggggttgcgggagaggcggagagggggcgtcgggaggggtttgaaggcggttcggtcgagtttcgcgttttttttttcgggtgcgggtcgcggggggcggtcgcggaagggcggggttttcgggcgggcggtttgcggttttcgaggagtttcgagaataaaaggagacggcgacggttttttcgtggttaaaataatttgcgttggcggtagtttaaggtcgggtcgcggttttcgagtttttcgttttaattttttcgtcgtcgttgttttttttttgcgtttggttggaggtcgtaggggtcgatttttttcgggagtcggcgaggtgcgggcgaggtgcggattttcggtcgtagtcgggcggaggtgggacggtatttagttacgtcgcgttttcggttgttttttttttttttttatcgcgcgcgtcgttttgtttcgtttttttttttatttggatttcgggtagatttgttaatttacggttacgtgaggttgggaggggtggggacggtttcgattttagcgtttttttagatgtttttatattttatttttcgtgtagttaggtttttgtaggcggcgcgtttcgtattttgtatgcgggggagagaggtgtttttttttgtagggcgcgggtataggtacggtaaggttttaggtatatagcgtttcgggggttggatttttttagagtttttagttttttttttattcgagtgttcgaaatttatttgcgtttttattttttttttttttttttttttcgttttttttttcgtttttttttttttttttttttttttttttttttttttttttttttttgttatttttattttaaatttcgcgttcgagatataagttgtttttagatcgtgttttggggtcgggtatgttttgcgcgtgtcggagggcgtttattcggatttcgatcgggagttagggtgggattcgagtttcgttaaaggtcggcgtggatggtatcggtgcgtaagtttgtattttttgggtaagtcgatggtaggatagagtttaagtcgaggttggcgtcgaagtgggttcgggaggacgcgttgttttttgtattttgggtattattttattttttttttttcggtcgggaaggggtttgttttcgggtttttaaagggtgggggatagggttatatatattttttttcgatacggaacggtttagggagttagattcgttcgtcggttggaaagaaagttatcgttgttgtttttttttagagtttgttattttcggatttcgtttttagttcgaagaggttatttagcgttcggcgttaggttcgcgggttgtaagggtttaaagtttattgtagggagaggagggggcggttagaaggggggggcgaaggtaatgaatgaagaattagttttagtcgtcgtggtaatttatttcggcgttgattagacgtaggtagtagtagagagataggaagagcgtttagtagcgatttatgtcgatttcgggttcggtttcgcggggtttcggacgcgtagatcgagcgcgtcgttttcgcggttagggtggggggttggggaggggggtgggttcggttcgggttcgcggcgattaggcgtttaggtttttgtagtcgcggtttattcgtatggttttcgggcgtcgtcgttttcggtttcggtttcgtcgttggggggtaggggaggatttgggcgtaggatttgggttcgaggtcgttatttgggcggatttcgagttcgagtgagtatttacggtcggggggttgcgtcgcgaattagtcgaggcgtttagtcgtgtgggggcgtttaggggattttaatttttaagaggaaaaggaatacggtagtcgatggttcgtttttattcgtcggttataggcgtttttttttgttcgtcggtttagtttttttgtaatattttttggaaaggtttttaaaatcggaaagcgcggagttgggtattttaaggtttaagttttttttaaaaaattttttttaaagttggttttgtaacggtagttcgagtattcgggtagggagaggtgtaaattttcgttcgggtcgggtaggggggcgggagcgtgtgcgttttggcgcggggttcgggcggcgggtacggttgtttcgcgcgcgcggcgtgttcgttgcgcgttcggttgggttcggtcgataggtggacgcggcgcgagttcgtcggttcgtttgttcgttcgttcgtcgttttgggcgttttttgcgggttgcgggttgcgagttgcgagttgcgagttgcggttgtttcggttttttttttgtagcgaggttggagggtgggttttttttttttttttttttttttgcgcgcgtatgtatgtgtgtgcgcgtaaagtatttttatttagggaatgaaaaatgggcgttggcggtcggaggggagttttagggaggtagcgggggaggttgcgggtgcgtagggaggtaggtaggtcgttttcggttgtaggaggagaagttgttatttttttagttgtttcggtttttataaaggagaagggagagtgcgagaggtgggtggagatagtttttttttttttggttcggagttagcgttaggaggggggggacgcgggagttgggggagggtttggggttagggcggggcgtttagggggtttttgagagtcgagtaattttttagtttatgaatttggttttggggaaaaaagaattaggggtgatttatcgtttcgttttttagtatagtgattatggataggttaggagtttacgtggtttagggggatgtttttagagttaaggttaggagtttacgtttttttttaggattagatatttttattttggtataggtatggtagggagggatttaggttttgtagtttgagagtttgaatttagattttgttttggtattcgggagtttgggttattttgggtaagttatttttttttgttttttttatttagttttaatttggagatggggttattgtaaggatttagtgttagtaagggaagatatcgtaaggtgaatttatagaattcggtagttagcgttttttagttgtaagttgggttcgagttttttttttttagttggttgtttggtataataggttttgttagcgttggttgaatttgaatttgttgaattgtaaagttatataaatttttatagttttgtagtattttcgtagggttattaatatgattttttcgttagttattttgttgtttattattttttttagttttcgggttcgaggtttagagtttatttatttataattagtttttatatagttaacgttttttgtttttagttagggagttgttgtgtttttgtttttagtagttatattgttttagttatagttatacgtatttatattgggtttagtatttttttcgggatacgtaggtttttgtattatttagtttttcggttttgaggtatttttatttttttcgtttgtattgtttttgttattcgtttttttttttgggatgttagtttgttttttatagaggagtatattgagagagttatatttgttttttttttatagattgtttttttggatttggatagggtggaatagaggaggaaggatattttaggtggtttttatagattattgtaggtatttatttattgttgtttattatttagtagcgtggtatagtggtagagatatagtttgaagatatattattttggtttaaattttggagtggttatttgttggataagtgtttgtaggaaggttttttaattttttagtatttcggtttttttttttataaattggagatgaatttataaattggagttgggtgtggtaataagtttttgtagttttagttatttaggagattgtggatcgttttgagtttaggagtttgaggttgtagtgagttgtgattgtgttattgtattttagtttgggtaatagagtaagattttatttttaaagaaataaaaataaatttataatgggaaggagtgagagagaatagagaggtatggtaaaattttagtggtgatggaaatgtttgttatttttgattgtggtgatgggtttatgggtgtatacgtatattataataaaatgtgtgtagtttgttgtattttagtgtagttgtagagaatttttattttgtttttggagtggtttggaggtttttatgaggttttttatgtggaggcgtttagtaaaatattttagtaggaagtaagcgtttggaattttttatgtagtttttaagtttattggtggtttcgtattgttttaggtattggggagataggtgtgaattagtttaatgtaggtttttgtttttgaagagttttattgagaaggataattagatgtataaatagataaattaggagatagggtgataagggagatggggtagcgggacgaggagataatttttaaatattagatttgaagtttaacgatttagagataaaaatttttttttatcggatagttgggttatttgattttgattttttgtgttttttataaatagaatggtaataattattatgattagtgagttgattatgtggtagttagtgttttttttattttatttgtagtttttttatgtttttgtgagatgtgttatttttattttatagatggggaaatggaagtatagagaggttaatatatttgtttaaggttatatagttcgtaagtggtaaggttaggatttgaatttgagtagtttagttatagagtttatatgttgagattatcgtgttgtgtaattttttggtaggtgatgttgatgataatgatgatatttttgatatagcgttttggtgagcgttatatgtattaatatgtgggaatttgttttgttagttaaaaagtgatggatttatatgaattttgatttaggtataagttgagggagagggaaggttatttagagtagtatcgtagaacgtttattgtttgtagattttgtgtgaagcgttgagaaatggaatgaggaaggagttttagtttcggtatttagggattttttatgtttttagtgagatagatttaaattattgtagtgtaggtgttagtatatgggttagaagtggtagaagagggtttagtagatatttgggtttgaatgttacgtgatatttgcgtgatatttgggtttgaatgttgtgttaagggttttttttttgtattttttttgtgtagaggaatagtttgtaaagaatatttttttaggtacggtggtttatttttgtatttttagtaatttgggaggttgaggttagaggattatgtgtagttaggagttcgagattagttttagtaatatagcgagattttattttttaaaaaaaattattaaaaaaaaaaaaaaaaaaaaaaaaaaatatatatatatatatatatatatatatatatatatatatatatatatatttgagtgtggttttagttatttaggaggttgagttaggagggagaattttttgagtttaggagtttaagattgtagtgagttattttagagacggggtttcggtttgtcgtcgaggttggagtgtcgtggtgcgatttttttttattgtaatttttgttttttaggtttaagcgatttttttgttttagtttttcgagtagttgagattataggcgtttgttattatgtttagttaatttttgtatttttagtagagacggttttattatgttgattagggtgttttcgattttttgattttaagtgatttgttttatttagtttttcgaagtgttgggattataggtatgaattattatatttagtttaaaaatttttttttaataatatttgatcgtttgttttttgttaggttgggtgtagtaggtattttttttagaaggtttattaggtttggtatttgttttaggttttatagtatgtatatttggtatcgttatggtttgattattaatttagtattagattgagtttagagtgtttaagggttttttgttagtttttagtatatagtggttgtttaggaagtgtcgttcgttgaaggaatgaataaatgattaaaattttgttaatttttttttttgagttttgattagttattgtagagatgttaggttttttttaaagggtggaaagagttggggaggggtttgtagtatgagtttttaagtttggaagtatagggtttttgaagggtattttttttggaggtattagaattgggaagggtttgaagttatattattttgaatgtacgtggttttatttgatttcggaattttattagggttgggtttgaggagtatttgaatgagagaattgggaaggttttcgtttattttcgcgtttaggttattgggaaataaggttttttagtagagttagggatgggggcgtttatattttcgtaattttttattttttattttaggatagatttgagttaaagggaaaaagagtggttatagtcgtgggggatgggggtgttgtttaaggttgggggttttttagattgtgtgtttagagttatttaagtttttatttatgaagagtattttatattttgggcgtgggggtttaggatattggttggggtgaagaaatattaaggaaggagttgggttttatttcgggggtaaatttacgtttttaagtttagaaaggtgagagcgatgattattgggagttttttcgttattgagaggggttagtaatatttgggttaggtagttttgtttttttatatttgatggagaggaagtgaggttttaagttggagatcgtttaagattatgttataaatggtttgaaattttaagttttattttatttcgcgtggtttttattagtttttttatgttttttgttgttttattttttgtttttttgtttatagggtttttggttgtttataaagtattttttttttttttgtttgttttatttttatagtcgtttagggagaaggtattgttatcgtatatgtttattgtatagatgaggaaagtgaggttgagagagggtaagggattaggtttttcgttaaagattatttgggtttaaagttttgttttattatttattaattttgtgattttaagtaaattttttaatttttttgagttttacgttttttttttgtaagtcgtagggataatagtttttattttattgggttaaatgagttaatttatttgaagtgataaagtttggagtgagtattttatagatgttggttattatagtgatggttattattgtaggttttgcgcgcgcgcgtatatatatatatatatatatatatatatatatatatatttttattttatttgtaaatttatttttgagttttagagttagcgttaggagaggggttataggtttttatttggagagggtggaggttgtttttatatagaattttcgttattttttttagatttttttattttaatgaggttttggttattggtttgtgagtgtta

SEQ ID NO: 201 - DNA, 8085 bp, Artificial Sequence
  chemically treated genomic DNA (Homo sapiens)
  unsure 2545: n is a or g or c or t
gttttatgatttaattattttttaatatttttttttattaagattattatattggtgattgggttttgatatatagatttggggagaatataaatatttatattatagtatttattaatttatttagttattttattgttaggtatttatttagaaaaaatgaaaatatatgtttatataaagatttgtataatatttttatagtagttttatttataatattaaaaaaattggaaataatttagatatttatttatagttaaatggataaataaattatagtatataaataaaaagaataaaaagaattaattattgatatatattataatttagttgaattttaaaataattatgttgagtgagagaaattaaatgaaaaaaagatatattatattatatataattttaagaaataaaatttaatttatttggtatttagatttttatttttatattagttttaaataaaaagttttaaatttttttggataaatggttgattttacgattggggtaggaaatatataagatgagtttgatgagtttgtagtattttgtaatattagaaagtaggaaagtttatatatatatatatatatatataatatagagagtgggttaaggagtataagagttaattgaaaaagtttttagtgttaaaaattggaaaaatttgagtaataaagtatttatgaatttatataaagaaaagattgaataaagaagtaaatgggggagaagaagtaaattttttttatagaattttaaataaattatgtagatattttattttaaaggagggttagtataattttttatttttttatatttttttaagtgatttataatgatttttttttaaagagtatagagtatgtaaagagggaaaaaagagtaattatgtaatggagaaatttgataaatattattttagttaggtgatggagaataatattaatagttataagttatgttgataatatgtattttttatatgatgtaataaatatagtatattatttttttgatttttatttcgttaaaatttaaaattttagtttatttatgaggatatattaaattttaatagaagggtattttgtaatatattttattagtatttttaaggattgttaaggttattaaatataaggaaaatttgagaaatttttatagttaagaggagtataagatattataataattaaatgtggtgttttggatggaattttggaaaggaaaaaggatattaagtgaaaatgaagaaaatttaaataaattatgaatattagttaataataatttattagtattagtttattaattgtaataaatgtattttattaatttaaaatgttaatagagaaaattgtataaatgatatatgagtattttttatattatttgtttaatttttttgtaaatttaaaatcgttttttaaaagtaaaatttattaataaaatatttaaagtaaatagatttaaaaggtatatgtaaatgtataatttaatgtttaataaattagatataaatatttttaaaaatttaatatttggtgatagaaagtagattagtggtttgttagaaagtggtgattagtattaggggaaggggatgggatagaatagtatgaagggatttaaaaaatggtatgaggaaatttttggaggtaaagggtatgtttattattttagttttataggtttaataataaattatataatttaaatatatgtagtttattatatgataattatattttgataaagtggtttttttttttaaattatagaaaaaatatttttatatttaaatttttttttttaaaaatagtttttaggaatatttgaagttagttttattatatttgaatttaattagtgaattttgtttatttaaagatttatatatttgggaagtttttgtgttaaaaatgttaattatttagtattaaaatttatggaataatggtgatttaggatatgttggatatttttattgttgtttttttattttaagatttttaattttttggaaataatttttttagatattttgataagggaattattataattaattaaaattaagttaaatatagtttgttagatttaaaatgaggttaagtgttaattttatagtagcgatcggaaaattaaattatatggtatttgatatttaaaattatatttttaagaaggttgttatttgatgttttgggtttgggttatagtatttaattttataatattgggtaattttgtgttttagtttttttaattatgaaattgggataatagtatttattttgtgagattgttgaaggattatagttaatataggtaaaaggtttataagattatttggtaatgttgttttgattttataaattttatatattgtgtggtattagttattaggaaaatataaataaattagtgagatattattttatatatttggggggttataataaaaaagatagataaaaaatgttgttaaagatgtgaagaaattaggatttttatttattgttggtgnaaatgtaagaagtataattatttgaattatagtttggtagttattttaaagattatatttagagttgttatatgaattagtaattttatttttatgtatatatttaggagaaaggaaaatatacgttgtataaaaatttgtatatgaatgtttattagtaggattttttatggtagttaaaaggtgtaaataatttaaatgtttaataattgatagagatggataaataaaatgtggtttatttatataatgaaatattatttgttaataaaaaggagtgaaggagtgaagtattgatttatgtggaatatggatgaattttgatttaaaatagttaaattataggtataaaaagtatattagtggttgttgggagatttaggcggaaatgtggaataattgttagtgggtattgagattttagagttatatttatgttataaaattaatagtgttgatggttgtataattttgagtatatgaaaaattaatgaattgatattttgagtgagttgtatgatattggaattatattttaataaagtatggtaattgttttaagataggttggaaagagaaagtttgaaaataataataatgatattaataaattagtttatttttttagttttatatatttttgtgtttatatttgtttttgttttatttataatggtttttttgtagttgttatattatattttgttatttgatgttcggtgaatattttatatttgttttttagaattttttttattttttttttatttgtttaatttttatatatttaaaattaattagagtaaattatttattagaataattaattttaaattttagtaatttaatatgataaaggtttgttttttatttatatagtttttttttagatgatcgaggggtttaggttttttatttttagtggtttttttattttttggagttttttgtattttttatatatggttgagataaattatgagttattagtatagttagattttgaggttttataagaaaatttgtaaattatttattttgttttgaataaggtatatttaagatgatgttaaaatatttaatggttttgggttaaatatagtttatgattgtgtatttaaaatatatattgtaatatttttttttttttttattgattttatgaatttagcggggatttattttataagtttaaagataattattttttagattaagaatatttagggtaaaaagtattgtttaatatttttattgaggatgttatgatgtagtatattgtataagttggagttaaaggaaattttttttaaagtgttatttattaaaaattggaatatattttttaagataaatcgaagtgtggtatataatatttaaatttttattatagatatagaggtgttattattttttatttttaaatttttttgttacgttgaggatatttaagaggagtaggatatgttggtcgtagtaggagaaatttgaaagtatttatttttatggaatttataagggagagaattttttattttagtatcgtttttgatatatttattattttaaaagataatgtagttaaatgtttttttttgtgttaaatttttataaaattgaaattttaaaatggtgataaaaattttatttttgatagaatttatttatttttttaattagatagggtataatttttaatttgtaaaataaaacgtaatatgtttatgaggttttattttaaagaatttgttattgagagtagtatttagaataacgggtggaaatgttaattttagagttttagattttatcggtaattggggtagggaggggttttgggcggggtttttttagaggaggaggcgttgttagaaagttgtttggttagtttatagttgttattaatcggggtaagttttgttgtatttgtgcgtgtgggtggtatttttaatgagaattagttttatttgttatttgagtgaaatttataattcgaggcggttagtgttttcgtattattgggatttgagattttcggagatgattgtcgttcgtagtacggagttagtagaagttcgattttttttgggaatgggttgtatcgagaggttcgattagttttagggttttagtgagggggtagtggaatttagcgagggattgagagttttatagtatgtacgagtttgatgttagagaaaaagtcgggagataaaggagtcgcgtgttattaaattgtcgtcgtagtcgtagttatttaagtgtcggatttgtgagtattttgcgtttttagttttcggatagaagttggagaatttttttggagaatttttcgagttaggagacgagattttttaataattattatttttttttgcgttttttatttgtcgttcgttgggataaacgatagttatagtttttttgacgataggatggaggttaagggtaggagttgattagcgtcgttttttttcgttttcgatttaggaggtggagattttttcggtttagttatatttaatatttatttttttttttttttgtttttatattttcgaaatttttttttttttttttttttttttttttttggagacgggggaggagaaaaggggagtttagtcgttatgattgagttgaaggtaaagggttttcgggttttttacgtggcgggcggttcgttttttttcgaggtcggatttttattgttgtgtcgtttagtcgtaggttcgttttcggggagttagatttcggatattttgtttgaagtttcggttatatttatttttttggacgggttatttttttttcggttttgttagggataggattttttcgacgaaaagacgtaggattagtagtcgttgtcggacgtggagggcgtatattttagagttgaagttataaggggtgttggaggtagtagttttagttttttagaaaaggatagcggattgttggatagtgttttggatattttgttggcgtttttaggtttcgggtagagttaatttagttttttcgtttgcgaggttattagtttttggtgtttgtttggtttcgaatttttcgaagatttatcggttgttttcgttatttagcgggtgttgttttcgtttatgagtcggttcgggtgtaaggttggagatagtttcgggacggtagttgtttataaagtgttgtttcggggtttgttattagttcggtagttgttgttttcggtttttgagagtttttattggttcggggttttagtgaagtcgttttcgtaggtcgttgcggtggaggttgaggaggaggatggttttgagttcgaggagtttgcgggttcgtttttgaagggtaaatttcgggttttgggtggcgcggcggttggaggaggagtcgcggttgtttcgtcggggcggtagtaggaggcgtcgttttggtttttaaggaagattttcgttttttagcgtttagggtcgttttggtggagtaggacgcgtcgatcgttcgggacgttttcgttggttattacggtgatggattttatttacgtgtttattttgttttttaattacgttttattggtagttcgtattcggtagttgttggaagacgaaagttacgacggcggggtcggggttgttagcgtttttgtttcgtcgcggagtttattttgtgtttcgtttatttcggtcgttgtaggcgattttttcgattgcgcgtattcgttcgacgtcgagtttaaggacgacgcgtattttttttatagcgatttttagtcgttcgttttaaagataaaggaggaggaggaaggcgcggaggttttcgcgcgtttttcgcgtttttattttgtggtcggtgttaatttcgtagttttttcggatttttcgttggggttatcgttttcgttgtcgtcgcgagcgattttatttagattcggggaagcggcggtgacggtcgtattcgttagtgttttagtttcgtttgcgtttttttcggggtcgattttggagtgtattttgtataaagcggagggcgcgtcgttttagtagggttcgttcgcgtcgtcgttttgtaaggcgtcgggcgcgagcggttgtttgttttcgcgggacggtttgttttttattttcgtttttgtcgtcgtcgtcggggcggttttcgcgttttattttgtattcggttttaacgggttttcgtagttcggttattaggtcgtcgtgtttaaggagggtttgtcgtaggtttattcgttttattttaattatttgaggtgagggttcgggacggggtacgtttagcgcgttcgggagtagcggtttcgttggcggcggcggtcgttaatttttagttttagttttagcgtatcgttgcgtttttcggggcggtcggagagggtgggtagcgggatatagtataggggtagttgtttttttttttttttttttttttttttatttttggggatacgaaggtgggcgtagaatatattatttttggggcgtgtttttttgaaagttgtttttttgtttgttttttaatttttcgaattttttagatttcgaagtagaattaatttcgatttaaaacgtgtagcgttatattaggttcgttgtagtttagtggggtagaaagtgcgcggcgagttgggggttttatgaaatgttttttttttagaagaaggacgtttattaggagtgtttgttttggagaggagttaaggtatcgttttttcgggaggggtgggatttgagaggtggtcggttagaatcgaaagtagtattattttagggatttgaatattttagtggtttagtttttttaagaattttaagattaaaattaagtttacgtgggaaatgtttaaattgtggatttaaacgtttgttattgtattgtatcgtttttttattattgtttgttatttattataattttttttatatataggtttaaaaaatattattttgtatattgaagtaatggaatgtaaaaaaagaatgttttgtttggaattttatgttgtgaataggtaaaatagtgttagtgtattggataatattttaaaatgataaatatatatttgtttaagtaagtaatgattatagggttgtgttttaaaaatttaaaattaaaatattgtaaagtattatcgaatttttaaagttaaattatatttgttttgatttagtatatagataggaaggatataatattttatttgttaaagattaaattgtttttatataaagagttttgtagaaagatttttttttaatcgattttaattttttaggatataatattatatattaattattgtttttttatattggtgttattgatgaatggttaattatttgtaagtatggtgaatttagttacggatagtttattattaagtttagtttgtatgttttttaagtgtatatatatagttttgtttttaaaatttttttttattttgttaatattggtttaagaaatttttagtattagatagtggtgtatttaaaaataaatggagtattttgttttgtattttaagg

SEQ ID NO: 202 - DNA, 8085 bp, Artificial Sequence
  chemically treated genomic DNA (Homo sapiens)
  unsure 5541: n is a or g or c or t
ttttgaaatgtaaaataaagtattttatttatttttaagtgtattattatttaatattaaaggttttttaaattagtattaatagggtgaaaggagattttaaaaatagaattgtatatatatatttgaaagatatgtaaattaaatttggtaatagattattcgtaattggatttattatatttgtaaatgattagttatttattagtagtattaatataaaagaataataattagtgtataatattatgttttagaaagttaaagtcggttaaaaggaaatttttttataaaattttttatatagaaataatttagtttttgataaatgaaatgttatgttttttttgtttgtatgttgggttaaaataaatatggtttggttttaaaagttcgatggtattttgtaatgttttggttttgagtttttaaaatataattttgtaattattgtttatttaagtaagtatatgtttgttattttaaagtattgtttaatatattgatattgttttgtttatttataatataagattttaaatagagtattttttttttatattttattattttagtatgtaaagtagtgttttttaaatttgtatataaaaaaaattgtagtgaatagtaagtaataataagaaaacggtgtaatgtagtgataggcgtttaaatttatagtttaaatattttttacgtgaatttaattttaattttgagatttttaagaaaattgagttattgaagtgtttaaatttttaagatggtgttgttttcggttttggtcggttattttttaagttttatttttttcgggggaacggtgttttaatttttttttaagataagtatttttggtaaacgttttttttttaagaaagaagtattttataaagtttttaattcgtcgcgtattttttgttttattgggttatagcggatttagtgtgacgttgtacgttttaaatcggggttggttttgtttcggaatttggaagattcggaaagttaaaaaataaataaaaaaatagtttttagggaggtacgttttaaaaatagtatattttgcgtttattttcgtgtttttaagagtgaggagaggagggaagaagaagggaggtaattgtttttgtgttgtgtttcgttgtttatttttttcggtcgtttcggggagcgtagcggtgcgttggggttggggttgagggttggcggtcgtcgtcgttaacggaatcgttattttcggacgcgttgggcgtgtttcgtttcgggtttttattttaggtagttgagatagggcgggtagatttgcggtaggttttttttgagtacggcggtttggtagtcgagttgcgggagttcgttgaggtcgagtgtagggtagagcgcgggggtcgtttcggcggcggcggtagaggcggaggtggagggtaggtcgtttcgcgggagtaggtagtcgttcgcgttcggcgttttgtagggcggcggcgcgaacgggttttgttggggcggcgcgtttttcgttttgtataggatgtattttagggtcgatttcgaggaggacgtagacgagattgaggtattggcgggtgcggtcgttatcgtcgttttttcgggtttggatggggtcgttcgcggcggtagcgggggcggtggttttaacgggaaattcgggaaggttgcggggttggtatcggttataaggtaggaacgcggggagcgcgcggaggttttcgcgttttttttttttttttttatttttagagcgggcggttggaagtcgttatagagagggtacgcgtcgtttttgggttcggcgtcgggcgggtacgcgtagtcggggaagtcgtttatagcgatcggggtggacgaggtatagggtgaatttcgcggcggggtaaaggcgttggtagtttcggtttcgtcgtcgtaattttcgttttttagtagttgtcgagtgcgggttgttaataaggcgtgattgagaggtaggataggtacgtggatgaaatttattatcgtggtggttagcggggacgtttcggacgatcggcgcgttttgttttattagggcgattttgggcgttgagaagcgggaattttttttggggattagggcgacgttttttgttgtcgtttcggcgggatagtcgcggttttttttttagtcgtcgcgttatttagagttcgaggtttgttttttagaagcggattcgtagatttttcggatttagagttatttttttttttaatttttatcgtagcggtttgcggagacggttttattggggtttcggattagtgagggtttttagaggtcgggagtagtagttgtcgggttggtgataggtttcggggtagtattttatgggtagttgtcgtttcggagttgtttttaattttgtattcggatcggtttatgagcggggataatattcgttgggtggcgggggtagtcggtggattttcgggaagttcggggttaaataggtattaagagttggtgatttcgtaggcgggagggttgggttggttttgttcgggatttgagggcgttaatagagtgtttaagatattgtttagtagttcgttgtttttttttgggggattagaattgttgtttttagtattttttgtagttttagttttggaatatgcgttttttacgttcgatagcgattgttggttttgcgttttttcgtcggaggggttttgtttttggtagggtcgagggaagagtagttcgtttagggagataggtatggtcgaaattttaggtaaggtgttcgaggtttggtttttcgggaacggatttgcggttgggcgatatagtagtggggattcgatttcgggggagggcgggtcgttcgttacgtggggagttcggggattttttgtttttagtttagttatgacgattggatttttttttttttttttttcgtttttagggaggagggaaaagggaaggaggagggggtttcgggaatataggggtagagggaggagaaagtgggtgttgaatgtggttggatcggagggatttttattttttgggtcgggggcgggggagggcggcgttggttagtttttgtttttggtttttattttgtcgttaggggaattgtggttgtcgtttgttttagcgagcggtaagtggggagcgtaagaaaaagtagtaattgttaggagatttcgttttttaattcggggagttttttaagagagttttttaatttttgttcgaggattggagacgtagagtatttataagttcggtatttgagtggttgcggttgcgacggtaatttagtgatacgcggtttttttatttttcgattttttttttggtattaaattcgtgtatgttgtgaagtttttagtttttcgttgagttttattgtttttttattaaaattttggggttagtcggatttttcggtatagtttatttttaggaagggtcggatttttgttggtttcgtattgcgggcgatagttattttcgaagattttagattttagtagtgcgggagtattagtcgtttcgggttgtagattttatttaaatgataagtgaagttagtttttattgagaatgttatttatacgtataaatataataaggtttatttcgattagtgatagttgtggattggttagatagttttttaataacgtttttttttttagggaggtttcgtttaaagtttttttttattttaattatcggtaggatttgaaattttggagttggtatttttattcgttattttgaatgttatttttaatagtaggttttttgggatggaattttataagtatattacgttttgttttgtaaattaagaattatgttttatttaattggaaaaatgaatagattttattagaagtagaatttttgttattattttaagattttagttttgtaaagatttaatatagaggaagatatttggttatattattttttaaaataataaatgtattaaggacgatattaaaataagaaatttttttttttatgagttttataaaagtgaatgtttttaagttttttttgttgcgattaatatgttttgttttttttgagtatttttagcgtgataaagaaatttgggagtgggagatggtaatatttttgtatttatgatggaagtttggatgttgtgtgttatatttcgatttgttttaaggaatgtgttttaatttttagtaaatagtattttaaggaaagttttttttagttttagtttatatagtgtgttatattataatatttttagtagagatgttgaatagtattttttattttaaatatttttagtttgaaaagtaattatttttgagtttataaaatggattttcgttaaatttatgaagttagtagaaaaagggaagaatattgtaatatatattttagatatatagttataaattgtatttgatttaagattattgggtattttaatattattttaaatatattttgtttaaaatagagtgaatgatttgtaaatttttttgtaggattttaaggtttagttgtgttaatgatttatagtttattttaattatgtataaagaatgtagaagattttagaaggtgggggagttattagaggtaaggagtttggatttttcgattatttggggaggggttatatgagtgagaaataaatttttattatgttaggttattaggatttggagttggttgttttagtaaatagtttattttgattaattttagatatgtggaagttaggtagatagaggaaaggtaaagagaattttgggaagtaggtatagaatgtttatcgggtattaaatggtaggatataatatggtaattgtaaggggattattatgaatagaataggagtaagtgtgggtatagaagtatatgagattagagaagtaaattaatttattaatattattattgttgtttttaggttttttttttttagtttattttaaaatagttattatgttttattgaggtgtaattttagtattatatagtttatttaaagtattagtttattgattttttatgtatttagagttgtgtaattattagtattattaattttgtaatatgagtatgattttaaaattttaatatttattagtagttattttatattttcgtttaaattttttagtagttattaatatgttttttgtatttgtgatttggttattttggattaaggtttatttatgttttatatgaattagtattttatttttttatttttttttattgataaataatattttattgtatggataaattatattttatttatttatttttattagttgttggatatttgggttgtttatattttttggttattatgaaaaattttgttaatgaatatttatgtataagtttttgtgtagcgtatattttttttttttttggatatatgtataggagtggaattgttggtttatatggtaattttaggtgtggtttttggagtaattgttagattatggtttaaatgattgtattttttatatttntattagtagtgaataagggttttagtttttttatatttttgataatattttttatttgttttttttgttatagttttttaagtgtgtgaagtggtattttattgatttatttatatttttttgatggttaatgttatatagtgtatagaatttgtaaaattaggatagtattgttaggtagttttgtaagttttttatttgtgttaattgtaattttttaatagttttataaaataggtattgttattttaattttatagttgggaaaattgaggtataaggttatttagtattataaagttaagtattgtaatttaaatttaagatattaaatgatagtttttttaggagtgtgattttaaatgttagatgttatataatttgatttttcggtcgttgttgtaaaattggtatttggttttattttaaatttgataaattatatttggtttgattttggttggttataataatttttttgttagaatgtttggggaggttgtttttaaaagattgaaaattttgaagtgggaaaataataataaagatgtttagtatgttttaaattattattattttataaattttgatgttgggtgattagtatttttggtataggaattttttaaatgtatgaatttttgaatgaataaaatttattgattaaatttaggtgtgatggggttaattttaaatatttttgaagattgtttttggagaagaggatttaaatgtggaagtattttttttatagtttggggaaaaaaattattttattaagatatagttgttatataataagttgtatatatttaaattgtataatttgttgttagatttgtgaaattaaaatgataaatatattttttgtttttaaaagtttttttatgttattttttaaatttttttatattgttttgttttattttttttttttagtattaattattattttttggtaagttattaatttgttttttgttattaaatattaggtttttaaaaatatttatatttgatttattaaatattaaattatatatttgtatatgttttttaggtttgtttgttttagatgttttattaatagattttatttttgggaaacgattttggatttatagaaaaattgagtagataatatagagaatgtttatatattatttgtataattttttttgttagtattttaaattaatagggtatatttgttataattaatgaattaatattgataaattgttattaattaatatttatagtttatttagattttttttatttttatttaatgtttttttttttttttaggattttatttaggatattatatttaattgttatgatgttttgtgttttttttggttgtgagagttttttagattttttttgtatttgatgattttgatagtttttaggagtattggtgaggtatattgtaagatgtttttttattgggatttgatgtatttttatgagtagattagggttttgggttttggcggggtggaaattaaagaggtaatgtattgtatttattatattatatgaagggtatatattgttaatatgatttatgattgttaatgttgttttttattatttggttgaagtagtgtttgttaggtttttttattgtatagttatttttttttttttttttgtatattttgtattttttggaaggaaattattatgagttatttaaggaagtgtgggggagtagggagttatgttagtttttttttggagtggagtatttatataatttatttggaattttgtgaggaagatttgtttttttttttttatttatttttttatttagttttttttttgtatggatttatgaatattttgttgtttaaatttttttagtttttggtattgggggtttttttagttgatttttgtgttttttgatttattttttgtattgtgtgtatgtgtgtgtatgtgtggatttttttattttttggtattataagatgttatagatttattagatttattttgtatattttttgttttagtcgtagaattagttatttatttaaggaagtttgagattttttatttgaaattggtatagaaatgaagatttgggtgttaaataaattaggttttattttttagaattgtatataatatagtgtattttttttttatttggttttttttatttagtataattattttgagatttagttaaattatagtatgtattaatagttaattttttttattttttttatttatatattatagtttgtttatttatttaattgtggataaatatttgagttgtttttaatttttttggtattataaatagagttattatgaaaatgttgtataagtttttgtatgaatatgtgtttttattttttttgggtaaatatttagtagtgaaatggttggataaattagtaggtgttgtgatatgagtgtttgtgttttttttaaatttgtgtgttaaaatttaattattaatgtgatagttttagtaggaggaggtgttggggagtgattaggttatggagt

SEQ ID NO: 203 - DNA, 12426 bp, Artificial Sequence
  chemically treated genomic DNA (Homo sapiens)
ttgtttaattttatttttttttattgtggttttttttttttttttttaagtttgttttttagaaaattttatatagtttgttttttgtaatatagtatagtttattatttaatataaaattttttttagataaatattagaagttgaaaagataaaaagtatgaaataaatttttaaaatagagtagttaggaaaaagaattataaatttggggtttttaaaatagttttttttttattttagttagaaattttaaagtagttattttattttttttgatttagtttttttataagtgaaaagatataatagtttatagtgattagttaggattttttatagttaattgtgaatggttggaaacgtggatagttaatatgattttattattgtatgggagaggtattatgtgaattagtgggaattatttttattagtgaagaaaaaaattatttgatgatttgtaggaattcggggagaatgttgagaatttgtggttgaaattttttttaggaaaagagagagattgagtgagagcgagagcgagatagagagagagagagagagagaaagcgagaggtatatgttagaataaagttttttttatttgtttttgggagtggttgggtgtgttaaattattttttagtttcgatgttgagtaattaagtataatatttgtaaagttttaatttataggtaagaaaaagtattaataaaatagttttttaggttattaaatatttagtttaatgattatttgtgttgaattagaggaagttattgttttatataattgtataatgaatgaatgaataatttattttttgagttatgtattttttttttaaaaaatttatttttttaaatatatagttaataaaatggtttttgtggtaaataaagagaggggaaaatattatggattatttttgaaattatagagtaaatgtttttttttataaataggtgtattttttgttattaaatttttttaaataaattatttatttggttgggtgcggtggtttacgtttgtaattttagtattttgggagtttgaggtaggtgggttataaggttaggagattaagattattttggttaataaggtgaaatttcgtttttattaaaaaataaaataaaaaaaaaattagttgggtatggtggcgggcgtttgtagttttagttatttgggaggttgaggtaggagaatggtatgaatttaggaggtggagtttgtagtgagtcgagatcgtgttattgtattttagtttgggcgatagagcgagatttcgttttaaaaaaaaaaaaaaaaaaaaaaaaaaaaaaaaaaaaaaaagaattatttattttataaatgtaaagtgtttgggatgaattagatgtattggtttttatatataaagagaattggaggaaaggtagttggtatttaaggaaatgttaaattgattttaaattttgggttgaatttatttttagttgaatttttgtcgggtagggttattttttatttatttattttttatttattatgtgttaagtatttattatgtgttagatattattttaagtttttggattatattagtgaaaaaaatagattaaaaaaatttgtttagattttagttgaaggaggttattaatagtaaatataataagtgaattgtatagtatattatatagaaaattataaaatttggttttatatttgttttttataggtttaaagtttattaagaagaagggagattaaaaatattttggagttgattatttatgggtttatataaaaagttttttatgaggtaagagattgaagattataataggataataatattatattgttatttttatgttgttgttttttgagttattagtatgagtagaatttttttttttataagtttgatgtttttaagtttatttgttaatataattgatatgataattttgttttttttaggtattttttttaggatgtatgttttttttttttttttttttttttttttatagtataataattagtgtaggtatttgatttatagaaatgtaaagttaaattgtagtcggtttgagatttatagttaggttttattttgggttttgtttagggtttgatatatttaaaaaatgtttatttagttaattatagattttaattaaaatgtttagttaaaatagggaagtagagtagaaatttattgaatgtagaagattttattgaggttatttttttttaaaattaattagtaggtatgttttttagaaattagtttgaaattttgtaatttaaaaaatgtgaattgtttgtataattttatttttttttatttttttgttttttagtgtttttttaggtagaattttaaagaatttaaaattttggttgtcgtggaaaagaatattattgggaaatgggtttttttagttaaatagaattatagttttaatattttttttattgaatgggaattattttttttttttttgtaattttgtttaaattaatagtgtgttttgttaatgatgttatatttgagatttgtgagtttttgttttatttgggtttaatgagagggtgagaatatttacgtatagggtttgatttttagagatattttaataagtgaaagtttttgataggaaatgttttgtttaattttttgttaatatatttgtttaatatattttgtattattttagttttggattttcgtttttaggtttaaatggttttttgatgtttaatgatgttgtttttatgatttttttttagttatagttagattgaaaaggttatatttatttttgaattatttttgttatttgtattttttttaagttttttattatatgtttttagatatttttttttgttttttgtttttttattgtattttttggggagagggaatatgttttatagttttagtcgaatggtgtttttaatttttatttagttagaattatttaaaggtattttattttgttagaatttttttgggtattgttgaatttttgttattggaaatgtttttgtttcggttgagtaagtattgaataggagtgttttagagggaattaaaattttaaaaaggagaatagagaggttttattatttaaatgtaagtcgtttgaaatttgtagattatagtagtaagtacgaagtaggtatttaataaatgtggtgaatttaatgttaataatatgttttagttttttgtttattatttttcgagtttatttaattaatgggtaaagtggtattaattgttattattaggaagtatatgttatgtgttagaaagtatgtaagaattgtttttttatttatttttgtttatattttattttatcgattttattgataaatgagaattatatatagattttattttatagatgaggaatttgaagataaagggattaagtaatttgtttaggattttttaagtaatgagtggttagatttagtttgtaaatttatgattttgtttttaaatttttatttttttttttatagttggataatagaatttttaagaagtatttttttatatttttttatttatgattttttttttatttgttttattgatgtttaaaattttgtttttggagtttatttagtttatgattttgattttggttaatattaaaatatttaggatatgggggaggggaagttgttattaattttagtttagttagttaatatagcgagttgtttttatttattatttaataagtatttattgattgtatattgtatattaggtttgtattaagttttggtgttataaaaatgaatgaagtttggtatttatttttaatattgttgtagttatatataggagaatgtaagagattattatgaaataatgtagtaaatgtataatagggaattttagataagtatagtagagaagtaattagtttcgttttaggtttttttttgagattgattcggttggaagggagtaggtttcgttaaatgaagaagttgtgggaagataggaggataagaataggttttacgaagagattttagagtagagttgcgtatttttttttttttttgttttttttgttttgttatttaggttgaagtatagtggttagtttacggtttattgtagttttgattttttaggtttaagtgattttttcgttttagttttttaagtaattgggattataggtatgtattattatattaggttattgttttatattttttgtagagatggggttttattatgttgtttaggttggttttaaatttttgggtttaagtaattcgtttacgttaatttttttaaatgttgggattataggcgtgagttatcgcgttaggtttgagtaattttaattataggattttaaaaagaaattttttgcgttatttattaaataatattttttattaatttggtagtaaatattttgttaatagtatttaatttttaggtaggtattgtgtttatatatatatttatttttttttttttgattgtttttttgtttaatgggtagttattttttttggtatttagtagaatgagttgttgtagtttatataaaaagaatggagattagagtattttttgtgttattaacgtgtttgagaaatttgtagtgttattattattatatattatttttattttatcgaatattttatttttcggttttgcgtgggtcgagaggattgtcgtacgtatgtttgtacgtatgtatgtaatttatagtttttttttgttcgaatatgttggaggttttttggaagttgtgtagataatagtaattttagtttgaattattttttttaattgtggataagttgttaagaggtttgagtaggagaggagtgtcgtcgaggcggggcggggcggggcgtggagttgggttggtagtgggcgtggcggtgttgtttaggtgagttatcgttgtttttgtttagatacggtcgtttttatatttaggtttttgtgtttttcgtttgtttgttttttttttacgtattttttaggataattgtgattttaggtaagtaaggtggggtagtagggttggtgattttttttttttagggaaatttataaatatcgttatttgagttgatttgagatggtgaataaaatggatttaggtttattttggggttgtttttaaagacgggttgttgggttgagtattgtcgttttttattttttatgttggtagtatttttagtttttaattttttgagtattaggaatattgtagagggagtaaaattatttaattatataaggtaagaatatgaagaagttacgtggttcggaggttttggtggtagaggggtgtaatcgtgatttacggaggagaaaatatttttgaggatatttttaggtttattttggaatttagaatgaattttgtaatgttagttttagaaagggtgtggtattcgtaaattggggaaagttgagaagtattggtgggtttggttggtttttttttttggttgacgttgtaaggttgagatttaggtatatggattgtttttttttttggtatttttaagtattagatcgttgtttatttatttgtaattgtatttttttaagcggaaattattttttttttagttttttgggttttagtataattttaaataagttatatattttagatgtatatttttggatttataaattgtaatagttgtttgtagttttttatttatatgttgtatatttttttttatggttttatttaagtatattatattaaaaattaatatgttaggttattttagagatttgtaattagatttttagagttgggggtttttagatatattttagtttagtttttttattttgtagatgaggagtagaatttatagaggtgatttggtgtttaaaggtatatagtttgtaagtagtatcgttgagattaaattaggtttttatatttgtagttcgggatgtttttataatatcgtgggttttgttattattttttttattttttatatttttcgggaggttttcgataatgggttttaaattttagtttttgttagttagtgtaagtgttcgatgagtttttttatgggtggagatgaagtttgtttgaggaaaggagtttttaaaggaaatgagttagtaggtttatatttttgttttttaacgttttgaattgtgttattttaatttttttgggttgtggattgattttggggttatgtagttttagcgatttgggttattttggtgtggttgagtttggttgtaagtttattgtttggtaatagtgggttgggttagtggttaagattaggtttttaaagagataggagtagttatgatgttttagagtaaagtagacgtttttttgttatgggaaattaaagtaattattaatagttgtattgtatttttttgtttataaagtattttttatatatattgatttatttaattatttcgtttagtttttatagttttttatattgtagaaattttaaaatattttatttttttaattttgtatattttttgttttttaaagatttagaatgtggataatagaggttgtgttttttggtattttattattgatattataataggtaaggttttttatggtattttttaaggattggttatattaaatatttgagagatgttttttattatgtttttttatttttaaaatgaggtaggttaggttaaatgatatttacgatattttgatatagtaaaaacgtagtttttttttttttttttttgagatggagttttgttttgttatttaggatggagtgtagtggtacgattttggtttatcgtaattttatttttttaggtttaagtgatttttttgttttagttttttaagtagttgggatgataggtacgtgttattacgttcggttaatttttatatttttggtagatatagggttttattatgttggttaggttggtttcgaatttttgattttaagtgatttgttcgttttggttttttaaagtgttgggattataggtgtgagttattgtattcggttaaaagttaaggttttaagggatgaaaaaattatatttatagttttgtttaaatatgtacgttcgtgatgtgtgggtgaagagtgtggttgatggtttataagtaaaatgaatatatattgtttaaattaggatatgtttgagagtaaacggggtattgttattaatgttaagataatagatataaattaggattgttttaggtaaagtgggatgtatatattttatttataggattttttttttatttaaatggtttaaagataaaaaatgtgaggattattggtttagatgtataaaaaatttaggaaatttttatataaagattagtgataagttataagtttagagaagtgagtacggttttatttttagtttagtatatgcgtttttatttattggggtttttttgaattgagttagttttttttgttttacgtttttgtaaggttaatttttatttattttgtaggatttatttttaatgtgatttatttagttgttattgtttttgaggaggtgttattgaggtttttagtatggggggtttgttatttttggggattttatagtgatttgggtgtttattaaaatatttaaaatagttattatattattaattgatagttttttggaggtaggggttatgtcgtttttatttttttttaatgtttattttgatataaattaggtatttagttaatatttattagatgaaagtaatattatattaagagtttataatataagtggtagaaagggaataagggtttttttaagtaggaaaattatagggaagaagttttgtgtcgattgaataaattatgtaggatatgttgatatttttaaggggagattttaggatatgtaggatttttggaattcgagagatttttgagagaataaatgttagtaaagatgtaattaataagaaagtaggtgattaggtgtggcggggaagtgttaggttgggagttagaagtaatgaattttaggtttggttttgttatttttattttttgcgtgggtggtttgggagatttattttatttttgtttgttttattttttttatttgtaaaatgaagaggtgtggttagtttagattttttttaagattttgttttatttttaaggtttataatttgtatagattgcgaaagtaaggtatttggaaataagtttttaaaattgtatttgtattattgtttgaatttttatttattttatttttttatggttaaaataaagttttttttaaatttttaagtgttgaaagatgtagcgttttttatattgtaattataaacgaagttttttttgttaaaatggttatagggtttttatagaaatggaagaagatttttgtgataaggtaatagaatgaaaaaaaatttgtagtaattttagtatttttaatagaagttattaggtatattaaatttattatataggaattgttaatttttattttggtatttgtaattttatagtatttgattatgtaaaatggtttgtgtaggaagtttgtattttttttaggttatgtattgttaatattgttgaggtttgtttaaatgttttgattgttttgtaatatagttatgtggtaattgtggttaaagttattttttgagttattttagattagattaattttatagtgtttttaggttatttgggattaattatagagttattgattagatttatcgggtagtatttgattgattatttagtgggtgattttttgtaattataattttttttatgtatagattttttttgttttttttagttagtattaaataatgtttttgttattgggattttagatattaagggttgtatgatttttttagatatgaaggagaattttttgagaaaggagttagttagtataggaataggaaggtagatttttttgcgtttatgtattgaggattagtatgtaaaggaagggatttatttaaagggaaggttcgttaatggtgagagaaagttttagagatgttaggatgttagatgtgtattgatttatatttttaatagggatttggatttaagttttgaattgtaatatagtattaattgtattgtgtaattaattatattaaaagttataatgattttgtatttataattatttagattaaatgtattttaaaatgttgtgataagtgaatgaataatgttttagtgaaataaaatggtaaaatgaatatttttttattatttgatttatttttaagatttatttgtaggtgtttgtagttaaatttttttagtatattaagattttaaatattatttttttatataaaggaaattattaaaagtatagtttgttattgattatgtaaaattattttagttttttttggaggataataaatacgtgtttggaggagttatttgtgtttgttaaagtagtttgtgtgtttttatattattattagtgcgattagttttttattggtggaagtgttaagaagtttttagggatttgggtttaggtttttttatttggtgaagaaataatttattattttttgtatatgttgagttttatttgtagatgaatttggtattattaatattaaatgtgttgtggaaggaagttaggttttttattttgaaagtttgtttatagattttttaaattttttgtgaagagtttttttatgtttttttagtggtaggtatattgggtgaaatatttaataggtttttatttttgttttagtatattttgttgattttagtatatatttaatgttagttatttttttttggggtgtgatgttatttgtaggtttttgtttttgttttgaggggagaaggagtaaggttgtgggttttaaagaaaagtgagaggtttatttgattttagggggtttcgtggtatatttgtaatgggaattggtttgagcgtatggttgtatttattagggatatatggagaaggaggaagtttatggaaatgattagtgagtatgaatagagttaataaaatattatttttggataatgaattcgtttttttagattttgagatataatcgatttaagtttattttatatataagttatatattttataaaagggagaattttgaagaaatgtttaaagattaggagtttttttttttattttattttcgtttttgtattttgaatttgtgtttaggtataaggtgtaaattgtaattttatttattatgtttttgatttttgatatacgtttgggtattggttaaagggagttttttattttaagtagtggagtttattttttaatgttagggtgtatgttttatttgaagatttttaatgttatattcggtttttgtgtttgtgtgtgtgcgtttgaggttttgggggaatatttcgagtttaatttttgtattgtttatttcggggtagtaatattaatttattttttttagaaatatgttgttttggtttaggtagaattttaggagtttatgtagtttagttttgtttttagaaagggaagttttgattgtttgaatttatttaattgtttttggagtcgattagtaattattagattaaataggtaggtagatttttattagaatagtgaagttttttaaatttgaggattttgttatatttttaaaaattatcgaggattttaaagaattgtttttttaaaaaaaatgtagattatatttattattatttattaaattagaaatgaaaattagatatattttgaaatgtttatttattaatttattaaaataatataataattaaatattaatatgaataatatatatattaaaaaatattttttaaagtgaaaaaatgtaatgagaagagtgatattgttttttatttttgtaaatttttttaatatttggtttaatagaagggatgttatatagtttttggaaaatttcgttgtttattagagattgagaatgataatgttttagtattattatgagaatagttttaattttatggattttttgaaagggtgttagggattgttaggagttaagatataatattttggaagttgttgtgttaaaattaaagagttttgagatgtgataagatgtttagttgttgttatatttattttattaggttatatattttgaaattgtttttttttttttttaatttttatattatttattatattatttatatgttttgggtagttttgtattttagttatttgtttgtatatttgtttaaagagattatgagtttagagaaggaggaggtttattgatttttgtaatattttgggtagtgttttatatatagatgcgtattataaacgtaaataataatcgttgttgtttattaagtattgttatgtgttgggtgttttgtaaaggtattagttattttaagggttttttagtattttttataaagtattataaattaggtagtttaaagtaatagaagttttatttatttataggtttggaggttagtattttgaaatgacgatgtcggtagggttatgttgttttaaaaggttttaggggagaatgttttatgatttttttttggtttttggtgttgttagtagtttttagtattttttggtttgtggaagtatttttttaatttttgtttttattgttatacggtatgttttttatataggtgaagatatttgtgtttttatattttttttttgtgtatgtttgtttttgtgtttttttttttatttttttaaggatattagttatatcggattagggtttatttaattttaatgtaattttattttaattaattatatattagttaagaaataggatatattttgtttttacgtaaggttatatttataggtaatggggattaggatttaatatatttttttgggggatataatttaatttattatatttattaaatattaaattgaataatgtaaaattgttgtaattcgattgtttttgttttataaaagttttaattttgtagtttaattgaaattttaatggaaataatatgtgataaataaaattaattgatgttgattagtgttgttaatttttttgatatatgttggagaagagatgtgattattgggttttcgataatggttattgtggttgagtaggtttaagattgtagagtttaggtagagttggatatatagaggattttatatgtttttagatatttgtttggaagtttttttataattgattttatttttgaatttatagaaagttttttgttttttttgagattaattattttgtttaaatagaatttttatagtgttggtagaatgtagttgagaagacgttaaagatgttttagaaattaattgtttttttgttt

SEQ ID NO: 204 - DNA, 12426 bp, Artificial Sequence
  chemically treated genomic DNA (Homo sapiens)
ggataagggagtagttagtttttaaagtatttttaacgtttttttaattgtattttgttaatattataagaattttatttaaataaagtaattgattttagaagaaataaggaattttttgtaaatttaaaagtaagattagttgtgaagaaatttttaggtaaatgtttgaaggtatgtgaggttttttgtgtgtttagttttgtttagattttgtagttttgggtttgtttagttatagtggttattgtcgggagtttagtggttatattttttttttagtatatgttagaaaagttgatagtattaattaatattagttggttttatttattatatattgtttttattaggattttagttaaattataaagttaaaatttttataaaataaaaatagtcgaattgtagtagttttgtattgtttagtttaatatttagtaagtgtaatgggttgaattgtgttttttaaaaagatatgttaagttttaatttttattatttgtgaatgtgattttacgtggaaatagggtatgttttattttttaattaatatataattagttaagatgaagttatattggagttaggtgagttttaattcgatatgattggtgtttttaaaggaataagaggagagatatagaaatagatatatatagagggaagatgtgaagatataaatgtttttatttgtgtgaagggtatgtcgtatggtaatggaggtagagattggagggatgtttttataagttaaagaatgttaagaattgttggtaatattagaaattaagagaaagttatggaatatttttttttggagttttttgagatagtatgattttgtcgatatcgttattttaaagtattggtttttaagtttgtgggtgaataaagtttttgttgttttaagttgtttggtttgtggtgttttgtgagaagtgttagaaaatttttaaagtaattaatgtttttgtaggatatttagtatataataatatttaataaatagtagcggttattgtttgcgtttataatacgtatttgtgtgtaagatattatttagagtgttataaggattagtggattttttttttttttaagtttatagtttttttgggtagatatgtagataaataattagaatatagagttgtttaagatatgtgagtggtataataagtaatatgggagttaaagaaaagagggaatagttttaaaatatgtagtttggtaaagtggatatagtagtaattaggtattttgttatattttagagttttttaattttaatatagtaatttttaaagtgttgtgttttgatttttggtagtttttaatatttttttaggaggtttatgaggttaaaattatttttatgataatattaagatattattatttttaatttttaatagatagcggagttttttagaggttatatgatattttttttattaagttaaatattaaggagatttgtaaaaatgaaaaataatattattttttttattatatttttttattttagaaaatgttttttaatatatatattatttatattagtatttaattattatattattttaataaattagtaaatgaatattttaaaatgtgtttggtttttatttttagtttggtaaatagtgatagatataatttatattttttttaaagaaatagttttttggggttttcggtaatttttaagagtgtaatagggtttttagatttaaaaagttttattgttttaataaaggtttatttatttatttagtttggtagttattgatcgattttaaagataattaggtaaatttaggtagttagggtttttttttttgggagtagagttgaattatatgaatttttgaggttttgtttaagttaggatagtatgtttttaagggaaatgaattgatattattatttcggggtgagtagtatagggattaaattcgaagtgtttttttaaagttttaggcgtatatatatagatataagggtcgaatgtgatattgaaggtttttaggtaggatatgtattttggtattagaaagtaagttttattgtttaagatagaggattttttttggttagtatttaaacgtgtgttaagagttaaaggtatgatgaataggattgtaatttgtattttatatttggatataaatttagaatgtaaagacgagaataagatggaggagaggatttttggtttttaaatatttttttagaatttttttttttatgggatatatggtttgtgtgtaggatggatttaaatcgattatattttagagtttgaaaaagcgagtttattatttaaaaataatgttttattgattttgtttatgtttattggttatttttatgggttttttttttttttatatgtttttgataagtatagttatgcgtttaggttagtttttattgtaaatatattacgaggttttttgaagttaggtgggttttttatttttttttaaagtttataattttattttttttttttttagggtaggggtaagggtttataggtgatattatattttagggaaaggtgattggtattaggtgtatattgaggttagtagggtatattgaggtaaaaatgaaagtttgttgagtgttttatttagtgtgtttgttattgggaaaatataaagaaattttttataaaaggtttggggaatttgtggatagatttttagaataggaaatttggtttttttttatagtatatttaatattagtaatgttaagtttatttataagtaaaatttaatatgtataagaagtaatgagttatttttttattaaatagagaagtttaaatttagatttttgaaagttttttaatatttttattagtggagagttaatcgtattgataataatatgaaaatatataaattgttttaataaatataagtagtttttttaagtacgtatttattattttttaagagaaattagaataattttgtatagttaataataaattatatttttagtgattttttttgtatagaaagatggtgtttaagattttaatgtgttgagggagtttggttgtaaatatttataaatggattttaggagtggattaaatggtgaggagatgtttattttattattttattttattaaagtattatttatttatttgttataatattttgagatatatttagtttaaatgattgtggatataagattattgtggtttttagtgtagttaattatataatataattaatgttgtgttgtaatttaaggtttagatttaggtttttgttggagatgtaaattagtgtatatttgatattttaatatttttggggtttttttttattattggcggattttttttttgagtgagtttttttttttgtatgttaatttttagtgtatgaacgtaaagagatttgtttttttgtttttatgttgattggttttttttttagaaaatttttttttatgtttgggaaggttatatagtttttagtatttggggttttagtggtaagagtattgtttgatgttggttaaaggaaatagaaaaggtttgtatatggaaaaggttgtagttgtaaaaaattatttattaagtaattaattaaatattgttcggtaaatttgattagtggttttgtgattagttttaagtgatttaaaaatattataaagttgatttggtttgaggtagtttaaaagatgattttggttatagttgttatatgattgtgttgtaagataattaaagtatttaaataaattttagtaatgttaataatatatgatttggaaaaaatataaattttttatatagattattttgtatgattaaatgttataaaattgtaagtattagagtagagattagtaatttttatataataaatttaatgtgtttaatgatttttgttgaaagtgttaaaattgttataaatttttttttattttgttgttttgttataagggtttttttttatttttgtgaaaattttgtaattattttaataaggagaatttcgtttatagttgtaatgtagaaaacgttatattttttagtatttaaaagtttaaaaggaattttattttaattataggaaagtgagatagatggaagtttaagtagtaatataaatgtagttttaagaatttatttttaagtattttgttttcgtaatttgtgtaaattataaattttgaaagtgggataagattttggagaggatttaggttggttatatttttttattttatagatgaggaaaatgaggtagataaagatgaagtgagttttttaggttatttacgtagggagtgagagtggtaaaattagatttagaatttattgtttttagtttttagtttggtattttttcgttatatttgattatttgtttttttgttaattgtatttttgttggtatttgtttttttagaagtttttcgagttttaaaaattttgtatgttttgaagtttttttttgaagatattaatatattttgtatggtttgtttaatcgatataaaattttttttttatgatttttttatttgaagaagtttttgttttttttttgttatttatgttgtaaatttttggtatgatgttgtttttatttagtaagtattaattgagtatttaatttgtgttagggtaagtattaagaaaaggtgaaaacgatatagtttttgtttttaaggagttgttagttagtggtatgatgattgttttaagtgttttgatgagtatttaagttattatgggatttttaggagtgatagattttttatattagaaattttagtgatatttttttagagatagtgataattgagtaagttatattaaaggtgagttttataggataagtaggagttagttttgtaaaaacgtgggatagggagaattgatttaatttagagaggttttagtgaatggagacgtatgtattgggttgggggtagggtcgtgtttatttttttagatttatagtttgttattggtttttgtatgaagattttttaagttttttatgtatttgagttaatggtttttatattttttgtttttagattatttaggtgagaaaaaagttttgtgggtaggatatatatattttattttgtttgggataattttggtttatgtttgttgttttgatattgataatagtgtttcgtttatttttaaatatattttgatttgaataatatatgtttattttatttatagattattaattatattttttatttatatattacgggcgtgtatatttaaatagagttatgagtatagtttttttattttttaaaattttaatttttggtcgggtatagtggtttatatttgtaattttagtattttgggaggttaaggcgggtagattatttgaggttaggagttcgagattagtttggttaatatggtgaaattttgtgtttattaaaaatatagaaattagtcgggcgtggtggtacgtgtttgttattttagttatttgggaggttgagatagaaaaattatttgaatttgggagggtgaggttgcggtgagttaagatcgtgttattgtattttattttgggtgataaagtaagattttattttaagaaaaaaaaaaaaaaaattacgtttttattgtgttagagtatcgtagatattatttagtttggtttgttttattttaaagatggaaagatatggtgaaaaatattttttaagtatttggtataattagtttttagggaatgttatgagaaattttgtttattataatattagtaatggaatgttaaaaaatataatttttgttgtttatattttaagtttttgaggagtaaaggatgtgtaggattaagaaaataggatattttgaagtttttgtaatgtgaaagattatgaggattaaacgaagtgattaagtgaattaatgtatatgaaaagtgttttgtgggtaagaaagtataatatagttattagtaattgttttaattttttatggtaggggggcgtttgttttgttttgaagtattatagttgtttttgtttttttagaagtttgattttgattattgatttagtttattgttgttaagtagtaaatttatagttagatttagttatattagaatggtttaaatcgttgagattgtatagttttaaagttaatttataatttagagggattgaagtggtataatttaaggcgttaggaagtaaagatataaatttgttgatttattttttttggagatttttttttttagataggttttatttttatttatgaaggaatttatcgaatatttatattaattgatagggattgaggtttggaatttattatcgaaaatttttcgggagatgtaggggatgaaaaagatggtaatagaatttacggtgttgtggaaatatttcgagttgtaagtgtgaaggtttgatttgattttagcggtgttatttataagttgtgtgtttttggatattagattatttttgtgagttttgttttttatttatagaatgagggggttgggttgaaatatgtttaagagtttttagttttgaggatttggttataagtttttggaatagtttggtatgttggtttttagtatgatatgtttaaatgaagttataagaaaaagtgtatagtatatgagtaagaaattataagtagttattataatttataagtttaagaatatgtatttgaaatgtgtaatttgtttaaagttatgttgaaatttagaaaattgaagggagaataattttcgtttagaagaatgtagttgtaagtagatgaatagcgatttgatgtttaaaaatgttaaaaagaagggtagtttatatgtttaaattttagttttataacgttagttagggagaagagttagttagatttattaatattttttaattttttttagtttgcgggtattatattttttttgaaattagtattgtaaaatttattttgagttttaaagtaggtttgaaaatgtttttagaagtattttttttttcgtgaattacggttgtatttttttattattaaaattttcgagttacgtgatttttttatatttttattttgtatggttaagtgattttattttttttgtagtgtttttggtgtttaaagggttgggagttggaaatattgttaatatgggggatgagaggcgatagtatttaatttaatagttcgtttttgaaaatagttttaaaatggatttaagtttattttgtttattattttaaattagtttaaataacgatatttatgaatttttttgaaaaaaggaagttattagttttgttattttattttgtttatttggagttatagttattttggaaaatgcgtggaaaaggaataggtaagcgaggagtataaagatttggatgtggaggcgatcgtgtttgggtagaagtagcggtggtttatttgggtagtatcgttacgtttattgttagtttagttttacgtttcgtttcgtttcgtttcggcggtattttttttttatttaagttttttggtagtttgtttataattgaaagaaatgatttaggttgaagttattgttgtttgtatagtttttaaaaggtttttaatatgttcgggtaggaaggggttgtgagttatatgtatacgtatagatatgcgtacggtaattttttcggtttacgtaggatcggaaggtgaaatattcgatgaaataaaagtaatgtgtgatgatagtaatattataaattttttagatacgttggtggtataaaaagtattttgatttttattttttttgtgtaaattgtagtagtttattttgttagatgttaagagaggtagttgtttattaaatagaaagataattaaaaaagaaggaatggatatatgtataaatatagtgtttatttaaaaattaggtattattagtaaaatatttattattaaattggtaggagatattgtttaatgggtggcgtaggaagtttttttttaaaattttgtgattaggattatttaggtttggcgcggtggtttacgtttgtaattttagtatttggggaggttgacgtgagcggattgtttgagtttaggagtttgagattaatttgggtaatatggtgagattttatttttataaaaaatgtaaaataatagtttagtgtggtgatgtatgtttgtggttttagttatttggaaagttgagacgagaggattatttgagtttgggaggttaaagttgtagtgagtcgtgagttaattattgtattttagtttgggtgatagagtaaaagaaataaaaagaaaaaggagtacgtagttttgttttgaaattttttcgtggagtttgtttttgtttttttgtttttttatagtttttttatttggcgggatttatttttttttagtcgaattagttttaggaaaggatttgaaacggagttggttgtttttttgttgtgtttatttagaattttttattgtatatttattatattgttttataataattttttatatttttttatatgtgattataataatgttaaaggtaagtgttaaattttatttatttttataatattaaagtttggtatagatttgatgtatagtatgtagttaataagtgtttgttgagtaatgaataagagtaattcgttatattaattgattaaattaagattgataatagtttttttttttttatgttttgggtattttaatgttaattagaattaaagttataaattaagtgaattttaaaaatagaattttaggtattagtggagtaagtggagggaaggttataggtgaggaggtgtggaaggatgttttttaaaaattttattatttagttgtaggagggaaaatgagaatttgggagtagagttataaatttgtaaattaagtttaattatttattgtttgagaaattttgagtaaattgtttaatttttttatttttagattttttatttgtaaaatgagatttatatatagtttttatttgttaataagatcgataaaatgagatatagatagagatggatgaagagataatttttatatattttttgatatatagtatgtgttttttaatgatggtaattagtattattttgtttattggttaggtaggttcggggaatagtggataaaagattggagtatgttattgatattgaatttattatatttattgaatatttgtttcgtgtttgttattgtggtttatagattttaagcgatttgtatttaaatggtagagtttttttatttttttttttgaagttttaattttttttaaaatatttttgtttagtgtttgtttaatcggggtagaaatatttttaatgataggaatttaataatatttaaggaagttttagtaaagtgaaatgtttttgggtgattttaattgggtgaaaattagaggtattattcgattggggttataagatatgttttttttttttaaagggtatagtaggaagataagaaataaaagaaagtatttggaggtatgtaataagggatttaagagaggtgtaaatgataaaagtagtttagagatgggtgtgatttttttagtttggttatgattggggaaggattatggaggtagtattattggatattaggagattatttaagtttgagaacggaggtttagagttgggatgatataaggtatattggatagatatgttaataaaagattaaatagaatattttttgttaaaagtttttatttgttgaagtatttttggaggttagattttgtacgtgaatgtttttatttttttattgaatttaagtaaggtaaggatttataagttttaggtgtaatattattgataaaatatattgttgatttaggtaaaattgtaggaaaaaaaaaagtggtttttatttagtggaaagagtattaaaattgtgattttatttgattgagaagatttattttttagtaatatttttttttacggtagttaaaattttaagttttttagaattttatttaaaaagatattagaaaatagaaaagtgggagaggatggagttatataagtagtttatattttttaaattatagaattttaaattagtttttggagaatatgtttgttgattaattttaggaaagagtggttttaataaagttttttgtatttaataggtttttattttgtttttttgttttaattggatattttgattggagtttgtgattgattgaataagtattttttgagtgtgttagattttgggtaagatttagaataagatttaattatggattttaagtcgattatagtttagttttgtatttttataagttagatatttatattaattgttatattgtaaaaaaaaaaaaaaaaaaaaaaaaaaaatatatattttgaaggaaatgtttggaaagaataaagttgttatgttaattatgttaataagtggatttagaagtattagatttataagaaaaaaggttttatttatattaataatttagagagtaataatataaaaataataatatggtgttattattttgttataatttttagttttttgttttatgaaaagttttttatgtgggtttatgaatagttaattttagagtatttttgattttttttttttttgatgaattttgaatttataagaagtagatataaggttagattttatagttttttatatgatatattatataatttatttattatgtttattgttgatggttttttttagttgaaatttaagtagatttttttggtttgttttttttattgatgtagtttaagaatttagaatagtatttggtatatagtgggtatttagtatatagtgggtagagaatgaatgagtgggaaataattttattcgataggaatttaattaaggatgaatttaatttaaaatttgaagttagtttgatatttttttaaatattagttattttttttttagttttttttgtatatgaagattagtatatttgatttattttaaatattttatatttgtaaaataaatgatttttttttttttttttttttttttttttttttttttttttttgagacggagtttcgttttgtcgtttaggttggagtgtagtggtacgatttcggtttattgtaagttttattttttgggtttatgttatttttttgttttagttttttaagtagttgggattataggcgttcgttattatgtttagttaattttttttttattttattttttagtagagacggggttttattttgttagttaggatgattttgattttttgattttgtgatttatttgttttagatttttaaagtgttgggattataggcgtaagttatcgtatttaattaaataaatgatttatttaaaaaaatttagtgataaagaatatatttgtttgtaggaaaaagtatttgttttataattttaaaaataatttataatgtttttttttttttttatttgttataaaaattattttattgattatatatttaaaagagtagattttttggaggggagatatatagtttaaagaatgaattatttatttatttattatataattgtatgaagtaataattttttttagtttaatataagtaattattggattaaatatttaataatttaggagattgttttgttggtgtttttttttatttataggttgaagttttgtaaatattatatttgattatttagtatcgaggttgagggatgatttgatatatttagttatttttaggaataaatgaaaggagttttgttttagtatgtgtttttcgttttttttttttttttttttttttgtttcgttttcgtttttatttaatttttttttttttttaagagaagttttagttataaatttttagtatttttttcggatttttataaattattaagtgatttttttttttattaataaaggtgatttttattaatttatatgatgttttttttatataatagtggaattatattagttgtttacgtttttagttatttatagttgattataaaggattttaattagttattgtggattattatgtttttttatttgtggagaaattgagttagggaagataaagtgattgttttaaagtttttgattgagatggaaaaaaaattattttaaaagttttagatttataatttttttttttaattattttattttgaggatttattttatattttttgtttttttaatttttggtgtttgtttagaagaaattttatattaaatgataaattgtattatattatagaaaataggttgtgtgaaattttttaagaagtaaatttaagagaaaaaaaaaaagattatagtgaaaaaaaatagagttaaatag

SEQ ID NO: 205 - DNA, 5571 bp, Artificial Sequence
  chemically treated genomic DNA (Homo sapiens)
gaaatttcgtttttattaaaaatataaaaaattagttgggcgtggtggtgggcgtttgtagttttagttattcgggaggtcgaggtaggagaatggcgtgaattcgggaggcggagtttgtagtgagtcgagattattttattgtattttagtttcggtagtagagcgaaatttcgttatatatataaaaaaagaataagtgaaaattagttcggcgtggtggtttatttttgtaattttagttaggtgggaggtttaggtagtaggatcgtttgggcgtaggtttaggttgtagtgcgtcgtgatttattgtgttattgtatttcggattttcggtgattagagtgagattttgttttaaaaataaataaataaaaattaaaataaaaaaagaaatatttagtttttgttttgtaaagatagggtttttttatgttgtttaggttgtttttttgagtttaagtaattcgtttgtttcggttttttaaagtgttgggattataggcgtgagttattatgtttggtttttttaaatttagaatgttttttgtttggttaggcgcggtggtttatgtttgtaattttagtattttgggaggttgaggtcgtcggattatttgaggttaggagtttgagattagtttggttaatttgatgaaattcgtttttattaaaaatataaaaattagtcgggtgttgtggcggacgtttgtaattttagttatttgggaggttgaggtaggagaatcgtttgaattcgggaaggggaggttgtagtgattcgagattatgttattgtattttagtttgggcgagagtgggattttgttttaaaaataaataaattaaataaaataaataaaaaattgagtaaattttttttaggagataaatgagtgatgtagatttaatacgtttttatttgattaattataaatagcgtatagagttttagttatataattttagttatataaatgtattgattagatttatagatattttaaaaaattgtgtatcgatattatttttaaatttttttttaaatttgttttttaaaaaaatttcgtgattatagaatttgttgaagttattgtttttttgttttttttttttgtataagtatatagtttttggatgaagttatttttttgataatgatttgattaaatttatattaggtagaatatgaaaattatttaaggattaatttggatattgtttaaattaatattaataaatgtttttttttttagagaattgttagtataattgtggttttttatttttttaaaagtatttgttatttaattattagggtgatttttttgattttttgttagattttttgagatagtataaatagtgttaattttattaagattatatttcgataaattaaaatattaagttttttattttcgaggagtaatttttgatttataatatatttgaatgtttattaattattttttaaagtagttttaagtaaattaaagttgtttgttaagtaaggtttatgttttgtaatttttagttgtgaagtttttattatataaagtagatatattaaatgttaattattttagttttaattaaatatttagttttttaaagatttagaaaaagtgaaaaaggttgaagttgatatatatttttttttttaaaaggtttaaaagatttattagaaataattattttaaattatatttttttttaaatggttaaaaatcgaattattaatttagtagtttatttttggtattttttaggtgtaagatcgtttgggttgggcgcggtggtttacgtttgtaattttagtattttgggaggttaaggtaggtggattataaggttaggagatcgggattattatggttaatacggtgaaatttcgtttttattaaaaatataaaaaattagttaggcgtggtggtaggcgtttgtagttttagttattcgggaggttgaggtaggagaatggcgtgaatttgggaggtagagtttgtagtgagttaagattgcgttattgtattttagtttgggagatagagcgagatttcgttttaaaaaaaaaaaaaaaaaaaaaaaggtcgttttaaaaaatattattattataattacgattaatattattgttattattattgttaatatttattagaagtttattttgtattgggttatatgttttataaataagagttttatttgttttttataataattttatgaggtagatgttgttattatttttattttgtttaaagtttaataaggttaagtaatttgattaatgtttaattagtagttgttagatttcggaattgaaattaggttaatttagtttaaagtttttgtttttaatttttatgttttcgaagtttatttaatttatttaaatttggtataaattgattttaattatggtttttttgttagaatttattatagtttttttttttattaataaatgttggataaagtatgtatttagggaggttgggtatggtggtttatatttgtaatttaaggaggttgggtatggtggtttatatttgtaattttagtattttgggaggtcgaggtaggcggattataaggttaggagttcgagattagtttggttaatatggtgaaatttcgtttttattaaaaatataaaaattagttgggtatggtggcgggcgtttgtaattttagttatttgggaggttgaggtaggagaattaattgtttgaattcgggagatggaggttgtagtgagtcgagatagtgttattgtattttagtttgggtaatagggcgagatttcgttttaaaaaaaaaaaaaaaaaaagggtatttaaggaataggaagataaagtataatggaaaagtaaatgaataaaaaggatttaaaaaaataaattttaattgttagattagtggatagtgaattaatgttttgagtttgtttattaatttgtggtagaattataattgttttttaaagagtggaaaggttttgaataaaagtggagaggtagagagggtttttttaggataggttgattgttttcgtaaaggtaaagggtttgtaaagtgttaggcgagtgggaataagtgggaatagttttgtttgattatatttgagggtttgagaaaggaaagggagggtagaagggatggaagtgggaattatatatgtttaatgatgttttgttcggtgttaaggatagttttagattttgataagcggaaagttttgaatatttaggaggtgaatttgggttattttatttttttttttagttgttgtatgattttgtgttattttatttatgttttatttttttatttgtaaaaagggagtaatttttgtttttttgggtttttttttagttataaaaaatgaatgagttcggttatagtatataaataaaaggaaaatatgtaatattttgtaggataaatttataaaagttgtggaggatttgggtatttttataaagtaagtattgtagaaaatttttaaaggaaatatttaaatttattaatgatagttatagggattttgattttttttttaaatggtaggtattttaaaaaattaaaatagaatgtagttagtttttaattatttaggttattgataatttaatttatggattatatagtattttaatttatttattttatacgtcgttattaattttatatgaagtttaaaaggataaaggatgtaagtggaattggttagtgtttcgggttatttttaagggaggtagagggtggggggttttttttgagataagatttggggttggttaataattgttggtattgtttgtttggtaataataggttgatgaaaaggtgattataacgtgaaaattggttaaattaagcgtatttttttattttcgttttagatgaggaatttttcgtttttatagaaggggttgaggtagtatttggtattataatattaatatttgtttcgtgattttttttttattcggttttttgatatatatttttttttagaaattaggattcgttggtgtttttgtatttttaaaatgggaatttcgtggttgagtttttagtcggtcggaacgattgagggttgtatttttttttcgtaggagcggggttttcgtttttagttttgttttaggtttgatttttttatttttttcgtgatttatgttttgcggatttttcgttttcgacgcgttttttaatatataaatttttagaattcgtttttagtttatagcgcgacgttagttcgttttagtcgatttggaggtttcgggtttgagttatatagaaagattattttcgtcggtatttttatatatagttcgatattcggcgcgtcggttttttcgtttgatatattaacgttcgtcgttttcgcgtaatttgttatgtttcggttcgagtttttgatttaaaatttttagcgaaacggagagtcgtagagtcggtttcgggcggtttttgatggttttgttattgtttgggtttgaatcgatacgtttttttttattttttttttttcgcggttttatatttagttttcgtttttttttacgtttcgcgtttttttttttttattttggcgttttttttttttcgttacgtcgtggcggcgtagagattattttgatcgcgagagttgggcggggcgggggcggggcgcgtcgagttatgtagattaatcggtttttggttggttggagtagcgttggtaggggcggggtcggggcgcggttatagagcgcgcggggcgggggtcgaggggagtcgtttagtttcgtcgtttttttatttttttttttttttcggtcggttcggtagttttgtttttcgttttggtttttcggagaggtttcgtttcgttttcgttcgtcgcgtttttttcgcgcgtttttttcgtcggcgcgttttttttttttatttttggttgcggggcgagtcgggcgtttgttgtagcggtcgcggtggttgaggaggttcgagaggagtcggtggtagcggcggcggcgggatcggtagtagtagtagtagtagtagtagtagtaattattagttttttgtttcgcggcgttgtcgtacgagttttacgagtcgtttatttcgtcgtttttagcgttgttcgatttcgttggcgcgttttttcgtcgttagtttcggtagcgtttttagttgtttttcgattcgttttcggtttttcgcgttagtcgtagttatagtcgtaacgttattcgtagttatagttatagttatagttttaggtatagttttcggtatagtttcggtttcggtttttgcggtagtttttttgggtatcgtttttgcgtcgatattttggaggttgggatgtttttgtttaaaattaattcgtttgtttatttgcgcgtcgcgttttgtaacgatttgtacgttattaagttggcgttcggtgagagtatttttcgttttcggttcggggatgcggggcggcggcgggattttttgggtggggagttggcggttcgcgggtcggtattgagttttcgtgttttttttttttttagg

SEQ ID NO: 206 - DNA, 5571 bp, Artificial Sequence
  chemically treated genomic DNA (Homo sapiens)
tttaggaaagggggaagtacggggatttagtgtcggttcgcgagtcgttagttttttatttaggagatttcgtcgtcgtttcgtattttcgggtcggaggcggggggtgtttttatcgggcgttagtttggtggcgtgtaggtcgttgtagggcgcggcgcgtaggtgggtaagcgagttgattttggataagagtattttaatttttaggatgtcggcgtagggacggtgtttagaggagttgtcgtaggagtcggagtcggggttgtgtcgaaggttatgtttggggttgtggttgtggttgtggttgcgggtggcgttgcggttgtggttgcggttggcgcggaaggtcgagggcgagtcggaggataattgagggcgttgtcgggattggcggcgggagggcgcgttagcggggtcgggtagcgttgagaacggcggggtgagcggttcgtggggttcgtgcggtagcgtcgcggggtaggaggttagtggttgttgttgttgttgttgttgttgttgttgtcggtttcgtcgtcgtcgttgttatcgatttttttcgggtttttttagttatcgcggtcgttgtagtagacgttcggttcgtttcgtagttaggagtaaaggggaggagcgcgtcggcggggagggcgcgcggggagggcgcggcgggcggggacggggcggggttttttcgggaggttaaggcggggagtagggttgtcgggtcggtcgagggaggagagggggtggggaagcggcgggattgggcgatttttttcggttttcgtttcgcgcgttttgtggtcgcgtttcggtttcgtttttgttagcgttattttagttaattagaggtcgattgatttgtataattcggcgcgtttcgttttcgtttcgtttagttttcgcggttagaatggtttttacgtcgttacgacgtggcgggaaggaaaaggcgttaaaatggagggggaggggcgcggggcgtgaggggaggcgggagttgggtgtagggtcgcgagggaggaaggatggggaggggcgtatcgatttaaatttaaataataataaagttattaaaggtcgttcgaggtcggttttgcggtttttcgtttcgttgagggttttgggttaagggttcgagtcggagtataataagttgcgcggagacgacgggcgttagtgtgttaggcggggaggtcggcgcgtcgggtgtcggattgtgtgtggggatgtcgacgagggtggtttttttgtgtgatttagattcgagatttttaagtcggttggggcgggttgacgtcgcgttgtaggttgggggcggattttgggggtttgtgtgttggggggcgcgtcgggggcgaaggattcgtaggatatgagttacggagggagtggaggagttaggtttggaatagaattggaggcgggagtttcgtttttgcgggaaagggatgtagtttttagtcgtttcggtcggttaaaagtttagttacgggatttttattttagaaatgtaaaagtattagcgaattttgatttttgggaagggatgtgtgttaaagggtcgggtaaagaggaaattacgaagtaaatgttagtgttgtgatgttagatgttgttttagttttttttgtgagggcggaaaattttttatttaaaacgagggtgggagggtgcgtttgatttaattagtttttacgttgtagttatttttttattagtttgttattattaggtaggtaatattagtaattattggttaattttaagttttgttttaaaggaaattttttattttttgttttttttggaaataattcggaatattgattaattttatttgtattttttgtttttttaaattttatgtagagttgataacgacgtgtgaaatgagtaaattaaaatattatataatttataaattgaattgttagtggtttaagtaattgaaagttaattatattttattttaattttttgaagtgtttgttatttaaaggaaaaattaggatttttatagttgttattagtgaatttaaatgttttttttgaaagttttttatagtgtttgttttataaaagtgtttagattttttataatttttatgaatttattttataaaatattatatattttttttttgtttgtgtattgtggtcgaatttatttattttttatgattaggagaaaatttaagggaataagaattattttttttttgtagataggaaaatgaaatataaataggatggtatagggttatatagtagttaagagaggagatgaaatgatttaaatttattttttgagtatttaaagtttttcgtttattagggtttaaaattgtttttggtatcgaataagatattattaaatatatgtgatttttatttttattttttttattttttttttttttttttaaatttttaaatgtagttaaatagaattatttttatttgtttttattcgtttagtattttatagattttttgtttttgcggaagtaattaatttgttttgggagagttttttttatttttttatttttatttaaagtttttttattttttaggaaataattgtagttttattatagattgatgaataaatttagagtattggtttattgtttattaatttgatagttgggatttgtttttttaaattttttttgtttatttatttttttattatattttgtttttttattttttgaatgttttttttttttttttttttttgagacggaatttcgttttgttatttaggttagagtgtaatggtattatttcggtttattgtaatttttatttttcgggtttaaataattggtttttttgttttagttttttaagtagttgggattataagcgttcgttattatgtttagttaatttttgtatttttagtagagacggagttttattatgttggttaggttggtttcgaatttttgattttatgattcgtttgtttcggttttttaaagtgttgggattataggtgtgaattattatgtttagtttttttggattataggtgtgagttattatgtttagtttttttgaatgtatattttatttaatatttgttgataaaagagaagattataatggattttaataaaaaggttataattaaagttaatttatattaaatttaaatgaattaagtgggtttcgggaatataaaagttgggagtaagggttttaaattaagttagtttggttttaatttcgggatttggtagttattagttaggtattggttaagttatttaattttattaagttttagatagaatggagataataatagtatttattttatagggttgttgtaaggagtaaataaaatttttgtttgtaaagtatataatttagtatagagtaaatttttaataaatattagtaatgatgatggtaataatgttgatcgtggttatgatgatgatgttttttaaaacggtttttttttttttttttttttttttgagacggagtttcgttttgttttttaggttggagtatagtggcgtaattttggtttattgtaagttttgttttttaggtttacgttatttttttgttttagtttttcgagtagttgggattataggcgtttgttattacgtttggttaattttttatatttttagtagagacggggttttatcgtgttagttatggtggtttcgattttttgattttgtgatttatttgttttggttttttagagtgttgggattataggcgtgagttatcgcgtttagtttaaacggttttatatttagaaggtattaaaggtaaattattggattaatagttcgatttttaattatttggggagagatgtgatttaaaatagttgtttttagtagattttttaggttttttagaaaaaaaaatatgtattaattttaattttttttattttttttaggtttttgaaggattaaatatttaattagagttaaagtgattaatatttaatatatttattttgtatagtgggggttttatagttggaagttataaaatatggattttgtttggtaaatagttttgatttatttaaaattgttttaaaagataattagtaaatatttagatgtgttgtgggttaaaagttatttttcgagagtagggaatttgatgttttgatttatcgaaatatagttttaataaaattagtattatttgtgttattttaaagaatttaataaagaattagaaaaattattttaataattaaatgataagtgtttttggaaggataaaaggttataattatgttaatagttttttgggaagaggagtatttattaatattaatttgaataatatttaaattaatttttaggtggtttttatattttgtttgatatgggtttaattaagttattgttaaaggaatgattttatttagggattatatgtttatgtaaaaaaaaaaaataaaaaaataatgattttagtaagttttgtagttacgaaatttttttaaaaaataagtttagaagaaagtttgaaagtgatatcggtatataattttttaaagtgtttgtaagtttagttaatgtatttatataattaggattgtataattaagattttatacgttatttataattaattaggtagagacgtattgaatttgtattatttatttattttttaaaaaaaatttatttagttttttatttattttatttagtttatttgtttttgagatagagttttattttcgtttaggttggagtgtagtggtatgatttcgggttattgtagtttttttttttcgggtttaagcgatttttttgttttagttttttaagtagttgggattataggcgttcgttataatattcgattaatttttgtatttttagtagagacgggttttattaggttggttaggttggttttaaatttttgattttaagtgattcggcggttttagttttttaaagtgttgggattataggtatgagttatcgcgtttggttagataggaaatattttaaatttaaaaagattaggtatggtggtttacgtttgtaattttagtattttgggaggtcgaggtaggcggattgtttgagtttaggagagtagtttgggtaatatagggaaattttgtttttataaaataaaaattgaatatttttttttttgttttaatttttatttatttatttttgagataaagttttattttggttatcgagggttcggagtgtagtggtataatggattacggcgtattgtagtttagatttgcgtttaagcgattttgttgtttgagttttttatttagttggaattataggggtgagttattacgtcgggttaatttttatttgttttttttttgtgtgtgtgacggggtttcgttttgttatcgaggttggagtgtagtggagtgatttcggtttattgtaagtttcgtttttcgggtttacgttatttttttgtttcggtttttcgagtagttgggattataggcgtttattattacgtttagttaattttttgtatttttagtagagacggggtttt

SEQ ID NO: 207 - DNA, 8013 bp, Artificial Sequence
  chemically treated genomic DNA (Homo sapiens)
ggttgaaatattttattttagtttggaagtacgtttatggggttaagtaattaattttataaattatttttttgtttttttttttttgttttggagatagggttttattttattgtttaggttggagtgtaggggtgtgattatggtttattgtagttttgattttttgggtttaagtgatttttttgttttagttttttgagtgtttgggattataagtgtgtgttattaagtttggttaatttttaaatttttttgtagagataaagaattgcgttatgttgtttaggttggttttaaatttttgtttttaagttatttttttattttaggttttaaagtgttgggaagatagtcgtgagttattatacgtggttaggttattattttttatttagtttattttatttcgtatttattttagtttatttttgtaaattattttttaagatggtagttggaaagatttaaaaagaaatttaaggttgggcgcgttgattgatgtttataattttagtattttgggaggtcgagaggggtagattatttgaggttaggagttcgagattagtttggttaatatggtgaaatttcgtttttattaaaagtataaaaattagttaggtgtggtgtgggtgtttgtaatattagttatttaggaggttgaggtaggagaatcgtttgaattcgggaggcggaggttgtagtgagtagagattatattattgtattttagtttaggcggtagagtgagattgtttttaaaaaaaaaaaaaaaaaaaaaaaaattagatattgttaatgttttttttttgttaatttgttaggtgtttaggataaaatgttaaatatttaatatggttttatagatattttgtattatttggtttttggttattttattttatttaatttcgttttttgtttgtgttttagttatattgttcgaggagtttttaaattattattttggttttgattatagatttttatatgtgttgttttttttatttgtattatttttttttttttttttgtttgtttaatttttatttattttcgggtttaattagtatttttttattttttttagtttgttgtttttatttaagattaaacgttagagaaatgtgaagtttattgattttcgggtggaatagagtttagtatgttaattaaattattgagtgttggttaggtatagtggttgatatttgtaattttagtattttggaagggcgaggcgggtggattatttgaggttaggagttcgagaggataatatgatgaaattttatttttattgaaatataaaaattagttgggtttggtggggggtatttgtaattttagttattggagaggttaaggtaggagaaaattgtttgaattcgggagatagtggttgtagtgagttgagattgcgatattgtattttagattgggtgatagagtgagattttgttttaaaaataaaaaaaatttcggttaggaatgaagaatgtttgaagtattgtatgtgtaacgtggtttgtgatttttaagttttgagtgtagcgtgatttagtttttcgtgatttgagtaataataaaatgtttaagatttgttttatgttattcgtgttttttaatgttggtttgttgttttttttgttgagattagattgtgatgtggtatattgtttttttttattagttttaatttatatgtatttataaatagtttattttttatgttgtttttatttattttggagatatttgattgtttttttttttttttttttttttgagatagggttttattttgttgtttatgttggagtttagtggtaggattatagtttaatgtagttttgattttttgggtttaagtgatttttttattttagttttttgagtagttggaattataggtatatgttattatatttggttaagttttgtattttttgtaataatggggttttattatgttgtttagattggttttgaatttttaggtttaagtgatttttttgttttggttttttaaagtgttgggattatagacgtgggttattgcgtttggttaagatgttttatggttaattatttgttcgtattgttattattttttagagaaattgttagaagagtgagattatgtgttttttaagtttataaaaatttaaaagaagttaggtagtagatttaaaaataaataaaatagattttgtaaaatttggttttaaatgaaaggtgatattttttaatttggattgtttttttggttttatgggattgtgtagttggagggtgattgggttttgtttttacggtattttttaggtgtagggattattgaattatgtttgttatttttgttttagttttgtattgaaataatagttgtgttattgggttttaaaagaaagtttgttttttttgatttaggtagaaagttattaaagaaaatagaaggataataagtagtgggaaaatagattagaaaagttatcgatttatttattttgtgttagaaatggataggtttgttttttttgttggaaatttaggatgtacgtttgtaatgagaaaagagtgaaagatttgagtaggtatattataaaagtataattatagcggttagtgaatatgaaaaggtttttaagttagagaagtttggagaaatttaaattaaaattattttaggatattacgttatatttattagttttgggtagggtgtaaatattaggaatttttttattttgttggtgagcggtgagcgagcgtataaattagtataattttggaaaataatttaatagagtggaaagttaggcgggtcgttgagttagtagttttatttattagtatatattttatgtttgtttttttgtataagagtatttattgtaggattgtttatagtaagttaaaatggaaaataatttagtgtttttgagtaagtaggatggataagtatatggtggagagttatgtaatagaacggtatagtatagagatgatgaatatttttgatattataataaaatgatttttaaaataatatttacgaaaaagaagttagggttgggatttagtggtttatgtttgtaattttagtattttgggaggttggggttagaggatcgtttgtggttaggagattgagattattttgggtttttataattattttttatgtagagatgtggtaagattttatttttatattaaaaaaaaaaaaatatttagatatattagattatacgttgtatgtttatttatatgaagattattgtttaggggtcgggtacggtggtttatatttgtaattttaatattttgggaggtcgaggcgggtggattttttgaggttaggagttcgagattagtttggttaatatggtgaaatttcgtttttattaaaaatagaaaaattagtcgggtttagtggatagcgtttgtaattttagttatttaggaggttgaggtagagaattgttttaatttgggaggtagaggttgtagtgagttaaaattatattattgtattttagtttgggtgatagagtgagattttatttgaaaaaaataaaaaaaaaaataaaaaattagattatattgtttagggataaatagttgataaaataatagagataagtaagatataattattataaaaattaggatttggggttgggggtggagagggaaggtttaagtggaaagaatggagtggtgataatgtgtgttaatttgggttatggtgattttggggttcgttttgtaattttttaaaatgagtatttatgtgttatttattttttagagggtagaatttttgaattaaaatgtttaagtaattatatattaaaaaaagaaaaaatatggatagatttgtattttaattaaaatatttaaaaaatagagataagggtttcgttatgttgttgagagtggttttaaatttttgggatttaattgattttttcgttttagttttttaaagcgttgagattttaggcgtgaattatcgcgttcgatttggaaagatatatatatatatatatatatatattttttttttttttttttttttttttgagatagagtttagtttttgttgtttaggttcgagtgtaatggttcgattttagtttattgtaaatttcgtttttagggtttaaacgatttttttgttttagtttttcgagtagttgggattataggcgttttattatattcggttaatttttgtatttttagtagagacgaggttttattatgttggttaggttagtttcgaatttttgattttaggtgattcgttcgtttcggttttttaaagtgttgggattataggcgtgagttacggcgttcggtttggataaattttttaaaatataaaagtttgagtgagtttttggtcggtcggtatagatgtcggggtggggtcgtgaatcggttgggacgcgttcgtttcggtttggggggattcgggttagtagtcggtcgtcgcgcgtgcgtattgggcggggggtttcgcgtttttatttgtacgtggttagcgttcggcgttgggtcgtagtttttgtcgtgtacgttggggagtcggtatatgtaggtgggaagttttatacggagaggcgcgtcgttttcgtgatagggttttatttggtatatcggtatggtagaattaaagtaaaagggggtagcgcgtgttaaaggttaacgtttagaaatcgttagaggttacgacggagatcggttattttttttttgattttgttgcgggcgttcgggaaaacgtagttcggtgtgttttgattggtttaggttttttgacgttacgaagtcgatttttgatagagttaataggcgaaaaggagagacgggaagtatttttgtcgtttcgttcggaaagggtggagtataacgtcgaaagtagttaatgggagtttaggaggcggagcgtttgtgggagttttggagggaatttttttagttttcgaggcggatcgggtgttgtatttatggagcgagttgagagttcgaggtgagcggggttcgtagtttttcggtgttttttttcgcgcgttttttttgagatttacggtattttaatttttttggaaatggggggaatatggtcgaggcgcgtggcgaggtagttttttggaggtttcggagtggcgattttagtgttgtagcgatttcgtgttttttgggtgcgttttgaggtcgaggtaagttttttcggggttttgggttgcgggtaaaggattcggttttgtgaggagttgggttcggtttgttttagataggttttgtttatattttattatagggtcgtggatttgaagcgggagcgtgaaatttttatagattgaatgtattttttttttatttgttttttttttttttttatttttatttttatagtattttatttttaatttttttttgtagagacggggatttcgttgcgttgtttaggttggtttcgaacgtttgagtttaagtaattcgttcgttttggttttttaaagtgttggaattaaaggtatgatgtatcgtgtttggtttttttaaaaaattaaggttattttggggacggtagagcgtttagatatatttttatttgtatagttgcgtagtttttaaaaatgtaatacgtttttatttgttaggatgtgtgatttttggttggtaagttatatcgaattttggttagtatatttgtattttatgttagatttgtaaacgtaaatttgttttttgtatttaaatatattagatatatttaggtaattatatttaaatgtattgagatatttaaataaatttggggtttgtgtttaaatgcgttttttttttaaaataaatatttgaagtgggtcgagagcggtgatttacgtttataattttagtattttgggaggttaaggcgggtggattatgaagttaggagtttatgattagtttggttaatatggtgaaattcgtttttattaaaaatataaaaattaattgggtatgatggcgggagtttgtaattttagttattttggaggttgaggtaggagaatcgttggaatttaggaggcggaggttgtagtgagttgagatcgtgttattgtagttcggtttgggtaacgtagtaagattcggttttaaaaaaaaaaaaaaaaaaaaattagaagtggatttgtagtttatagtgtgttgttaaataaatttatttttagagatatttttttttattttttgtgaggttatttgtagttttatatggtagatagatttaggtgagatttttagtaaggtggaatgaagagtaaagaggtttgtttattttagaagggtttattaaaggtttacgatgtgttaaatgttgtaggaaatatttagtgattttttttttatggaggttttttgtttttttttaataagttattaattaaattgtttgttggaaattgttaagttaatgaatatacgggatatattttttgagtagatattgtttgggtagaggaggaagaggagagcggtttagatagagatttgtttatatattgtagtgttttaaagagtttgtgatgtttaggatagttgtttattgtgttataatataggggatggttggttgcggttttttgtaattttagtattttgggaggtcgaggtaggcggattatttgaggttaggagttcgagattagtttggttaatatggtgaaattttattttttttaaaaatataaaaattagttgggtgtgatggtgggcgtttgtaattttagttatttgggaggttgagataggagaatcgtttgaatttgggaggcggaggttgtagtgagttgagtttatgttattgttttttagtataggtaacggggtgagattttgttttaaataataataataataataataataataataataataataataatgtaggggatttgatgaagggaaaggattagagagattttgaaaagaaggtagttttggttttaatgatgattaaattttaatttttatatagtaggaagtggggtattagtaaatttttaagtagaaaaattatttgattagatttgtgattttaaaaatagttttggtgatagagtggaggatgtattggagtagggaataaggggagataaaatttttataaaatttttaaagttagtatagtaagagttttgagggtttttgttaagatagtagttggtagttttagtttggagtggggtattaaaggtaattgtgtataaggaatagttatataattggtatttaatttttgagatgattttgatttaaatattgtgtattttttagtatattgttggtttttttaattatgttgggaaattatgttatttttatttttttttttgttcgttgtttaggttggagtgtaatgtcgtaattttagtttattgtaattttcgttttttggatttaagcgatttttttgttttagttttttgagtagttaggattataggtgtttattattatgtttggttaattttttgtatttttagtaaagacggggttttatcgtgttggttaggttggtgtcgaatttttgattttaagttatttatttatttttgttttttaaagtgttgggattataggtatgagttattatagttagttatgtttttattttttaagaaagaagatattattgttgttaaagattttggtaatttgagagatataatgtatgttttttttatgtggattttagtataattagatagtaaggatttgttgaatttgaagtatttatttagaagtattttgggtatatgtttaaggattgtaaaatagtgtttttatttttggatataataaatgtatttgttaatataataaatgaatagattagatttataaattatttatagtgttgagttattttttatagttaaaattaggatgaaaatatatagttgaatatttgatttgttttttgtaattgatttttttagt

SEQ ID NO: 208 - DNA, 8013 bp, Artificial Sequence
  chemically treated genomic DNA (Homo sapiens)
attagagaaattagttataagaaataaattaagtatttagttatatatttttattttgattttaattgtgggaaatgatttaatattgtaaataatttatgggtttaatttatttatttattatattagtaaatatatttattatatttagaaatagaaatattgttttataatttttaaatatgtatttaaaatatttttggatagatattttaaatttaatagatttttattatttaattatattaagatttatatggagaaaatatatattgtattttttaaattattaaaatttttggtaataatggtgtttttttttttgaaaagtgaaagtatggttggttgtggtggtttatgtttgtaattttagtattttgggaagtagagatgggtggataatttgaggttaggagttcgatattagtttggttaatacggtgaaatttcgtttttattaaaaatataaaaaattagttaggtatggtggtgggtatttgtaattttagttatttaggaggttgaggtaggagaatcgtttaaatttaggaggcggaggttgtagtgagttgagattgcggtattgtattttagtttgggtaacgagtaaaaaaaaaaatgaaagtaatataattttttaatataattagaaaaattaatagtatgttgggaaatatataatgtttaagttaaaattattttagaaattgggtattagttatataattattttttatatatagttgtttttgatattttattttaaattgaagttgttagttgttgttttagtaaagatttttaaagtttttgttgtattagttttaagagttttataaaggttttatttttttttattttttgttttaatatattttttattttattattagagttatttttgaaattataaatttggttaaataatttttttgtttaaaaatttattagtgttttattttttattatatgaaagttaaaatttagttattattggggttaaaattattttttttttagaatttttttaattttttttttttattaagttttttatattattattattattattattattattgttattattgttattatttgagatagagttttatttcgttgtttatgttagagggtaatggtatgagtttagtttattgtaattttcgttttttaggtttaagcgatttttttattttagttttttaagtagttgggattataggcgtttattattatatttagttaatttttgtgtttttagaagagatagggttttattatgttggttaggttggtttcgaatttttgattttaggtgattcgtttgtttcggttttttaaagtgttaggattataggggatcgtaattagttattttttatattgtagtatagtgaataattgttttgaatattataagttttttgagatattatagtgtataagtaggtttttgtttaaatcgttttttttttttttttttgtttaaataatgtttgtttaaagaatgtatttcgtgtgtttattaatttagtaatttttagtaaatagtttaattgataatttgttaagagaaggtaggaaatttttatgaaagagaaattattgggtattttttatagtatttaatatatcgtaggtttttaataaatttttttgaaataaataaatttttttattttttattttattttgttaagaattttatttaagtttgtttattatgtgaaattgtagatgattttatagaaaatggaaagaagtatttttaaaaataagtttatttggtagtatattataggttataggtttatttttgatttttttttttttttttttttgagatcgagttttgttgcgttgtttaggtcggattgtagtggtacgattttagtttattgtaattttcgttttttgggttttagcgatttttttgttttagtttttaaagtagttaggattataggttttcgttattatgtttagttaatttttgtatttttagtagaaacggattttattatgttggttaggttggttatgaatttttgattttatgatttattcgttttggttttttaaagtgttgggattataggcgtgagttatcgttttcggtttattttagatatttattttgaggagggagcgtatttagatatagattttaaatttatttaaatgttttaatatatttaaatgtagttatttaaatatatttaatatatttaaatgtagagagtaaatttgcgtttataaatttgatatggaatgtaaatgtgttagttaagattcggtgtagtttattagttagaaattatatattttaataggtagaaacgtattgtatttttaaaaattgcgtagttatgtaaataaggatgtgtttggacgttttatcgtttttaaaataattttaattttttaaaaaggttaggtacggtgtattatgtttttaattttagtattttgaggggttaaggcgggcggattgtttgagtttaggcgttcgagattagtttgggtaacgtagcgaaattttcgtttttataaaaaaaaattaaaaataaaatattataaaaataaaaataaaaggggagagagaataggtagaaaggaaatgtatttagtttatggggattttacgttttcgttttaagtttacggttttgtgatgggatgtgggtaaggtttgtttgggataggtcgaatttaattttttatagggtcgaattttttgttcgtagtttaggatttcgaaggagtttgtttcggttttaaggcgtatttaaggggtacgagatcgttgtaatattgaggtcgttatttcggggtttttagggggttgtttcgttacgcgtttcggttatgttttttttatttttagggaggttggaatgtcgtgggttttaaagagggcgcgcgagaggggatatcggaagattgcgagtttcgtttatttcgagtttttagttcgttttatggatgtaatattcgattcgtttcggggattgggaaagttttttttagggtttttataggcgtttcgttttttgaatttttattggttgttttcgacgttgtgttttatttttttcgggcggggcggtaaaaatatttttcgtttttttttttcgtttattggttttgttaaaggtcgatttcgtgacgttaaagagtttgggttaattagagtatatcggattgcgttttttcgaacgttcgtagtagggttagaagggaggtggtcggttttcgtcgtgatttttgacggtttttgagcgttggtttttggtacgcgttatttttttttgttttggttttgttatgtcgatgtattaggtaaagttttattacgggggcggcgcgttttttcgtgtggagttttttatttgtatgtatcggttttttaacgtgtacggtaggagttacggtttagcgtcgggcgttggttacgtgtaggtaggagcgcggggtttttcgtttagtgcgtacgcgcggcgatcggttgttggttcgggtttttttaggtcggagcgagcgcgttttaatcggtttacggttttatttcggtatttgtgtcggtcggttagggatttatttagatttttatgttttaaaagatttatttaggtcgggcgtcgtggtttacgtttgtaattttagtattttgggaggtcgaggcgggcggattatttgaggttaggagttcgagattagtttggttaatatggtaaaatttcgtttttattaaaaatatagaaattggtcgggtgtggtgaggcgtttgtaattttagttattcgggaggttgaggtaggagaatcgtttgaattttggaggcggagtttgtagtgagttgagatcgagttattgtattcgagtttgggtaataagagttaaattttattttaaaaaaaaaaaaaaaaaaaaaaaaaatatatatatatatatatgtatgtatttttttaggtcgggcgcggtggtttacgtttggagttttagcgttttgggagattgaggcgggaggattaattgaattttaagagtttgagattatttttagtaatatagcgagatttttgtttttattttttaaatgttttaattaaaatataaatttgtttatattttttttttttttaatatatggttgtttaaatattttggtttagagattttattttttgaaaagtgaatagtatataaatgtttattttgaggaattataaagcgaattttagggttattatggtttaggttgatatatattgttattattttattttttttatttaaattttttttttttatttttaattttaggttttgatttttatggtaattatgttttgtttgtttttattattttgttaattatttatttttaaataatatagtttggttttttgtttttttttttgttttttttagatggagttttattttattatttaggttggagtgtagtggtgtgattttagtttattgtaatttttgttttttaggttgaagtaattttttgttttagttttttgagtagttgagattataggcgttgtttattggattcggttaatttttttatttttggtagagacggggttttattatgttggttaggttgatttcgaatttttgattttaagagatttattcgtttcgattttttaaagtgttgggattataggtgtgagttatcgtgttcggtttttaaataatagtttttatataggtaagtatatagcgtatagtttgatgtgtttgggtgtttttttttttttaatgtagagatgaggttttattatatttttatataaaaggtggttatggagatttaaggtggttttaattttttggttataggcgattttttaattttagttttttaaagtgttgggattataaatatgagttattgggttttagttttggtttttttttcgtagatattattttaggagttattttattgtaatattagaagtatttattatttttgtattatatcgttttattgtatgattttttattatatatttatttattttgtttgtttagggatattggattgttttttattttaatttgttatgaatagttttgtagtgaatatttttatatagaggagtaggtatggggtatgtattaatgaatgggattgttggtttagcggttcgtttggttttttattttattaaattgttttttaaagttatattggtttatgcgttcgtttatcgtttattagtagggtagaagaatttttgatgtttgtattttgtttaaagttggtgggtgtagcgtggtattttaaggtagttttagtttggatttttttagatttttttaatttgaggatttttttatatttattggtcgttgtgattgtgtttttgtaatgtatttgtttaagttttttattttttttttattgtaaacgtatattttaggtttttagtaggagaaataggtttgtttatttttgatataagatgggtgaatcggtaatttttttggtttgtttttttattgtttgttatttttttgttttttttaatggttttttgtttagattaggagggatagatttttttttgaaatttaataatataattgttattttagtatagagttaagatagaaatagtagatatagtttaatggtttttgtatttagagagtgtcgtggaaatagggtttagttattttttaattgtatagttttatgaagttaaaaagataatttaggttggagaatgttattttttatttaaggttaagttttgtagagtttgttttatttgtttttaagtttgttgtttaattttttttgggtttttgtgaatttagaggatatataattttatttttttagtagtttttttaggaggtgataataatgcggataaataattagttataaaatattttggttaggcgtagtggtttacgtttgtaattttagtattttgggagattaaggtaggaggattatttgaatttaggagtttaaaattaatttgggtaatatggtgaaattttattgttataaaaagtataaaatttagttaggtgtggtagtatgtgtttgtagttttagttatttaggaggttgaggtgggaggattatttgagtttaggaggttagggttgtattgagttgtgattttgttattggattttagtatgggtaatagagtaaaattttgttttaaaaaaaaaaaaaagaaaaaaagtaattaagtatttttagggtaaatgaaagtaatatgaagaataagttgtttataaatatatataaattaaaattaatggagaaaaatagtatattatattatagtttagttttagtaaggaaaataataggttaatattagaagatacgaatgatataaaatagattttgaatattttgttattatttagattacgaaggattagattacgttgtatttagggtttaaaaattataagttacgttatatatatagtattttagatattttttatttttgatcgaggttttttttgtttttgagatagagttttattttgttatttagtttggagtgtaatgtcgtaattttagtttattgtagttattgtttttcgggtttaagtaatttttttttgttttagtttttttagtagttgggattataggtgttttttattaagtttagttaatttttgtgttttagtagaaatggagttttattatgttgttttttcgaatttttgattttaagtgatttattcgtttcgtttttttaaagtgttgagattataggtattagttattgtgtttagttagtatttaataatttaattggtatattgaattttgttttattcggaagttagtggattttatatttttttgacgtttgattttaaataagagtagtagattaggagaggtgagaaagtgttgattaagttcgaaggtaaataggagttaagtaaataagagaagaaggaagagtgatgtagatggagggaatagtatatgtgaagatttgtggttagagttagggtggtggtttaggaatttttcggatagtgtggttagagtataggtaaaggacgaaattgggtgaggtaaggtagttagaggttaaatgatataaaatgtttgtgaagttatgttaaatgtttgatattttattttaagtatttagtaggttagtaagggggagatattgataatatttgatttttttttttttttttttttttttggaaatagttttattttgtcgtttaggttggagtgtagtggtgtgatttttgtttattgtaattttcgtttttcgggtttaagcgatttttttgttttagttttttgaatagttggtattataggtatttatattatatttggttaatttttgtatttttagtagagacggggttttattatgttggttaggttggtttcgaatttttgattttaggtgatttgtttttttcggttttttaaagtgttaggattataggtattagttagcgcgtttagttttgagtttttttttaagtttttttagttgttattttaaaggatggtttgtaggggtggattagaatgggtgcgaggtggaataggttaggtgaagaatggtggtttggttacgtgtggtggtttacggttgtttttttagtattttgggatttgaggtgggaggatggtttgaggataggagtttgagattagtttgagtaatatagcgtagttttttgtttttataaaaaaatttaaaaattagttaggtttggtggtatatatttgtagttttaggtatttaggagattaaggtaggaggattatttgagtttaggaagttaaggttgtagtgggttatgattatatttttgtattttagtttgggtaatagagtgagattttgtttttaggataaaaaaaaaaagataagaaaatgatttgtggaattgattatttggttttatggacgtgtttttaagttaaaataaagtgttttaatt

SEQ ID NO: 209 - DNA, 6763 bp, Artificial Sequence
  chemically treated genomic DNA (Homo sapiens)
taaaattataaatggttttagggttaaattattggaatatattaatttttttatttatttatattttgtaaaatttgttaaattatattggattttaaagatttatttggtttgatttgagaaattagtgaaaagttaaattttattgtggttttttataattttattaagtttggtttttataattgtttattattggaatattttaatataaagggtagatgttttattttattgttattatttggataatttgatgttatttttgaaatgtgtgtggtgtggttatggatatttgtagtattggaatagagaagggaggagatgtgagggaattcggagagtttaaggtatttgttttgaaaattatatattttaatgagaagttttggattatgattgggagattaaaatgataatttatgtattgagatgaattttatttggaaaggggaaatggaatatttagttgttgttttataaaggttggtaatttttgttggttgataaggttttaagtttttatttatttttatttggtaattgttataaggggtgttagaggtagaagggttatttaaagggattgttttttcggaggatattttagtaggtttggttgttttagtttgtattttagatttgtggaatttttgtggttagttgaagttaataaattcggtgtggtatagtagttttttgtatagggtatgtatattaaagtcgataatgtttataaatgtaaataagggtagattgattaggaataatattatcgttgggaatgtcgtattcgtatgtattagtaatgaggtaaattgggggtagttttagttttgattatttaagtcgagtaggtttttatattggtttttttttttttttttaaaacgttatagaaataaggttaattagatttttaaagtaatttatttttaagtatgaaaaaagtagattataggggaagcggcgggtggggggtggggagattaagatagcgttcgttagagtcgaggtttcggagtgcgttttggaatttacgggtagaatttataggtcgggattattgtttgagatgttgaaaagttaatttattaaatagcgggcgagggggtttagggtattgaaagtttcggggattaatgtttaaaacgtttaggaattaagttaaattaagggatatgggtttgagtggaagaggttttgttattgaaatgacgtgtatgtggtagtcgtcggaattagaggatatgtagtcgcgtgcggagagtgaggcggatttattacgggtatatagtttattatttttttttagaatttttttttttaaataagttatattgaaatttttttagtaaaagattgagacgaaatattaatagttttgggttaaaacgtggtggagaagtttgaaaagataaatatagtaacgtgtttttggttatatggttttttgttttttagtaagtttgaaatataaaaaggttaatatgtaaaattaggggtattattttttttttttagtttttaaaaagtaatttttagaagtaaatatataatggttcgatttgaagtgtcggtataattatttagtaagaaaagttagaatagtaaatttttttttttgttttgtgttatttattaaatttaataaatattaggatcgtatttaaagatgaaattggtaatgtgtggagtcgtttgagttttttattaatttagtgttatttttttcgtatgttgttcgtttgtttttcgagttttcgtagtttttttttgaggtatttataaaattacgtgttttttaagcggtttgagttttgaattttcgcgttggttcggtgtttaggttttttttcggatttcgcgaacgtttttaaatatttttatttcgtttttttttttttttcgggatatttcgttttgatttcggtatcgtatacggtttgcgggttagggggtcgggggaagggtttttttttgaagtcggggaggaggagaggttggagggaaggtggttaggttggtgggggaggggagattgagggagggagcggggcgagggaggaaggagaaggcgtaggtcgaaggaaggaagcggggaggggaaatcgtcggggaggaaggaagggggcggggagagtcggcggacgggttttttgcgggagtcgcgtggatcgtttcggtggtcggcgcgtttcgtcgtagtttttagcgcgttcgggtagttagcgcggggtcgttgaatgggtagggattcgtgagcgcgattattggtcggtcgcggggaggcggcgcgggtattgggtagcgtaagggggtcggttcgtttttaggaatgtattacggcgcgttcggtacgttcgttcgcgtcggttgggcgcgcgtttcgtttgggttttcgggagatcgcgttggaggttcggagtcggttcggcgtattcgtttttttatttattttgtttcggtcgcgcgggcgcggggagttcgggagtcgggcgcgcgcgcgtatcgggttttttggcgcggggttacgtggttatcggagtttcgttttttttttgtttttttttttttttttttatttgggtttttttttttttttttttttttttttttttttttttttaatgaatatatatcgtgcgtattttaaagttatatcgttttattttacgattttattagatttttcgttattgttagtttttttgtagtttaatttcgtttaaaaaaaaaaataaagtgaagtaaattaagggtttgcgggtcgggtttttatcgtagggaggaacgtaataatttggaaacgtaagaaaaatatattttattttttcgaaaataaaaatttttttaaataaaaagtttagttgtgtagacgtgtttggttttagaatttattttaaagggtcgcgtgtttttttttttcgcgggaagcgaattttcgggatgttttggtgatattggacgcggtgtcgggacgaattttcgcgattcgcgtatagtttgtttttaatgaatttagtatcggggtatttataattttttacgttatattattattaaatataatatgtatatcgagttttgtaaaaaaaaatattgattatataaatatttggttaataaaaaggggtgtataaatgaatttaaaataattaggaaaattttatttttttaaggaaataatttcgtttttttaagttgtaaaaaaagattttgttgttttttttttatttatgttatattcgagatttaaataaaaacgtttttgtttttataagattgtttcggtgtttggattttacgtttatagaatattgatttttttaaattaagattgtgttttttttttttttaagttggggggagaaagcggttggggggtagacggattttaagaaagatggttttttttaacgtttttgtttttttttttaattttttattttgtttattttaatgcgaggcgttgttttttgtaagagtttaagttttttttttagttataaaagaaaagagaagaggaaaaaaaaatttggtatatattggcgtattatttagtacgttgttattattggtgtaggtttgggaatgcgagtcggattttttagtatttgttgtagtttgaggttaaggtgtttttgaaaggtttttttttgaggaattttagaaattgtttaagcgtttaaaaaaatattatattttttttcgtgtttatcgcgaggtaaatgttcgtgtgtgtgcgtgcgcgcgcgtgtgtgcgcgtaaaggtattttataaaaagaagatattgttgaaaagaaaaggaataagagagaaaggagggggagtattttttaatggaagtattgtatgcgagaaggttggcgtttttagaggttgtttcgaagtcgaggatgtatatattgggttgtttatttgggtggtttttttattttggtgagttgttgttaagtagttaataatagttatgtttgttgagtaatttttgtttttcgcgagttaatcgcgtcgtagaaatttaagttatttgatagtttcgggggcgggagttttagtttttttttttttcgttcgttttttttttttttatttttttttttttttttttttttttttttttttaaatggagagagtttttttttttttttttttattttatttattgaattaaggagttgttgcggtcgttgttcgttgtatatatatagagcggagtttttaggtttcgggagcgagagaggcgcgttgtacggggatagaatggtttagcgggttgtcgaggagtataagaaagtagagttcgggatcgagtagttatcgcgaatttagtagttagagttcgagtagttcgagtagtagtttttggagtcgttatcgttagtagtagttatcgcgggagtagcggtagttgcggttgttcgggttcggtagcgttgagattcgtcgggtattttcggatttcgcggcggcggcggttttgcgtttgtttttcgcggtcgttcgggcgattcgggaggcgtcgagagagttagcgcggtcggcgggagtagcggggattcgttggttttttttgtagtgaaggggtcgcggcgcggggcggggggcgggtagggggagttggggatcgtaaggagtgtcgcggaagcgttcgaaggataggttcgttcggcgcgtcggttttcgttttttcgcgaattggatgtgggtagcggcggtcgtagagatttcgggattttcgcgtaatgtggtaatggaaggcgtagggtttgatttttcggtagcggtcgcggtcgtagcggtagtagcgttcgtcgtgtgagtagtagtagcggttggtttgttaatcggagttcgagttcgagtagtttgcggttagtagcgttttcgtaagtcgagcgtttaggcgcgttaggagttcgtagtagcggtagtagcgcgtcgggtcgttcgggaagttttcgttttcgcggcggcggcggcggcggcggtaatatggtttcggttggtaacgtcgtcgagttttaggatcgcggcggcggcggtagcggttgtatcggtgtttcgggacggtcggttggaggcgggaggcgtagacggacgggggggttgcgtcgtgttgtcgcgtcggatcgggattatttgtatcggtttagttattgcgacgtcgttttcgttttggagtagatttttaaggtgtattttagattttttttttttattttttttttttttttttaattttttgggatcgttttcgttatatataaatatatatatttttttttttttttttttatatatatatatatatttatttatatttttttaggaaaagtagtagataaatggggattgaaaaatttaaattttttttttggttttgggaggaaagggttgtttgaggttcgtagggggtggaggtgtgtgtgtgtgcgtgtgtgtgtgtgtatatatacgttttttttggtgtgtttttttcggagtattggaaagtcgtttacggcggattattttaagggcggtcgcggtattgttttgtttcgtgttttttgttttgaattttttttttttgcgtttttgtttttatttgtagtttaaatttttgtacggttgttatattttttaatattttggagggggaggcggagtggagagaggcggagagaggaaggggggagggagtcgaaataaaggtggtttttttttttggtagttagttttggttttgttgagtatgaaatttttgtttttttaaaaaattattttcggaaaaagatatttttttcgttttttaggttttgagtcgtttttttttagggtttggtcgggggaggaaaagttgtaaataaattgttattttaaattcgcggtgcgagtttgcggagttgtcgggtttattgtgtttacgaggttcgttgaaatgtgtggaatttagggaaggcgagtatttagacgggggttcgtcggggtcgcggttagcgtcggggaaatgtcgcgtcggggagtagtttgcgtcggtttgagtttttttttttgtattcggttgttttttacgtttaattagaaaggaagggagaggagggaaagatttatgtggttgttttttttcgattataaatattgtcgtaagttgtagttggttgttttattttttaatttagtttatatagtttttttttacgttatggaaatgcgtcgggagtgaatttcggcggtcgcgtttattacgtggatttttatttattattattttcggcgggggtttagttgggggaattcgtaatatgttgttttaaagagcgttcgtttttagcgttcgttttcgagggtgatggatagagtaggattggtttgttggtttttgaattttgggttttatcgttgggattacgtagtttttttttttttagttttggggtgaatattgtttgtgtcgagtggttttttttttttttatttcggtttttttttttgtattgtagttttagtgttttaagtcgtttagggatttcgcgggtgggggcgttttgatgttttcgaggtgtagtttttacgttgcggttcggttttatgatcgagttttttatgacgtttagattcgtcggggttgtagtttcgagggcgagttcgtgtgtcgcggttattcgcgtttttacggttgttgggggtttatcgggcgggtgcgcgtaagcgggcgtgggcgcgcgggtcgcgatttttcggcgtttattttttttttttgtttcgtttttagg

SEQ ID NO: 210 - DNA, 6763 bp, Artificial Sequence
  chemically treated genomic DNA (Homo sapiens)
tttggggacgaagtagaagggaggagtgagcgtcggggagtcgcggttcgcgcgtttacgttcgtttgcgcgtattcgttcggtgagtttttaatagtcgtgggggcgcgggtggtcgcggtatacggattcgttttcgagattgtagtttcggcggatttgagcgttatggggggttcggttataaagtcgggtcgtagcgtgggagttgtatttcggggatattagggcgtttttattcgcgggatttttgagcgatttggggtattggggttgtaatatagaagaggaagtcgaggtagagaggagagaaattattcgatatagataatatttattttagagttgagaagggaggggttgcgtaattttagcgatggagtttaaggtttaggagttagtaaattagttttgttttgtttattattttcggggacgggcgttaggggcgagcgttttttggaataatatattgcgggtttttttaattggattttcgtcgagaatggtagtaagtggggatttacgtggtgagcgcggtcgtcggagtttattttcgacgtatttttatagcgtggggagaggttgtgtgagttgaattaggaagtggggtagttagttgtaatttacgataatatttgtgatcggaagagggtagttatatggattttttttttttttttttttttttttggttaaacgtaaaaaatagtcgagtgtaaagggaagggtttaggtcggcgtaggttgtttttcggcgcggtattttttcggcgttggtcgcggtttcggcgggttttcgtttgggtgttcgttttttttggattttatatattttagcgagtttcgtaaatataatgaattcggtagtttcgtagattcgtatcgcgaatttaaggtggtaatttgtttataattttttttttttcgattaggttttaaggagaggcggtttaaaatttggaaaacgggggggatattttttttcgagaataattttttaagggagtagagattttatgtttaataaaattaaaattggttgttaaaaaaggaaattatttttatttcggttttttttttttttttttttttcgtttttttttatttcgtttttttttttaagatgttaagaaatgtggtagtcgtataggagtttaggttgtaaataggggtaggggcgtaggaggaagaagtttagggtagggggtacggggtaggatagtgtcgcggtcgtttttgaggtggttcgtcgtggacggttttttagtgtttcggaaaaggtatattagggagggcgtgtgtatatatatatatatacgtatatatatatatttttattttttgcggattttagatagttttttttttttaggattagagggagggtttgaattttttaatttttatttgtttgttgttttttttggagaggtgtgagtgagtgtgtgtgtgtgtgtgagagagagaggaagagagtgtgtgtgtttgtgtgtggcgggggcgattttaaagagttagaggagggaagagaaagtgggaggagagagtttgaaatgtattttggaaatttgttttagagcgaaggcggcgtcgtagtagttgggtcggtgtagatagtttcggttcggcgcggtagtacggcgtagttttttcgttcgtttgcgtttttcgtttttagtcggtcgtttcggggtatcgatatagtcgttgtcgtcgtcgtcgcggttttggggttcggcggcgttattagtcgaggttatgttgtcgtcgtcgtcgtcgtcgtcgcggggacggaggtttttcgggcggttcggcgcgttgttgtcgttgttgcgggtttttggcgcgtttgggcgttcggtttgcgaggacgttgttggtcgtaggttgttcgggttcgggtttcggttgatagattagtcgttgttgttgtttatacggcgggcgttgttgtcgttgcggtcgcggtcgttgtcggggagttagattttgcgttttttattgttatattgcgcgggggtttcgaggtttttgcggtcgtcgttgtttatatttagttcgcggaagagcgagagtcggcgcgtcgagcgagtttgtttttcgggcgttttcgcggtattttttgcggtttttaattttttttattcgtttttcgtttcgcgtcgcgatttttttattgtagaaagagttagcgaattttcgttgttttcgtcggtcgcgttggttttttcggcgtttttcgggtcgttcgagcggtcgcggagggtaagcgtagagtcgtcgtcgtcgcggggttcgagggtgttcggcgggttttagcgttgtcgggttcgggtagtcgtagttgtcgttgttttcgcggtggttgttgttggcggtggcggttttaggagttgttgttcgggttgttcgggttttggttgttgggttcgcggtggttgttcggtttcggattttgtttttttgtgtttttcggtaattcgttggattattttgttttcgtgtagcgcgtttttttcgttttcgggatttggggatttcgttttgtgtgtgtgtagcgggtagcggtcgtagtagttttttgatttaatagatgagatggaagaagaaaaaaaagaattttttttatttggagaaagaagaggaggaggggaggggagggggtggagggggagagagcgagcgaaagagaaaaaggttggagttttcgttttcggggttgttagatggtttgggtttttgcgacgcgattggttcgcggagggtagaaattatttagtaaatatgattattattagttgtttagtaatagtttattaaagtagagagattatttaggtaggtaatttagtgtgtgtattttcggtttcggggtagtttttgagagcgttaattttttcgtatgtaatatttttattaaggaatgttttttttttttttttttttattttttttttttttaatagtgttttttttttgtgggatgtttttgcgcgtatatacgcgcgcgtacgtatatatacgaatatttgtttcgcggtagatacggggggaaatgtaatatttttttaagcgtttaaataatttttgaaattttttaaagaaaagttttttagaggtattttggttttaagttgtagtaaatattgggaggttcggttcgtatttttaggtttgtattaataatgatagcgtgttggatagtgcgttagtgtgtgttagatttttttttttttttttttttttttttataattaaagggaagatttaggtttttgtagggaataacgtttcgtattaagataaatagaatggaaagttaaagaggaaagtaaggacgttgggaaaagttattttttttaaaattcgtttgttttttagtcgttttttttttttaatttaaaaaaaaaaaaaatatagttttggtttgaaggagttagtgttttataaacgtggaatttagatatcgaagtagttttgtagaggtagaggcgtttttatttgaatttcgaatgtgatataagtaaaagagaaataatagaatttttttttataatttagagaaacggaattgtttttttgagagagtaaagtttttttgattattttgggtttatttgtatatttttttttattaattagatgtttatatagttagtatttttttttataaaattcggtatgtatgttatatttaataatagtatgacgtaggagattataaatgtttcgatgttggatttattgaaaataaattgtgcgcggatcgcgaggattcgtttcgatatcgcgtttagtgttattaaggtatttcggggattcgtttttcgcggagggggaaaatacgcgattttttgaggtggattttggagttagatacgtttatataattaggttttttatttaaaaaaatttttgttttcggaaaagtggaatgtgttttttttacgtttttaagttattacgtttttttttgcggtaggaattcgattcgtaaatttttgatttgttttattttatttttttttttaaacggggttgaattgtagagggattggtagtagcgagaagtttagtgaagtcgtgaaatggggcggtgtggttttaagatgcgtacggtgtatgtttattgaaaaaaaaagaagaaagaaaggaaaggaaagaaagaaatttagatggagggaaagggggaggagtagggagaaggcggagtttcggtggttacgtgatttcgcgttaggaggttcggtgcgcgcgcgcgttcggttttcggatttttcgcgttcgcgcggtcggggtagagtaggtagggaggcggatgcgtcgggtcggtttcgggtttttagcgcggtttttcgagagtttaggcgaggcgcgcgtttagtcggcgcggacggacgtgtcggacgcgtcgtagtatatttttgaaggcggatcggtttttttacgttgtttaatgttcgcgtcgttttttcgcgatcggttaatggtcgcgtttacgagtttttgtttatttagcggtttcgcgttggttgttcgggcgcgttgggggttgcggcggggcgcgtcggttatcggggcggtttacgcggttttcgtagggggttcgttcgtcggtttttttcgtttttttttttttttttcggcggtttttttttttcgtttttttttttcggtttgcgtttttttttttttttttcgtttcgtttttttttttaatttttttttttttattagtttggttattttttttttagttttttttttttttcggttttagggggaggtttttttttcgattttttaattcgtaaatcgtatgcggtgtcggggttagggcgggatgtttcgaggaagagagggagacggggtggaggtgtttgggggcgttcgcgggattcggagggggatttgagtatcgggttagcgcggaaatttaaaatttagatcgtttaaggagtacgtgattttgtgagtgttttagggaagggttgcggaaattcggaaagtaggcgggtagtatgcgaggaaaatgatattgagttgataaagagtttagacggttttatatattgttagttttatttttgagtacgattttgatgtttattaggtttgataaatagtataaaataggaaaagaggtttattattttagttttttttattgaatggttatgtcgatattttaagtcgaattattgtgtgtttgtttttggaaattgttttttaaaaattgggggaggggggtagtatttttagttttgtatgttagtttttttatattttaagtttgttggagggtaaggaattatatagttaaagatacgttgttatgtttgtttttttaaatttttttattacgttttggtttaaaattattagtgtttcgttttaattttttattagagggattttagtatagtttgtttggaagaaggaattttggaaggaaatggtaagttgtgtgttcgtaatggattcgttttatttttcgtacgcggttgtatgttttttggtttcggcggttgttatatgtacgttattttagtggtaaagttttttttatttaggtttatattttttagtttgatttaatttttaaacgttttgaatattgattttcggagtttttagtgttttgagttttttcgttcgttgtttgatgggttaattttttagtattttagataatggtttcggtttgtaaattttattcgtgggttttaggacgtatttcggagtttcggttttaacgagcgttattttaatttttttattttttattcgtcgttttttttgtggtttgttttttttatatttagagatgaattattttgaggatttaattggttttgtttttgtaacgttttaagaaagggaagaggagttagtgtaaaagtttgttcgatttgggtggttagggttgaggttgtttttaatttgttttattgttgatgtatgcgagtgcgatatttttagcgataatgttgtttttaattaatttgtttttatttatatttgtaagtattgtcggttttaatatgtatgttttgtgtaggggattgttgtgttatatcgggtttgttaattttaattaattataaggattttatagatttgagatgtagattggggtagttagatttgttaaggtgtttttcgggaagatagtttttttaaatggtttttttgtttttggtattttttgtgatagttattaaataaaaataagtgagaatttggggttttattagttagtaggagttgttagtttttatgaagtaatagttgagtgttttattttttttttttaagtaaagtttattttaatgtataaattgttattttggttttttagttatgatttaagattttttattggagtgtgtagtttttaaagtagatgttttaagtttttcggatttttttatatttttttttttttttgttttaatattataaatatttatggttatattatatatattttaaaaatgatattagattatttaaatgatgataatgaaataaaatatttgttttttgtgttgggatgttttaatggtaagtaattgtggaagttagatttggtggagttatgaaaaattatagtgagatttaattttttattggttttttagattaaattaaatgagtttttaaaatttaatgtaatttggtaagttttgtagagtataaatgaataaaggggttaatgtattttagtaatttgattttggggttatttataattttg

SEQ ID NO: 211 - DNA, 7110 bp, Artificial Sequence
  chemically treated genomic DNA (Homo sapiens)
tgttttttgtgatgttttagaggttagaaggatgttttgaaggggaaaattgtaggagttaggtagagtagggttttggtttttttttaatgtttttttatttagataaattcgggttattttgtagaggttgtagtgagttatgattacgttattgtattttagtttgaggaatagagggagatttcgttttaaaaaaaaaaaaaaaaaaaaaaaaaaaaaaaaaaaaaatttcggtttattttatgaagtatttggtaggtgttttaatattttttggtatatgggaattatttttttttattattggaaggtttaaaaagtaaataatgtgttttatatggttagagttagtattaaggggattaagtagaataattggtagttagtgttagtttggagattaatatagttaaagttgttttgttatgttatgttttttttatttgtattgttttacggtttaagataaaatttttgaacgttatttggatatagtgagtatttggtttgttttattgtttttaggagtaattaatttaatttttatttttttgagaatgatgattttatatagtatatttttttattaagatgtgaaagatgatattatggtatttgaaatagttttaggagagatttgggatatgggaagtttgtagataataatggaaaatttttttttagaatatagttatttgtatgatttatagtagcgttttttggagaatgttttaaaattatttttattgaaagaataataatgtttgttattaggataaatgaaataaggggaaaattttagatttttggaataatgggtttatatttaatttaatgattattatgtttttatattttgtattatttagaaaatagtagttaaatagatagaaatatagaagattgtttaaaaattaaagttattgagttagatttttttttgaaaggttagcgtatgggagatgagaaaggtattatagagattagagtgtttatataaaagatattttagtagatgatttataaagagtatattaagtatttatattatttatattaagttgttggttatttcgtttattaaagaaaataagaaagaaattttttttcgatattattttggtgtagtaataatagagttttggaattagttgttagaagcgataattaaagttagtttattatgtttattaattaatttatatagttattttgaagttttatataattgtttttttgttataagtttttatttttttttatggtattttggttttgaatttagataggtaaagaattaagtatggtcgggcgcggtggtttacgtttgtaattttagtattttgggaggtcgtggcgggtagattacgaggttaggagatcgagattattttgattaatatggtgaaattttgtttttattaaattataaaaaattagttcggtatgatggtgtgcgtttgtagttttagttattcgggaggttgaggtaggggaattgtttgaatttgggaggtagaggttgtagtgaatcgagattatgttattgtattttagtttgtgagatttcgttttaaaaaaaaaaaaaaaaaaagaaaaaaaaaaaaagaattgaagtgtttggagattagtgtattgtaatatttatatagttaagtaggtatttttaattgaattttaaaaaagtattatttttgaaattttttttagtttagatagggttagttatttgggtagaaaggaaaagaaaaataaaaaattggaaaaggatgtattagtattttttttagaaataatttaatattaggaatagaaggaggattttatttattaatttttaataattatttgatgttgttgttgggttggttaaatatttgttaatattgatgatttttttatttattattagagagaagtagagggatttgatgtttagagaagtagtaaaatttattttttattttttttttttagtcggatggaagtatttggaggttggttttatattttagtattttagtgttggtgatgtagattatttttgttttagagtaattttgtgttatggaatttaagaggattttgtcgtattaggataggaatgtatttttgttttatttgtttttatgaaagtagattttagagatttttagatgttatgagattaattgttatttagggtaggttttaggggagggatagagaagggtagtgttaataatagggattttggagataagattagtaatttaagaaataaatgtgagatattttatttttttttaatttattttttttttaaaagtttatttttattttttttttttttattacgtagtaattgataattaaatatagttttggtttttattatgtaatttagtagaatatttagatattaggaattttttatttttggttatttatataataatgaaatttgtagtttacgttaggttgtgtggatagtatttgtatttttggaaattaattggaggttttttttttattttttttcggttgttttttatttttttttttattgtggtttttgttttttttaagttgattagaattatgtataaaattagtttttaataaatattaatattgaagttttagtaggttgttaatttttgtatagttattttaaatgttgtatataagtgtaaagttttatggagttttagaggtttttaagaatattgtaaatattttaggtttaattagtagtttcggagttaggtaatggtttgtggttttttgcgttaggttttttgaggtttttagtttttagaggttgtttgtaattatgatgtgtatatatatagtatttttttttaaatatagtataaattttttttagattttgttaggtatttataattattgaatatatatgtagattgatttttatttttttaaagtttgaaaaataatttagtgttttaatttaggtttcgttagatattttttgatttaaattgtcgtttgtagttttattttttaagggaaatgaaaaaataataaatttttagattggtgttgatgtttattttttttaagcgggtcgattatttgttttgtagatttttgacgggtggggtgcggggtaggagtgcgatttaatttttagtattttcgaattagtttttttacggtgataggttagtttaatcggggttgtaaatagatttgataggtttgttttgggttgacggttattgattaggtttttagattagataagttatttggttgagtttatagtaggtggggcgcgtttattagtttaggggtagtgattggacgtttgttgtaatatcggagaatgtacgttttgggttgtagtaggagatatttttaagtatagaattaaaagggtttattttaagcggtagggtattagcgatggagaggttcgagagttttagcgtttagtttttttttttacgtttgggaaggcgtagaataggtcgatgtagagtaaggagtgagttttaggttttagttttttggtttgtttttagggtagtaggcgaggagtggtattagtttggggatttttttttcgcgttttgtaagaatcggcggtagttagtaggcggggaggcgggggtacgtgtttggatgtgggtgtttgtgtaattagttttttaagcgttagtttcgatagcgttttttcgggaggttggttcgagtttttgttttcgtcgcggcgtaggaagggttggggtttcgttgtttgtattaggtaagagtatttcgagtaaaggaagaagacgatttgttttcggagttattattggggagtgggaatttggaaagttttttaattagggatatacgtgatttttttcggaaagtagtttcgattgtggttcgtgtatttttttatttttttttgaatttttttaggttttttcgtttcgtttattcgttgggttgtagttttttatcgtttcgtattttttatttaattcggtaattttaaacgtgtacggttcggtcggggcgcgcggagtttggtttcgggcgatttattttgtcgggtttttacggcggttaagggggggcggggttaggtggtttttgagaatcgagtttgatttcgacgtcgcgaatcgatttggagttcgaggggaaagatgttcgatttttttgggggtatcggagcgggcgtaggagaggtttgcggggtgcgttttatttatagggatttttttttagtttatttagataggtgttttttgggtttttgaaatttaacggttatgtgtttacgtttagtacgttcggttgagagtttttatttttagggtaaacgagtcgagttatcggggaagcgagaggtggggcgttgtaagggagtcggatgaggtgatatacgttggcgatataatagtaggttgttttttgtgttaagattgatattatgaggatatagatttgggggaagggggaatttttaggtaaaggttgttatagttaaatttttgcgaacgattgtgattcgatagcggtgtaaaaggaaagagcgaatgtagtttacgtcgcggaaatttaggggtagaggtaaggggggagggtattttttttgtagggatcgtttttgtatttttttttatattgagtagcgtggttatttggttttttttatttgtgtataggtaattttagattcgagttagtgatattgtttaacgtatttattttagtttttattattagttttttattttcgttttataatagtttattttgttttcggttgggtttttgggtagaggtcgaggtttagttcgttattttcgtttcgcgttgttgtaaaagtcgtagtaagtgtagttgtaggttggcggttgggaatcggttcgagtaagttttaggtagttatattgggtatgtttagtagagtttgcggtttggggattttgcgttcgtatttagagttatcgttttgtttttttttatcgttttttgttttgttttgtttttttttcgttcggcgcggtttcgttcgtttttcgttcgtttttcgttttttttcggtttttcgaggcgttcgggttttcggcgcggcggcggagggggcgggtaggtcggcgggcggtgatgtggcgggattttttatgcgttgcggtaggatacgcgttcggcgttgggacgcgattgcgtttagtttttttttttcggaagttgtagttatgatggaagtttgagagttgagtcgttgtgaggcgaggtcgggtttaggcgagggagatgagagacggcggcggtcgcggttcggagttttttttagcgtttgtgagtagtcgcgggggtagcgttttcggggagtcggtcggtttgcggcggcggtagcggcggcgtttttcgtttttttttcgttttttttaatcgtgtagtttttttttcggttttttttgaaagggaaggtggaagtcgtgggttcgggcgggagtcggttgaggcgcggcggcggcggcggtatttttcgtttttggagcgggggggagaagcggcggcggcggcggtcgcggcggttgtagttttagggagggggtttgagtcgtttgttattatttttagggttgggaacgtcggagagttggtttttttttttttattgtttttaatacggcggcggcggcggcggtatatttagggattcgggtcggttttaaatttttcgttcgtcgtcgtcgtatttttcgtggttcgggtttcggaggtcgtcggcggaggtagtcgttcggaggattattcgttttttttttatttcgttgtcgtcgttgttaggtttttggttgttgaggagaagtaggtttagtcgttgtaattatttagtagtcgtcgtagtagttattattcggttgcggtttagagttaagcggcggtagagcgaggggtattagttatcgttaagtttagagttatttttattttgtagaagaagtttcgttattagtagtttttgttatttttttttttttttttttttagttataggtttttagatatgatagttattattaaagagatcgttagtagaaataaaaggagatattaagaggatggattcgatttagatttgatttgtatttatttttgcggttgtttttttttatttttttgttatttttttagaacgtgggagtagacggatgcgaaaatgttcgtagtttgggtgattataatatttaattttggttaggttgttaggttatatattttgtgttttttttttgtgtatttaatttagggtgtgtttggttagacggaatttttgtttggttgtaagtgttaagttatcgattgtttttttaggttatttatatggtttttttttgagggttattgttcgttaatatagaatatagtatattgttagtggattagcgagttcggtaattcggttttttaaatgaataaaaaagtagacgttttttgaggttgagtatatttcgattaaattttggtttaggttttagattaagggtttagattagaataaaatgaaaattagtgttgtacgtacgtatattgtattagaattttgtagtgattgttttagttttttgagttgtattgatagatttttttaaaatatgattgatttgtataattttagaagtagaattatttttagtatatatggtgtatattgagggtaaaaagtagttttgttaatgtttaaatttaagttatttataattttgaattgtatgtagaagttttgtagtttgaagttaatagtgttataatatattttataaggcgtttttattagatttttgttatatttatttttttttttttttatggggtgatgtaggatagtgtttgaaatttgtattttagtagtatttaatgtttagtgtttttgttataaatatagaatggatattgagtagtttttgattttagatggtaatgtgtaggtttaagggtattgtgtgtagtaagtgaagattgtagaaataaaattttagtttatgtttgaaatttaagtattgttgtgatgttagaattgttgtttatcgtttttaggttttaggttttttgatattttttggtatcgttaattttattgatttg

SEQ ID NO: 212 - DNA, 7110 bp, Artificial Sequence
  chemically treated genomic DNA (Homo sapiens)
taaattagtaaaattaacgatattaaaaggtgttagaggatttgaaatttaaaaacggtgagtagtaattttggtattataataatatttaaattttaagtatgaattgaagttttatttttgtaatttttatttgttatatataatatttttgaatttatatattattatttgggattagaaattatttaatatttattttatgtttatgataagagtattgaatattaaatgttattgaagtgtaaattttaagtattattttatattattttatagggagagaaaaaggtaaatataataaagatttagtaagaacgttttataaggtatattatggtattattgattttaaattataaaatttttatatatagtttaaagttgtaggtaatttaagtttaaatattaataaaattattttttgtttttaatgtgtattatatatattgaaaatgattttgtttttaaagttatgtaaattagttatattttaaaagaatttattaatgtaatttaggaaattaaaataattattgtaagattttgatgtaatatgcgtacgtgtaatattaatttttattttattttgatttaaatttttgatttagggtttaagttaagatttaatcgaaatatgtttaattttaaaaagcgtttatttttttgtttatttaggagatcggattatcgagttcgttaatttattaatagtgtattgtattttgtattaacggataatagtttttaggaagagattatatagatagtttaagaaagtaatcggtggtttgatatttgtaattaggtaagagtttcgtttagttaaatatattttaggttgaatatatagaaaggaaatataaaatatatgatttagtaatttgattagggttaaatgttatagttatttaaattacggatattttcgtattcgtttatttttacgttttaagagagtgatagaaaggtaaagaggagtagtcgtagaaatggatataggttaagtttaagtcgaatttatttttttgatatttttttttgtttttgttaacgatttttttgatgatggttgttatgtttgggagtttgtggttgaagaaaaaggaggagagagatggtagaagttgttggtggcggggttttttttgtaggatggaaatggttttggatttggcggtagttgatgtttttcgttttgtcgtcgtttggttttggatcgtagtcgggtaatggttgttgcggcggttgttggatggttgtagcgattgggtttgtttttttttagtagttagaggtttggtagcggcggtagcggaatggggagaagacgaataatttttcgaacggttgttttcgtcggcggttttcggagttcgggttacggggggtgcggcggcggcggacgggaggtttaaaatcggttcgggtttttggatgtgtcgtcgtcgtcgtcgtcgtgttggaggtagtagaaggggagagattaatttttcggcgtttttagttttggaaatggtgataggcgatttagattttttttttggagttgtagtcgtcgcggtcgtcgtcgtcgtcgtttttttttttcgttttaggagcgggaggtgtcgtcgtcgtcgtcgcgttttagtcggttttcgttcgagtttacggtttttatttttttttttaggagaagtcgaggaagaggttgtacggttagaaaagacgaagaggaggcgagaaacgtcgtcgttgtcgtcgtcgtaggtcggtcggtttttcgagggcgttgttttcgcggttgtttataggcgttgagaggggtttcgggtcgcggtcgtcgtcgttttttatttttttcgtttgagttcggtttcgttttatagcggtttaatttttaaatttttattatggttgtagttttcgagaggagagaattgagcgtagtcgcgttttagcgtcgagcgcgtattttgtcgtagcgtataaagagtttcgttatattatcgttcgtcggtttgttcgtttttttcgtcgtcgcgtcgggagttcgggcgtttcggaagatcgaggggaggcgggaggcgagcgagaggcggacgggatcgcgtcgggcgaggggagggtagggtagggtagggggcggtaggagggggtagagcggtagttttgggtgcgagcgtagagtttttaagtcgtaggttttattgagtatgtttagtgtagttgtttggggtttgttcgggtcggtttttagtcgttagtttgtagttgtatttgttgcggtttttgtagtaacgcgaggcgaggataacgagttaagtttcggtttttgtttagaaatttagtcggaggtagggtaggttgttgtggggcgggggtggaggattgatgatgaaagttgagatgggtgcgttgagtagtgttattgattcgagtttgaggttatttgtgtataggtgaaaaggattaggtgattacgttgtttagtgtagagggaaatgtagggacggtttttgtaaggggaatattttttttttttgtttttatttttagattttcgcggcgtggattgtattcgttttttttttttgtatcgttgtcggattataatcgttcgtagagatttgattgtaatagtttttgtttagagattttttttttttttaaatttgtgtttttatggtgttagttttagtataaagagtaatttgttattgtgtcgttagcgtgtattattttattcggtttttttgtagcgttttatttttcgttttttcggtaattcggttcgtttgttttaaaaatgaaagtttttagtcgagcgtgttgaacgtgaatatatagtcgttgaattttaagggtttaaagggtatttatttaaatgaattgaaagaggatttttgtgagtgggacgtatttcgtaggttttttttgcgttcgtttcggtgtttttaagagagtcgagtattttttttttcgggttttaggtcggttcgcggcgtcggagttaagttcggtttttagagattatttagtttcgtttttttttggtcgtcgtgaaaattcggtaggatggatcgttcggggttaggtttcgcgcgtttcggtcggatcgtgtacgtttggggttatcgggttgagtggaaagtacggaacggtaggaagttgtagtttagcgagtgggcggggcgaggagatttaggagggtttaaaaggaggtggaaggatatacgggttatagtcggaattatttttcgaaggaggttacgtgtgtttttagttggggaattttttaaatttttattttttagtgatagtttcggaggtaagtcgttttttttttttgttcggggtgtttttgtttggtgtaggtagcggaattttaattttttttgcgtcgcggcggaaataggggttcggattagtttttcgaaggagcgttgtcggggttggcgtttggggaattggttatataagtatttatatttaaatacgtgttttcgttttttcgtttgttggttgtcgtcgatttttatagaacgcggggagagagtttttaaattggtgttatttttcgtttgttattttaagagtaagttaaaggattgagatttgagatttattttttgttttatatcgatttattttgcgtttttttaaacgtgggaaaaggagttgggcgttagggttttcgggtttttttatcgttgatgttttgtcgtttagggtgaatttttttggttttgtgtttgagggtattttttgttgtagtttagagcgtgtatttttcgatgttgtaataaacgtttagttattatttttgagttggtgagcgcgttttatttattgtggatttagttaagtgatttatttggtttgagaatttagttaatggtcgttagtttagaataaatttgttaagtttgtttatagtttcgattgggttgatttgttatcgtgagagagttgattcggaaatgttgagagttggatcgtatttttatttcgtattttattcgttaaggatttataaagtaagtagtcgattcgtttaaagagaatgagtattaatattagtttgggaatttattgtttttttattttttttaggaagtagaattatagacgataatttgagttaaaaaatatttaacgagatttaggttgaagtattgagttgttttttaaattttgagagaatgagaattaatttgtatgtgtgtttaataattgtaagtgtttagtaaagtttaaagagggtttatgttgtatttgagaaagagtattgtatatgtgtatattatagttgtaggtaatttttgaagattagaaattttaagagatttagcgtagaaagttataggttattatttaatttcgggattattaattaaatttgggatatttatagtgtttttagagatttttgaggttttataaaattttgtatttatatatagtatttaagatagttgtgtaggagttaataatttgttgaagttttagtgttgatatttattgaagattggttttgtgtatagttttggttagtttgggaaaggtaaggattatagtggaaaaggaaatggaaagtaatcggaaaagagtaagagaaaggtttttagttgatttttagagatgtagatattgtttatatagtttagcgtgaattatagattttattattgtataaataattaaagataaggagtttttgatgtttaggtgttttattagattgtatggtaaaaattagagttgtgtttaattattaattattgcgtggtagaaaaagggaaaatgaagatgaatttttaaaaggggagtagattagggaggggtaaaatgttttatatttgttttttagattgttgattttgtttttagagtttttgttattagtattgtttttttttgttttttttttggagtttattttaagtgataattagttttatagtatttgagaatttttgaaatttgtttttatggaagtaaatgaaataagggtgtatttttgttttggtgcgatagaatttttttggattttatggtatagagttattttggagtagagataatttgtattattagtattaaagtgttagaatatgagattagtttttaagtatttttattcggttgaagaaagaaaatgggaaatgggttttattgtttttttaaatattaggtttttttatttttttttagtggtgaatgaaaggattattaatgttggtagatatttggttagtttaatagtaatattaggtggttattaggagttggtgaataaaattttttttttgtttttagtgttaagttgtttttgaaagaaatattgatgtatttttttttaattttttgtttttttttttttttttatttaaatggttggttttatttaaattaaagaaagttttaaaaatagtatttttttaaagtttagttgaaaatatttgtttggttgtatagatattataatatattggtttttaagtattttagttttttttttttttttttttttttttttttttttttgagacggagttttataggttggagtgtagtggtatgatttcggtttattgtaatttttgttttttaggtttaagtaatttttttgttttagtttttcgagtagttgggattataggcgtatattattatgtcgggttaattttttgtagtttagtaaagatagggttttattatgttggttaggatggtttcgattttttgatttcgtgatttgttcgttacggttttttaaagtgttgggattataggcgtgagttatcgcgttcggttatatttagttttttatttgtttggatttagaattagaatattatagggagaagtagaagtttgtaataaagggataattatataaagttttagggtgattatgtagattgattagtaagtatggtaaattagttttaattatcgtttttaatagttgattttaaaattttattgttattatattaaaataatgtcgaaagaaaattttttttttattttttttgataagcgaaatgattagtaatttgatgtggatgatataaatatttgatgtgttttttgtaggttatttgttaagatgttttttgtgtaaatattttgatttttatagtgttttttttattttttatacgttgattttttaaaaagggatttaatttaatagttttaatttttaaataattttttgtatttttgtttgtttaattattgttttttaaataatatagaatataaaaatataataattattggattgaatgtaaatttattgttttaagggtttgaggttttttttttattttatttattttaataataaatattattgtttttttaataaagataattttaagatattttttaaaaggcgttattgtgggttatataagtaattatattttaaaagagaattttttattattgtttataagttttttatgttttaaattttttttgaagttattttagatgttatggtgttattttttatattttggtagagagatgtgttgtatgaaattattatttttagagaaataagggttgagttggttgtttttgagaataatagagtagattaggtatttattgtgtttaagtggcgtttagaaattttgttttggatcgtggagtaatataaataaaaaagatataatatgataagatagttttgattatgttagtttttaggttaatattagttattaattattttatttggtttttttaatattaattttagttatatggagtatattgtttgttttttagattttttaataatagaaaaaggtaatttttatatattagaaaatattgggatatttattaggtgttttatagagtaggtcgaaattttttttttttttttttttttttttttttttttttttgagacggagtttttttttgttttttaggttggagtgtagtgacgtgattatggtttattgtaatttttgtagaatagttcgaatttgtttaggtagagggatattgagaaggagttaaaattttgttttgtttaatttttataatttttttttttaaaatatttttttggtttttaaggtattataaaaaata

SEQ ID NO: 213 - DNA, 8078 bp, Artificial Sequence
  chemically treated genomic DNA (Homo sapiens)
ttttggtttattgtagtttttgtttagaggggttaagtagtttttttatttttatttgtcgagtagttgggattatagatacgtattattatgtttagttaatttttgtattttttgtagagatagagttttattttgttgtttaggttggtttcgaatttttggttttaagtaatttttttattttagtttttagagtagttgggattagagatatgtaatattacgtttggttagttttatagttgtagagatggggttttgttatgttgtttaggttggttttaaatttttgggtttaagtaatgttttaattttagttttttaaagtgttgaaattataggtgtgagtttttgcgtttggatatatacgatgatgataaagttgaaatatttagagtttgtaaagtatgtattaggtagatttttaaaaaaaaaattagttataaattattttgtaattgtaaagaaagaaaagaaaaatttaagttagagatgattttatttttattttttagtataaagtattttattattttttttatttgtttgttttgagacggagttttatattgttatttgggttggagtgtagtggtataattttagtttaatgtaattttcgttttttgggtttaagtgatttttttgttttagttttttaagtagttgggattataggtatttattattatgtttagttaattttttgtatttttagtatagatatggttttattatgttggttaggttggttttgaatttttgattttatgatttgttcgttttagttttttaaagtgttgggattataggtgtgagttatcgtatttagtttattagtattttttgagatagaatgtcgttttgtcgtttagattggagtgtagtttattgtaattttcgttttttcgggtttaagtaatttttttgtttgaattggaggattaattaggagattgtatttgtatttttgagtagttgggattgtaggcgtttgttattacgtttggttaatttttgtatttttagtagagatggggttttattaggttggttaggttggttttttgataataggtgatttatttgttttagttttttaaagtgttaggattataggtatgagttatcgtgttcggttagtataaaatattttgtttatgttgttattgtgttttagtttatgttatttaatttatatgtattgttagtttgtttttttaggaaatttagatttggtagttgattggtttaataaatgttggttaaattgggattatttgggaaaaaaaaattgtgtatattaggaaaggttagattatttttagattgtagtggtttgaaatagttaaggtggattttgttattcgtgttgtattgagtgttagtttggagttcgtgcggatagattatgaaggttgttaatggatatagtaaaggtagaggggtttggttttttattagtaattatgtgtttttgttgaatttatatgtgttatttttgtttatattttattggttagatgtaattatatggttttatattttattggttaaaattaattatatggtcgtatttaagttaaatggggttaaatgttggttaagtgtggagttagaaatatatggtaaatagtattaacggttattttaatattttaaatattttattttaattaagaatatttaaatagatattttttgtacgtaggattaagatttttttttttagtattggttttttagttagtatacgatattatatttttgtttttgagatagggttttattttgttatttggattgaagtgtagtggtgtgaatacggtttattatagttttaattttttggatttaagagatttttttattttagttttttgagtagttgggattataggtgtatgttattatgtttagaaaattattgttgtttttgtagaggtgggagttttattgtgttgtttaggttggtttcgagtttttgggtttaagtaatttttttattttagttttttaatgtgttgggattacgggtatgagttattgcgtttagtagaatattatatttttgtataagttttatttataaattataatgagttatttttttaagtggtttgagaatttaaagatatttatgaaataaattgggggttgagtttttttaggtttttataagtttttttattaaataatttatagttgttttatttgtatttaatttggtagtatttttttttttttaagagatggagttttgttttgttgtttaggttggagttgtagtggtgagattttagtttattgtaatttttattttttgggtttaatcgatttttttgttttagtttttagagtagttgggattataggtatatattattatgttcggttaatttttgtatttttagtggagacggtgttttattatgttggttagattggttttgaatttttgatttgaagtgatttgtttatttcggttttttaaagtgtagaattataggtgtgagttattacgtttggtatgttttttttttaataatttttttttagtttttttaaagtaagtaatttggtttgtgtataaataattgttttgtattaattttattagtttgatagtaaattaaataagaatttttggtataaataggtttggattaaatagttattttttaggaagtaaatagtttgagagatggaagtggaattgtttagttataatagtagtttgttagttttagtagtgggttttatagatgaaaaggaaagtgttttttaagttggtggatcgagttaagtgagatggttttagagagttttgttgtagtattattgatagaattttagtttatatttttattttattttttgatatgagtttttattttgtttattttggagtatattttggtatatcgttttttatgtttatataatttagggtatttaaatttacgtgtgttttgatgggttttgagggatgggaaggtattaataggtagagaataggaaggatgggagagagattttttggggggcggtagtaggggttatagtattaagtttggatttaattttaaaggtattgggaagttattggatggttttgattattgtagtgatagagaaggtagtaagagttaggagacgttatttaggtaagagattttgatggtttggattaataagaatggggagaagtgaggatttcgggagattaaagtagtttttgtttttttttttttttgttgttaggttgtttttatatgggtgattgatagggtattggaggtatttgttgataattaatttgtagtttgtgtttagggagtattgatttcgtttggttataatgtaggttggatttggggtttaaggttgggttttagttagttttcgggagtttttgggtaggaaaatatggataggtttacgggtttttttgttattttattggttattttttcgtgttttttgttggttgttttttattgtcgtgattgttaaagggatgagtgttttagtttttttgtgagtttatttagtttttatttaaatattgatgattttcgaatttttttttttaggttatgatattaatatttatttatattgtttagttaatattcgaaatagaagtagggatttcgtttttaattttttatagttgtgtttattttttttttttatttttattcgatttcgtttatattggtttttttttattttttttatttttaggatttgtttttgttgttttgttttttttgtatatttttttagttatttggaatggtaggttgtttataggtcgtttttttgattttttttgtttgttaattttatttcgttatggttatattttatcgttttgtggatgtgcgttagttaatatttagtatagtttgtgattatgtttttttttagtggatcgtggggtttgtgagggacgtggtttgattcggtcgtcgtcgagtatagaattggatagggtatttataatagatttttgttgttgtttttaaagaaaagttaatatttgagtagtgattgcgttaagtagttaagtatagtttttcgggttcgatttttataattattttagggttaggtattatttacgtttaaggaataaaaatcgagggaaaaattttatataattattagtaagtagttattttattttagtagagcgaatgagcgaatttacggaaggtcggggagcgacgtgagtggcgagaagtttggagtcgttagggacggcgggcggagtttgggcgtcggggttaatgggcggagtttttagggatagttggtttcgtttaggtcgcgcggggttcgttgggagttggagttttttgtttatttcgttacgttatcgattgtaaatttttagttgttttaggttcgggtgtaattcgtatttttagtgggtttttttttagtgggtttttttgtttttaggtttattatttcgttttttttttttttttgatgtattttggcgcggttttttggttttgcgggtttagggtttcggatgaggtttttcgtcgtttcgattttcgtaaggggttagtttggtgtcgttttcgtttttttgttattttattcggtaggggttttcgttttcgttacgttttttgaagttgtggttcgcgcgtttttttaggattttttcgcgtcggagaggttcgtaggatcgtcgagtttatatttcgttttcgttcgggtttcgttttttcgcgtcgttttggtacgtttcggttacgttttttcggacgcgtttggtacgcgtcgggttttttcgttcgttttagtggttcggtcgcggcgattttatttcggcggcgcgtttttcgagtttggtacggtttagttcgtttttttcgaagtcgcgcgttcgcgttcgcgttttttagtcggtggagttcgtagttttttttgtggttcgcggtagtttttcgttcgttcggttcgcgttcgttatggttcgttcgcgtcgtgtttcgtatcgtttcggcgtcgggggttttttcgggggtcgcggtcgtttttcgcggtttttcgtggtgcgcgtcgttcgttcgcgtttttggtttgttagttttcgaggttcgtagttttcgcggattcgggttcgttcggttttttttatggtgagtttttcgttttttttttagagttttttacggtttcgtttttttagtttttatttcgggtttacgtttttgttcgtagttttcgtcgtttcggggtgttttttgtggttcgaagggtggtttcgttcggggtcgggttttttcgtggagtattcggtggttcgcgtcgcgtttttttttttgttgcgcgttcgggtcggggtggggggttgggggacgggggcggggcgggtttatattattgttgatttcgcggttcgatttaaacgcgggttgggggcggtagataggtagtcggtacgttcgtttgttttttttattggagagttgttcgtttttcgggtaggaaatttggaaatgggggcggttttgggggatagcggcgagggaggggttcgcgttttgtattagcgtttttagatgtcgtattcgtgggcgtttttttttggcggtcgtttcgtgttcgtggagtgcgtatttagaatacgcgttcgcgtttatatgtgggatgttttgatggattgtcgtgagtttagattttaaacgtaaatatttagtttcgtaggtattttgggttgtatacgttttttcggatttaaaagatgtatatgttttttagaaatcgtaaggtttatttggggttgtaaaatcgtatatcgcgattttgtatcgtgtatacgtttgtttcgatgtgagattttttttgggttcgcgttcgggttcgttttttaaatatattgttttagcggtgtggatggtatagagttgtggtagttttattgaaattttaaataggttttttggggttataaatatggatatcgagatttagattattttttataatttaaacgtatttttttattttattgttttcgtttttttttgtagtattcgtatttagttgtttaaaagtgtttttcgggtttttagatatgtattttaaggttttaaattttagtgtaagtattagatgggtttttttgtgtaatagggatgttaggcgcgtagttttgtatacgattgttaagatgtgagatttattttaggttgtattttaatcgtcgtttttaaatatgatcgttttattttgatgtgttgtttttgttgtggaaggtatttttgggttttaggtaagtatatgtgttttttattatggttttagattttagtatatttgaagttttgagttaatttgtttttttagataagtagatattaagtatgtcgtttgggtttttaagtgcgtttttttgatttttatttatttttgtggtagtaaatgtatacgtgttattgtatatgcggattagatattttaggttttagcgttataaataatttgtatgttgtaagtgtatttttatttcgaaagttatttttagttgtgcgttttaatttattttagatgttggatgttcggtatggtgtttgaagttttcggggtaatatttattttttgtttaatttattttaacgttaagatatttaggttttttatttgattttttgacgattgtttaaaagttagaattatttgcgtgggtgaagaattatttgcgtgggtggagaattatttgcgtgggtggagagtaagtttgtttaggtttttttttttttaagtatttataaaataaaattttttgtgtttgttagtattttggaaggaaagatttttttgtgttttatagaaaatttggaaaatatttgtttgtaataagataaaaataaattatttttataatttgttttttttcgtttggaggcgtttattacggggaaattttcgtgggttttttgttgttaggttgtttgcggagtttttttttgtttgttttgagatgtttttggttttaaaaaataataagtgaggttaggtttggtggttttcgtttgtaattttagtattttgggaggtcgaggcgggcggattatttgaggttaggagttcgagattagtttggttaatatggtgaaattttatttttattaaaaaaaaaaaaaaaaaaaaaattagtcgggtatgatggcgcggtttgtagtgagcgaggttgtagtgagttgagatcgtattattgtattttagtttgggaaatgagtgaaattttgttttaaaaaaaaaatagtaataaaaatagtggggagagtgtttgtgagtagtatttgtggcgttgtttggttttattgttagaatttttttttggtgttttatatgttttggtttgtgagatttttttgggggtggtgttttagttgttttttaaatgtttttttttttttttcgttgttttttttttggatggtttagttttttttgtgttttttgttattttttttttgttttttttcggggttagatttataaggttagagaggtgggtattggtttgagttagaggaaggaattgaattttgggatgatagggagttttaggagagttttagtttgggaaagatagggtaagttggtgtgtgggatagatatagcgtaagtcggtttgtgtttgtggaggttgtaaggaagttttgggtttagtttggggtacggggaaagttttttatagttggtttttaatttgggttttaagaatcgattaggcgtatagttggggtaaaggttggaggtggggttggttgaaggttttaggattttgttgggttagtgttaaggtgatagtaggttttgggaaggaagggttttgagggtgggtagcgggaaaggatatgaggattagcgtgtgggggttttgaggggtgagtagagggtttggatatggtttcgtgggtttttagtaggggatttggggttgaatattgggacgttttttttggggtgtgtggggattgtttgtttttgtaggtttcggttttagtttttttatttattttttattttattgtagg

SEQ ID NO: 214 - DNA, 8078 bp, Artificial Sequence
  chemically treated genomic DNA (Homo sapiens)
tttgtaatggagtgggggataggtgggaaaattgaggtcggggtttgtaaggataggtagtttttatatattttagaggggacgttttaatatttagttttaaattttttgttggaagtttacggggttatgtttaaattttttgtttattttttaggatttttatacgttggtttttatgttttttttcgttgtttatttttaggattttttttttttagagtttgttgttattttgatattggtttagtagagttttgaagtttttagttagttttatttttagtttttgttttagttgtgcgtttgatcgatttttgagatttaagttagaagttagttgtagggggtttttttcgtgttttaggttgggtttagggtttttttgtagtttttataggtataagtcggtttgcgttgtgtttgttttatatattagtttgttttgttttttttaggttgaaatttttttaaagttttttgttattttaaagtttaatttttttttttggtttaggttagtgtttatttttttggttttataagtttgatttcggggggaggtaggaaggagatgataagaaatatagaggggattaaattatttaggagaaagatagcgaggaaaagggggaaatatttggaagatagttgggatattatttttagaggggttttatagattaaaatatgtagaatattaagagaaagttttagtaataaagttaagtaacgttataaatgttatttataggtattttttttattatttttattattattttttttttgagatagagttttatttattttttagattggagtgtagtggtgcgattttagtttattgtaatttcgtttattgtaagtcgcgttattatgttcggttaattttttttttttttttttttttagtagagatggggttttattatgttggttagattggtttcgaatttttgattttaagtgattcgttcgtttcggttttttaaagtgttgggattatagacgagggttattaagtttgattttatttattgttttttaaaattaaaaatattttaaagtaaataagggaaagtttcgtaaatagtttggtagtaggaaatttacgagagttttttcgtaataggcgtttttaggcgggggaaaataaattataagggtgatttatttttattttattataaataggtattttttaaattttttatgaagtataaggagatttttttttttagaatattagtaaatataaaaaattttattttgtgagtgtttaaaaagagaaaaatttgaataaatttgttttttatttacgtaggtgattttttatttacgtaggtgattttttatttacgtaggtgattttgatttttgggtagtcgttagaagattagatagaaaatttgagtattttggcgttagaatgagttggatagagagtggatgttgtttcgggggttttaggtattatatcggatatttagtatttgagatgagttaaaacgtatagttggaggtgattttcgagatgagggtatatttataatatataagttgtttatggcgttgggatttgaggtatttagttcgtatatatagtgatacgtatgtatttattgttataaagatgggtaaaagttaggagaacgtatttaagagtttaagcgatatatttaatgtttgtttgtttaggagagtaggttgatttaggattttaaatatgttgggatttggagttatagtaaagaatatatatgtttgtttaaaatttagggatattttttatagtaggagtagtatattaagatgggacgattatatttaaaaacgacggttaaggtgtaatttaaagtaaattttatattttggtaatcgtgtgtaaaattgcgcgtttgatatttttattgtatagggaagtttatttagtatttgtattgaggtttaaaattttggggtgtatgtttgaggattcggaaagtatttttgaataattagatgcgaatgttgtaggaaggggcgaaggtagtggagtgaaggggtacgtttaagttgtgggaggtgatttaagtttcggtatttatgtttatgattttaggaagtttgtttaaggttttagtagggttgttatagttttgtgttatttatatcgttgaggtagtgtatttaagaagcggattcgagcgcgaatttaggggaaattttatatcggggtaagcgtgtgtacggtgtaaagtcgcgatgtgcggttttatagttttaggtaaattttacggtttttgaaaagtatgtgtattttttgggttcggagaagcgtgtgtagtttaaagtatttgcgaagttgaatgtttacgtttaaggtttgggtttacggtagtttattaaagtattttatatgtgggcgcgggcgcgtattttaggtgcgtattttacgggtacggagcggtcgttaggggagaacgtttacgggtgcgatatttgggggcgttggtataaagcgcgggtttttttttcgtcgttgttttttaaaatcgtttttatttttaggttttttgttcggagagcgagtaattttttaataggaaaaataagcgagcgtgtcggttgtttgtttgtcgtttttagttcgcgtttaaatcgggtcgcggagttagtagtaatatgagttcgtttcgttttcgttttttaattttttatttcggttcgaacgcgtaataaaggggagagcgcggcgcgaattatcgggtgttttacgggggaattcggtttcgggcgggattatttttcgggttataggggatatttcggagcggcgggggttgcggataaaggcgtgagttcgggataggggttgggggggcggggtcgtggaaggttttggaaaaagggcggggggtttattatgggaggggtcgagcgggttcggattcgcggaggttgcgggtttcgggggttggtaggttaggagcgcgagcggacggcgcgtattacgaggggtcgcggagggcggtcgcgattttcgagggggttttcggcgtcggagcggtacggggtacggcgcggacggattatggcgggcgcgggtcgagcgggcggggagttgtcgcgggttataaggggggttgcgggttttatcgattgaggggcgcgggcgcgggcgcgcggtttcgggggagacgggttgagtcgtattaagttcgggggacgcgtcgtcggagtggggtcgtcgcggtcgaattattgaggcgagcgggggagttcggcgcgtattaagcgcgttcgagggggcgtggtcggagcgtattaaggcggcgcgggggagcggggttcgggcgggagcggagtgtgggttcggcggttttgcgggttttttcggcgcgggggagttttgggaagacgcgcgagttataattttagggggcgtggcgggaacgggagtttttatcgaatggggtggtagaagaacgaaggcgatattaagttggttttttgcgggggtcgggacggcgggagattttattcggagttttgggttcgtagagttaggagatcgcgttaaaatatattagggaagaggggaggacggaataatgggtttggggataaaggaatttattgaaagggaatttattgagggtacggattgtattcgagtttgagatagttgaaggtttgtagtcggtgacgtggcgaggtgggtaagggattttaatttttagcgggtttcgcgcggtttgggcggggttagttgtttttggaggtttcgtttattagtttcggcgtttaggtttcgttcgtcgtttttggcgattttaagtttttcgttatttacgtcgtttttcggtttttcgtggattcgtttattcgttttgttaaaatggaatgattatttattagtagttgtataagatttttttttcgatttttgttttttaaacgtgggtaatatttaattttagagtggttatggggatcgagttcgaggggttgtgtttgattgtttggcgtagttattatttaaatgttagtttttttttaaaaataataataaaaatttgttatgagtattttgtttagttttgtgttcggcgacgatcgaattagattacgttttttataggttttacggtttattggggagagatataattataggttgtgttaagtgttaattagcgtatatttatagggcgatgggatatgattatagcgaggtaaagttagtaagtaagggaagttaagaaaacgatttgtgagtaatttgttattttagatggttggaaaagtgtgtaaagaggatagaatagtaaagataaattttgaaagtagaaggaataaaagggagttagtgtgggcggagtcgagtgaaggtagagaggagaaatagatatagttgtaggaggttagagacggagtttttatttttgtttcggatgttgattaaataatgtagatagatattgatgttatagtttggagagagaaattcgggagttattagtgtttgaatggagattggatgagtttataaagagattgggatatttatttttttagtagttacgataatgagaagtaattagtaaaggatacggaggagtggttagtgaaatggtagaagaattcgtaggtttgtttatgtttttttgtttaggggttttcgagggttgattggagtttagttttaaattttaaatttaatttgtattgtggttaaacggagttagtgttttttgaatataaattgtaagttagttattaataggtatttttaatgttttgttaattatttatgtgaggataatttggtagtaggaaggagaaaaaataggagttgttttaatttttcggaatttttatttttttttatttttgttggtttaaattattaagattttttgtttgggtgacgttttttaatttttgttgttttttttgttattataataattaaaattatttaatggttttttagtgtttttagaattaaatttaaatttggtattgtggtttttgttgtcgttttttaaaaaattttttttttattttttttgttttttatttgttaatgtttttttattttttagaatttattaggatatacgtgagtttgaatgttttgaattgtataagtatggagagcggtatattagggtgtattttagagtgagtaaaatgggaatttatgttagaaagtgaaatgaaaatgtaggttgaaattttattagtaatattgtaataaaattttttgaaattattttatttaattcggtttattaatttgaaagatatttttttttttatttgtgaagtttattgttggggttagtaggttattattatgattaagtaattttatttttattttttaagttgtttattttttgaaaggtagttgtttgatttaaatttgtttatgttagaagtttttgtttaatttattattaaattaatgaaattaatgtaagatagttgtttatatataaattagattgtttgttttggaaagattaaaagggagttgttaaaagaaaaatatgttaggcgtggtggtttatatttgtaattttgtattttgggaagtcgaggtgggtagattattttaggttaggagtttaagattagtttggttaatatggtgaaatatcgtttttattaaaaatataaaagttaatcgggtatggtggtgtatgtttgtagttttagttattttggaggttaaggtaggagaatcgattgaatttagggggtggaggttgtagtgagttgagattttattattgtaattttagtttgagtaataaagtaagattttattttttaaaaaaaaaaaaatgttgttaagttaggtataagtaaagtaattgtaaattatttaatgaaaaagtttataaaaatttaggaagatttagtttttagtttgttttataaatgtttttaggtttttaagttatttaaaaaaatgatttattgtggtttgtgggtggagtttatataagaatgtgatgttttattgggcgtagtggtttatgttcgtaattttaatatattgggaggttgaggtgggaagattgtttgagtttaggagttcgagattagtttgggtaatatagtgagatttttatttttataaaaataataataattttttaggtatggtggtatgtatttgtggttttagttatttaggaggttgaggtgggaggattttttgagtttaggagattgaggttgtagtgagtcgtgtttatattattgtattttagtttaagtgataaagtgagattttgttttaaaaataagaatgtaatgtcgtgtgttaattaggagattaatattgaaagaaagggttttggttttacgtataagagatgtttgtttaaatgtttttggttaaaataagatgtttaaagtgttaagatggtcgttagtgttatttgttatatatttttagttttatatttggttagtatttgattttatttagtttgagtgcggttatgtgattaattttggttagtaaggtgtgaggttatgtgattatatttggttaatgagatatgagtagaagtgatatatgtgaatttagtaagagtatataattgttaatggaagattagatttttttgtttttattatgtttattggtaatttttatgatttgttcgtacgggttttaagttgatatttaatatagtacgagtgataaaatttattttggttgttttaagttattgtaatttgggggtaatttggttttttttgatatatataattttttttttttaaataattttagtttaattaatatttgttaaattaattaattattaagtttgagttttttagaagaataaattggtagtatatataggttggatgatataggttaggatataatgataatatggataaagtgttttatattggtcgggtacggtggtttatgtttgtaattttagtattttgggaggttgaggtaggtggattatttgttgttaggagattagtttggttaatttggtgaaattttatttttattaaaaatataaaaattagttagacgtggtggtaggcgtttgtaattttagttatttaggaatataaatatagttttttgattgattttttaatttaagtaggagaattgtttaaattcggggaggcggaggttgtagtgagttgtattttaatttgggcgatagagcgatattttgttttaaaaaatgttaataggttgggtgcggtggtttatatttgtaattttagtattttgggaggttgaggcgggtaaattatgaggttaggagtttaagattagtttggttaatatggtgaaattatgtttgtattaaaaatataaaaaattagttgggtatggtagtgggtgtttgtaattttagttatttgggaagttgaggtaggagaattatttgaatttaggaggcggaggttgtattgagttgagattgtgttattgtattttagtttaggtaatagtgtgagatttcgttttaaaataaataaataaaaaagataataaaatgttttatgttaagaaatgggagtaagattatttttggtttggattttttttttttttttttgtaattataaaatagtttatggttgattttttttttaaaggtttgtttgatatatgttttgtaaattttaggtattttaattttgttattatcgtgtgtgtttagacgtagaggtttatatttgtagttttaatattttgggaggttgaggttggagtattgtttgagtttaggagtttgagattagtttgggtaatatagtaagattttatttttataattataaaattagttaggcgtggtgttatatgtttttagttttagttattttggaggttgaggtaggagaattatttgaggttaggagttcgagattagtttgagtaatagagtaaaattttgtttttataaaaaatataaaaattagttgggtatggtggtgcgtgtttgtagttttagttattcgataagtggaggtgggaagattgtttgatttttttaggtagaggttgtagtgaattaagg

SEQ ID NO: 215 - DNA, 6707 bp, Artificial Sequence
  chemically treated genomic DNA (Homo sapiens)
atggatgtttaaattttcgatataaaatgatatagtatttgtttgtaatttgtgtttatttttttatatattttaaattatttttagattatttatattatttaatatagtgtaaatgttatatatatagtgttatattgttttgtttagggaatagttataagaaaaaatgtttgtatatgtttagtatagatataattattttttgttttttttaaatatttataatttacggttggttgaatttatagatgcgaaatttatgggtaaagagggttaattgtatataaattataatgtgttataatgtgtagtttttattgtgatttttttttataaaaatttttgttttttgttatgagtatttgtggtttaagaataagtagtgtttaagagagttttattttaaagtttatattttttatttttttattatgtatatagattataatatatattgttagggttggtcgtggtgttttacgtttgtaattttagtattttgggaggttaaggtgggaggattgtttgagtttaggagtttgagattagtttgggtaatatagtgagattttgtttttatttaaaaaataaaaaataaatatttttttttaaaatatatataatttgttttaaataaattttttttttttttttgaaataacgttttttgttatttaggttggagtatcggtgtcgtgatttaggtttattgtaatatttgttttttaggtttaagttatttttttattttagttttttgagtagttggaatgataatcggttaatttttgtattttttgtagagatgggagcgggggttttttttgtgttgtttaggttggtttcgaatttttggattttaagcgattatttattttagttttttaaagtgttgagattataggtatgagttattatattcggtttaatgaatttttaatatattatgttatttaaaaatttgttttattcgttgtttgattttttttttattaggatgtaagtttttcgagggtaggggttttggtttgttttgtttatagatgtgttgttatagattagatagtatttggtttttagtaggtgtttaatatatattgaatgtgaagtgaataaatttttagtagattatttttattgtgttttaatatatttaaaatgattaaatggtttttttttgtatttttattttgtgttttttttttttgattttatgtgatatgtttagggacgttaattaatgttagtattaatttaagaaaagtggagtgtagtcgggtatagtggtttatatttttaattttagtattttgggagatcgagatgggtagattatttgaggttaggagtttaagattagtttggttaatatagtgaaattttatgtttattaaaaattagttaggtgtggtggagtatatttgtagttttagttatttgggaggttgaggtacgagaattatttgaatttaggaggtggaagatgaagtgagtagagatcgcgttatcgtattttagtttgggtaatagagtaagatttcgttttaaaagaaaaaaaaaaaaaagaagggagtgtagaaatgaattttttttaaagaagttattgatgtatgttacggtgaaatttaaagaattatttttattcggtttttgggattatttgtattatggtttttttttttttataggaaggattaagttgattatataaatatttagattttttacgtgagatgggagaatataagttttttatgagtttgtataatatttatggttatagttatataatgtggtagacgtatttttttttttttaaaagaaggaaagagataaatgtatgatatttgatatgatatatgtttttattttttataattattaaagtaataaataatattattttttagagataaggaatttatttgttgataggaatatgtattgttgggtatagtggtttatgtttgtaattttaatattttgggaagttaaggtaggaggatattttgagtttaggagtttaagattagtttgagtaatatagtaggatttttttttataaaatataaaaagattatttgggtatgggggtgcgtgtttgtagttttaggtatttaggaggttgaggtaggaggattgtttgagtttaagagttcgaggttatagtgagttatgattatagttttagtaatagagtaaggttttattttttaaaataataaaaataaaaataaataaataaataatatagaaagagaagagagttgagattttaaaatagtttttttgattttaaattttatttttattttatattatttttttataaaagtttagaatagattgtttgatgttttttttattgtttattattattttttaaaaggttaattttgatatgtgatttatattttttgataaattatatattattttttttttttttttttgtttttttttttttttatttttttatttataatgtaatagatgatagttttttatggtgttttgtaggtagtgtattttattttaaaatattagataaaattattagtagttatttgtggaaagttttattggaaaatattattttaattatatttatatgttttttaaaatgttatttttgttgatttttgtttagaataatagaaatatagatggttatagttattggatttgttgttagtttttatgtttttttttttatatacgtttatggcgattaagtttatttttaaaaatatatgttaagaatagtaatatattttttagatttgaagttgtttaggaaaaaagtatgttttatattaagaaagagtttgtaagattaataaagtagatttattttttagaaaatttattttttgagtaggttatttttatttttaattaataaatattagattttttagtttggtaattaagaattttgattatatttggttttagatgattttttatattttttatttttgttttaagatggtgtattttattttttagtaaaatgggatagttaattttttttcgtagttatgtttttttttgttttgtttattgttgttttttttgtttggggagattttttttttttttatttaagtatttcgttttttttagtttttttttttatttaagtattttattttttttagtttaaatgttattttttttagaaagtgtttttggattagatttgtttttatatttttagattttttttatttgttttttttttaggatatatatatgatattttttattttaattatttttgttttaatttagagtattattagaaggttgttaataaaaaatgaatgtgtcggaagagttgaaagaagttgtttaataataatttttgttaatggtataatgagataggattatagataggtggtttgtaaattttattgtaaaagttgtttattatagtgtttgaagaaaaataatttaattggaatgtttgtagattggtatatatattttattttattagttttttcgttttttattgttttttattggtatattatatatttatatttttttattgattttgggtggtatttgaatttataagttttatatagaggttatattaattagttgatatattaggtttaagttatggttttgttattttttagttagttgtgttaggttaagagtaagatttttaatgatatttttgaatggttttttgtatttgaggtggttttatgtaaataaataggtatagttgatttttgaataatgtgagggttaggggcgttaattatttgtatagtcgaaaatttatttataatttttgatttttaaaaagtttaatcgatagtttttcgttgattttattaataatatagtcgattaatatatatttcgtatgttttatgtattatattttgtatttttataataaagtaagttgaagaaaatgttattaagaaaaattataaggaagagaatatattgtattatttattaagtagaaatagattattatataggtttttatttttattgtttttacgttgaataggttgaggaggaggaggaagaggaggggttggttttgtagttttagaggtggtagtcgtagaagaaaatttgagaataagtggatttatgcgatttaattttgtattgtttaagatttaattgtatatttttgtatatgggtttaaatacgtacgtatatatgttattgggttaaagatttatagaatgaattagataataagaatatttattattgaattgaaatggtttattgtaaaagtgtttttaatttatttttaggttttagaaatagaagtgattttttgttgttgtgaattaatagtttggattagattggggttgggttggtaaaggtatatagttattgttatagtttagtatttttgtttaagtaagtattattagtagttacgttgtttagagagggtttttcggttttttttattattgtatgttggattgtttgttattagtagattagagttggtaaaagggataattcgggatgaaatatttgagtattttgtagtttagagaaattttaggggtgttgttttagtaaaaaatggaagatttgtatttattaaaggttagtaagaagtgaaataatgtatgtaaaagtatattataaattagaaaatgtaataacggtagaaattatttatttattggttgttttgttttttatttaagtggtttttgattatttaataatgtgtaagagttgggttttatttttattttatggatgtggaaatagggtttggatgttagttaatttgtttaaattttatagttaatagaaagtggtattttcgagatttttatttaggtttgtttgattttaggtttgtgttttttatatgagtttatgttaatttttagatgatgtgttaggtataaaaattagatattatattaatttttattatagttaatattttatttaaatataaagtgggattacggttttagatgaatgtggttgttgagagcggtaataatttagaatggttattttgatttacgttgataaggaaattggagaattaggtattcgtgtggttgttaaggatgtgttgaagttggagtttagatttttaattaaagtattagatgggatattttaagttttaatacgacgttttggtaaaatatacgatgttttattagttttatttaaagttattagaaaggttttgggtattgttaatagagttatagaaaagttagtaaagattaatggatttagaaaataaaaatagttaagtttttttgttaaaaagatgatcgagaagattgttaaaataaaaagttttgtttttgttttagatgacgtttatttagaaatagaaaaattttttttttttaattttttagattttgagagttttgatttgtttgaagagcgttagattgtatatttttttttgagtggagtgttttttatgatttttgatgaggagggagagtttgaaaagttgttttagttgggtttttttttatttgtgaaaatgttttttttattatgggaatgtaatttgtttgtagttttttttaagtattttgtcgattttggatgttgaattgttagttgtttgttatgatatagatatttaaattttttagtgttttggagtttgtgtgtatttgtattaataaagtattatttgtttaataatataataaatatataaatataaagtgggttatatttttttttatgtgtatttgttttagttgttttttgtttttatattttttttatattatagttcgtattttttggggatatgttaatatgatttatttttgtagagaaataggagataggaaatagtaaaggataaaggagaaaaggttagggttaggttaagaatttttatattttttttttttagtttagtgtgaattagatgaaagttttaaggaggttttagtagtaaagggagataattaaaagaatgagaattttgtggaatgttaaaaaaaaatagggaatatatttgtagttaggattaatattgattattttaaaatgtttatatggttaaataatgtttatgaaatttcgtattttattttgttaatgttttataatttaaagtatttttatgtttatgttttgaattttgtataaagttttgatagagttatagatgtttggtgttaatttagattatttgagaggttttagggttttttttttggtttttgaattttaagatttagtgagttttttaggttaggagttgttatttattatatatgttagtggttttgttttttttattgaaagtgagtggtggttatgtttttgaatatgttattttataaaaagttaattagatgtggttatttaagaattattaaaggttatgataggttaaagtttttaaatttttttttaattaaaggatgttgttagaattgatttttaaaaaagatgtaaggttttagttttaggttgttatattggtttttagagaagagttataattttgtgatttgttttattttattttgatttttgtttttatgttattttaaaattggagaaggtttaagtttaaaaatttaagataaattataaaatatttgagaatttatttgtatattgtttgtttttttaaataaattgtgggttttatgagggtagggattatttttgt

SEQ ID NO: 216 - DNA, 6707 bp, Artificial Sequence
  chemically treated genomic DNA (Homo sapiens)
atagagatggtttttgtttttatggggtttatagtttatttgggaagataggtaatgtataagtaaatttttaaatattttatgatttgttttgaatttttaaatttaaattttttttagttttaaaatagtatggaagtaaaaattaaaatggagtggagtagattataaaattgtaatttttttttaaggattagtatgatagtttaggattgagattttgtattttttttggaggttagttttgatagtattttttgattgaagagggatttggaaattttggtttgttatggtttttgatggtttttaaatagttatatttagttggttttttgtggaataatatgtttagagatataattattatttatttttagtagaaagagtaaaattattaatatgtataatgaatagtagtttttggtttaggaaatttattaagttttggaatttaggaattagagaggaaattttgaagttttttaggtgatttggattgatattagatatttgtgattttattaaagttttgtatagaatttaaggtatggatataaaagtgttttaagttgtaagatattagtagaataagatacgggattttatgaatattatttagttatatagatattttaagataattagtgttagttttagttgtaaatatgttttttatttttttttagtattttataaaatttttatttttttaattatttttttttgttgttaggatttttttaaggtttttatttggtttatattaggttgggaagaaaagatgtagaagtttttggtttggttttggtttttttttttttattttttgttattttttgttttttgtttttttatagaagtaaattatgttgatatatttttaaagagtacgggttgtagtatggaagaaatatagaaataagggatagttgagatagatgtatataaagaggaatatgatttattttatatttatgtatttattatgttgttaaataaataatgttttattaatataagtatatataaattttaaagtattaagaaatttaaatatttatgttatagtaaatagttggtaatttaatatttagggtcgatagaatgtttgaaggagattgtaaatagattgtatttttatggtggagagggtatttttataggtgaaggggggtttagttgaaatagttttttaagttttttttttttattaaggattatgagaggtattttatttaaggggaggtgtgtaatttggcgttttttaggtaggttaaaatttttaaagtttagaagattgaagggaaagaatttttttatttttggataggcgttatttgaggtaggaatagaattttttgttttaatagttttttcggttatttttttggtagaaaagtttggttgtttttgttttttgggtttattggtttttattgatttttttgtagttttgttgatagtgtttaaagtttttttggtagttttaggtaaggttgatggagtatcgtatgttttgttaaaacgtcgtgttaaaatttgagatattttatttaatgttttgattgaaggtttagattttagttttagtatatttttggtagttatacgggtgtttggttttttaatttttttattaacgtagattagagtagttattttggattattgtcgtttttaatagttatatttatttaagatcgtggttttattttatatttagatagaatgttaattatagtggaaattggtgtaatatttaatttttgtgtttagtatattatttgagagttagtatgaatttatataaagagtataggtttgaggttagataaatttgggtaggaatttcgggagtattattttttgttagttgtaagatttgggtaagttagttaatatttaagttttatttttatatttataaaatggaggtaaaatttaatttttatatattgttaaatggttaaaaattatttaggtaaagggtagagtaattaataaataaatagtttttgtcgttattgtattttttaatttataatgtatttttgtatatattattttattttttattaatttttaataaatgtaagttttttattttttattaaagtagtatttttgaagtttttttaaattgtaaaatgtttaaatgttttatttcgagttattttttttgttaattttgatttattggtggtagataatttagtatgtagtggtggggagagtcgagaggttttttttgagtaacgtgattattaatggtgtttgtttgggtaggaatattggattatggtaatgattatatatttttgttaatttaattttaatttagtttaggttattgatttatagtagtaaagggttatttttgtttttaaggtttagagataagttgagggtatttttgtagtgagttattttaatttaatgataaatatttttgttgtttaatttattttatgaatttttgatttagtgatatatgtgcgtacgtatttgagtttatatgtaaaaatatatagttgagttttgaataatataggattgagtcgtatggatttatttgtttttagatttttttttgcggttgttatttttgagattgtaagattaattttttttttttttttttttttttagtttatttaacgtgaagataatgagggtgaagatttgtatgatgatttatttttatttaatgaataatgtaatatgtttttttttttatgattttttttaataatattttttttagtttattttattgtgagaatataggatatagtgtataaaatatacgaaatatatgttagtcgattgtgttattggtgaggttaacggaagattatcggttaagttttttgggagttaaaggttataggtggattttcgattatgtaggtgattggcgtttttaatttttatattgtttaagggttaattgtgtttgtttatttgtataaggttattttaaatataaagggttatttaaaggtattattagaagttttgtttttaatttgatatagttagttagaaagtgatagagttatgatttggatttggtatattaattgattgatgtaatttttatatggagtttgtaaatttaagtgttatttagagttagtgagggaatgtaaatatatgatgtgttagtggaagataatggggaacggggagattggtggggtagagtgtgtgtgttaatttgtaggtattttaattgaattgtttttttttaaatattatggtaggtaatttttataataaagtttgtaggttatttgtttgtaattttgttttattatattattagtaggaattattattaaataattttttttaattttttcgatatatttattttttattaatagttttttaatagtattttgaattggggtagaaataattaaagtaaaagatgttatatatgtgttttaaagaagggataaataaaggaggtttagaggtgtgaaagtaaatttaatttaggaatattttttggaggaggtggtatttgagttaggagagatggaatgtttaagtaagagaaggagttaggagagacggaatgtttaagtaaaagaagaggaaatttttttaggtaaaagaaataataatgaataaaatagaggaaagtatggttacgaggaaaaattaattgttttattttgttggaaaatagagtatattattttggaataaaaataaaaaatatgaagaattatttgggattagatatggttaaggtttttgattgttaagttaaggaatttggtgtttattggttagagatgaaaatggtttgtttagagaatgggttttttaggagatgaatttgttttgttgattttatagatttttttttaatatgaagtatattttttttttagataattttaaatttgaaaaatgtgttattatttttagtatatgtttttgaaagtaaatttggtcgttataaacgtatatgagaaaaggggtataaaaattggtagtaaatttagtaattgtagttatttgtgtttttgttgttttaagtagagattaataaaaatagtattttaaaaaatatataagtatggttgaagtaatattttttagtgaagttttttataagtggttgttgataattttatttggtattttaaaataaaatatattatttataggatattatgaaaaattattatttgttgtattataaatggaagaataaaaggaaggaaagatagaagggagggaggaaaatgatatgtagtttgttaggaaatgtaaattatatgttagaattgattttttaaaaagtaataatgagtaataagaaaaatattaaataatttgttttgaatttttatgaaaaagtggtgtaggataaaaatggagtttggagttagaaagattgttttggaattttaatttttttttttttttatattatttatttatttgtttttatttttattattttaagagataggattttgttttgttgttgaggttgtgattatagtttattgtagtttcgaatttttaggtttaggtaatttttttgttttagttttttgagtatttaggattataggtacgtatttttatgtttaggtaatttttttatgttttgtagagaggggttttgttgtgttgtttaggttggttttgaatttttgggtttaagatatttttttgttttggttttttaaagtgttaggattataggtatgagttattgtgtttagtaatatatatttttgttaatagataaattttttgtttttaaaaagtagtgttatttattattttaatgattgtgaagaatgaaaatatgtgttatattaggtattatatatttgttttttttttttttttggaaaggaagagatacgtttgttatattgtgtaattgtggttatgagtattatataaatttatgaggggtttatgtttttttattttacgtagggagtttaaatgtttatgtggttagtttgattttttttgtaaggggagggaggttatggtgtagataattttaaagatcggataggagtaattttttaagttttatcgtggtatgtattagtggtttttttgggggaaatttatttttatatttttttttttttttttttttttttttgagacggagttttgttttgttgtttaggttggagtgcggtggcgcgatttttgtttattttattttttattttttgggtttaagtgattttcgtgttttagttttttaagtaattgggattataggtgtgttttattatatttggttaatttttagtagatatggggttttattgtgttggttaggttggttttgaatttttgattttaagtgatttgtttatttcggttttttaaagtgttgggattagaggtgtgagttattgtgttcggttatattttattttttttaagttaatattaatattagttggcgtttttgagtatattatatgaggttaaggggaaaagatatagaatggaagtatagggaaaagttatttggttattttaaatgtgttaaagtataatgaggatagtttgttggaagtttatttattttatatttaatatgtattgagtatttattgggggttaggtattgtttagtttgtggtaatatatttgtgagtaaaataaattaaaatttttgttttcgggaaatttatattttagtgaaaagagagttagataacgaatgaaataaatttttaaatggtatagtgtattagaagtttattaagtcgggtgtggtggtttatgtttgtagttttaatattttgggaggttgagatgggtgatcgtttgaagtttaggagttcgagattagtttgggtaatatagggagaattttcgtttttatttttataaaaaatataaaaattagtcggttgttattttagttatttagaaggttgaggtgggaggatggtttgaatttgggaggtagatgttgtagtaagtttagattacgatatcggtattttagtttgagtgatagaggacgttgttttaaaaaaaaaaaaaaagtttatttgaagtagattatatgtattttgggggaagatatttattttttattttttaaatagagataaggttttattatgttgtttaggttggttttaaatttttagatttaagtaatttttttattttagttttttaaagtgttggaattataggcgtgagatattacggttagttttgataatatgtattataatttatatgtataatagaaaaatgaaaagtgtaaattttgaggtaaagtttttttaaatattgtttatttttggattataggtgtttataataaagggtagaaatttttgtaaaaaagagttatagtggaaattgtatattgtaatatattgtaatttatatatagttgattttttttatttatgggtttcgtatttgtggatttaattaatcgtggattgtaaatatttggaaaaaataaaggatggttgtgtttgtattgaatatgtatagatatttttttttataattattttttgaataaaatagtataatattatgtatgtagtatttatattgtattgagtagtataagtaatttagagatgatttaaagtatataggagggtgggtataggttataggtaaatattatgttattttatatcgggggtttgagtatttat

SEQ ID NO: 217 - DNA, 6409 bp, Artificial Sequence
  chemically treated genomic DNA (Homo sapiens)
ttaatttattaattaatttattgtaaaatggtagtattttgtttttatgtattatttggaatttttttgtaataagaaatttttttttattgattatttggttatttggagtgtagtttatattggaaggtaggatataggtttgatttttattttttatttattagtttttaaaataatgagttagttttttatggttatcgaaaggtaaattatgaggtttgttttttattttttagtatttttgtaaatttttggatttatatgttcgatatattttaatttataatggtgatttttttttatgatcgattttgttatttttgaattagtttttgaggttttttatatgattttggtagttattgatattatattggaaagtaaggaagttaggatattttaggtttattttgtatattttttgttgtaggtttgtaattagttagttttttaaggagttttagtttatattagtgggaaatatttagggattataattttggtattaggggtgtttatttttttagattggttattgattttagttttttttatgttagagttaggaaatatatatatataaatatatatgtgtatttatatgaatatatatatatttatgtatatataaaatatatatatgtatattttaaagataaaatataatatatatttatattgatatttttaattgaaatttagtattataggtttttttggtttttttaaatttaagtttatttgtatttttttttttttatattagaatttttggtttttaaggataggaatataattattaattttttttttttttaaaaagttattattattgttattattatttgaggtagggttttgttttgttgtttagattggagtgtagtggtacgattttagtttattgcggttttaattattagggtttaagtgatttttttattttttagtttttcgagtagttggaattataggtatgtgttattatattcggttaatttttatagagataggattttattgtgttgtttaggttggtttggaatttttgggtttaagcgatttgtttattttggttttttagagtgttgggattataggtatgtattattatatttgatttattttttttattttataatatgaatatgattttatataatgattatttgaatagagtttaagatttttttataattttttttttatagtttttttgttttttgagtttattttattagggaaagatattttttattttgaagttatttgaaggaattttttttattagttaggttaatttatttaattttgggaaggaattatgttaaatgtttttgtttttagtttttattatatttttttttatatttttaaataataaaattatattgtattttttttgaatttaatttgtatattattttttgtttttgttttgttttttgagaaagggttttattttagttgtttaggttggagtgtattggtttgtttttgatttattatagttttaattttttgggtttaggtgatttttttattttagttttttgtagttgggattataggtatgttttattacgtttggttaatttttttttgttaattttgttagtagagatggggttttattatgttgtttaggttggttttaggtaatttatagtttttggtaattattaatttgtttttcgtttttatggagttaagtgtttgtaatattatgttaaatgaaataaattagatattagaggtaagaattgtatgattttatttatgtggaatataaatataaatatagtataatgtttttaaggtttatttattttgtagtatgtattagtattttatttttttttatggtcgggtaatattttattgaatgtatatattatagtttatttatttattggttgatggatatatgggttatttttattttttgagtattgtgaatagtgttgttgtgaataaatatgtgtaagtaagtatttgtttgaatatttatttttagttttttgggggtatatatttagaagtagaattgttgggttatatagaaatattgtgttaaattttttgagaaattttaaaattgttttttatagtagttatattattttatatttttattattaatgtataaggttttaatttttttatatttttattaatatttagtttttatttttttgattattgttattttagtgagtgtgaattggtattttattgtgattttgatttgcgtttttttaatgattaatgttgttgagtaattttttatgtgtttgtggttatttgtatattttttttgtagaaatgtttatttaagttttttgattattttaaattggattttttgtttttgagttattgcgtttagttaattggtagttttttataaagttataggttaggtatagtggtttatgtttgtaattttagtattatgggaggttaaggcgggtggattatttgaggttaggagttcgagattagtcgggttaatatgataaaattttatttttattaaaaatataaaaattagttaggtgtggtggtatgtgtttgtaattttagttattcgggaggttgaaataggggaattgtttgaatataggaggcggaggttgtagtgagttaagatggtgcgggggggtggtattcgggtaataagagtgaaattttcgttttaaaaaaaaaaaaaaagaaaaaaagttatatatatattttatgatttagtaattttttttttaggtatttatttaagataatgaaaatatatgtttataaaaagatttgtgtaagaatgtttatagtagttttatttataatagttaaaatatgtaaaattaaatgttttttattacgagaatagataaatgaattttggtatattcgtataatgaaatgttatttattaatagaaataatgaattattgatgtatataattggattaatttaaaaatattttgttgagtaagagagattagatttaaaagaggatgtattgtatgattttattatttgaagtttaagaataggaaaattaatttatggtgatagaaattattagtgaagataggaattgattggaagagggaaggagggaaatttttggggtgatagaaatgttttatattttattgtggtggtgattaaaggagtgtatgttaaatttgttaaaatttaatgtttttagtgatgatgataagatttgattattttattgtatgtaaattttatttaaaaagaaaaaaataaattaattttttatatagttttaaatattatttaaaaagtttaaaggttaatggtaaatagaaaaagaaaggttttaatttatatgtattataaattaataataaatagataaataatataataaaaataataatgattaagaatgggaggtttatagaaaaataatatatgtttaataagttttatatgatgtaaaaattatttttaattaaataaatgtaaattaaaataaaatataattttttatttattagattgtaattttttttttttttttgagtaaaaaaaaaaaagagaaaggttaaggaaattcgattaattggggataattttaaattagtttaataaattggtaattagatttttttgaaggaaaaaaataaagaaggtgttgaagaatgggataggaaaatatatttgtgagaaattatggttgatatattttttaaattagatgaaaattataaatttatagatttgataagtgtaatgaattgaaatattagaaatatgaagaaaattatattaaggtatattataataaaagtattaaaaattagtgataaagttttaatagtagttagaagaaaagatatgttatatatggaggaataaaggtaaaaatgttagtatattttttattagaaatagtataagtggttgggtatagtggtttatgtttgtaattttaatatttgtaggaggttgaggagggtaacgggtagattatttgaggttaggagttcgagacgagtttggtaaatatggtgaaattttgattttattaaaaatataaaaattagtcgggtgtggtggtatacgttagtaattttagttatttaggaggttgaggtaggagaattatttgaatttggggggtagaggttgtagtgagttgagatggtattattgtattttagattgggtgatagagtaagattttattttaaaataaataaataaataaatagtataagaagtggagtaatatttataatgtattgaataaaaaaatttgttaatttaaaattatttatttattaaaaatattttttaaaattaaagatatgtaaagttatataaagatttttttagattgaaaaaaaaaaaagttgaaaaatttataattagtagatttatataataagaaatatttaaggaagttttttagatatagaaaagttattttagatttttggaaataaagatttattaagaaatgaagagtatttgaaatagtaataatagaattaaatatattttgattttttaataatttaaatttttaaaagttaataaataagaatagtaataatttatggtgggtttatatttaatgtattagtaaaatatatgataatagtattataaaagttagtattagagatatggaagtatattattgtaagatatattttataagtgtaagtattttataagtgatgtggtataatttaaatgaagatagattgtaataaattaaagatatatatttaaatttggttgagagcggtaataatttagaatggttattttgatttatgttgataaggaaaacgaagaattaggtatttttgtggttataaaggatgggttgaagttggggtttggatttttaattaaagttttagatgggagattttaagttttaatattatgttttggtaaaatattcgatgtttttatatttttatttaaagttattagaaaggttttgggaattgttaatagagttatagaaaagttagtaaagattaatggattttttaaataaaaatagttaagtttttttgttaaaaagatgattgagaagattgttaaagtaaaaaattttgtttttgttttagatgatggttatttagaaatagaaaaattatttttttttaattttttaggtttcgagagttttgatttgtttgaagagtattagattgtatatttttttttgagtgaagtgttttttatgatatttgatgaggagagagagtttgaaaagttgttttagttgggtttttttttatttttgaagatgttttttttattatggaaatttaatttgttgtagttttttttaagtattttgttgattttggatgttgaattgttatttgtttgttttgatatagatatttaaattttttagtgttttagagtttgtgtatatttttattaataaagtattatttgtttaatagaaaaaaagatatatatttaaattttaaaataaaataattattaaaaggaaaaataggagttataattaataagggaataaaggatataaaatgggataataatgtttaatttaaaataaagtagaaaatgaagaaaaatgaaatgaagaatagataaatagaaaataaatagtaatatgaaagataaatttgatcgggtgtggtggttgatgtttgtaattttagtattgtgggaggttgaggtaggcggattatttgaggtcgggagtttgagattagtttgattaatatggagaaattttgtttttattaaaaatataatagttaggtgtggtggtgtatgtttgtaattttagtagtttaggagggtgaggtagaattgtttgaattcgggaggtagagattgcggtgggcggagatcgcgttattgtattttagtttaggtaataagagtaaaattttattttaaaaaaaagaaagttagagtagttatatgaatatattaagaacgttttaaagtaaataatattatcgtggaaagagaaggttatttaataatggtaaaggggttaatttattaagaggatataataattttaaatgtttacgtatttaataatagagttttaaaatatatgaataaaaattgaaaatattttaagaagaaatagatatatttataattatagttagaagttttaaaattttttttataataatataagtagagagaaaattagtaagtatatagaagatttaaataatattattaattattttgagattttatttatttatttatttatttatattttgagatagttttgttttgtcgtttaggttgaaatgtagttgtaatttcggtttattgtaatttttttgttttttaggtttaagtaattttttagttttagtttttcgagtagttgagattatagg

SEQ ID NO: 218 - DNA, 6409 bp, Artificial Sequence
  chemically treated genomic DNA (Homo sapiens)
tttgtagttttagttattcgagaggttgaagttggagaattgtttgaatttaggaggtagagaggttgtagtgagtcgagattgtaattgtattttagtttgggcgatagagtaagattgttttaaaatataaataaataaataaataaataaaattttaagatggttaatagtgttgtttaggttttttatatatttgttgattttttttttatttgtgttattatgaaaggggttttgaaatttttaattataattgtgggtgtgtttatttttttttgaaatatttttagtttttgtttatatattttgaagttttgttattaggtacgtaaatatttagaattgttgtgtttttttgataaattggtttttttattattattaaatgattttttttttttacggtaatattatttgttttgaaacgtttttgatatatttatatagttgttttagtttttttttttttgagatggagttttgtttttgttgtttaggttggagtgtagtggcgcgattttcgtttatcgtaatttttgtttttcgggtttaagtaattttgttttatttttttgagttgttgggattataagtatgtattattatatttggttattgtatttttagtagagataggatttttttatgttggttaggttggttttaaattttcgattttaggtgattcgtttgttttagttttttatagtgttgggattataggtattagttattatattcggttaagtttgttttttatattgttatttgttttttatttatttgttttttattttatttttttttattttttgttttattttggattaagtattattattttattttatgttttttgtttttttattagttataatttttgtttttttttttaatggttattttattttaggatttaagtatatatttttttttttgttaaataaataatgttttattaatagaaatatatataaattttaaagtattaagaaatttaaatatttatgttagagtaaataggtggtaatttaatatttagggttaatagaatgtttaaaggagattgtaatagattggatttttatggtggagagggtatttttaaaggtgaaggggggtttagttgaaatagttttttaagttttttttttttattaagtattatgagaggtattttatttaaggggagatgtgtaatttggtgttttttaggtaggttaaaattttcgaagtttagaggattgaagggaaataatttttttatttttggatagttattatttgaggtaggaatagagttttttgttttaatagtttttttagttatttttttggtagaaaagtttggttgtttttgtttgaggggtttattggtttttattgatttttttgtagttttgttgatagtttttaaagtttttttggtagttttaggtaaggatgtgggagtatcgaatgttttgttaaaatatgatattgaaatttgagattttttatttaaggttttgattgaaggtttagattttagttttagtttattttttgtagttataaggatgtttggtttttcgttttttttattaatatagattagagtagttattttggattattgtcgtttttaattagatttaagtatatatttttaatttattatagtttatttttatttgaattatattatattatttatagaatatttatatttataggatatattttataatggtatatttttatgtttttaatgttagtttttataatattgttgttatatattttattgatatattagatataaatttattataagttattattatttttgtttgttaatttttagagatttaaattattaaaaaattaaaatatgtttagttttgttgttattattttaagtgttttttattttttagtagatttttatttttagaaatttggaataatttttttatgtttgaagggtttttttgaatgttttttgttgtatgagtttattggttatgaattttttagttttttttttttttagtttgaaaaaatttttatatagttttatatatttttgattttgaaggatatttttggtaggtaaataattttaggttgatagatttttttatttagtatattatagatgttgttttattttttgtattatttatttatttatttattttgagatggaattttgttttgttatttagtttggagtgtagtggtgttattttagtttattgtaatttttgttttttaggtttaagtgatttttttgttttagttttttgagtagttggaattattggcgtgtgttattatattcggttaatttttgtatttttagtagagttagggttttattatatttattaggttcgtttcgaatttttgattttaagtgatttgttcgttgttttttttagttttttataagtgttgagattatagatatgagttattgtgtttagttatttgtattatttttgatgagaaatatgttgatatttttatttttgtttttttatatataatatgtttttttttttggttgttgttaagattttattattggtttttagtatttttattgtgatgtgttttggtgtaattttttttatgtttttagtgttttaatttattgtatttgttagatttgtgagtttatagtttttatttaatttgggagatatgttagttatgattttttataaatgtatttttttattttattttttaatattttttttattttttttttttaagggaatttaattgttagtttattaggttggtttaaagttgtttttagttaatcgaatttttttaattttttttttttttttttttgtttaaaaaaaaaaaaaaaattgtaatttgataggtggaaaattgtattttattttaatttgtatttatttaattggaaataatttttgtattatataaaatttattaaatatgtattatttttttatgaattttttatttttgattattgttgtttttattatgttgtttatttatttattattgatttgtgatgtatgtaaattaaggtttttttttttttgtttgttattaatttttagattttttaaatgatatttggggttgtgtgagagattggtttgtttttttttttttaggtaaaatttatatatagtgaaataattagattttattattattattaaaaatattgagttttgataaatttaatatatatttttttaattattattataatgagatatagaatatttttattattttagaaattttttttttttttttttttaattagtttttatttttattggtgatttttgttattatagattaatttttttgtttttgaattttagataatgaaattatatagtgtatttttttttgggtttagttttttttatttaataaaatatttttgaattgatttaattgtgtatattagtagtttattgtttttgttgatgagtagtattttattatacgaatgtattaaaatttatttatttattttcgtagtggaagatatttggttttgtatgttttgattattatgaataaagttgttgtaaatatttttgtataagtttttttgtggatatgtatttttattattttgggtaaatatttaggagaagaattgttgggttataaggtatatgtataattttttttttttttttttttttttaagacggaggttttatttttgttgttcgggtgttattttttcgtattattttggtttattgtaattttcgttttttgtgtttaagtaatttttttgttttagtttttcgagtagttgggattataggtatatgttattatatttggttaatttttgtatttttagtagaaatagggttttattatattggttcggttagtttcgaatttttgattttaggtaatttattcgttttggttttttatagtgttgggattataggtatgagttattgtgtttggtttataattttataagaaattgttagttagttgagcgtagtggtttaaagataaagaatttaatttaaagtggttaaaagatttaagtagatatttttgtaaagaaaatatataaatggttataggtatatgaagagttgtttaataatattagttattagggaaacgtaaattaaaattataatgagatattaatttatatttattaggatggtaataattaaaaaagtgaaaattaagtgttggtgaggatgtggagaagttgaagttttgtatattggtggtgaaaatgtaaaatggtgtggttgttgtggaaaataattttgaggttttttaaaaagtttaatatagtatttttgtatgatttagtaattttatttttagatatatatttttaaaaaattgaaaataggtatttaaataaatatttatttgtatatgtttgtttatagtagtattgtttataatatttaagaggtgaaaataatttatgtgtttattagttaatgaatggataaattgtggtatatatatttaatggaatattattcggttataaaaaggaatgaagtattgatatatgttataaaatgaatgaattttgaaaatattatgttatatttatatttatattttatataaatggaattatatagtttttatttttggtgtttggtttattttatttagtataatgttatagatatttagttttatagaaacgggaaatagattggtagttgttaagggttgtggattgtttgagattagtttggataatatggtgaaattttatttttattgataaaattaataaaaaaaaattagttaggcgtagtggagtatgtttgtagttttagttataggaggttgaggtgggaggattatttgaatttaggaggttgaggttgtagtgagttaagagtagattaatatattttagtttgggtaattggagtgaggtttttttttaaaaaataaaataaaaataaaagataatgtataaattaaatttagaaaaggtataatataattttattatttagagatgtggagggaaatataataaggattaaaagtagaaatatttaatatggtttttttttaaaattaaataaattgatttaattgataaggggaatttttttaaataattttaaaataaaggatatttttttttagtggaataaatttaaaggataaaagaattgtaaaaaaaaaattataaaaaaattttaaattttatttaggtaattattatatgagattatgtttatgttgtaaaataaagaaaatgggttaggtgtggtggtgtatgtttgtaattttagtattttggggggttaaggtgggtagatcgtttgagtttaggagttttagattagtttaggtaatatagtaaaattttgtttttataaaaattagtcgggtgtggtggtatatgtttgtagttttagttattcgggaggttgagagataggaggattatttgagttttgatggttgaggtcgtagtgagttaagatcgtgttattgtattttagtttgggtaatagagtaagattttgttttaaataataataatagtaataataattttttaaaaaggaagaaaattagtaattatgtttttatttttaagaattaggaattttgatgtaggagaaaggagatatagatgaatttgggtttaaaaaaattaaaaaaatttgtagtattgaattttaattggaagtattagtatgaatatatgttgtattttatttttaaaatatatatatgtatattttatgtgtatataaatatatgtatatttatataaatatatatatatatttatatgtatgtattttttagttttagtatggaaaaagttaaaattagtgattaatttagggaaatgaatatttttagtattaagattatggtttttaaatattttttattaatatgaattagggttttttggagaattggttgattgtagatttgtagtagaaaatgtataagatgagtttggaatgttttaatttttttattttttagtatgatattaatgattattagagttatgtgaaaaattttagaaattaatttaaagatggtaaaatcgattataaaaaagaattattattatgaattgaaatatatcgaatatgtaaatttaggaatttataaagatattaaaaaatagaaaataaattttatggtttatttttcgataattataaggaattaatttattattttgaaaattggtaaataaaagataagaattaagtttatattttgttttttaatataaattgtattttaggtaattaaatagttaatgaggagaagttttttgttatagaagaattttaggtaatgtataaaggtagaatgttgttattttgtaatgaattaattaatgaattaa

SEQ ID NO: 219 - DNA, 6233 bp, Artificial Sequence
  chemically treated genomic DNA (Homo sapiens)
ttttttaggtttaaatggtttttttattttagttttttgagtagttgggattataggtatgtattattatgtttagttaagttttgtatttttttttttttttttgagacggtgtttttttttgttgtttaggttggagtgtagtggtgttattttggtttattgtaattttcgtttttcgggtttaagtaattttttgttttagagtagttaggattataggtgtttattattacgtttggttaatttttttatagttttagtagagatagggttttattattttggttaggttggttttgaatttttgattttgtgatttgtcggttttagttttttaaagtgttgggattataggtatgagttatcgcgtttggttaatttttgtattttttgtattattattgttattttttgagataacggtttttttttgttgtttaggttggaggttagtggtgtaaatatggtttattgtagtttcgattttttaggtttaggtgatttttttattttaggtttttgagtagttgggattgtaggtatttgttattaagtttagttaattttttgtatttttagtagataaggggttttattatgttgtttcggttggtttcgaatttttgagtttaagttattcgtttgtttcggttttttaaagtgttgggattataggtgtgagttattatttttggttaggaaatttttttttatatttaaaaaattttaaatgtatttttttgagttttttttttttagaaatttatatagattttttcgtagatagaattttatttatttttgtatttatattagattaggatttaatttttagagtgtttggttaattattattttttatgttaattttagtggttaatgtttttgtttttttttatttaatatttttgtttaagtttagttttttttgagatgtgtttattattttataaaattaatttaatttttaatatttttaggtagatttgcgttttatttattttaatagtgttaatacgtttgaaatgtttgttatttttagtttttttgatttgttttttggtttgaattttaatttagatgtttagtagaaggaaataggttgtttgttaaatatagttatatggttgaattttttgatattggtaaatagggaaaaattaatgttagaatatgggatgaatagtttgagggagttttagaacgatttaaaaagtttaagtggttataattaggtagtgtttatatagttttaaaagcggagttttggaattgggcgcggtggttaacgtttgtaattttagtattttgggaggttgaggtaggtgaattatttgaggttaggagttcgagattagtttgattaatatggtgaaattttatttttattaaaaatataaaaattagttaggtgtggtggtacgtgtttgtagttttagttatttgggaggttgagataggagaattgtttgaatttgggaggtagaggttgtagtgagtcgagattaagttatagtattttagtttgcgtgatagagtaagattttgttttaaaaaaaaaaatttaaaaataataatttaataaaaaaaaaaagtagagttttgagatgcgtggtggttttattttataagcgttttttgagtatgtaatatgtgttgagtaggtttttggttttgggtgagttgggtaggtgagaggtttggggtgaagattttttttggaggagtttatagtttggtattttttatttatttgtttatttagggttggagtggtttagttaggtaggtgttgaggttatttagttgaagtttgaataggttgattttttcgttgatgtttgagcgtgtttattataggaagagaagttttttagtaattgttttttttttttaaagtagtattttttattttatttagaattaaagaaagaataaggaattttttaggttagtggtttttaaaatatggttattggtgtagtattatttggaattttgtgagagttgtaaattattttttattttagatttatagatttagaaataatggggcggaaatttttgatcgaatggaatattttggagttcgtttttttatttaattttaagatgaatttggaataagggtgtttagttagaggggtaggtgaggtcgtaagtttagttgtttttgtttatttaggtaagtatatagattgtgtttattttttgggggtattttgttttaaattatttgtttaattaggattaatatggtttttataacgttatttttgagaattatttgtttataatgaagggaagaagaaaatttattagtatttggtgaattgggaaataatggggtttttatttgttaaatgtatttatttgtttatttatttaatatattttgttttgtagggtagagaaaagatatatgaggggtttaaggaatttagaatttatttggttagaagaaattaataagtaagagatagggttagaaatataaatgtgatataagggtaagtttttaaataagaaagaatataagaagagaagaagggatagattaaattttagtggtttggagagattagatgtggttttttaaagttaataaagatagtattattaataataatatattagtaataatcgttatttatttttttaatttttttattgagagaaaatttatataaaatttattattgtaattatttatttatttattattttttgagatggagttttgttttgtcgtttagattggagtgtagtggtaggatttcgatttattgtagtttttattttttgggtttaagtgattttttcgttttagttttttgagtagttgggattataggagcgtattattatatttggttaatttttgtatttttagtagtgatagggttttattatgttggttggttagttggtttcgaatttttgattttagttggtttatttttttcggttttttaaagtgttgggattataggtgtgagttattacgtttggtttgttttgtattttatttatgtatttgtttttttagacggagttttattttgtcgtttaggttggagtgtagtggcgtaatttcggtttattgtaattttcgtttttcgggtttaagtaattttttgttttagtttttcgagtagttgggattataggtgtttgttattatattcggtttatttttttatttttagtagagatggggttttattattttggttaggttagttttgaatttttgatttggggatttattcgttttggttttttaaagtgttgggattataggtattagttattgtgtttagtcgttttgtatttttttagtagagacggggttttttttatgttggttaggttggtttcgaatttttggatttaagtgatttgtttgtttcggtcgtttaacgtgttgggattgtaggtgtgagttatcgcgatcggtcgttttttttttttttcgagataaggttttgttttgttatttaggttagagtgtagtggtgttattatagtttattgagtttagaatttttggttttaagatattttcgttttatttttttgaatagttgggtttataggtatgtgttatcgtgttcggtttttttttttttttttttttttttttgagttttttgttttgtcgtttaggttgtagtgtaggtggtgtaatttcggtttattgtaagtttcgtttttagggtttacgttatttttttgttttagttttcggagtagttggaattatagcgttcgttattacgttcggttaattttttttgtatttttagtagagatggggttttatcgtgttagttaggatggtttcgattttttgatttcgtgatttgttcgttttggttttttaaagtgttgggattataggcgtgagttattacgttcggagtttttttttttttttttttaagagggaagtggggtttttttatgttgtttaggttggttttgaatttttggttttaagcgatttttttgtttcggttttttaaagtgttgggattataggtgtgagttattatatttggttaatttagttttaaattaattttttgaggtttcgttttggtaaggttatttatttgttttaaaaataaacgatgtattttagtaaaagaaaaaaaatggaggaaaaaatagggttttgattttatggaataattatgaggttaatttaatgagttttataaaatattatatttatatatagtatgtttgttattttattgttttgttagggtttagagaattaggttattgtgttgtttaggtatcgtgtttgtatatagtttatttcggtgtatatttatttatttttatattagaatgttagttttaagaatttagttatttcgtttatattgttttttaatttttaatatttgcgatagtttttggggtaaaaataaatgtttgttgaattaaaaagaaaaattgggtcgggcgtggtggtttacgtttgtaattttagtatttcgggaggtcgaggtaggcggattatttgaggttaggagttcgagattagtttaatatggtgaaatttcgtttttattaaaaatataaaaatattagtcgggtgtagtggtgggtgtttgtaattttagttatttgggaggttgaggtaggagaatcgtttgaagtcgggaggcggaggttgtagtgagtcgagattacgttattgtattttaatttgggtaatagagcgatattttgttttaaaaaaaaaaaaaaatttttgtagaagtttttaagtttaattaaagtttaaggttatcgtttacgtagtgggttttaaatcgttaagtttttaggttagtagggagagcgagtcgagcgaaggtcgtttgtgttaaaggcggggatttgtatagtatttatatggaagcggaggaaaggttgtttagtaatcgggttgaggggacgggttgtattgcgtacgcgtatatgggcggggtattttgcgtatgcgtaggcgatagtttatggcgtttagggtttgacggttgttagggtgatagggatataatatggcggcgggatttttaacgttttttttcgagggattattacggagattttagtgcgggatttcgttttagggaagtggaaagtagggggataatttttttgtttttttttttttcgtttagtgtcggtaaggggttgttatcggttttcgtatttaagatgaagagtgagtggggtcggggaaaggggtagggattggagagcgagtggcgggggagggagggattgggggagtttgaggagtttgaggggtttgtggggtcgggcgtcgtcgttttttgtcgtggttcgataggttcgggaggtttcgtatgtgggtttcgaatttttttcggttgtgagaagtcggtgtttttgggggaagtttgaggggttggggttaggttgggaattttggggtttcggagagtcgattcgagttttcgtttaggtatattttggtgtaggtgcgtggtttttatattggagtttagggagttgattgtgatttattttattttattttaaatgttggtttgaatttgatattttttttttgaatattcggtagaaaacgggggagcgtttatagcgtggttttttgtttttttatgatattggtttagtgattaattgagaggaaagttgggttgtgtgttttattttattttttgggttaagtagtagtgttttataggaattattttttaatagtagttttgaagtaattttttagttaaaagttgttattttaaagttgggaaatgaggtagttattttagaaaatgtaacgggtaaaaaattttttttagtgggatttgtggattattgataatttaagtgtaattagttagaatgatgtttttaaaattattattattgtatagatataattgtttatggttgtgaattagaggtgtagtaaaaatttagatttttgttgtgaaaatattatgttaggagtagttataatgttaaatttgtattgtattttaattgttaatggtgtatattgtataatatttaaaataattaattttatttattttttataaggtatttttatttttattttattttgttggatattgtttaatgtttattttttttattaatgtattataaagttgtagttagaatttaaggtttataaaagattttatatttttatttatagtgtagattat

SEQ ID NO: 220 - DNA, 6233 bp, Artificial Sequence
  chemically treated genomic DNA (Homo sapiens)
atagtttgtattgtaagtaaaagtgtaaagttttttgtagattttggattttaattatagttttgtagtgtattaatgaaaaaggtaaatattaaataatatttaataaaataaaataaaaataaaaatgttttgtaaagggtgaatgagattaattattttaaatgttatgtaatgtatattattgataattaggatataatgtaaatttaatattataattatttttaatataatatttttatagtaaaggtttgaatttttattgtatttttggtttataattataaataattatatttgtatagtaataataattttaaaaatattattttagttggttgtatttggattgttaataatttataaattttattaaagaaaattttttattcgttatattttttagaatgattattttattttttaattttgaagtaatagtttttaattaaaaggttgttttaaaattattattaaaaagtggtttttataaaatattattgtttgatttaaaaaataaaataaagtatatagtttagttttttttttaattggttattaaattagtattatgaaaaggtagggagttacgttgtaagcgttttttcgttttttgtcgaatgtttaggaaaagagtgttaggtttaagttagtatttaaaataaaataaaatgaattatagttaattttttaaattttaatgtaagaattacgtatttgtattaaaatatgtttgagcgggaattcgagtcggtttttcgagattttaaagtttttaatttagttttaattttttaagttttttttaggggtatcggttttttatagtcgagggggattcggggtttatatgcggagtttttcgggtttgtcgagttacggtagaaggcgacgacgttcggttttataggttttttaagttttttaagtttttttagtttttttttttttcgttattcgttttttagtttttgttttttttttcggttttatttattttttattttggatgcggaagtcggtgataattttttgtcgatattggacggaaaagaaagaagtaggaaggttgtttttttgttttttatttttttgaggcggggtttcgtattaggattttcgtggtggtttttcgaaggagagcgttagagatttcgtcgttatgttgtgtttttgttattttagtaatcgttaggttttgaacgttatgagttgtcgtttgcgtatgcgtaagatgtttcgtttatgtacgcgtgcgtagtgtagttcgtttttttagttcggttgttaagtagtttttttttcgtttttatgtaaatattgtgtaaattttcgtttttgatataggcgattttcgttcggttcgttttttttgttggtttgggaatttagcgatttggaatttattacgtggacgatagttttgagttttaattgggtttgggagtttttataggaatttttttttttttttgagatagagtgtcgttttgttatttaggttggggtgtaatggcgtgatttcggtttattgtaattttcgtttttcggttttaagcgatttttttgttttagttttttaagtagttgggattataggtatttattattatattcggttaatgtttttgtatttttagtagagacggggttttattatgttaggttggtttcgaatttttgattttaggtgattcgtttgtttcggtttttcgaagtgttgggattataggcgtgagttattacgttcggtttagtttttttttttaatttaataagtatttgtttttgttttaggaattgtcgtaggtattggggattaaaggatagtgtagacgaggtgattgagtttttgaaattaatattttagtgtaaagatgaatgaatgtatatcggaatgaattatgtgtagatacggtgtttaagtaatatagtggtttagttttttggattttgataaaataataaaataataagtatattatgtatgggtatagtattttatgaagtttattagattagttttataattattttatgagattaaaattttgtttttttttttatttttttttttttattaaaatatatcgtttatttttaaaatagataagtagttttgttaaaacgaagttttagaaaattggtttaagattgaattggttaggtgtggtggtttatatttgtaattttagtattttggaaggtcgaggtaagaggatcgtttgaggttagaaatttaagattagtttgggtaatatagagaaattttattttttttttaaaaaaaaaaaaaaaaaaatttcgggcgtggtggtttacgtttgtaattttagtattttgggaggttaaggcgggtagattacgaggttaggaaatcgagattattttggttaatacggtgaaattttatttttattaaaaatataaaaaaaattagtcgggcgtagtggcgggcgttatagttttagttatttcgggggttgaggtaggagaatggcgtgaattttggaggcggagtttgtagtgagtcgagattgtattatttgtattgtagtttgggcgatagagtaagagatttaaaaaaaaaaaaaaaaaaaaaaaaaagtcgggtacggtggtatatgtttgtaaatttagttatttaggagaataaggcggaggtattttgagattaggagttttaggtttagtgagttatgatagtattattgtattttagtttgggtgataaagtaagattttgtttcgaaagaaagagaaagcggtcggtcgcggtggtttatatttgtaattttagtacgttgggcggtcgaggtaggtagattatttgagtttaggagttcgagattagtttggttaatatgggggaaatttcgtttttattaaaaaaatataaaacggttgggtatagtggttgatgtttgtaattttagtattttgggaggttaaggcgggtggatttttaggttaggagtttaagattagtttggttaagatggtgaaattttatttttattgaaaatagaaaaatgagtcgggtgtggtggtaggtatttgtaattttagttattcgggaggttgaggtagagaattgtttgaattcgggaggcggaggttgtagtgagtcgagattgcgttattgtattttagtttgggcgatagagtgagatttcgtttaaaaaagtaaatatataaataaaatataaaataagttaggcgtggtggtttatatttataattttagtattttgggaggtcgaggaggatggattaattgaggttaggaattcgagattagttggttaattaatatggtgaaattttgttattattaaaaatataaaaattagttaggtgtggtgatgcgtttttgtaattttagttatttaggaggttgaggcgggagaattatttgaatttaggaggtggaggttatagtgagtcgagattttgttattatattttagtttgggcgatagagtaagattttattttaaaaaataataaataaataaatggttataatggtgaattttatgtaaatttttttttaataaaaaagttgaaaaaataaatagcgattattgttggtgtattattgttggtggtgttatttttgttggttttgagaagttatatttaatttttttagattattaggatttgatttatttttttttttttttttgtgtttttttttatttgggggtttgtttttatgttatatttatatttttaattttgttttttgtttgttagttttttttaattaggtgggttttaagttttttgggttttttatgtgttttttttttattttgtagggtagagtgtattaaataagtgaataggtgaatgtatttagtaagtgagagttttattgttttttaatttattaggtgttgatggattttttttttttttttattgtggataagtggtttttagaagtgacgttgtagagattatgttggttttgattgggtagatgatttagagtaaggtgtttttagggggtagatatagtttatgtgtttatttaggtgaataggggtagttggatttgcggttttatttgtttttttggttgagtatttttgttttaagtttattttaaggttgggtgaggggacgaattttagaatgttttattcgattagggattttcgttttattatttttaaatttgtaagtttggagtgggggatagtttgtagtttttataaaattttaggtgatgttgtattagtggttatattttgaaaattattggtttagagaattttttattttttttttaattttaaatgaaataggaaatgttgttttgaaaagaaggaataattgttgaggagtttttttttttgtggtaaatacgtttaaatattagcggaggggttaatttgtttaggttttagttgggtggttttagtatttgtttagttgggttattttagttttgaatggatagataagtaagaagtattaggttgtgaatttttttagagagggtttttattttaagttttttatttgtttagtttatttagagttaggagtttgtttagtatatattatatgtttaggaaacgtttgtgaaatggaattattacgtattttagagttttgttttttttttttattaagttattatttttaaatttttttttttgagatagagttttgttttgttacgtaggttggagtattgtggtttgatttcggtttattataatttttgttttttaggtttaagtaatttttttgttttagttttttaagtagttgggattataggtacgtgttattatatttggttaatttttgtatttttagtagagatggggttttattatattggttaggttggtttcgaatttttgattttaggtgatttatttgttttagttttttaaagtgttgggattataggcgttagttatcgcgtttagttttagagtttcgtttttaaaattgtatgaatattatttaattataattatttgagttttttgaatcgttttaaaatttttttagattgtttattttatattttagtattagtttttttttatttgttaatgttaagggatttagttatgtggttatgtttagtagataatttatttttttttgttgagtatttgaattaaggtttaaattaggaaataagttagaaaagttagggatgatagatattttaaacgtgttaatattgttaaagtgggtaaaacgtaaatttatttaaagatattagaaattagattgattttgtaaaataataaatatattttagggaaaattaagtttgaataaggatattaaataaggaggagtaaaaatattagttattgaaattaatatgaaggatggtagttaattaagtattttagaaattagattttggtttagtgtggatgtaaaaataggtaaaattttgtttacgaagaagtttgtgtaggtttttgagaaaaaggaatttaaagaaatatatttagaattttttaagtgtaagaaaaggttttttggttaggaatagtggtttatatttgtaattttagtattttaggaggtcgaggtaagcggatggtttgagtttaggggttcgagattagtcgaggtaatatggtgaaattttttatttattaaaaatataaaaaattagttgggtttggtggtaggtgtttgtagttttagttatttagaagtttaaagtgggagaattatttgagtttgggaaatcgaggttgtaataagttatgtttgtattattgatttttagtttgggtaataggagagagtcgttgttttaaaaaataataataataatataaaaaatataaaaattggttaggcgcggtggtttatgtttgtaattttagtattttgggaggttgaggtcggtagattataaggttaggagtttaagattagtttggttaagatggtgaaattttgtttttattaaaattataaaaaaattagttaggcgtggtggtgggtatttgtaattttggttattttgaggtagagaattgtttgaattcgggaggcggaggttgtagtgagttaagatggtattattgtattttagtttgggtaatagagggagatatcgttttaaaaaaaaaaaaaaaaatgtaaaatttaattgggtatggtggtgtatgtttgtagttttagttgtttaggaggttgaggtgggaggattatttaagtttgggagg

SEQ ID NO: 221 - DNA, 8404 bp, Artificial Sequence
  chemically treated genomic DNA (Homo sapiens)
ttatttatttttaatttggattttttttatttattttttttgtttaatgttattgtagttttttatgtaggaaacgaggatttgaatagtgatggagagatgagtaatggttcgatttggaatatattttatgggtagaataaatggaatttgttggtttagaagtgggtggtggaagaaagagggaagttaaaagtgatttttaggtttatggatggatgaattggttaaattattgtggtgttatttgtttagatagggtagatggggggatgtaggattaagagaggaagagaaaagttttatttgggttatattaaatttggttatgattgtggattagataggtaaaagtaagagaaggagggaagaagttagaatatagatttttggggaaagtttatacgtagaaaaggggtggaagaagaggtattagaaagagaggtaaagaagagtaatttgaggggtagaaaaagaattaggaaagttagagaaaaaagggaaaagttttaggaaagtggtaatggttaattatgtaaataagaggggaaggaaggtgaggattgagaaaggattttttatgtaagtaataaggaggtttttggtgatttttgatagaatatttttagtagattggataaggtttttgtttgagtgtaagtgagttgaaaatgtaagtgagtgagggaagtgttttaaaaaagtttaaagtgttatgtgtgtaaggtaatgttgttatttttgttgttatggaaatagaaattatttaggagaattaaaagttatttaaaatttttgattttaatttattatattcgtttgattttttgagaaagataatgataaaaaattagttattagaggggtagggtaattttaggttttttttttttagatatagtttttaattggaaatttttattttttttgagaagggagtttgtattaatatttataatggtttttaaaaagtatagatgatttgttatattttttgatttgtttgttattggttggtattgtttataaatataatttgtttttttatttttttttgaaatgagtaatttgaattattcggaggagaaaggtaggagagatagaggtagtagaagttagggtagttgaaagatagagatttttaggtgggtattttaatttttgttttgttaatttagtgttgagtattatgatttgatgattatataatagttagaggagtaattttttaaaagtaaatttgttttgttttattataaatgttatttttttattatgtatatggtagtttaaaaaatattgtggaagtataaaaatgttgaaagaagttaaattttttattaaaatagtttttattgatattttggggatcgtttttttgtgtgtgtgtgtgtgtgtgtgtgtgtgtgtgtgtgtgtgtgtgtgtgtgtgtgagatatatatatatatatatatatatatatatatattttttgagatggggttttgtttttgtcgtataggttgaagtgtagtggtatgattttagtttattgtaatttttgttttttgggtttaagtgatttttttgttttagtttttagagtagttgggattataggtatttgttattatatttagttaatttcgtatttttggtagagatgtggttttattatgtttgttagtttggttttaaatttttgattttaggtgatttattcgttttggttttttaaattgttgggattataggcgtgagttatcgtatttggtttagattttgtcgaaattttaatatttttttggtaatgtaatagaaaattaaagattttgatggtgaatttaattgtttttgagttgtgtggatgaaaatatattttattatttttttttttaatttttaagtttttaggtatatgtgtaggatgtgtaggtttgttatataggtaaatgtgtgttatggtggtgtgttgtatagattaatttattattatggtattaagtttagtatttattagtttttttgatgttttttttttttttattttttttcgttataggttttagtgtgtgttgtttttttttttgggtttattttatggtatgtatgtgtgtatgtgtgtgtgtgtgtgtgtgtgtgtgtgtgtgtgtgtatttatttatgtgtatatattatgatatatatattatattttttttaaattattattttaggtttagggatatatgtgtaagtttgttatataggtaaattgtgtgtttttggggtttggtgtgtatagatttttttattatttaggtaataagtgtagtatttgataggtagttttttgattttttgtttttttattttatatttttaagtaattttttagtgtgtgttgtttttttttttatgtttatgtgtttttattgtttagtttttatttataagtgagaatatgtagtgtttggttttttgtttttgcgttagtttgttgaggataaaggtttttggttttatttatgtttttgtaaaggatatgattttatttttttttatggttgtaggaaaatatattttatatattagtgaatatagttaaattaatttatggttaagatatatatttttttgtaaattgagaaatttttttattataattgtaatatggtaataaataaatttagattatataaatgtaatttagatgttgataaattggttttaaataaagtaagtgatatttacgtatgaagagagtttattttagtttttagaatttttttttatttttttgttatttttatttttagtaagtaagtatttattgtgtgtgtaatattgtgttaggtattaaggtaatgatgatatttaagatttggtttttattttgaagataagtataggagaaatattattagttatgatgttttttgttgtaaataagtgaaaattttagtttagtttaggttagttttagggttggttaaattagaggtttatttataatattgaggatttagatttttttgaaattttttttgtattaatattagtatttttattttttttgtagggtggtttgttttacgttataatggttgtagtaattagaagtgttatatttttagtaatatttaatattattattattatttaataatatttagaattgtgttatttttgttttaatttattaggtttttagtagattattttttattttttaaatgttaaaattgtattttgagtttttgtttaaattaatttggggtgaggtgaatggaagtagtattttaattgtatttattttttgtagttggatttgggtttgggttattttttgatatttgtttataagaaagatttttgaagttaggtaggaatggttgttgagtaggttagtgtttgttaaatttttatatatttttatatatgttataatatgtagataaaaagataattttttatataatttgttgggataaatttaggaggtttatagtatgatttgtttgaaggttttttttgttttagattttgtttagttgttttaggatgaggggatttatattatagtataattgtattttatttatagtataaattattttttttttttttagttgacgagtttagatgggtaataatagtgtttgttaaagagaaaaaaaaatgtatttaaattagataatttattggtataaatatcgagatatagaagtgataatagttttaagttaatgtttgatggtggtagttttagtaagtttttttttgatgtttttgtgtttttgtatatgttttttttttgttattgttttttttattaaatataatataatggataagtggaattaaatagaattgagtttaaattttttgttatttatcggttttggtattggataaattaatttttttgagtttgtttttttatttgtaacgtagattagttaatattatttattggaaagcgttgttttttagttaatgtatgtaaggtttaaaatttagatgacgggttgataggtgtagtaaatttttatggtatacgtatgtttatgtaataaatttatacgttttgtatttgtatttcggaatttaaagtaaaaaaaaaaaaaaaaaaaaaaagaaagaaagaaaaagaaaaaaaaggttgtttttggggattaaataagataattatgtaaggtggttagtatagtttttggtatatagtaaatgttaggtttgtttgatagatttttatttagtagttattgtttttttgaaaattttttttagacgtttttacggtgtttttcgtttttatattattataattttttattatattattattcgtttattttttatagttttttttttttttttttttaattagtgattttaaaaggttagtaagtgtttaatattttttattttttaagtgattggtaaagtttcgtatttattagcgttttaagtttgtttttgttttggtcgattttgtaaaacggattgggcgggatgagaggtggggggcgtcgttaaggagggagagtggcgttttcgtcgagggtgtattagttagatattttttgcggggttcgagagttttttttattagatttcgggatagggatgaggtttatagttatttattagattttttgtatagtttcgttaagtgtatttcggtttggagggggtggttttgggtagaagtacgttcgggtcgcgtcggatgttttttggaaggcgtttggatttacgttaggttttttagtttaattttttatgatttagcgttttagttcgcgtatcgattagcgttttagttttttatagacgtcggcgggttcgggagtttcgcggacgtgacgtcgcgggcggaagtgacgttttttcgcggttggacgcggcgtttagttgtcgggcgggggagggcgcgttcggttttttttaggggacgttgaaattatttttgtaacgggagtcgggagaggacggggcgtgtttcgacgtgcgcgcgcgtcgtttttttcggcgtttttttatagttcgttggttttcgtcgcggaaaggcgttatgtcgtttaaaatttttcgaaaaacggtcgttatcgtcgtcgttgtcgtcgcggaattttcggtatcgtcgtcgtcgtttttttttgaggaggatttagagtaggatagcggttcggaggatttgtttttcgttaggtgagcgagtagagtcgtcgtcgttttacgcgggaagggcgtttcgggtgtgcgtagggcgggcgtaaggcggttcggcggggattcgttttcgttaggggtcgggtttcggcgggaggaggcgttttttttgtttttcgttacggcggagcgtttgtagaatggtgataggattttgggtttttgggcgaggggtttcggttttaatttgataggtgtcgggcgggtggggttagggttttgagcgaagtgataggtgtagtttttttttgtgaggttcggaggtagagggtcgttgcgagcgtttattagacgtaaaaaatgaaaaataaaaatataaaaatggtgtttgtgggagagttttttatcggagaattggagtatttcggtggtcgtttgattttttgttttggtttacgcgatgtaatagttgggaagtattttttttcgggcgtgtattgtatttgaagtttatttgtgggagaggtcgattagaaagttttggataagaagcgtagggttttgagtgtttattgtttataggatattcggtttaggagttttgcggcgtttttttagaataataatgtatcgaggttttggggatttaaagttatttgtagtgattgatggagcgtaattttttagaggaattgaaatatgggtaaaatttttatgagatatttattagaagtgtttgaaagtttttaaattttttttttttttgtttgatgaattttttttgcgtgttagtcggtttcggtttgttttattattttttttattttgttttttgattttgaattagtaaggattttggtgttttttttttttgtttttgtttttggtataaaattagtggttttgtgcgtaaatggaaattttcgtttttttttattaagtggaatttaaatttaagtaagtttatacgaatgtattagattttgaagggaagtatttattgtattataatattttattttttttgatttttttattttatggttaaatagttatgattgaaagagtgtaattgttattattgttagtattggttttattttgagataagtttattgtagagggaatgggatttgtttttgttttttattatttttttttttatttttgtttattattaaatttttttatttttatttatttttttttattcggtatatattaataatttacggtagaaaagattgaagtgggatttaggaaatggtttttggaaggttattaaaaatttatatatttaaatggattgttttataggttagttaaaaattatattcgttaaaaaattaaaataataataataaaaaattaaaaattacgtttggggtatgttttgggaaaagatatggttttagtttttgattaaattttgatgtatttaatttttgtaaattttttttgggaaaatgtagtaatggttattttaaagaattttatgttatgtatatagttttggaagtatattttaatgtagggtaattaggaatattgacgttgtggttattgtttggaaaaaagaggattgttttttttattttttaatttattttatatattttaagtaatggaattataaaaaatttttttataagttaaaattatataagatatagtttgtttttgattatttatatttataaagggttttattaatatagatagttgaattttataaattaattagtaagggtagaattattgtcgtgtagtttgatattgagtattttgtttggagatggaattaaggtttagtttaattgtatttttagtgatagattttatttttgatttgagagtttagattttatttttgttgttttatttttggtttaagtaatgtagttggaagggaaattgttattaggaatagtatattatatttattgttgaaataattaaaggttaattatgtttcgagttgggtgtgatggcgcgtatttgtagtttatgttatttaggaggttgaggtaggaggattatatgagtttgggagttggaggttagtttgggtaataacgtaagattttagtttttaaaaaaataaaaaagttgattaggtatgttggtttacgttgtaatgttagtattttgggaggttaagatgggaagattgtttgaggttaggagtttgagaggagtttgggtaataaaataagattttgtttttaaaataaattttaaaaaattagttagtggttgtggtatatttgtaggtttatttatttaggaggttgaggtgggaggatttttgagtttaggagtttgagattgtagtgagttatgattttattattgtattttagtttggatgatagagtgaaattttattttaaaataagaaaaaaaaataaaaattaattatgttttgaaggaggaattggtagtttagaatagtggttaagggtatggattatagagttagattgttgggtttatatagtggtttattttttatcggttgagattttaggtaagttttttaatttttttaatttgatagatatttgtaaatgtttatttttatagatgagaatatttatttaaaagggttgatgtcgggatttagtgaaattatatgtttaaggtattttttataggattatagtaaatatttaaaaattattaattattttttatattatttttattagtagataatatatagaaattagatgaatgaaaatgaattagttaataagaatttattaaatgtttgtttttgttaaggggaaaggataaaaataagtagtcgtattatgtaagatgtgttagtaggtagagagatatatgaaatattgataagagaagattatagtttaataaagttattggcgttgaattgtataatattatttatgggtttttatttttttgttgttatttttattttatttttttaaatagttttagttattatatttatttttttttatagaagtgttttgttgttttgaagtatatttgatttattatgtaagtaaatattttttattgtgtggtatttttattttggaatgattatgaaaaagataattatatgtttaaatttgaagtgtaatgtttttttaagataaaataagattttaaagtatttaataatgtttttttttatagtagtgttatgtgtaaattattgaaataagtatgtattgaattaatttgatttataagtatatgttaattatatgattatttttatttggtagg

SEQ ID NO: 222 - DNA, 8404 bp, Artificial Sequence
  chemically treated genomic DNA (Homo sapiens)
tttattaaatgaaaataattatataattggtatatatttataaattaaattgatttagtatatatttgttttaatagtttgtatataatattattgtgaaaaagaatattattaaatattttaagattttattttattttagaaaaatattatattttaaatttaaatatatgattattttttttatggttattttaaaataaggatattatatagtgaaaaatatttgtttgtatggtaagttaaatatattttaaagtagtaaaatatttttgtgaaggaaagtaaatgtaatagttaaagttgtttgggaaaataggataaagataataataaaaagataaaaatttatagataatattatataatttaacgttagtgattttgttaaattgtagtttttttttattaatgttttatatatttttttatttattagtatattttatatgatgcgattgtttatttttgttttttttttttaataaagataagtatttaataaatttttgttggttaatttatttttatttatttaatttttatgtgttatttattaataagaatagtatgaagaataattaataatttttgagtatttattatgattttgtagaaagtattttaaatatatggttttattgaatttcgatattagtttttttagataagtatttttatttgtaaaagtagatatttatagatgtttgttaaattggagaagttaaagaatttatttgaggttttagtcggtaagaggtaaattattatgtgagtttaatagtttaattttataatttatgtttttgattattattttagattgttaattttttttttaaaatataattagtttttgttttttttttttgttttgaaatagggttttattttgttatttaggttggggtgtagtggtgaaattatggtttattgtagttttaaatttttgggtttaaggatttttttattttagttttttgagtagatgagtttataggtgtgttatagttattggttaattttttaaaatttgttttagagatagggttttgttttgttgtttaggttttttttaaatttttggttttaagtaatttttttattttggttttttaaagtgttggtattatagcgtgagttaatatgtttggttagtttttttgtttttttaaagattggggttttgcgttgttgtttaggttggtttttaatttttaagtttatgtgatttttttgttttagttttttgagtagtatggattataggtacgcgttattatatttagttcgaaatatgattaatttttgattattttaataatgaatgtggtatgttgtttttagtgatagttttttttttagttatattatttaggttagagataaggtaatagaaataagatttaaatttttaaattaggaatggaatttgttattggaggtgtagttggattgagttttgattttatttttaggtaagatgtttagtattagattgtacggtagtggttttatttttgttggttaatttatagagtttaattgtttatgttaatgaaattttttgtgggtatggataattaagaatagattgtattttgtatggttttgatttataagagaattttttatagttttattatttaaaatatataaaatgagttaaaaaatgaaagaaatagtttttttttttttaagtagtggttataacgttaatatttttggttattttatattagagtatgtttttaaagttgtgtgtataatatggaattttttagagtagttattattgtatttttttaagggaaatttgtaagaattggatatattagaatttaattagaaattaaagttatgtttttttttagaatatgttttagacgtggtttttaattttttgttgttgttattttggttttttaacgaatatggtttttaattgatttataagatagtttatttaaatatataaatttttaatagttttttaggggttattttttaaattttattttaattttttttgtcgtgaattgttagtgtatatcgagtggaaagaaatgggtgagggtgaaaggatttggtgatagataagaatgggagagaaaatagtgaaaaatagaaataagttttattttttttgtaatgaatttgttttaaagtagaattagtgttgataataatgataattatatttttttaattatagttatttaattataaagtagaaaaattaagaaaagtaagatgttgtaatataataaatatttttttttaagatttagtgtattcgtatggatttgtttaaatttagattttatttaataagggaaaacgaaaatttttatttgcgtatagaattattaattttgtgttaaaaataaaggtaaaaagaggggatattaagatttttgttggtttaaagttaaaaggtaaaatggaagaaataatgagataagtcgaagtcgattaatacgtaagaagagtttattaaataggaaaaaaaaaagtttagaaatttttaagtatttttggtaaatgttttatgaaagttttgtttatgttttagtttttttaaagagttacgttttattaattattatagatggttttgagtttttaaggtttcgatgtattattgttttaaggaaacgtcgtaaagtttttgagtcgagtattttgtgggtaatggatatttaggattttgcgttttttgtttaaggttttttggtcggttttttttataaatggattttagatgtagtgtacgttcggaagaaaatattttttaattgttgtatcgcgtgaattaaaatagaaagttagacgattatcggagtattttaatttttcggtgaaaaatttttttatagatattatttttgtatttttattttttattttttgcgtttgatggacgttcgtaacgattttttgttttcgagttttataagagggaattgtatttgttatttcgtttaggattttagttttattcgttcgatatttgttaagttgaagtcgagatttttcgtttaagaatttagaattttgttattattttgtagacgtttcgtcgtggcggggggtagggagggcgttttttttcgtcgggattcggtttttggcgaggacgggttttcgtcgagtcgttttgcgttcgttttacgtatattcggggcgtttttttcgcgtgaggcgacggcggttttgttcgtttatttgacgagaggtaggtttttcgggtcgttgttttgttttgggttttttttaggagggggcggcggcggcggtgtcgggggtttcgcggcggtagcggcggcggtggcggtcgtttttcggggggttttgggcggtatgacgttttttcgcggcgggagttagcgagttgtggaggagcgtcggggaggacgacgcgcgcgtacgtcggggtacgtttcgttttttttcgattttcgttataaaaataattttaacgttttttgagaaaaatcggacgcgttttttttcgttcggtaattgagcgtcgcgtttaatcgcgggaaaacgttattttcgttcgcggcgttacgttcgcgaggttttcgggttcgtcggcgtttgtggggaattggggcgttggtcggtgcgcgggttgggacgttaagttatgaggaattaaattgggaaatttggcgtgggtttaggcgttttttaggaggtattcggcgcggttcggacgtgtttttatttagaattattttttttaggtcggggtgtatttaacggggttatataaagagtttggtgggtgattgtgggttttatttttatttcggggtttgatagggaagattttcgggtttcgtagggaatatttggttagtgtattttcggcgggagcgttattttttttttttggcggcgttttttattttttatttcgtttaattcgttttgtaaagtcggttaaaataaaaataaatttggagcgttgataggtgcggaattttattagttatttagaagatagaaaatgttagatatttgttggttttttgggattattggttagggaaaggaagggagggagttgtggggaatgaacggatagtagtgtaataaaggattgtagtggtgtaagaacgggaagtatcgtggaaacgtttgaggaagatttttaggggagtagtagttgttgaatagaagtttgttaggtaggtttgatatttattatgtattaggaattgtgttggttattttatataattgttttatttaatttttagaaatagttttttttttttttttttttttttttttttttttttttttttttttttattttaagtttcgggatataagtgtagaacgtgtaggtttgttatataggtatacgtatgttatggaggtttgttgtatttattaattcgttatttaggttttaagttttgtatgtattagttaagaaataacgttttttaatgggtagtattagttagtttacgttgtagatgaggaaataggtttagaggagttaatttgtttaatattagggtcgatgggtagtagagaatttgaatttaattttatttgattttatttgtttattatattatgtttgatgaagaaaatagtgatagagaaggagtatgtgtaaaggtataaagatattagaaaagagtttgttgggattattattattaaatattggtttaaagttgttattatttttgtgtttcggtatttgtattaatagattatttagtttgaatatatttttttttttttttggtagatattgttattgtttatttgaattcgttaattgagaaggaaagagatggtttatgttgtgaataaaatatagttgtgttgtgatgtaaatttttttattttggagtagttgagtaaggtttaaggtaggaagaatttttaagtaggttatgttgtaagttttttgagtttattttagtaagttgtataagggattatttttttatttgtatattatgatatatgtgaggatgtgtaaaggtttggtaagtattggtttatttaatagttatttttatttaattttagaaattttttttgtgggtaaatgttaggagatagtttaggtttaggtttagttataaagaatgaatataattaaagtgttatttttatttattttattttagattagtttaggtaagagtttaggatgtagttttgatatttgaaagataaggagtagtttgttgggagtttgataaattgaaatagggatggtatagttttaaatattattaaataatagtaataatattaagtattattgaggatgtgatatttttgattgttgtagttattgtaacgtgaggtaagttattttatagagaaggtagaaatgttgatattggtgtaggaggaattttaaaagaatttggatttttagtgttataaatgagtttttgatttggttagttttggagttgatttaagttgagttgaggtttttatttgtttgtaatagaaagtattatgattgataatgttttttttgtgtttatttttaggatagagattaaattttgggtattattattgttttagtatttagtatagtgttatatatatagtaaatgtttgtttattaaaagtagggatggtaggaaagtgaaggaaagttttaggaattgaagtaaattttttttatacgtagatattatttgttttatttaaaattagtttattaatatttagattatatttatgtaatttagatttatttattattatattataattatgataaagagattttttaatttataaaagaatatatgttttgattatggattaatttaattatgtttattagtatgtaaaatatatttttttgtagttataaaaaggaatgagattatgttttttgtaggaatatggatggagttagaagtttttatttttagtaaattaacgtaggaatagaaaattaaatattgtatgtttttatttataagtgggagttaaataatgagaatatatggatatgaagaggggaataatatatattgggggattatttgagggtgtagggtgagaggatagaagattaaaaaattatttattaggtattatatttgttatttgggtggtgaaaaaatttgtatatattaaattttagagatatatagtttatttatataataaatttgtatatgtatttttaaatttaaaataatagtttgaaaaaagtgtggtgtatatattataatatatatatataaatagatatatatatatatatatatatatatatatatatatatatatatatatatatattataaaatagatttaggaaggggaataatatatattggggtttgtagcggggaagggtggggagagggagagtattaggagagttaatggatgttgggtttaatattatggtgatgggttgatttgtgtagtatattattatagtatatatttatttgtgtaataaatttgtatattttatatatatatttgggagtttaaaagttgaaggaaaaaataataaaatatatttttatttatataatttagaagtaattgagtttattattaaaatttttagttttttgttgtattattaaagaagtattagaatttcggtagagtttagattaggtacggtggtttacgtttgtaattttagtagtttgggaggttaaggcgggtggattatttgaggttaggagtttgagattaggttggtaaatatggtgaaattatatttttattaaaaatacgaaattagttgagtgtggtggtaggtgtttgtaattttagttattttggaggttgaggtaggagaattatttgaatttaggaggtagaggttgtagtgagttgagattatgttattgtattttagtttatgcgataagagtaagattttattttaaaaaatatatatatatatatatatatatatatatatattttatatatatatatatatatatatatatatatatatatatatatatatatatataaagggacgatttttaaaatattaatagaggttattttggtggagaatttggttttttttaatatttttatatttttatagtattttttaaattattatgtatatgataggaaaataatatttatagtagaataaaataaatttatttttaaaaaattatttttttgattattatgtgattattaagttatgatgtttaatattgaattaataaaataaagattaaaatgtttatttgaaggtttttgttttttagttgttttggtttttgttgtttttattttttttgtttttttttttcgagtaatttaggttgtttattttaaagaaaagtgaaagagtaaattatatttatgaatagtgttaattaatagtaagtaagttaggaagtgtagtaggttatttgtgttttttagaagttattgtagatgttagtgtaagttttttttttaagaagggtgaaaatttttagttaggggttatgtttaaaaagaagaaatttaaaattgttttgtttttttaatgattggttttttgttattattttttttaagagattaagcggatatgatgggttagagttaggaattttaagtggtttttagtttttttaaatggtttttgtttttatggtaatagaaatagtaatattgttttatatatatagtattttagatttttttaaagtattttttttatttatttgtatttttagtttatttgtatttaggtagagattttatttagtttgttgaaaatgttttgttagaggttattaaaaatttttttgttgtttatataaaaaatttttttttagtttttattttttttttttttttgtttgtatagttgattattgttatttttttgaaattttttttttttttttttgatttttttggttttttttttattttttagattgtttttttttgtttttttttttgatgtttttttttttattttttttttacgtgtgagttttttttagaggtttgtgttttgatttttttttttttttttttgtttttatttatttgatttataattatggttaaatttaatgtggtttaggtggagttttttttttttttttttagttttgtatttttttatttattttgtttaagtaaatggtattataataatttagttagtttatttatttataaatttagaagttatttttaattttttttttttttttattatttatttttgagttaataagttttatttgttttgtttataaaatatgttttaaatcgaattattatttatttttttattattgtttaaattttcgttttttgtatagaaagttgtagtaatattaagtaagaaaaataagtaaaagggatttaaattggaaataaataa

SEQ ID NO: 223 - DNA, 9289 bp, Artificial Sequence
  chemically treated genomic DNA (Homo sapiens)
atagattttagttgggtagggtttagtgggaaggtttatttttgttgtatataatattagttaggataatttgattgaaggttggaggatttgtttcggtttttaaattggtttatttaatatagttgagggttagaggttttgggttttatttatatggtgataattgtagaatttttggtatataaaggttttttttaaatttttgtatttaagagatgattatattttatgagtaaaagaaaagagagagagagagaggattaaatttttgtattgtttttgggagtttagggttaattttttggaatgattttgggttttttgtttttatttttttattgaaattattaggaagaataggggttttgttttttagtttgtgtaggggatagtagtttgattttgatagttgttggttagtagatataattagtttaatgatattaatattgatttattttttgtaattttttatttaagttttgttttttttttttttttttttattttttttttaaaaggttaagttatatttaaaaaagttggaatgaagtttagttttttttttgttgtttgttagtagttatttagtaaaattcgttttttatattttaattaatgttcggttttgtttatttttgataataggtgatttggttttttttatagtatgttggttgggtataaagagtgaatgaagaatgattgagagaatgagagatagagagagtatatgtgttagttaggtgaaagattttttgtattttatgattaagttttataagttaaataataattttaaggaaatttaatttttttatattagaggtatttaaattagagtgattttattttgagtgatggttaggaaaaatggggttgggattggttgggttgtatttttagaaagttaggtatttttagtttttagatgtttatagttaagggaatatattgataatatttattaaatagatttagatttaggagtgttttgatatttcgatattttgagaatagaagtatttttaattttgttttaaagataatattaatttttgtaaaatatagtaattaggaagattaattttttattataaatttttgtggtagagtatatttttttatgatttttttaaattttatttataaataagtattgtatttagggtggatgtatttttttttttattttcgggaacgttttattttttatggagtaattgtttttttattattttatttttttaataaatttttttttgttttgtattgtggattcgttttgaatttttttttatatgagatttaagaatttttttttggggtttggatcgggattttttttacgtaatatttatatttttattttattttatttttattttaaaaggttttgaaaatattggtattaataagtaaaggatattttaataaatatatatttgatggtttattgttattaattttgtttatattgtaataattatttaaattatattaatttttattaaaaatagtaaagataattttatatcgtttgtttaagttaaatagtttgaagttaaattttaattgttaaaataatttaagttttttttttagttgttaaaagaaaaattttggataagttaatagtttaagtaaataataatttatgaattgggtattatttaaaataagaagatatttagagcgtttttgtaggtgagtagtaagttttaatagaaaagtaaaatagttatttgattggttatagttgggtgtttgttttatttgggtgtgagggttgggttcggtggtttatgtttgtaattttagtattttggaaggtcgaggtggttggattatttgaggttaggagtttaagattagtttggttaatgtgtttaaatttcgtttttattaaaaatataaaaattagtcggtgtggtggttggtttttgtaattttagttattttggaggttgaggtaggagaatcgtttgaatttgggaggtagaggttgtagtaagtcgagattgtattattgtattttagtttgcgtgataaggtaagattttgttattaaaaaaaaaaaaaaaaaaaaaaaaggaaaatttttaattagaggttagttggtagtttttgattggttaagtttatgttttgttttattgttgttttattgtttatattgaattttggtttgtttatatataagttttagttatagagatagatgatattaggtttatggtttttttatttgttttgatatagtaaagtgttgataatgatttttaaaggaagaaatattattattttaaaattaatatttttagtgtatatataggtaaaatattaagattttaatatatttattatttattaatttatttatttattgagatggagttgttttgtcgtttaggttggagtgtagtggtatgattttagttaattgtagtttttgttttttgggttttagtaatttttttgttttagttttttgagtagttgggattattggtattagttattatttttggttaattttttgtatttttagtagaaatggggttttataatgtttgttaggttggttttaaatttttaattttaagtgatttgttcgttttggttttttaaagtgtagggattataggcgtgagttatcgcgttttgttaaattatttattattatttttttgagatagggtttttgttgtttaagttgtagtggtatggttatagtttattgtagattttttaggtttaggcgttttttttattttagttttttaagtagttaggattataggcgtgtattattattttgggttaatttttttattttttgtagagatagggttttattatgtcgtttaggttggtttcgaatttttgtatttaagtagtttttttattttgattttttaaagtgttggatttataggtgtgatttataacgtttagtttatatatttaagatatttttaaattatttgtgtttaatttttgtttttgttttatagttattttgagatttattatttagttaattttaaaagtattgttgattattgtgaattttattaaggtttttttaagagggttttattgttttaaaattgtttttgaaatattttgttatttgtttatttgatttttttttatttttagagttttattttttgttttttcgtttgttattatattttttataagtttttatttttgttttagtatttttttttttgttagtttatatattttattaagtaaaataaaaatagtaaaatagtaatgttttttgaatttttaaattgtttaatttttagattgttttttaatttggaaaatgttttatattaagtttatttataaattaaggattggtaatttaaaaaattaaaataaagaaaggagaattggaaataaaatgaattggttgggtacggtggtttacgtttgtaattttagaattttgggaggtcgaggtgggtggattatttgaggttaggagttcgagattagtttggttaatatggtgaaattttgtttgtattgaaaatataaaaattagttgggtgcggtggcgtatatttgtaattttagatatttaggaggttgaggtaggagaatcgtttgaatttaggaggcggaggttgtagtgagtcgagatcgtgttattatattttagtttgggtaatagagttagattttgttttaaaaaaaaaaaaaaagtttaatttacgtagagttagttgaacggtagataggagtttggttatttaaattagtttattagaaaattcggagattggggtttttaaagaatgatttggcgggtagggggttagggattggcgaatgttaatttgttaggtgggaggtgaaattatagggggttgaagtgggtttttgttgttttttgttattgagtggaattgtagaatttgttgagttagattatggtttgagtggcgttagttagtgtatcggaatgcgcggtttgaaaagtatttttagtattaattttaggttttataatagtgatgttatttttgagagtaattggggaggttaggaattttatagtttttggttgtaagttttttaaattataatttttaattttgtggttaatttgttagttttataaaggtagattgatttttaggtaagaatggggtttgtttttggaaaggattgttataatttttgttttaaagtgaaattagaaattaaattttttttgtagttagttaggttttcgtttaggaatgaataagggtagttcggaagtgagaagcgtggagttatttaggttagattttttgtattgttataatttttttattgttaggatttttgtaaaggtagtttcgtgaacgtatagagataggtttttgttattatttttattttttagataaggatatttaggcgatgaggaagttttatttttgggaatagtttggatacgaaatttttatacgttagtgttttttggatattttttcgttagtatagttttgttgaatgtttttacggtggggaggtacgtgtttaaaatgcggggaaggtgtttttattttatttttggtgaaattaggggagttaatttttttaaatatgatttttggtttttttgaatcgtcggtttggattacgttttttagtagttcgtgtttaagattacgggtgtttgtaggcggttagcgtcgtttgcggcggcgtaggcgcggtgcgggcggcggacgggcgggcgtttcgtcgtttgaatggttgcgggttcgggtttttattttatttgaggttcggtcgtttaggggtgcgttatgtcgtcgggaggtgattagtcgttatcgttttcgttttttttttcggcggcggtagtttcggatgaggaggaggaggacgacggcgaggcggaagacgtcgcgtcgtttgtcgagtcgtttattttttagatttagtagcggttcgacgagttgtgtagtcgttttaatatggacgaggcggcgcgggtcgaggtttgggatagttatcgtagtatgagcgaaagttatacgttggaggtgcgttcgcgggcggaggggcgttttcggtttagttggcgtgaatcggtgtttttcgagtcgcgtcgcgcgtttcgagagattttcgggcgggttgcgggtttttagtttcgagaggggtggggattttttttgcgttatttcgaggtttttagtcgtttcgagggttaattcgttttcgtcgcgtttttttgcggttttcgaatggggaacgcgttttgttttaaagtagtatagtaaggttgagatcgcgttggggtttcgttgaggaaaatgggtgtgtgtggtttatttgatttttcgttcgttttgttagtagaatgaattagtgtcgttgttaagattatacggataaggggaggggatttgtttttatttgtatcgcgattaatcgggttgtggtatttgggtttttaggcgttttcgtttgttcgtttttttttgttaattaaattgtttttgttttggcgttgcgggcgtttgagttaacgtgttgatgcgttttgggttgtgtttacgtttgtgtaaataaattaatatttatttttttttaggttagatgaaatgagtttttcgtcgattcggatgtagatatatgtttttatttgttattaggattaggattgtggttatttcgagggttttttggttatttcgggtattgtataggatttttgttgttgttgcgattcgggtgtgttaggtcgtagttttcggatagggtttgtagatgagaaaaatggttattttagttagtgagtgttagttttgtatgtattttttttttatgggttaatgggaagtgatacggaagtacggattgtttattagttgtttgattgtgtgtgtggtatttaaatttgaggttatttgattttttaagtcgttttataattaatttgtagaaagagtcgggtaaataggtttaggatgtaaagtttaattaaggtattatttaaatatgatgtttttggttatgtgtattgatgagtgaggttatttttaatttgtatttgtattaatagaattttaatttaattattagttttttttttgaattgttaggtttgtagaagatagtgtatggtggttttagaattcgatagatttgaaatcgttggaaaagtttagtatggtgatttttaaattggagatatttgtgtttattttatagagttgttttgaagattaaataaggtaataatgtagtttttggtatataaagtatttatatggatagtgtttttaagtttattaagttttttgtatatttatatgatttggttgagtaagttatgtttttatttattttttagtgtttttttgtagtttggtaaagagaaggattggttggttttttatgttgttttttgttttttgggtttttttttggtaaatggttttaaaggtttttaaataagtttttattttatttttaagataattttgtaaattagatagaataagtattatcgttatttatttgaggtattttaatttatagtagttaagttgtatgaagtttagtgatatatgagtaagtattacgtaatagttggttagtaaattatttttgaaaatatgtttgattatttaatttttttgattattgagattttagttttagttttttagtttagtttatttagtaaatgatttatttagtaaaatatttattaaatattttttgagtatttattatttgttatatattgttttaggtgttggatatagagtagtaaatttgtttttgtggggtttatagtgaggtacgttgtgataatatgggatgttatttttatgggagtgtaagggaaaataaagtttttatgatgtttaatatagaatattggttatggaattttaatttgattttttgtattttttgtgtatttttaatttgtaatttatttttatagtttttagttaagaaaatgtagtttttgagattgttaagtaatttttttattgtgttatagttattgtatggtagagtcggaatttgaaattagatttatttgattttagaagatgtgattatgagatgttaattttgaggataatttttttagtattatggaatttttaatatatattttttaggattaaagataaattaggtatagagtttattttttgtataaattatttaaaagagtttcgcgttttattttgttatttaagtattgtaaaatttttataagattaatttttttttttaggaacgatatagttgtaaattttttattttttttttttttttttttttttttttattatttaagtagttgtgaattttttagagttaaaatagaatattatagattattttttaaattttttattgaagtagaggataatgttgtgatcgatttaattttatgttttttaagagatattgatatagtagagaaatgtagtagttatgtatttaaatttgtttttatattataaattaagaatattatgaaattattttttagagatatatgtgatatatagattttggttgttttttttttttttataaaagaatatttatgttattgatatatataagtgggtttgtaagatagtttatgtgtaaatgtgaaaaaaggaagaatttttagttttttttatttttatttagattagtaatgaatatattgaagttaaaggatattttttattttttttcgtttttatagggagaggaaagttgtattattttttgagtaaaaagaattgtgacgattttttataaataatgttttaaaaattattatttttgaatgatatttggtagtggatttataatagttttatttggttatataaataaattttatgtatttatgtatgtgttttgattaggtataaaattagtggttgaatatttatttaagtttaattttgtatttttattatttttttagattttgagtaagattaaaaatataaataataggttaggcgtaggggtttacgtttgtaattttagtattttgggaggtttaggtgggcgagttacgaggttaggagattaagattattttggttaatatattgaaatttagtttttattaaaaatataaaaaattagttgagcgtggtggtgggtatttgtagttttagttatttaggaggttgaggtaggagaatggtgtgaatttgggaggtagagtttggagtgagttaagatggagttattgtattttagtttgggtgatatagtgagattttattttaaaaaaaataaaaaataaataaaaataaataataatattgtttgtattattatggttatatagtaaattgttttaaaatttaggggtagaaagtaatttgttttggttataggttttgtgagtaaggaatttaggttggggatagtgtggatgttatgtttttgcgttaaaatgattggtattttatttggaagatttgagtaattaggtattggtatagttggagttcgttgggtatttttgtatgtttgttttatgtggttttattagtatggtgatttagggtagttaaatttttatatgttggtttaggatttcgaaggtatatgttttaagagagagaattaagtggaatttatattgttttgtataattttttagaattatatagttttatttttatttttgtaattattgatagagatagttaattagtgtgagggaacgtagatttttgtttaggtttaaggtgagggaattttttttattttttagtggaataatgttaatgttatattataagaagagtttacggggttgggtatagtggtttatatttgtaattttagtattttggaaggttaaggcggatggattatttgaggttaggagtttaagattagtttgggtaatatgataaaattttgtttttataaaaaatataaaaattagttaggtatggtggcgtatttttgtagttttagttatttgggaggttgaggtaggaggagtgtttgaatttgggaggtggaggttgtagtgagttaagattgcgttattgtattttagtttgggtgatagagtaagattttattttaaaaaaaaaaaaaaaaaaaaaaaaaaaaagagcgtatgagatagggttattattgaaattaagttttttataaaaatataaataatatttttaatttaaatatatttttaaaaatattgaaatatttatatgtagttttttaattaaaaattaattttttttttttttatagg

SEQ ID NO: 224 - DNA, 9289 bp, Artificial Sequence
  chemically treated genomic DNA (Homo sapiens)
tttgtaaaagaaaagaaaattgatttttagttaaaaagttatatataaatattttaatatttttaaaagtatgtttaaattgaaagtgttgtttatatttttgtgggaaatttagttttaatgatgattttattttatacgttttttttttttttttttttttttttttttttgagatggaattttgttttgttatttaggttggagtgtagtggcgtaattttggtttattgtaatttttattttttaggtttaagtattttttttattttagttttttaagtagttgggattatagaagtgcgttattatatttggttaatttttgtattttttgtagagatagggttttgttatgttgtttaggttggttttgaatttttggttttaagtgatttattcgttttggttttttaaagtgttgggattataggtgtgagttattgtatttagtttcgtaggttttttttataatgtgatattaatattattttattgagaggtagagagggtttttttattttggatttgggtaagggtttgcgtttttttatattgattaattgtttttattaataattgtagaggtagaagtgaaattatgtaattttaaaagattatataaggtagtatagattttatttggtttttttttttaggatatgtgttttcggagttttgaattaatatgtaagaatttagttattttggattattatgttggtgagattatatggaataaatatatagagatgtttaacgagttttagttgtgttagtatttagttgtttaagttttttaggtgaggtattagttattttgacgtagaaatatgatatttatattgtttttagtttgaattttttatttatagaatttgtgattaaaataaattgttttttgtttttaagttttaaggtaatttgttatatagttatagtaatgtaaataatattattgtttatttttatttattttttattttttttgagatggagttttattgtgttatttaggttggagtatagtggttttattttggtttattttaagttttgttttttaggtttatattatttttttgttttagttttttgagtagttgggattataggtgtttattattacgtttagttaattttttgtatttttagtagagattgggttttaatgtgttagttaggatggttttgattttttgatttcgtgattcgtttatttagattttttaaagtgttgggattataggcgtgagtttttgcgtttggtttattgtttatatttttaattttgtttaaaatttagaaaagtgatagaaatataaaattaagtttgaatggatatttagttattaattttatatttaattaaaatatatatatgaatatataaaatttatttgtataattaaatgagattattgtggatttattattagatattatttaaaaataataatttttaaggtattgtttgtaaaagatcgttataattttttttatttaagaagtgatataatttttttttttttataaaagcgaggaaggatggaagatgttttttagttttaatgtatttattattggtttaaatgaaaatgagaagaattggaaattttttttttttttatatttatatatagattgttttataaatttatttatatgtattaatagtatagatgtttttttgtaaaaaaaaaaaaaatagttaagatttgtgtattatatatatttttgggagatggttttataatatttttgatttatgatgtaaaagtaaatttagatgtataattattgtatttttttattatattaatattttttagaaagtataaagttaagtcggttatagtattattttttgttttaataaagggtttaaaagataatttataatgttttattttggttttagaaaatttataattatttggatggtggagggagaaaaaaaaaaagaaaaaaaatagaaagtttataattatatcgtttttaaaaagaagaattagttttgtgagaattttatagtgtttagatgataaaatggagcgcgaagtttttttaaataatttatgtaaagagtagattttgtgtttagtttatttttggttttaaaaaatatatgttgaaaattttataatattaaaaaagttatttttaaaattaatattttatggttatattttttagggttaaatagatttggttttaaatttcggttttgttatatagtagttataatatagtggggaaattatttaatagttttagaggttgtatttttttggttgaggattgtgagaatgagttataggttaaaaatgtatagaaaatataagaaattaagttaaaattttataattagtattttgtattaaatattataagagttttatttttttttgtatttttatgagaatgatattttatattgttatagcgtattttattgtaagttttataagagtaggtttgttgttttatatttagtatttagaataatgtgtagtaagtaataggtgtttaagaaatatttgatgaatattttattgagtaaattatttattgaataaattgggttaagaagttgaaattaaagttttagtaattaaaagaattgagtaattaaatatgtttttaaaaataatttattaattagttattacgtgatatttgtttatgtattattagattttatataatttaattgttatgagttgaaatattttaaataaatggcgataatgtttgttttatttgatttataggattattttgagggtaaaataagagtttgtttggaagtttttaaggttatttattaaaaaaaaatttaaaaaataaaaaataatataaaaagttaattagtttttttttttgttagattatagaaaggtattgagagatgaataggaatatagtttatttagttagattatgtaaatatataaagagtttagtaaatttgaaaatattgtttatatgggtgttttatgtgttagaaattatattattgttttatttaatttttagaatagttttgtgaggtaaatataaatatttttagtttagagattattatattgaatttttttagcggttttaggtttgtcgggttttaaagttattatatattattttttgtagatttaataatttaaagagggaattagtaattgaattaaaattttattaatgtaaatataaattaaaaataattttatttattagtatatatagttaaaaatattatatttaaataatattttggttaggttttgtattttggatttatttgttcgattttttttataaattaattataaaacgatttgagaaattaaatggttttaggtttaaatgttatatatatagttaaatagttgataaataattcgtattttcgtgttattttttattggtttatgaaggggaggtgtatataaagttgatatttattggttagaatggttattttttttatttgtaagttttgttcgaaggttgcgatttaatatattcggatcgtaataataataggagttttgtgtaatgttcggggtgattaaaaagttttcgaggtagttatagttttgattttagtgataaatgggggtatgtgtttatattcgggtcggcggagggtttattttatttggtttggggggaaatgagtattaatttgtttatatagacgtaaatatagtttaaaacgtattagtacgttgatttaaacgttcgtaacgttagggtaaaggtaatttggttaatagggggaagcgaatagacggagacgtttggagatttaggtgttataattcggttaatcgcggtgtaaataagggtaagttttttttttttgttcgtgtggttttgataacgatattagtttattttattaataaggcgggcggggggttagatgggttatatatatttattttttttaacgggattttagcgcgattttagttttgttgtgttattttagggtaagacgcgttttttattcggaagtcgtaggaaagcgcggcgagagcgggttagttttcggagcggttaagagtttcggaatagcgtagaggaagtttttatttttttcggggttgggagttcgtaattcgttcgagagtttttcgaggcgcgcgacgcggttcggaaggtatcggtttacgttaattaggtcggaagcgttttttcgttcgcgagcgtatttttagcgtgtagttttcgtttatgttgcggtagttgttttaggtttcggttcgcgtcgtttcgtttatgttgaggcggttgtatagttcgtcgaatcgttgttggatttgaggggtgggcgattcggtaggcggcgcggcgtttttcgtttcgtcgtcgttttttttttttttattcgaggttgtcgtcgtcggagggggaggcgggggcggtggcgattggttatttttcgacggtatagcgtatttttgggcggtcggattttaggtgaggtgagggttcgggttcgtagttatttaaacggcgaagcgttcgttcgttcgtcgttcgtatcgcgtttgcgtcgtcgtaaacgacgttgatcgtttgtaggtattcgtagttttgagtacgggttgttgggaaacgtagtttaggtcggcggtttaagggggttaaaaattatgtttaaaaaaattagtttttttagttttattaggggtgaaataaaagtatttttttcgtattttaaatacgtatttttttatcgtgagaatatttaatagggttgtattgacgagaaaatgtttaaaagatattgacgtgtgaaggtttcgtatttaggttgtttttagaagtaaaatttttttatcgtttggatatttttatttaaaaaatagggataatagtaagggtttgtttttgtacgtttacgaaattgtttttgtaaaaattttaatagtgagaaagttatgatagtgtaagggatttgatttaaatgattttacgttttttattttcgagttgtttttgtttatttttgggcgaagatttaattaattataggaggaatttaatttttaattttattttgaaataaagattgtaatagttttttttaaaaataaattttatttttgtttggggattagtttgtttttgtagaattaataaattagttataagattagaaattatgatttaggaggtttgtagttagaggttataagatttttgatttttttaattgtttttagggataatattattattgtaaaatttaagattggtgttggagatattttttagatcgcgtatttcgatgtattagttggcgttatttagattataatttggtttaataagttttgtaattttatttagtaatagaagatagtaagagtttattttaattttttgtgattttattttttatttgataaattagtattcgttaatttttggttttttattcgttaagttattttttaaaaattttagttttcgaattttttggtaggttgatttgaataattaaatttttgtttgtcgtttagttggttttgcgtgaattaaattttttttttttttttgagatagagtttggttttgttgtttaggttggagtgtagtggtacgatttcggtttattgtaattttcgttttttgggtttaagcgatttttttgttttagttttttgagtatttgggattataggtgtgcgttatcgtatttagttaatttttgtatttttagtataggtagggttttattatgttggttaggttggtttcgaatttttgattttaagtgatttatttatttcggttttttaaagttttgggattataggcgtgagttatcgtgtttagttaatttattttatttttaatttttttttttttattttaattttttaaattgttaatttttgatttataaatgggtttgatataaaatattttttagattgaggagtaatttgaggattgagtaatttgaggatttagaaggtattattgttttgttatttttgttttgtttggtgggatatgtaaattgatagagggaaaagtgttgggataaaagtaggggtttatggaaggtataatgataggcgggaggataggaaatggaattttgaagataggagaaaattaggtagataggtaataggatattttaggaataattttgagataatggaatttttttaagaaaattttagtaaaatttatagtaattagtaatgtttttggagttggttaagtgatgagttttaaggtgattatggggtaagaatagaagttgaatataaatggtttagaagtattttaagtatataggttggacgttgtggattatatttgtaaatttagtattttgggaggttaaggtgggaggattgtttgagtataggagttcgagattagtttgggcgatatagtgaaattttgtttttataaaaaatagaaaaattaatttagagtggtggtatacgtttgtaattttagttatttgggagattgaggtgggaggaacgtttaagtttggggagtttgtagtgaattgtgattatgttattatagtttgggtaatagagattttgttttaaaaaaataataataaataatttggtaaggcgcggtggtttacgtttgtaatttttatattttgggaggttaaggcgggtagattatttaaggttaggagtttaagattagtttggtaaatattgtgaaattttatttttattaaaaatataaaaaattagttaggagtggtggttggtgttagtaattttagttatttaggaggttgaggtaggagaattgttggaatttaggaggtaaagattgtagttagttgggattatgttattgtattttagtttgggcgatagagtaattttattttaataaataaataaattaataaataataagtgtattaaaattttagtattttatttgtatatatattgggaatattgattttaaaataatgatatttttttttttggaaattattattaatattttattatgttaaagtaaataaagaggttatgagtttgatattatttgtttttgtagttggagtttatatgtaagtaaattagaatttagtgtaaatagtaagataatagtaaaataaaatataagtttaattaattagaaattgttaattagtttttaattagggattttttttttttttttttttttttttttttggtgatagagttttgttttgttacgtaggttggagtgtaatgatgtaatttcggtttattgtaatttttgttttttaggtttaagcgatttttttgttttagtttttagagtggttgggattataggagttaattattatatcggttaatttttgtatttttagtagagacggggtttaagtatattggttaggttggttttgaatttttgattttaaatgatttaattatttcggttttttaaagtgttgggattataggtatgagttatcgggtttagtttttatatttaaataaggtaaatatttagttgtagttaattaagtaattgttttatttttttattaaagtttattgtttatttgtagaagcgttttgaatatttttttgttttaagtggtgtttaatttatgaattgttgtttgtttaaattgttaatttgtttaaagttttttttttagtaattaagagaaaaatttaaattgttttaataattaaagtttaattttaaattgtttaatttaaataaacgatgtgaaattatttttattatttttagtaaaagttaatgtaatttaaataattattgtaatgtaagtaaaattggtggtaataaattattaaatatgtatttattaaaatattttttgtttgttaatattaatgtttttaaagttttttgggatgggggtggggtggaatgggggtgtgagtgttacgtgaaaggagtttcgatttagattttaagagagggtttttggattttatgtaagaaagaatttagggcgagtttatagtgtaaagtaaaagaaagtttattaagaaagtaaagtgatgagagaatagttattttatagagagtaggacgttttcgaaagtaggaggaggaatgtatttattttaggtataatatttgtttataaataggatttagaaagattatgaggagatgtgttttgttataagggtttgtgataaaggattaatttttttaattattatattttgtaagaattgatattatttttaaagtaaaattaggaatgtttttgtttttaagatatcgggatattaggatatttttaagtttgggtttgtttagtaaatgttattaatgtgtttttttaattataaatatttaggggttaggaatatttaattttttaggaatgtagtttagttagttttagttttattttttttagttattatttaagatggagttattttggtttggatgtttttgatatggagaagttaaatttttttgaggttattatttgatttatgaagtttagttataaaatgtaagaggttttttatttgattggtatatgtgttttttttgttttttatttttttagttattttttatttattttttgtatttagttaatatattgtgggaaagattaggttatttattgttaaagataaataaagtcgaatattagttaaagtgtgaaaaacggattttattgagtaattattgatagatagtagggaaagagttgagttttattttaatttttttagatgtgatttggttttttaaagaaagagtaaaggaggagggggagagagtagagtttgagtaaaaaattataaaaggtgggttaatgttaatgttattaggttagttgtgtttattagttagtaattattaaagttaggttattgttttttatatagattggaagatagaatttttattttttttgatgattttaatgggagggtgggggtagggagtttaggattattttagagaattgattttaagtttttagaagtaatgtaaaaatttgattttttttttttttttttttttttttgtttatgagatatggttattttttaagtgtagaggtttggaaggagtttttatgtgttaagaattttgtagttattattatgtggataggatttaaggtttttggtttttagttgtgttgaataagttagtttggaagtcgaagtagattttttagtttttagttaaattgttttagttgatgttgtatataatagagatgaatttttttattgagttttgtttaattgaaatttgt

SEQ ID NO: 225 - DNA, 6221 bp, Artificial Sequence
  chemically treated genomic DNA (Homo sapiens)
ttgtttgtgaaaaattttttgtattaggttgattgaggatttttagaaataaagttgtttaatatttaattataatgagtttttcgtgtgtgtgtgtacgcgttatgagttatttagtatatatacgtttgtgtatgtttttgtatatataagtgtgtaaattaacgaagaggttgattaatatgtatggaataagaatagtatgtgtagggttgagaaatgagagaggatttataaattaaatgaatttagtagaggtttatagtaagaggtgataattagaagataagtatttgggggatttttagaggttttggagagagatttgaatgttaaatagttattaaattagagtttaagttaatttttagtttttagaaataagaagattttagttgatatttgggttattgggattatatgatttttttttttaggttgttgtgaggttgagagataataatatgtgtaatgtttttagtataatgtttaatattaatttggtatttagtaaaaaattgaattgaataagcgaggtattttatgttatagttttttagaagataaaaatgaagaagtagtttatatttgtaattttagtattttgagaggttaaggcgggaggattttttgagtttaggagtgtgagattagtttgggtaatatagtaaggttttattttttaaaaagagagagttttgaaagatttgtaaaggtagaggggagtggtaagggtagtttaggtgagtagtatataaagagttgaggtgtagagttaagaatgggtggtatgaggggggatatttatttaattgaagattttttaatagtatttaagaagagaaattgtaaggatgtgtttgtaagaagatagaaatggtcgggcgtagtggtttacgtttgtaattttagcgttttgggaggttaaggcgggtagattatttgaggttaggagttcgagattagtttagttaatatggtgaaattttatttttattaaaaatataaaaaatagttgggtgtggtggttagtatttgtaattttagttatttgggaggttgatatataagaattatttgaattcgggaggcggaggttgtagtgagttaagatcgtattattgtattttagtttgggtaatagagttagattttgttttaaaaaaaaaaaaaaaaaaaaaagagagagagaaaagaaaagaagaaaatagaaataagtttgggaggttgattagagattggtttgaaaatagggagaaagagggtagaaagtatattgaattgtgggtttttattagggatttatgtgattttaggtaatattttttttttttaggtttgtaaagtgatggaggtgtgtttttattgttaaaggtttttttagatttattggtttgatgttggggtaatggagagttaaagaaggtttaggagtagtgagattgtaggatagggatagttgttatttaaatagtttttgttatttgttgttagtttgtagtttgggttgtaggtgtagtggaatatggtttaggtattgatatattggtgttggtaattatgtttttttttagtatattggtttttttttgaggatatataggattagaattagtagggaatagatgggtagaagtttttaataagagagagttggatggggatggggttagaggtaggtattatttttaaatggtttttagaaggaaatgattaatttgagaagggtcgtattaagtgagagggtttagggaaagaataaggtttaaggagtttttgtgagtaggtttagaagaggagatatttaattagatacgttagtgggttgggataggattatataggggtaggagtgggtaggaaggtggagaggtgttaagtcgaggtgggcggaataaatttaaaatagattagaatagattttgtagtatttgtgggaggagttaagatgataatgggagaagttatttttatgtgggagggttacgattttttggagtagtcgattttttttagttttgagaattattggtttcgtgtgtgtagggggttggtgttggaatttgatattaagtttgtggtaagttgtggcgggtagggtaagaaattataggttgttttttgttgatggaggttgagtagaagtggttagagttgaaatttgatatagtttgcggtaggttagggtaattttatttggaaatcgcggggttatttttacgggatgggatttattgtggtgggaaaggaatttaagtatttggattgagagttcgagttttattttagcgtttttttaatttattatatagtcggttttggaattgtaggtcgaatttttggatgaggtcgaaggattttacgaggaagacgtgttcgtttagcgggggcgatgttatggcgcgtagggagtttacgttcgcgcgttgtatttttatcgcgtaaattttaatgtcgcgggcgcgcgtttgtgtcgttatttcggttacgcggttttggggtcgttcgtttgttacgatgatagcgatacgcggtacgcgtttttttggcggtcgcgcgttttcggttatattgaaggttacgtttatggcgtattggattgttagtttcgttatggtgttttgcgttagaggtattaggtcgcggatggcgcgttttatgttttcgcggcgagagaacgcgcggagagggaagacgttttgtatttgattcgaatattggattacgttaacgcgcgtggcgttgggatttacgtttaggtttcggaggaggtttatgaggaattgtcgtatggtttcgaattcgaaagggcgtacgttgcgggagttgttaattacgaatattagatttaggggtttagtgtgatatttgggatttgcggggagattagggaggatttttttaggttagtaaagttttattttcgaggagattttttaggaaatttaggggaaatgtcgttatgtcgatataatagcgtttagtatagtaaacgtagattagatagatgtattcgttcggtatgtgtttagtatttgggttaggagattttataaatttttttattttatagatttgagggttattttgaggcggtattatttattgacgagggggtaaggaagcgtcgtaaatttaaagtttgtagggattaggtagggaatatggatgaattggttgggttaggacgttggagatttaaagagtttttattatttttaaattgggtaggtagttgtatttaaatgaggttatgtttttgcgaattggatgttagtagatttttggttttttaagagaaatattaaatagggatttttatgtaaaattttttggtttttttttatgtttttaaataatttttttaaattaaatattttatgggtagttttgtatgcgtttaaaattaagttatattttatagatgaagaaattgaggtttagaaaggtgaagtggggaatttaaatttagttttatatgttttaaagtttttgtttttttttttttagtaggaggagttggttgtagagggaggatttgttttcgtttttttttttttattggtgagggttgggttttagtttatttgttaattggagttgggttttttagggttgaagaaggagtagtaatacgggttagtaaagaaggttttttatggcgtttggggatagagaatggaggtgttagagtttggagggaggaaggaaaatagaaaagtaatagtatttatagagtttttattttgggtgataggtatttggagggggaagatagttataggtttattttattaatttttttatttttgtgtatgtttgaaatgttttagaattaaaaaatttttattatagtgggattgttgggaaatataagagattttttttttttttttttttagatagagttttgttttgtcgtttcggttggagtgtagtggtatgatttcggtttattgtaatttttgttttttaggtttaagcgatttttcggttttagtttttcgagtagttgggattataggtttttgttattatatttggttaattttttgtatttttagtagagagcgggttttgttatgttggttaggttggttttaaatttttgattttaggtgatttttttatttcggttttttagaatgttgggattataggcgtgagttatcgcgttcggtttataagagaatggtaaataagaatagatatatagatataaatatgtaaaatttaaatagaaaaaaataggttttttttaaatgttaggtatagtgttaaatgttttttacgtattgtggtatttaattttttttgtaattgtaagattaaggttgtgattgttttttattatatagataatgaaattgaggtttagaaaagttaagcgttggtatttaaagttattcggttaaaaagtggttgcggtaggatataattttacgtttgttagtttttgtgagttagtttgggcgtttggtgtttttttttttgttaggcgaatttttgtagatagaagtttttttttatttcggtttatttttttacgtatataggtttttgtgtggttgtttttgtaattcgttaatttttttagatttttttatatatataaatatagatatgtattgtttaatcgtaggcggtagggaggggttgcgttttgttgcggggttgagcgtggtggcgtggtagcgagtggattaaaatttattgcgtacgagaacgcgcggtttggcgtttgtttttcgtttgtttttaggagcgatcgttagggggcgttcgagatggtagggggcgtgggaagtttatatttgtttagtaggtgcgtttatttcgagtaaatagggggtcggggttcggggttttggagataaggtttggataggatataattcgcgtaagagtcgaggagtaggggtgtgtagggttttagcgatagtagtattggattcgtttagagggcggcgggtgagcggttggggtttcgtggagttattatggatttcgtaggggtagtaggtgagcgtttattttttcgaggtttcggagacgtttcgtgagaattacgaaggattatttttttattttttttttattatataaataggaaaattaagttttaaggaggtagttcgtcgaattgtaaaagtaggattagaatttagggtttttggtttttttttttttttttgaggttttttggcgtttagaatttattaaattttatttttttttagtttttattttatcgtcgcgttttatgttgaagttgtgttagttatttttttgttgttgttttttggtagagagggttagttgtttttaatttaatagtagtttcgttttcgttttttaatttcgtgaatgcgtttattttgagcgaggttagtgtttgttttttattttaggcgatttttttatttcggattttttttttttttttttttttaggtttggtagaagaatataaattttttggtagggttcgtcgtgggagggtgattaagtaagatgtggtagcgttggtggaagtgggagggcggggaatttttgttaagtttgggttataggtaaagttaatatttttggatagtatgagggttaaggtataaggggtttttgttattttttatatttttttattcggagatgtttttgggtttttaaattttggttaaggttttttttattttatttttggtttgagttaattttttatttggtattttgtttttattttaggaattttagaaagttaaaatagtaaatgttttaaagtttattatttttttaaattttttattttataaagaaaggaattaggtttagagagggtagtgttttgttgaagggtatatggcgatgtcgtggtaggattgatattagaatttgggatttttttgaggagttaatttttgtattaaaaaaagaaagatttagagatgttttgaggtgaggttgagggagtggagtagtaagggaggagaggtttgtaaataaatttttaaaagttttttagggatattttagggggtttttggagggatgagagtagaaaagggatgattttattttgatggttttgagggtgggggttcgatttggaaaggattttgtagaagtggggaagggtattgtaaattagatagggtattttaggtagcgtttttgttaaaatatattcgtttgatttggtttgatgtttatttttttgtaga

SEQ ID NO: 226 - DNA, 6221 bp, Artificial Sequence
  chemically treated genomic DNA (Homo sapiens)
tttgtaggggagtaggtattaagttaggttaggcgagtgtattttagtagagacgttgtttagggtgttttatttgatttgtagtgtttttttttatttttgtagggttttttttaaatcgagtttttatttttaaagttattaaaataggattattttttttttatttttatttttttaggaattttttgaaatgtttttaagggatttttgagaatttatttataggtttttttttttttgttgttttatttttttaattttattttagggtatttttgaatttttttttttttaatgtaaggattaattttttagaggaattttaggttttagtattagttttgttacgatatcgttatgtattttttagtaagatattattttttttggatttagtttttttttttgtagaatgaggggtttggaaaggtgatgaattttgaggtatttgttattttgattttttaggatttttggggtggaggtagggtgttaggtgagaagttggtttagattaagaatgggatgaggggaattttaattaagatttaggggtttagaggtattttcgggtaggaaagtatgggaggtggtagaggttttttgtgttttagtttttatgttgtttagggatgttggttttgtttgtggtttaagtttgataagggtttttcgtttttttatttttattagcgttgttatattttgtttggttatttttttacgacgggttttgttagaggatttatgtttttttattaggtttgggaggggaaaagggagaagaattcgggatgagaaggtcgtttggagtgagaagtaggtattggtttcgtttagaataggcgtatttacggaattggggggcgggggcggagttgttgttgggttaggggtagttggttttttttgttaagaaatagtaatagaaaaatggttaatatagttttagtatggggcgcggcggtggggtaggagttggaaggaaatgaggtttagtgaattttaggcgttagggggttttaagagagagaaggggaattaggagttttaggttttaattttgtttttgtagttcggcgggttgtttttttggggtttagtttttttatttgtatagtggggagggggtgggggggtggtttttcgtagtttttacggggcgttttcggggtttcgggagggtaagcgtttatttgttgtttttgcggggtttatggtggttttacggggttttagtcgtttattcgtcgttttttggacgagtttagtgttgttgtcgttggaattttgtatatttttgtttttcggtttttgcgcgggttatattttgtttaggttttatttttaaggtttcgggtttcggttttttgtttgttcggggtgggcgtatttgttgggtagatgtgggttttttacgttttttgttatttcgggcgttttttggcggtcgtttttgagagtaggcgggaaataggcgttaagtcgcgcgttttcgtgcgtagtgggttttggtttattcgttgttacgttattacgtttagtttcgtaatagggcgtagtttttttttgtcgtttgcggttgggtagtgtatgtttgtgtttgtgtgtgtggaggggtttgggggggttggcgagttgtaaagatagttatatagaagtttgtgtgcgtaggggagtgggtcgaggtggggaagggtttttgtttgtagaggttcgtttggtaggaggagaggtattaaacgtttaggttggtttatagaaattagtaggcgtgggattgtattttgtcgtagttattttttggtcgaatgattttgggtattagcgtttaatttttttgagttttaattttattgtttgtatgatgggggataattatagttttagttttataattgtagagaggattaaatgttataatgcgtgaagagtatttaatattgtgtttgatatttaaggaagatttgtttttttttgtttaaattttgtatatttgtatttatgtatttatttttatttattatttttttgtgggtcgagcgcggtggtttacgtttgtaattttagtattttgggaggtcgaggtgggaggattatttgaggttaggagtttgagattagtttgattaatatggtaaaattcgttttttattaaaaatataaaaaattagttaggtgtggtggtaggagtttgtaattttagttattcgggaggttgaggtcggagaatcgtttgaatttgggaggtagaggttgtagtgagtcgagattatgttattgtattttagtcgggacgatagagtaagattttatttaaaaaaaaaaaaaaaaagaattttttgtgttttttagtaattttattgtgatgagaattttttaattttgaaatattttaaatatatataaaaatagagagattagtaaaataaatttgtaattgttttttttttttaagtgtttattatttagaataagagttttgtaaatattgttgtttttttatttttttttttttttttaggttttgatatttttattttttgtttttaagcgttatgagaggttttttttgttggttcgtgttgttgttttttttttagttttgggaaatttagttttagttgataggtgaattggggtttagtttttattagtgggaggaggggagcggaagtaggttttttttttgtagttagttttttttgttggggagagggaagtaagggttttggaatatatgggattgggtttaagttttttattttatttttttgggttttagtttttttatttgtaggatgtggtttagttttgggcgtatgtagaattgtttatggggtgtttaatttggaaaaattatttgaaaatatggaaaaaaattaggaaattttatataaaaatttttgtttagtattttttttgaaaaattagggatttgttgatatttaattcgtaggggtatggttttatttggatgtagttatttgtttaatttaggagtgataggggttttttgggtttttagcgttttaatttaattagtttatttatgttttttgtttggtttttgtaggttttgagtttgcgacgtttttttgttttttcgttaatgggtaatatcgttttagaatagtttttagatttgtaagatgagggaatttgtgaaattttttagtttaggtgttaggtatatgtcgggcgagtgtatttgtttaatttgcgtttgttgtgttgggcgttgttatgtcggtatagcggtattttttttgggttttttagggggttttttcggaggtgaggttttgttgatttaggagagttttttttgattttttcgtaggttttaggtgttatattgggtttttggatttggtgttcgtgattgatagttttcgtagcgtgcgttttttcgagttcgagattatgcggtagttttttatgggtttttttcgaggtttgaacgtgggttttaacgttacgcgcgttggcgtgatttagtattcgagttaagtgtagagcgtttttttttttcgcgcgttttttcgtcgcgaggatatggagcgcgttattcgcgatttggtgtttttggcgtaaggtattatgacgggattggtaatttagtacgttatgaacgtggtttttagtgtggtcgagggcgcgcgatcgttagaggagcgcgtgtcgcgtgtcgttgttatcgtgatagacgggcggttttaggatcgcgtggtcgaggtggcggtataggcgcgcgttcgcggtattgaaatttacgcggtgggggtgtagcgcgcggacgtgggttttttgcgcgttatggtatcgttttcgttagacgagtacgtttttttcgtagagtttttcgattttatttaggagttcggtttgtagttttagagtcggttgtgtggtgagttaggagggcgttggagtgaagttcgaatttttaatttaaatgtttggattttttttttattatagtaaattttatttcgtgggggtggtttcgcgatttttaggtagagttgttttgatttatcgtaggttgtgttagattttagttttgattatttttgtttagtttttattaataaggagtaatttataattttttgttttattcgttatagtttattataggtttaatgttaaattttagtattaattttttgtatatacggaattagtgatttttaaagttaagagggatcggttgttttaaagagtcgtggtttttttatatggggatgattttttttattattattttagttttttttataaatgttgtaagatttgttttgatttgttttgagtttatttcgtttatttcgatttagtatttttttatttttttatttatttttgtttttgtgtagttttgttttagtttattgacgtgtttaattgagtgtttttttttttgagtttatttataggggttttttaagttttattttttttttaagtttttttatttggtacggttttttttaaattagttatttttttttgaaagttatttgagggtgatgtttgtttttgattttatttttatttagtttttttttgttggaggtttttgtttatttgttttttattgattttagttttgtgtgtttttagggaaggattagtgtgttgaggggggatatggttgttagtattaatgtgttaatgtttgggttatgttttattgtatttgtaatttaggttataagttagtagtagataataagagttgtttggatgatagttatttttgttttgtaattttattgtttttgaattttttttggttttttattgttttaatattagattaatgagtttggaagggtttttggtagtaaaagtatatttttattattttataggtttaagaaagaaaggtattgtttggggttatataagtttttggtgggagtttatagtttagtgtgttttttgttttttttttttttgtttttaggttagtttttaattaattttttaaatttgtttttgttttttttttttttttttttttttttttttttttttttttttttttttgagatagagtttggttttattgtttaagttggagtgtaatggtgcgattttagtttattgtaattttcgtttttcgggtttaagtgatttttgtgtgttagttttttaagtagttgggattataggtgttggttattatatttagttattttttgtatttttagtggagatggggttttattatgttggttaggttggtttcgaatttttgattttaagtgatttgttcgttttggttttttaaagcgttgggattataggcgtgagttattgcgttcggttatttttgtttttttataggtatatttttatagtttttttttttagatattgttggggggtttttaattaggtgggtgtttttttttatgttatttatttttgattttgtattttagttttttgtgtgttgtttatttgagttgtttttgttatttttttttgtttttgtaaattttttaagattttttttttttaagagatagggttttgttatgttgtttaggttggttttatatttttgggtttaagagattttttcgttttggttttttaaagtgttgggattataggtgtgagttgtttttttatttttgttttttgaaaagttatggtatagaatatttcgtttatttaatttagttttttattgagtattaagttagtattagatattgtgttaggagtattatatatgttattattttttagttttataataatttggaaaaagaaattatgtaattttaataatttagatgttagttggggtttttttgtttttagaaattaaaagttggtttgaattttgatttgatgattgtttaatatttaaatttttttttaagatttttggaaattttttaagtgtttattttttggttgttattttttgttgtgagtttttgttaaatttatttgatttatggatttttttttattttttaattttgtatatgttgtttttgttttatgtatgttaattaattttttcgttggtttatatatttgtgtatgtaggggtatatataagcgtgtatgtgttaagtaatttatagcgcgtgtatatatatacgaaaaatttattataattgaatattagatagttttgtttttgaaagtttttagttagtttagtataagggattttttataggtag

SEQ ID NO: 227 - DNA, 14919 bp, Artificial Sequence
  chemically treated genomic DNA (Homo sapiens)
  unsure 614, 662: n is a or g or c or t
ttttgtttttttttttttttaatttatttttatttattttaaaagaaatacgggggggtatttatttttatatattaattcggagaaaattgatattttacgatattatgtttttttgtttaagtatatatttgttttattttgtttggattttattttttatattttgagaagttttttaggattttatgttttttttggtttgttttttgagatagggttttgttgttttgtttaggtcgaagtgtagtagcgtagttatagtttattgtaattttcgttttttgggttttatcgatttttttattttagttttttgagtagttgggattataggtgtttgttattacggttggttaatttttgtatttttagtagagacggggtgttattatgttggttaggttggtttcgaatttttgattttagatgttttatttgtttcggttttttaaagtgttgggattataggcgtgagttatcgtgttcgttcggttttttaagtttttttgtgggagtataatttggtataataattttggaaaattggtaggggtttattaaaattaatatgtatttattatatgatttagtagtattattttggggtgtanattaatagatataagtgtttataattattaaaagacggataattatgnggatataatttaaatatttattaatagtagattggataaataaaatgtgttatatttatataatggatttttttttaataatgaaaaagaatgtattattgttatatagtacggatatgatatatataattgttaagtgagaaagttatatttaaaagagtatatattgtatgaatttatttatattaagtttaaaaatagatataattaattattgttaaggaggttagaatatcgggtgttttttgggggtggatattgattagaagtagtttcgaggtagttttttgagtggttggttagaagcgttttgtattttaattcgggtagtgggttataaagattttttttgatgatattttgaagaggtttttttgagttttgttttttattaggttttagttttggtttgtaattattgtagatattgagtatatattattttatttatgttttatattaatagatttaaataaatattagtatgtttttaggatgatgatttcggttatttttagttattgtttgggaaagtttaagaatgttaaaataatatatgtttgttttagttttatgaatttatggtgattataacgtttgattttattttgaaattgttgttaattgtatttatttaatttaatgatgggtgttttgtttttttaataataaaaaaatattttatggagtaattttatttttgattttttatttttatttttttatattttgcgattatagatttagaatatatttatttgttaattagatttgttttttttttggaggattgtgattttttaattgttgtattattaaaaaatttttttttatatgtttaaggtaagttttttagtattaatagttttaaaggttttaaaggttttttgtttttttagattagtgtttattgttttataatatatatttgtaatattttttttagtaggttgaagtgaaatttataatttattttatatgaatatttttaaataaataaaaattatgttttaatagtaatattaagaattaaaaagaaagtaatttttaggaaaataatatcgattatagtatgtaaatgtttgggtataattatattaaaagatataatggggttagatgtagtggtttatgtttataatttcggtattttgggaggttgaggcgggaagattatttgagtttaggagtttgagattagtttgggtaatatagtaagatttcgttttttaaaaaaaaaagatataatgggttgggtgtggtagtacgggtatgtagttttagttgtttgggaggatgaggtaggaggatagtttgagtttaggaggtggaggttgtagtgagttgtgtttatgttagtgtattttagttttggtgatagagtaagattttgtttttaaaaaaaaaaaaaagatataatgaagttgttagatgtttgtatttgtatttagaattagtgtgaatgtaagtgttgtaaatgtagtttgatattattgtggttttttgtttgtttgttttttgagatatagttttgttttgttatttaggttagaatgtaatggtgtgatttcggtttattgtaatttttatttttttagttttagcgattttcgtgttttagttttttaagtagttgggattataggagtatattattacgtttagttaatttttgtatttttagtagcgatagggttttattatgttgtttaggttggtgttgaatttttgattttaggtaatttattcgtttcggttttttaaagttttgggattataggtgtgagttattatagttggtatattgtgttgtattgatgagttgttagagttataattttttaatttttaaaatattttttaataaaagtttgtttttaatttatataatatttgtatttttgggaaatttagtatatattaaaaattatataaaaatattttatatttatatatgaaagggagttgtgttttaattatatattattaaaataggtattttaattatatgaaagtgaatgtttgatgagacgtttgaaggttatgaggatgagggataatttttgattgtgtttttttttattttaaggatttgttgtttgttgtttttttagttggaatgttttttttttgaatttttttgtgaatggtttttttttttttttttttttttttttgagacggagtttcgttttgtcgtttaggttggagtgtaagtggtatgatttcggtttattgtaattttcgttttttaggtttaagtaattttttattttagttttttgagtagttggggttataggcgttcgttattacgtttggttaatttttgtatttttagtagagacggggtttattattttggttagattggttttgaatttttaatttcgtgatttatttgttttagttttttaaagtgttgggattataggtatgagttattgtcgttggtcggtttttttttaaattgaggatttagtttaaatgttatttttttagaattttttttttttttagttattttttattttgaaatttttttagagaattgaaaatgtttttcgtttttttgaaatgtatgtatatattttaaaaagttaaataagttttttgttagttttgcgtttttagaaggttttttttgcgggtttcggagttattttttggaaatgtgaatattaaggatggtgttttatgtttttgtttttaggagggtttaagttttggtttttggttttaagataattttttattatttttttttggataaagataattaataggtatgtaatggattgtacgtgtttgattatatgaaaaggtgagatttttttttttttggttagtgtattttttttagtggattgtttgtgatgtgtattatggtacgttttagtatatatttaataataaaattgttttatttttttgttgtatattgcgtatttcgtggaaagaatagtttggggttggtaggatattttaaattatttgtttatatgggttttttagttttgggtatttgtatggtaggttgatattttttattattttttcgtattaattttaattagtaagggataggggtaagggtatggagttttggagttagataattttggttttaaattgtgttttttattagtattttgaagtattgtatgttgaagtaatttttttgaatttcgaatattttatttataaagttaggaataataaatacgttatagattaagtatggatattatttgatgtatagtaggtattatttaaatgaaggaaacgaagttattttaggttttttaatgtattaaatgtgtgttttattttcgttttttttggtatttgtgtgaaattttaggatatagtgtttattaaattttagtgtattgtttaatgagataacgaattttaagtgcggattttttgagtttaaacgggttttagtaggtaaaatacgtaaagtttatagtattttcgtaatttagatggaggaaaaaaaattagtcggggggggggttttcgtatgtaaatataggaattatagaagaagataggattttcgtcgtagtattatttttttttatagggcgtaacgtttcgtcgttggcgcgggggtggagatttgtatgtgcgaagtcgggaagagggggaattatttttcgaaaatttcggtcgtcgtttttttaggtcgggagagtcggtttcgcgcgtttttaaaagttttttagcggtcggttttttttacgttattcgtattttttcgttcgtttttgaattttaaattatattcggaagaataatttggaggagggggattttttaggagttagcggtttttttacgttgttagtcgttatttttcggttttcgtcgttttttgcgttttcgaagtttattttaagttttcgttttttcgatttttttttaagttagtcgtcgtagtaagtcgggggcgtatgcgtgggggtcggcggggagcgtgcgcggggataggtaggggcggggcgttgggggcggtcgcgcgcgcggcggtcgcgaggtcgtttcgtttacgttttcgggtgagggttgttgcgtcgggtttacgttagtcgcgggaaatttttttttcgttaggttgttcgtttttcggttgggttagtattcggtttttttcgtttcgttttttgtttttggttttcgtacggtggacggcgacgttgggtgattcggggtgtaagaatttaggggttgggaaggtgtgagtcgtaaatttagcggagggcgggaagaaggaggaggtttttagggtggtcgggggattgggggtttcgtcggtagaggtttttcggttttttgattgattgattgcggtcgttttcggtaggacgttgggagttgtttgcgggaaggtgcggggagcggacgtatggttttcggtgagtgtttatggggcgcgggtttggttcgggggaaaggagtttttttgaagggggttttgtcgtagtgagtttagggagtttagtttttgttggggcgcgttttgtttttaaaattttatatggtaaaattgttagtttttaaaaaagttatttgttttagggtttgcgtgtagaatttaagttacgttttgtaattcgattttgttgttatagtaggaattttagaaatttttaacgatttgattttaggattagggaagttataagcgaattaaaggaggacgaagagtttttattaaaaatgtatatgtattgaagatggtggttttatgttttagaataggaatgaggaatttttagatttcgggtaagttttttttttttttttagtttaattttattaaatgtaaagaggtgattttttttgtattgatagttgtataaaatgtgttacggttttaaaaattattcgtggtattttaatacgaattagaaaattcgtggtattttaagtgttaatgttgtttcgattaagtgtaggtcgggcgcggtggtttatgtttgtatttttagtattttgggaggtcgaggcgggtggataattagaggttaggagtttgagattagtttggtaaatatggtgaaatttcgtttttattaaaaatataaaaattagcggggcgtggtggcgcgcgtttgtaattttagttattcgggaagttgaggtaggagaatcgtttgaatttgggaggtggaggttgtagtgagtcgagatcgcgtttttgtattttagtttgggcgatagagggagattttgtttttatttaaaaaaaaaaaaaatgtagtttttattgtgagataaagtttaaggtttttaatttgacgaatagagacgttgaattttttttttttttcgttggaaataaggggaaagaggagttttagaatattcgagttttaaaataatgagtaggaatgaatataattttattatttatgtgattatatatttttttttaataaatgttcgatttttttttttgggggggaataagtttgtaagaaatattgtagagtaagaaagttttttatatatatagatgtggttggggttgtttggagtttaaggttgagggggacgggagagtcggggcggggggataaattaagtagtttggggtcgagttggttttttattaggattttggtaaggtgagtgggggatattttttagatagaggaagtagcgtgagtaaaggtagggagggttaaatgtatgttaaatgttgtattaagagaatgaagagggggtttcgtttatgaatttgatttttatttttaaattgtttggtttagtgatttttagaagtaggttgatgtttagtagagatgaggaagtaggaagtttaaagaatttttttaaaaggttgagtagaataatgttatagttattgttgtaggtagaaaaggaaattggggtgttttatatgatatttgattttagtttgtttgtggttgtgagaatattaagtgtagtttaaaatattttaattttttttttttttatttaagtgatattagatttttagataatcgtgtaaatttatgaatttaaagtatgtgtagattagaagtgttaagatgattttaaatattttgttaatgtattggttattagaaagattttgtttggaagtaatggagaatgtttagtattataagtaagtttaggtttttggcgatttaattaaattttattgatatattgtatgaatttaatatttttaatttttttagttgagagaggaaataattatttttatatagagtattgtaagatttataggattttaaaatttgatataatttaaatttgtttattgatattgtattttgtgttgttgtgaggaggaaggattttttaaaagtaaggaggaaatgtttaaagaaatggaaagttttaaaggtttagaagttgaagggtgattaatttttttttttttttttttggttttttttaagagttgtattaaaatgggattatttaaaatgtaataagttatttaaattgtaatttagttgttagaaaattgttaggtttggaataaaaaaaaaaaaatgtttataggaatttgtgtatttttttttaatttgttataaagattttagagaaagaaaaagatttattaataaaattttaaatttttattttgttttgaaatagtaatttaatcggaagagtgattaaaaaaaaaaaaaaaaagaaattgtttagttttttattgtttagtttagattttgtttgtagtaaggtagtattaaaattttagaaagtaatttttatttattacgaagtatttaagagtatttttttattttttattagatgttatatgtaaataggtatatgtagttgaatatgtgatagttataatgtaaaagtaatataaattataattttataagtaaaattatgtaagttagaatgtagtttaaaattatgtatataatatgattttaaattttgtttagataagttagtagattaattaggattttatagtttgtattaagttgtttttcgttgttttttaaaaaaattatattttgattatagttttttgatataattaataatagatatagtgaagaaaaatgtttttaaatttatttaaggtatgtatagtaggtagttgttgtttttgtatatttattttatttaatataagtaaaattagatattttatgtttgaatttaaatttttttattgttttagtaaaaagagtaaaatgtttttgtgtggtatatagttttgttaattaataattagtgttgtttttggtaaaatgttttaaaatttagataatttatttttttttatattttttttagtatggtttttttgtgttatataataggaaggaagtatagaaatgaattgtttttgtaaattttattttttattaattatttgtagtgtgaattttaagagaattgttgtttttttcgattaaaggggagaaatggaagtaagtgtgaggtaatttaatttttaataatagagttggaagttaggaatggatagttatagtaaatgatttttttttttaagtaaaatgttatatatgagtatgaatgttttagaaatgtaatatatgaaaaaatagaaataataatggagttaaataattaaggtgacgtatgataggtatagataaagggaatgagttaatgtaatgattagggaggagttagataatgaattataattaggaatatttaggttatgtatagtattttttttaaatataatttaagggatttagaattttattttgttttaatttttttttatatgggttttttgaaaatgattttgtttgtaggtatatgatttaaatattgtatgggataaaattgtttttttgaaatttatatttatttgggttttttttgtttttatttttaaaatagaggtgatttggttttgttatttgtttttaattttaatatttgtataatttaggatagtttttaaaatttatttattttattttggtacgtgtaagagtttttttaagatttatttttttttttttttggtaatagaatttttattgttagaattttttatagtttttattttgtagtgtataaattagttgaatatttatttgaaaattttttttttttgatttttaaggtttagttgaaagttagtttgatgtattggagtaataaagttagtttgatatattggtatagtttttggttgatgagagatttagtttgaggaaaaaaataatagattttattttttttttttttaaattgagtagaggtgatatttggaaaaatatatattgttagttttattggtttttttaggttttaggtaaagtttgttatcgaggatttttatgagagatatgtagtttagttagttatttttaattgtggtgttgatatattggtgtgataattatttgtgtgatgtgttgtaagagttaaaatatttgtgttgtaaattatttattttttaaataaatgaaagtatttgaaggttatttttatattgttatttttttttgtttgtatttgaataaggtttttttttaagtgggagataaatataagtttaagttataagtagttagaattgttttgtttaatttatttacgttttagtttatatttgtatttgaatttttagattattttttttaatatgtgtattgttgtttttattttatgttttaagataattatttttaattaggagtgtgttagaattttttggaaggtttttttagtaacgtgtatttgggttttaaaaattatgaagatttttttattttttaaatattttaagtggggtaaggatatgtatgttttgaaaaaattatttaggtgattttgatgtatatttttagtatgaattttgttttagggatttttttggatttaaatatttatttggttatattaggatgtattatttttttaaattaagttgtatttattttagattgtagattatgtgttgtattagttattatttttagttgtttttatgtttgttttttaaatttggtattgttatattagtatattatttataatttatttttattataattttatataatttttaattttagttttattatgtgtaagatgggataataatttttattattttttaaatggagattaaagttaagaggattaaatgagaaatgtatataaaggggttttaaaataatgttataattataataattagtttttttttttgtatatttgatgttggttgttaattttagtaataaagtgtttgttaataatgtgtttattttcgataatttatgatttatttaaatattttaatgtaatttttttattttaaaagtttatgttttattagataggtattatgttttaaaatagtatttttttttgtttaagcgtaaataaaaatatagatatattttataaatattttggttgtattttagaagttattttgatgtatattagttttttaaaatattatttagaatataggggttagttttagttttgtatagtgttgtttaaagaaaaatatagtaattaatttgtttagagttaattttggagacgttttggtgttttttaaaattgtggcgatttgaggttattttagttaagagtatttattttttttataattttttgatttatgttttatttttttgtattttatagatgattatattttaatatattttatatttaggaagaatggtattgtgtaaagtatagtattgaggaaggagataattggtgtattgtattgatgtattatataaatgatttatagttgggaagttttttaaaaattataaatatagataaattaaaataggaatgagtatgaggaaatattgaggtgtagtaattttggtatttataaagtattatttttttttttttagtagtggaatttaattaaaaaatttgattaattatttatatgattatttaacgtttgaataatttgtataaataaaagattttaagattttttagttatttatttaatagatgtttaatgaatatttttgtataaggtattgatgagttaaatataatttttgtttttaagtagtttgaagaaataaaataagtagttttattttaagaagaaataagacggtaagttttttttaaattatagttatttggaataattgttatatatagaatattatggtagtttaaaggaggggagattatttttagttgggggaatgtagagtattatagtatattgtgttatttggttgtaatattttatatttttttagtttgttaatttttattaattaagagtttttgtagtaggaaaaataaattttaaggattttaaatatttaatattatatgataattgatatttatgtaatttttattatttaaaaatatttaatttttttaataattatttttttgttttttttgtaaataatttaaagaagtgttatgtaattaatgaagttttgggtttttttgttgttgtttttgtgttttgtttgtttttttttttgagacggagttttattttgttatttaggttagagtgtagtggtataattttggtttattgtagtttttattttttgggtttaagtaatttttttgttttagttttttaagtagttgggattataggtgtttgttattatatttcgttaattttttgtatttttagtagagatggggttttattatgttttttaggttggtttggaatttttgattttaagtgatttatttattttggttttttaaagtgttgggattataggtatgagttattatgtttagttttagtgaaatatttgaatgtttattatgaatttagtagttttatttatattttttttttttaaagttaaatatttattattaacgatgttattttatattagttttttattaagatatttttaaataagtagtgggtagggatttatttggtttttattttagttatataaattatttaaaatgtgatttaaaaagtaatgttgattttaatagtttttaagaggaaaatatatttttttaaatatttttataaggatatataagggtatgaaatatttgaaattgtaatgtgaatttgaaatttttaaaatatgtaaggataaaatcgtgaaatatttatttgtatattttatgtttttgagtaaaattgaaataaggattatgaatttgtttaggttaaagttagttttttttggttttttattttttgaataaataaataggtagtagatttaaatatagggagtttatattatatagaataaaattgaaagttatagtaatattttatttagtaatttaaagtagaagttatggaattattaatgattttttaatttttgagttattagtgattttttaattttttttaattttattgtttaggtattaggtgttgttaattttattttttaaataattttttatttattttattattgttatatattagagatatttttattattgtttatattattatagtggtttttaaattgatgatattgtttttttttttttatttgtttattgtgattaaaatttttattttaaaatgtaaatttgattatgtgatttgtttgtattaaaatatttattgattttattatatataaaatgaaatttatattgttaagtgtgttttgatttttagttttttttttaagagagaaagtgtgttttatttatattggtgatttttaaataaatttttttttgtggatatattgtttttttttttttagaatatttattttttttttttttatttttttcgtttttttgttttattaatcgttttttttttattgatatagttgggtatttttgattttttcgtttttattttcgtagaattttgttagtgttttttttttttttgtagtttaataatatatgttgtttgttttgtttttttataaggttttttagagtgatagttgggatattattatagtattattaaattattgtttttaagaaagtatttgaaataatagatattatttttttttattttttatttttttatattttaagttttagggtatatgtatatatcgtgcggttttgttatatatgtatatatgtgttatgttggtgtgttgtatttattaatttgttatttaatattaggtatattttttaatgtttttttttttttttttttttattttataataggttttggtgtgtgatgtttttttttttgtgtttatgtgtttttattgattaatttttatttatgagtgagaatatgcggtgtttggtttttttgtttttacgatagtttttagttttatttatgtttttataaaggatatgagtttatttttttttatggttgtatagtattttatggtgtatatgtgttatatttttttaatttagtttattattgttggatatttgggttggttttaagtttttgttattgtgaagagtgtcgtaataaatatatttgtgtatgtgtttttatagtagtatgatttataattttttgggtatatatttagtaatgggatggttgggtaaaatggtatttttagttttagatttttgaggaatcgttatattgatttttataatggttgaattagtttatagttttattaattgtgtaaaagtgtttttatttttttatattttttttagtatttgttgttttttgattttttaatgatcgttattttaattggtgtaagatggtattttattgtggttttgatttgtatttttttgatggttagtgatgatgagtatttttttacgtagataatatttattgaatgtgtatgtatatatgatatttcgtaagaatttagtatatataatttgttatttttataataatttaatgaggtaggtgttattatgattatttttattttatagaggaggaaattaagagatttttaattttaattatatttttttggttttattgttaagaagtagttggggtaggattttaaaggttttttttttatattgttttgataaggtttattgtgttattattttttaggattgtttgcgttttaataggataagttttagttagtattaaagtgattaagggatatattattattattttttaatggaaaatatttttatatttttattaatttttttatttgtaagtatagttgagtgtttatttatttttttttttataatttggataataaaagtaaagttgtatatattttaaatagttttattgatatataatttatgtataataaattgtatttttaaagtatgtaatttgataagttttgatatatgtatataattttggaattattattataagataatgttttttttgttttttttatttattatatatttttgtttttaggtaattagtgatttgttatcgtttattgtatattattttatatattttagggttttatataaatggaattatatagtatgtgtttttttggtttaattttttttatttagtataattattttgagagtcgtttatgttattatatgtagtagtagtttattttgtagatgtatattttgaattttagttattatagaaagtgaatatttttttttttttattatgtttttagaaaaggtttgtatgggattgattgtatattttttgagtttaaagttttttttggggtttgttttgatatattgtgtgtaagttttttaatatttgaatggagatataaaaaatttatatatgtttttgtaaggatttaaatgtatttttatttttagtgaatggtttttttatttagtattatgaatatgatgtaaaattaagtagttaaatatatttaatttattttaggagtgtgatattttatttttgaatattgttttttttattttttttggggaattttgggggaaatttttttgttaggttttacgtgggaggtagatatttttgaagtggttattttagaattttatattgacgttagttatagatattaagttataaagtgttaattagttaatatggtttgaatgatttgttttgatattatatagggatttaatttgaatgggaaaaaaaggtgttttttttagttaatttttaagataatatttcggttttgttatttaatgttaggaggaaaaaaatttttgttttagtttgttgttataaaaaaaatagaatgttaaaatttattattaattgttatattaattttattgatttttttttttttaaaaattttttagg

SEQ ID NO: 228 - DNA, 14919 bp, Artificial Sequence
  chemically treated genomic DNA (Homo sapiens)
  unsure 14258, 14306: n is a or g or c or t
tttgaaaagtttttaaaaaggaggaggttagtgagattaatatagtaattaataatggattttaatattttgttttttttataatagtagattaaaataaagatttttttttttttaatattaaataataagatcgaaatgttattttggagattggttgggagaggtattttttttttttatttaaattgagtttttatgtagtgttaaaataagttatttaaattatattgattggttagtattttatagtttaatatttatagttaacgttaatatgaagttttgagataattattttagagatatttgttttttacgtgagatttagtagaagggttttttttaagattttttaagaagggtaaagaaggtagtatttagaagtaaaatattatatttttaaagtgagttaaatatatttaattgtttgattttatattatatttataatattgaatgaaaagattatttattgaaaatgaaaatgtatttaaatttttgtagaagtatatgtaagttttttatatttttatttaaatattaaaggatttatatatagtatattaaaataagttttaggagggattttaggtttaaagaatgtgtaattagttttatgtaaattttttttaaagatataatagagaaaaaaaagtatttattttttataataattaaaatttaaaatatgtatttgtagaatgaattgttgttatatataataatatggacgatttttaaaatgattatgttgagtgaaagaagttagattagaagagtatatattgtatgattttatttatatgaaattttaggatatgtaaagtaatatataatgaacgatagtagattattggttgtttaagaatagggatatatggtggataggaaaggtaggggggatattattttgtgatgatgattttagggttgtatatatatgttaaaatttgttaaattgtatattttaaaagtatagtttgttgtatataaattatatgttaataaagttatttaaaatgtatgtaattttatttttattatttaaattgtgggggaaaaggtaaatagatatttaattgtatttgtaagtaggggagttaataggggtgtgaagatgttttttattaaaaaataataataatgtgttttttaattattttagtgttgattaaggtttattttgttagaacgtaagtaattttgagaaatggtaatatagtgggttttattagaatagtatggagaagaggtttttagaattttattttagttattttttaatagtaagattaaggaaatgtgattaaaattaaaaattttttagtttttttttttgtaaaataggaataattataatagtatttattttattgggttgttgtgaagatgatagattatatgtgttaaatttttacgaagtgttatatatatatatatatttaataaatgttgtttacgtgaaaaaatgtttattattattggttattagagaaatgtaaattaaaattataatgagatattattttatattagttagaatggcgattattaaaaagttaggaaataataggtgttggagaggatgtgaagaaataggaatatttttatatagttggtgggattgtaagttagtttaattattgtggaagttagtgtggcgattttttagggatttagaattagaaatattattttatttagttattttattattgggtatatatttaaaagattataaattatgttgttataaagatatatgtataagtatgtttattgcggtattttttataatagtaaagatttggaattaatttaaatgtttaataatgatagattggattaagaaaatgtggtatatatatattatggaatattatgtagttataaaaaaggataagtttatgttttttgtagggatatagatgaagttggaaattatcgtgaggataaaaaaattaaatatcgtatgtttttatttatgggtgggaattgattaatgagaatatatggatataggaaggggaatattatatattagggtttgttgtggggtgggggaaggggggagggaaagtattaggagatatatttaatgttaaatgataagttaatgggtgtagtatattaatatggtatatgtatatatatgtaataaagtcgtacgatgtgtatatgtattttaaaatttaaagtgtaaaaaaataaaaaataaaaaaaaatggtgtttattattttagatgtttttttgaaaataatgatttagtgatattatggtggtattttaattgttattttaaaggattttatagaagagtaaggtaaataatatatattattagattatagaaggaaggaaagtattaataaaattttgcggaaataagagcgaaagagttaggaatgtttaattgtgttagtggaaaaagagcggttaatgaagtaaaagagcggaggaaatgaagaggaaaaaggtaggtattttagggaaaagggaatagtgtgtttatagaggagggtttatttaagaattattaatgtaaatggaatatatttttttttttaaaaagagaattaaaagttagagtatatttggtaatgtggattttattttatgtgtgatgaaattaatgaatattttgatgtaggtaaattatatgattagatttgtattttagagtaaaagttttagttatagtgaatagatagaaaaaagaaagtaatgttattagtttagagattattataataatgtgggtaatgatgagggtatttttgatatatggtagtgataagatgaatgaaggattatttaaaagataaaattgatagtatttggtgtttgaatagtagggttaagagaaattaaagaattattgatagtttagaaattaaagaattattgatgattttatggtttttattttgggttattgaataaagtattattgtaatttttaattttattttgtatggtgtaaattttttgtgtttgaatttattatttatttgtttatttagaagatgaagagttagagaaaattgattttaatttaaataagtttataatttttattttagttttatttaaaaatataagatatgtagatgagtattttacgattttatttttgtatattttaaagattttaaatttatattgtaattttaaatattttatatttttatatatttttgtaggagtatttaagaaagtatattttttttttaaaaattgttaaaattaatattattttttaagttatattttaaataatttatgtggttgaagtaaaggttaaataaatttttgtttattatttatttaaaggtgttttggtgggaaattgatataaaatgatatcgttaatgataagtgtttaattttgggaagagagagtgtgaataaaattgttaggtttatagtgagtatttaaatattttattgaggttgggtatggtggtttatatttgtaattttagtattttgggaggttaaagtgggtggattatttgaggttaggagttttagattagtttggaaaatatggtgaaattttatttttattaaaaatataaaaaattagcgggatgtggtggtaggtatttgtaattttagttatttgggagattgaggtaagagaattgtttgaatttaggaggtggaggttgtagtgagttaagattgtattattgtattttagtttgggtgatagagtgagatttcgttttaaaaaaaaaaataaataaaatataaaaataataataaaaaaatttaaaattttattggttatatgatatttttttagattgtttataaaaagaatagaaaagtagttgttgaaaagattaaatatttttaaatagtaaaaattatataaatattagttattatataatattgagtatttaaagtttttggaatttattttttttattgtagaagtttttaattggtaaaaattaataagttgggggaatgtagagtattataattaagtaatatagtatattgtaatattttatatttttttagttggaaataatttttttttttttaaattattatagtattttgtgtatagtaattattttaaataattgtaatttagggaaaatttatcgttttatttttttttgagataaagttatttgttttatttttttaagttatttgaaggtagaaattgtgtttaatttattagtgttttgtatagagatatttattaaatatttattgaatgaatgattaaaaaattttaaggttttttgtttatataagttatttaaacgttaaataattatataagtgattagttagattttttaattagattttattattaaggaaaaaaaaatagtgttttataggtattaggattgttatattttagtatttttttatatttatttttattttgatttatttgtgtttatgatttttaaaaaattttttagttataaattatttatataatgtattagtataatgtattagttatttttttttttagtattgtgttttgtataatgttattttttttgaatataaaatgtgttgaaatgtagttatttatggagtgtaagagggtaaaatataaattaggaaattgtagggaaaataagtatttttaattaagataattttaaatcgttatagttttgaaaagtattaaaacgtttttaaaattgattttaaataaattgattattgtatttttttttaagtaatattatgtaaagttgggattgatttttatattttgaatagtattttaaaaggttaatatatattagaataatttttaaaatatagttaaaatgtttgtaagatatatttatgtttttatttgcgtttaggtaagaaagagtgttattttaaaatatagtgtttatttaataaagtatgagtttttaaaataaaaaaattatattgaaatgtttaaatggattataaattatcggaaatagatatattattaataaatattttattgttagaattagtaattagtattaagtatatagaaaaaaaagttaattattgtaattataatattattttaagatttttttatatatattttttatttgatttttttaattttaatttttatttgaaaaataatagaaattattattttattttatatatgataaaattaaagttgaaaattatatgaagttataataaaaatgaattatgaatggtatgttaatatggtagtgttaaatttaaaaaataagtataaaagtaattggaggtaataattgatatagtatataatttgtaatttaaaataaatgtaatttaatttaagaagataatgtattttggtatagttaaatgagtatttagatttaaagaaatttttagaatagagtttatattggggatgtatattagaattatttaggtagtttttttaaaatatatatgtttttattttatttgagatgtttagaagataaagaaatttttatagtttttaaagtttagatatacgttgttgaaaaagttttttaagaaattttaatatatttttgattaagaataattgttttaaaatatgaagtggaagtaataatgtatatattgagagaagtaatttaaaaatttaggtataaatatggattgggacgtgagtaaattaggtaaagtaattttggttatttgtaatttgaatttgtgtttattttttatttaaaaaagaattttatttaaatgtaagtaagaaaaaatgataatatagagataatttttaaatgtttttatttatttaaaaagtaaataatttataatataaatattttaatttttgtaatatattatataaatgattgttatattagtgtgttaatattatagttgagaatagttgattagattgtatgttttttataaaggttttcggtgatagattttgtttgagatttaaaggagttaatggagttaataatatatatttttttaaatattatttttatttaatttggagaaaaagaaaataagatttattatttttttttttaaattaggttttttattagttaaaggttatgttaatatattaggttgattttattattttaatatattaggttgatttttaattgggttttaagaattaaagaaaggaaatttttagatgagtatttaattgatttatgtattataaggtaaaaattgtaaaagattttggtaatagggattttgttattaagggggaaaaaaggtaagttttgaaaaaatttttgtacgtgttagggtaaaataaataaattttaaaagttgttttagattatataggtattaaagttaaaaataaatggtaagattaaattatttttgttttaaaaataaaaatagaggaggtttagataaatatgaattttagaaaaataattttattttatgtaatatttgggttatgtgtttataaataaaattatttttagagaatttatatgagagaaagttggaataaaatgaaattttgagttttttaaattgtatttgagaaagatattatgtataatttagatgtttttaattatgatttattgtttggtttttttttagttattatattaatttattttttttatttgtgtttattatacgttattttaattatttaattttattgttatttttatttttttatgtgttgtatttttgaaatatttatgtttatgtgtggtattttatttaaaaaaagaagttatttattgtagttatttatttttaatttttagttttgttattaaagattaagttgttttatatttatttttattttttttttttaatcgagaaaaataataatttttttgaaatttatattataaatagttggtaagaagtgaggtttataaaaataatttatttttgtattttttttttattgtgtgatatagaagaattatattaagaaaaatgtgaagaaaaataaattatttaaattttaaaatattttattaaagatagtattaattattagttaatagagttatatgttatataaagatattttgttttttttattggaataatgagaaggtttaaatttagatataaaatatttaattttatttatattaaatagaataaatatataaaagtaataattgtttattatgtatattttagatgggtttgggaatatttttttttattatatttattattaattatgttaaaagattgtgattaaggtgtaatttttttaaaaagtaacgaaaggtagtttaatataagttgtgaaattttaattaatttgttaatttatttaaataaaatttagaattatattatatatatgattttaaattatattttaatttatataattttgtttataagattatgatttatgttatttttatattatagttattatatatttaattatatatatttatttatatatgatatttggtaagaaatgaagaaatgtttttaaatatttcgtaatgaataaaagttattttttgaggttttaatattattttattataaatagaatttaaattagataatgaaaaattaagtaatttttttttttttttttttttggttattttttcggttaaattattgttttaaaatagaataggaatttagaattttattagtgaatttttttttttttttaaggtttttataatagattaaggaaaagtatatagatttttgtaaatatttttttttttttattttaggtttggtagttttttaataattgaattataatttaaataatttgttatattttaaatagttttattttaatgtaatttttagaaaagattaaaaaaaaaaaaaaaaaagttaattattttttaatttttaaatttttaaaattttttatttttttaaatattttttttttatttttagggaattttttttttttataatagtataaaatatagtgttaatgaataaatttaaattgtattaaattttaaaattttgtgggttttataatattttatatagaaatggttgtttttttttttaattgaaaaaattagaagtattaaatttatgtaatatattaataaagtttgattaaatcgttaagagtttgaatttatttataatgttaggtattttttattatttttaaataaaatttttttgataattaatatattaataaaatatttgaagttattttagtatttttaatttatatatgttttgaatttataaatttatacgattatttgaaagtttggtgttatttaagtgggaaaagggaaagttgaaatattttaaattatatttagtatttttataattataaataaattgaaattaaatgttatgtgaaatattttaatttttttttttgtttatagtaatagttatggtattgttttgtttaattttttaaaaaggttttttaagttttttatttttttatttttattagatattagtttatttttgagggttattggattaggtagtttggggataagagttaagtttataaacggggttttttttttatttttttagtatagtatttaatatgtatttagttttttttgtttttgtttacgttgttttttttgtttggaaagtgttttttatttattttgttaaaattttggtaaaagattaattcgattttaggttatttgatttattttttcgtttcggttttttcgttttttttaattttaagttttaggtagttttaattatatttgtgtatataggagatttttttgttttgtaatgttttttataaatttatttttttttaaagggagagatcgagtatttattaagggaaaatatatagttatataagtgataaagttgtatttatttttatttattattttaaagttcggatattttaaaatttttttttttttttatttttagcgaggaggaagggggatttaacgtttttattcgttagattaggaattttgagttttattttatagtaaaaattatattttttttttttttaaatagagatagggtttttttttgtcgtttaggttggagtgtaggggcgcgatttcggtttattgtaatttttattttttaggtttaagcgatttttttgttttagtttttcgagtagttgggattataggcgcgcgttattacgtttcgttgatttttgtatttttagtagagacggggttttattatgtttgttaggttggttttaaatttttgatttttggttatttattcgtttcggttttttaaagtgttgggaatataggtatgagttatcgcgttcggtttatatttggtcgaagtaatattaatatttaaaatattacggattttttaattcgtgttaaaatattacggatgatttttaaagtcgtgatatattttgtataattgttagtataagggggattatttttttgtatttgatgaaattaaattaaaaagggggagagagtttgttcgaggtttgaaggttttttatttttgttttaaaatataaaattattatttttaatatatatatatttttaatgagaatttttcgtttttttttggttcgtttatgatttttttaattttaaaattaagtcgttgggaatttttaaggtttttgttatgataataggatcgaattatagagcgtggtttggattttgtacgtaaattttgaagtaggtaatttttttaaaagttgataattttattatatgagattttaaagatagaacgcgttttagtaaaaattgagttttttaaatttattgcggtaggattttttttagaagagtttttttttttcggattaggttcgcgttttatgaatatttatcggaggttatgcgttcgtttttcgtattttttcgtaggtagtttttagcgttttgtcggaggcggtcgtagttagttagttaggaggtcgagggatttttgtcggcggggtttttagtttttcgattattttagaggtttttttttttttttcgtttttcgttgggtttgcggtttatatttttttaatttttgaatttttgtatttcgggttatttagcgtcgtcgtttatcgtacgggagttaggggtagggggcggagcggggagagtcgagtgttggtttagtcgagaggcgagtagtttggcgggaggggaatttttcgcggttgacgtaggttcgacgtagtaatttttattcggaggcgtgggcggggcgatttcgcggtcgtcgcgcgcgcgatcgtttttagcgtttcgtttttgtttgttttcgcgtacgtttttcgtcggtttttacgtatacgttttcggtttgttgcggcggttggtttgggagggggtcgagggagcgggagtttggggtgggtttcgggagcgtagggaacggcgggagtcgggaggtgacggttagtagcgtgagaaggtcgttggtttttgagaaattttttttttttaggttgttttttcgagtgtggtttaaagtttaggagcgggcgggagggtgcggatgacgtagagagggtcggtcgttggggagtttttgggggcgcgcggggtcgattttttcggtttgggagggcgacggtcggggttttcgagaggtggtttttttttttttcgatttcgtatatgtaaatttttattttcgcgttagcggcgggacgttgcgttttgtagggggaagtggtgttgcggcgggggttttgtttttttttgtaatttttgtatttgtatacggggatttttttttcgattgatttttttttttttatttaaattgcgagggtattgtgaattttacgtattttatttattgaaattcgtttaaatttaaaaggttcgtatttggagttcgttgttttattaggtagtgtattgaagtttagtggatattatattttgagattttatatagatgttaagaaaggcggaaatggagtatatatttagtgtattaaaggatttaggataatttcgttttttttatttgaatagtatttgttatgtattagataatgtttatatttaatttatgacgtatttattatttttaattttatagatgaagtattcggggtttagagaagttattttaatatatagtattttagaatgttgataaaaggtatagtttaaagttagggttgtttgattttaaagttttatgtttttgtttttgttttttattagttaaaattagtacggagaggtaatggggaatattagtttgttatataagtgtttaaaattgggggatttatatgggtaaataatttaaaatattttgttaattttaaattgttttttttacgaaatgcgtaatgtataataaaagaatgaaatagttttattattggatatgtattaaaacgtattatgatgtatattataggtaatttattgaagagagtgtattgattaaaaaaaaggaaattttatttttttatatggttaggtacgtataatttattatatatttattaattgtttttatttaaaggaaaataatgggaagttattttggaattaagagttaaggtttaaatttttttagagatagaaatatggagtattatttttgatgtttatatttttaagagatggtttcgaggttcgtaagaaagattttttgaggacgtaaaattagtaagaggtttatttagttttttaaaatatgtatatatattttaaagagacggaaaatatttttagttttttgaaggaattttaaaatgaaaagtgattgggggagaggaaagttttgaggaggtgatatttgagttgagtttttagtttaagaaagagtcggttagcggtagtggtttatgtttgtaattttagtattttgggaggttgaggtaagtggattacgaggttgggagtttaagattagtttggttaagatggtgaatttcgtttttattaaaaatataaaaattagttaggcgtggtggcgggcgtttgtaattttagttatttaggaggttgaggtagagaattgtttgaatttgggaggcggaggttgtagtgagtcgagattatgttatttgtattttagtttgggcgatagagcgagatttcgttttagaaaaaaaaaaaaaaaaaaaaaaaggttatttatagggagatttagggaaagaatattttagttgggggaatagtaggtagtaggtttttgagataggaaagagtatagttaagaattgttttttatttttatgatttttaaacgttttattaaatatttatttttatgtagttgaaatgtttattttaataatatatggttagaatataatttttttttatatatagatataaaatatttttgtatggtttttaatatatattgaattttttaggaatgtaaatattgtataaattgagggtagatttttattaaaaaatgttttaaaagttggaaaattgtaattttgatagtttattaatataatatagtatgttagttgtggtggtttatatttgtaattttagaattttgggaggtcgaggcgggtggattatttgaggttaggagtttaatattagtttgggtaatatggtgaaattttgtcgttattaaaaatataaaaattagttgggcgtagtggtgtgtttttgtaattttagttatttgagaggttgaggtacgagaatcgttagaattggggaggtggaggttgtagtgagtcgagattatattattgtattttagtttggatgatagagtaagattgtgttttagaaaataaataaataaaaaattatagtagtattaggttgtatttgtagtatttgtatttatattgattttaggtataagtataaatatttggtaattttattatgttttttttttttttttggagatagggttttgttttgttattaaggttggaatgtattggtatgaatatagtttattgtagtttttattttttgggtttaagttatttttttattttatttttttaaatagttgggattatatgttcgtgttattatatttaatttattatgttttttttttttaagagacggggttttgttatgttgtttaggttggttttaaatttttgggtttaaatgattttttcgttttagttttttaaagtgtcgggattataggtatgagttattgtatttggttttattatgttttttgatgtagttatgtttaagtatttatatattgtagtcgatattatttttttagaaattgttttttttttaatttttgatattgttgttagaatataatttttatttatttgaaaatatttatgtaaggtagattatgaattttattttaatttattaaaggggatgttataaatatatgttataaaatagtgggtattgatttgaaagggtagagaatttttagaatttttagaattgttgatgttaaagaatttattttaaatatatgaaaaaaaattttttaatgatgtagtagttaaaaagttataattttttaggaaagaaataaatttgattagtaaatggatgtgttttgagtttgtgatcgtagaatatgaaaaagtaagagtgaggggttaaaagtgaaattgttttataagatatttttttgttgttgaaagaataagatatttattattaaattgaatggatatagttaataatagttttagaataaaattaaacgttgtggttattataggtttatagaattggaataaatatatattattttggtatttttgagtttttttaggtagtaattaaaggtgatcgaagttattattttaggggtatgttagtatttgtttaggtttgttagtgtggggtatggataaaataatgtgtgtttagtatttgtagtagttataggttaaggttgaagtttagtggagaatagggtttagagaagtttttttagagtgttattaaggagagtttttgtaatttattattcggattaagatatagaacgtttttagttagttatttagaaggttgtttcggagttgtttttagttaatatttatttttaaaaggtattcgatattttgatttttttgataataattagttgtatttgtttttgaatttgatatgaatggatttatatagtgtatatttttttaagtatgatttttttatttaataattgtatgtgttatgttcgtattgtgtgatagtagtatatttttttttattattggggagaaatttattgtatgaatatagtatattttatttatttagtttattgttgataaatatttgaattgtgtttntatagttgttcgttttttggtggttatgagtatttatatttgttgatntatattttagagtagtattgttggattatatggtaaatatatgttagttttagtagatttttgttagttttttagggttgttgtattaaattatatttttataaaaaaatttaagaggtcggacggatacggtggtttacgtttgtaattttagtattttgggaggtcgagataggtggaatatttgaggttaggagttcgagattagtttggttaatatagtgatatttcgtttttattaaaaatataaaaattagttagtcgtggtggtaggtatttgtagttttagttatttaggaggttgaggtgggagaatcgatggaatttaggaggcggaggttgtagtgagttgtgattgcgttattatatttcggtttgggtaagatagtaagattttgttttaaaaaataaattaagaaaggtatagaattttaaagaattttttaaagtataaaaaataggatttaagtagaatgaaataaatatatgtttagataggaagatataatatcgtaaaatgttaatttttttcgaattagtatatagaaatgaatattttttcgtgttttttttgaaatagataaaaataaattgaaaaaaaaaaaaaataaaa

SEQ ID NO: 229 - DNA, 15500 bp, Artificial Sequence
  chemically treated genomic DNA (Homo sapiens)
tagaagtgtggatttcggtggggtttatatttagatattggagattgtgataagtagttaataaatgtaatagttgaattttgtttttgggtagtgtcgtgtgttggggtgttttgtgtatatagttaggattaagatagatttagatttgtcgttatggggtttatagtttagtagaaattttgagtattgaggatatttgatatgttttttttaatttttatttttatttatttatttttttttttttttttgagatggagtttcgttttgttgtttaggttggagtgtagtggtacgatttcggtttattgtagttttcgtttgtcgagtttaagtaatttttttgttttagttttttgagtagttgggattataggtatttgttattaagtttagttaatttttgtatttttagtagagatagagttttatattttattatattggttaggttggtttcgaatttttgattttaagtgatttgtttgtttcggttttttatagtgttgagattataggtatgagttacggcgtttggttattttttatttatttatttatttatttattgagataaagttttgttttgtcgtttaggttggagtgtagtggcgcgatttcggtttattgtaagttttgttttttaggtttaagtaatttttttattttagttttttgaatagttgggattataggagtgcgttattacgtttagttaatttttgtatttttagtagagatggtattttattatgttgattaggttggttttaaatttttgattttatgatttattcgttttagttttataaagtgttgggattatagacgtgagttattgtgtttggtttttttttatttatttgtgttttttttgagatggagttattgttatttaggttggagtgagtgtagtggtacgattttattttattgtaattttcgttttttgggtttaagtgatttttttgttttagttttttgaatagttgggattataggtgttcgttattatattagttaatttttgtatttttagtagatatggggttttattatgttggttaggttggttttgaatttttgattttaggtgatttgtttgttttagttttttaaagtgttgggattataggtatgagttatcgtgtttggttttgatatgtttttttagttatttagtaaattttttttttttttttttttttttgagatagttttattttgttatttaggttggagtgtagtggcgtgattttagtttattgtagtttttattttttgggtttaagtgatcgttttgttttagtttttttagtagttgggattataggtatatgttattatatttagttagttttgtatttttagtagagacggggttttattacgttggttaggttggttttgaatttttgattttaggtgattcgtttgttttggttttttaaagtgttgggattataggtatgagttattgtatttagttttaataaatatttttgaggtttggtattggtaagaggtagagaggaattaggagagtttttggttttataataattggagttgttatttgttatttttattataagttaagtattagtgtaagtgttgtatgtggttggttttatttattatatttaatattatttagtgttttcgttattttattggtttattattttgtttttatttttattttttttttgttagttattttgtattagtttttttgttattttttaagtatgttatgtatgtttttattatagggtttttgtacgtgttagtttttgtgttttgaatatttttttttagatatttatatgaattttttattttttttgattttttgtttaaatggtattttttagattttgatttttttaatttaaattatttttcgaattttttttcgttattttgttttattttgtaatattgttattattattagatataatatttgtttatttgttttttatttgtttttttatttggatttttttgatggtaagggttttttgtttgttgtgtgttttgttatgtttttagtttttagagtagtgtttgatattgttacgttgtgtgtaataattgtaaattgaagagttaggtatagtggtttacgtttgtaattttagcgttttgggaggttcgggtagaaggattatttgaggttaggaggttaagattagtttgggtaatagtaaaattttatgttttaaataaaagaaagaagatcgggtgtggtggtttacgtttgtaattttagtattttgggaggttaaggtaggcggattacgaggttaggagattgagattattttggttaatacggtgaaattttgtttttattaaaattataaaaaattagttaggtatggtggcgggcgtttgtagttttagttattcgggaggttgaggagtagaatggcgtgaattcgggagtaggagtttgtagtgagtcgagatcgcgttattgtattttagtttgggtggtagaggaagattttattttaataaaaaaaaaaaaagaaagaaatagggttgggtatagtggtttacgattgtaattttagtattttgggaggttaagataggcggattatttgaggttaggagtttaagattagtttggataatatggtgaaattttatttttattaaaaaaaaaaaaaaaaaaagaaagaaagaaatgtagttttagtattttgggaggttgaggtaggtagttcgtttgaatttaggagtttgagattagtttgggtaatatggtgaaattttatttttgttaaaaatataaaaattaggttaggtatggtggcgtatatttgtggttttagtttattagttgtgtggttttaggtaattgattttatttttttgagttttagtttttcgtttgtaaagtgggtttaataataggacggttatgagtattaaataaaatgatgttaatagttagttgttttttggttaggtgtattggtttagtttaagtaatagattttttttttataaaaatagaaaataggttgggcgtagtggtttatgtttgtagttttagttatttgggaagttgaggtaggagaatcgtttgaattcgggaggtagagattgtagtgagttgagatcgtattattgtattgtagtttgggtgatagagcgagattttattttttaaaaaaaaaaagaaagaaaagaaaagaaaatattagtcggatgcggtggtgtgtgtttgtagttttagttattttggaggttgaggtgagaggatttttttagtttaggaggttgaggttgtggtgaattatgtttttgttattgtattttaatttcggtgatagagtgatattttgttttaaaaaaaaaaaaaaagtttatatttgtatatagtatttatatgtgttaggttttgttttaagaattttgtgttttaaatatttgtgtttattaatttgtgtgattttggagaaattaattttgtcgggttttagtttttttatttgttatgtggggattaataatattatatattttatataattgttgtgaatatttaatttatagagttatttttttttttttttgagataaggttttattttgttatttaggttggagtgtaatagcgttattatagtttattgtagttttaattttttaggtttaagtaatttttttgtttcggttttttaaagtattggggttataggtgtgagttatcgtgtttagttagaatatttaaattttatataagtaaaggaaagataataaattttgtatttgtggtttgagagcgtttggtatttaatttagaatttaatagattatttagtcgtttttaggaatatgagaggtttaggaatgtgatttagttaaatggttgttttttttttagtttgagttttttttgtaataattttattatatgtttttggcgttggtgatagggatgagtttagggtttaggtatatagtttaggatgtatacggaggttatattgttgttattcgtagattgaataattgagtttttgagtttaaagtggtttgggttatttatgggtaatttttaggggttgtagggaggaataaattaataaataaaatatttatgtatttatttaataaatttttttttttttgagatgggagtttcgttttgttgtttaggttggagtgtagtggtacgattttagtttattgtaattttcgttttttaggtttaagttatttttttgttttagttttcggagtagttggtattataggcgtatattaatacgtttagttaatttttgtatttttagtagagatgggattttattatgtcggttaggttggtttcgaaattttgatttcgtgatgtgtttgtttcggttttttaaagtgttgagattataggtatgaattatcgcgttcggtttttaataaatatttattgggtatttacggtgttttaggcgttggtttaggcgttggggttataataacgtataaaatataaattttgaagttgatacgttagttttaaacgttttttaaatatttttatttttaatttacggttgaggaaattgaggtgtagcgagattttggaggttttcgaaatattattatggatggtaggtgtagagttttgttaatttttcgattttgaagttttttttttagtttgagaaacggtaggtttaagttttattgggagattaaagcggggagcggtttagtttgtcggtttgtttaatgggtaaggcgtgatggttttaagtaggttttagttgtttcgtttagagtaatgggtagcgacgtttgtttaattttttttgagcgtttagtttttttttttcggtcggtttcgttttcgcgattacgtgacgcgtgggggttttttcgttttttaggcgtgacgttacggcggggtgtagattaatgggcgcgtaggtcggcggcgtcggggaatttcgtcgtttcgttttcgttcgtcgttcgttcggttcggtttcgcgtttcgcgtagtttcgggcgtcgcgcgttttgttcggtttgcggttttagtttttgcgtcgttcgttcgattcgcgatcgtttattagatcgtgtttttcggtcgttcggtcggttcgcgtgtatgtttcggtttgggttagtttttgggtcgttcgtttttattggtcgggttatgtcgagtcgtcgcgtcgttagatcgtcggttgcgtcggagttgggggttttaggtaagcggggttggggtttaggagaggggtttggggcggggttggagatgcggggattttggcggtttcggagtagtttgggggtttttatgggagtttaagggtttcgcgggggtagagtgagggtttttgagatattgtattagggcgtaggaagaaggtagagggtgatgagggggtacggttcgaggttcgagcgaggcgtttcgttgtagagtgagagggggcggggtttgattttgaggtaaagaagggggcgtggtttgatttagagaaggcggagcgaaagttgtttttgggcggtatcggggcggggtcgggtttagagagggagaagaggggcgggattcgattcggattatgagaagagggtcgggtttgatttaaaaaaggaagtagggttttacgttgaggggtgagggggcggggtttggtcgtgagggtaggaagggggcggggtttgagttggtcgaaagaaggggaaggggcggggtttgattttggtcgagtggaggggaagggtttgttatttaaaaaagtagggcggggttcgatatagagaatgaggagggggtggggtttgtttttagacggagaagcggagttttgatattgaaaaaattaaaagtggtttgattttgataggaggatgtttttttttgtttgttttttgttttttttttttgagatggagtttcgttttgtcgtttaggttggagtgtagtggtacgatttaggtttattgtaatttttgtttttcgggtttaagtagtttttttgttttagtttttcgagtagttggaattataggtgttcgttattatattcggttaatttttgtagttttattagagacggggttttattatgttggttagattggtttcgaatttttgattttaggtgattcgtacgtttcggttttttaaagtgttgggattataggtgtgagtttttgtgtttagcgggatggggattttttaaattgagattgagatggggttttttttaggtttaattttaagggagaaaaggagcgggttttgagtgtgatgaagggtggggcgaattatagaaattaaaggttaggatttgtttatgatttagttggtaagtttggttagacgtaggggggtagttagggcgaggggtttgatttagaggggaagggttagaagaggaaggggtggggtttttttgggatattttttggttttttggttgttttttattattttttgagacgtttttttttttttgtagggtttttcgatttttttttattttcgttcgtcgtttttaggagtataggtgagtagttttttatagtttttgtttattcgtttatgtaggatgaggttgggaggattttatagagatgtttttgtttgggggtttacgaggtttattttagtttttttttgatagggtgtatttttttttgttagttgagatgggttttttaggtttttttattttttggattgttaagagcgtgataggtggtcgggcgcggtggtttacgtttgtagttttagtattttgggaggtcgaggcggacggattacgaggttaggagatcgagattattttggttaatacggtgaaatttcgtttttattgaaaatataaaaataaaattagtcgggcgtggtggcgggtttttgtagttttagttattcgggaggttgaggtaggagaatggcgtgaatttgggaggcggagtttgtagtgagtcgagatcgtattattgtattttagtttgggagatagagcgagatttcgatttaaaaaaaaaaaaaaaaaaaaaaaaagcgtgataggtaaattttattatttatttatgcgtaaaggtttttttagagatttattgtggtttagtagaaggtaattattgttattttgggttttggagttggggtttatatattgttgttatcgtttttttttgtgtgaatgtttgtaagttagttttttagtttaggttttagttttttttatttgtaagatggatagaataatagtgttttttttttagggaaattgagagtatttaatgaattgatataggtatattttttaagtagtatttggtatatagtaagggtttagtaagtgttaattgttagtggtataataataataacgataataattattattattagatagtttataatagtggtttatttttggtgtgtgtgtgggttttttttgtttgttttttgtgttttttttttttttttttttttttttgagatagagtttcgttgtgttatttaggttggagtatattgatgcgattttgatttattgtaatttttatttttcgggtttagtaatttttttgttttagttttttgagtagttgggattataggtattcgttattataatttattttgtgtttttagtagagatggggttttattatgttggttaggttggttttgaatttttgattttaggtaattcgttcgttttagttttttaaagtgttgggattataggtgtgagttatttcgtttggttagatagtggtttttttttttttgagacggagttttatttttgttgtttaggttggagtataatggcgcgatttcggtttattgtaatttttattttttaggttcgagtaatttttttgttttagttttttaagtagttgggattatagttatgtgttattacgtttagttaattttttgtatttttagtagagatagggtttttttatgttggttaggttggtttcgaatttttgattttaaaggattcgtttttttcggttttttaaagtgttgggattataggcgcgagttatcgtgtttggttagatagtggtttttaaattatgtgtattagaattatttatagcgttagttaaaatataatgtcgtttgatgtggtggtttatgtttgtaatttcggtattttgggaggtcgaggtaggtttattatttgaggtcgggagttttagattaggttgattaatatggagaaatattatttttattaaaaatataaaattagttgggcgtggtggcgtatgtttgtaattttaaatatttaggaggttgaggtaggagaattatttgaatttgggaggtggaggttgtcgtgagtcgagattatggtattgtattttagtttgggtaataagagtgaaatttcgttttaaataaataaataaaaaaatagtcggtcgtggtggtttatttttgtgattttagtattttgggaggtcgagataggtagattataaggttaggagtttaagattagtttggttaatatgttgaaattttatttttattaaaaatataaaaaaaattagttaggcgtggtggtaggtatttgtaattttagttatttgggaggttgaggtaggagaattatttgaattcgggaggcggaagttgtagtgagcggggatcgtgttattgtattttagtttgggtgatagagtaagagttttcgttttaggaaaaaaaataaaaaattatgttaggttttatttttcgagtttttgatttagtaggtttgggatgagaaattatttgtatttttagtaagtttttaagagatgtttagaattattagtttataaagttttttagttaaaatttagtgttgtttaaggaaatgtagaattttaattaaattatgatatttttttttatatatatttgttaggatttggagggtaggggtagttttgttgttatgaatatttagtggttttagttagttgggtttgggtttttttttggagatataattttgggatggatttaagttttggtttggttattgaagaagtgaggtcggttttttaataggtttgtgagtttagggaggatggtattagtgatagatattgtttaagcggtggttttgcgtaggaataaggttgagattttttttttttttgagatagagtttcgttttgttatttagtttggagtgtagtgttataatttcggtttattgtaattttcgttttttaggtttaagtgatttttttgttttagtttttcgagtagttgagattataggcgtgtgttattatgtttatttaatttttgtatttttagtagagacggggttttgttatgttggttaggtcggtttggaatttttggttttaagcgatttgtttgttttggttttttaaagtgttaggattataggtatgagttatcgtgttcggttaaggttgagatttttttggtttaagatttagatttttggttttaaatgagagttatttttgatgttatttatttaataaatatttattatgcgtttgttttgtatttggttttgtgtcgagtagtgttgaggataggtttggttttggggttttttatttagatgaggaggtagatacgtaaataataagttaaatatgggattataaaatgtgataagggttatgaagaaattttggggttaatgatatttaataatagggtggggatacgagaattagtgagatagaatgggaaggaaaattttttttttgtttttggaggtagagttttattttgtcgtttatattggagtgcggtggcgtgatttaggtttattgtaattttcgattttcgggtttaagttatttttttgttttagttttttaaatagttgggattttaggcgtgtgttattatacgtagttgatttttgtatttttagagaaacggggttttattacgttggttaggtttgttttaaaattttgatttttattgatttagttatttcggttttttaaagtgttgggattataggtatgagttattgtgtttagcgagaaaattttttttattgtgaagggttagatatatgttggattttggggataaaatgaggagaaatagatattatttttattttttaatgtttttagtttataggagataggtatgagttagtgtaatgtgaggttatgtgatatttttattagcgttatgaaaatgataaaataggttgggtgtggtggtttatgtttgtaattttagtattttgggaggtcgaggtgggtggattatttgaggttaggagtttaagattagtttgattaacgtggtaaaattttatttttattaaaaatacgaaaattagttgggtgtggtggtttgtaattttagttatttaggaggttgaggtaggagaattatttgaatttgcgaggcggaggttgtggtgagttgagattgtattattgtattttagtttgggtgataatagtaaaattttatttgaaaaaaaaaaaaaaaaagaaaatgataaaataaaggtatttgattttgagggattggagtgggggataaggggatttttttggataaaatggttagggaagagttgtttaggatgtgacgtttgattaaggaattgaagatggaggaggaggaagttacgttatgtaaagaattgggggaagagtatttaggtagagattagtttgtgtaaaggttgaggtagtatatatatagttaattttttgtttttatatttgtttttacgtggtttattttggttgtttttgaatggtggtaagtttacgttgggggtaaagggaggtattgttatttgagtagaaatttgaataattttttggttaatagaggatttgagataataataatattaattaagttttttggaagatgtcgcgtggttagaatttgtattaagtagtttatttgtgtgattttgaatttttatgttagtttttgaggtaggagtttatattttattttgtagaggaagtttagagacggtaagtgatttgtttaaggttgtatagttagtgagtaatagttgagatttaaattaattttatgtgattttatattttatgttttaaaattatgtttatggttaggcgtggtggtttatatttgtaattttagtattttgggaggttggggtgggtgggttatttgaggttaggagttcgagattagtttggttaatatggtgaaatttcgtttttattaaaagtataaaaattagtcgggtatggtggtacgagattgtaattttagttatttaggaggttgaggtaggagaatcgttagaattcgggaggtagaggttgtagtgagttaagaatgtattatattgtattttagtttgggtgatagagtaagattttattttaaaaaatagaaaataggttgggcgtggtggtttacgtttgtaattttagtattttaggaggtcgaggtgcgcggattatgaggttaggagatcgagattagtttgattaatatagtaaaatttcgtttttgttaaaaatataaaaaaaaaaaaaaaaaaaaaaagtcgggtgtggtggtgtgtatttgtaattttagttattcgggaggttgagataggagaattatttgaatttaggaggtagaggttgtagtgagttaagattgtgttattgtattttagtttgggtgatagagtaagatttcgttttaaaaaaataaaaataaataaaataaaataaaataaaatattaaataaaagtattttagtttaataaggtaggtattattattgtgtttattttatagatgaagaagttaaggtataaaaaggtgaagtaataggtttatggttttataattagtaagttgtagagttaggatttgaatagaggtagtgaatttagagttttagttatagtcgtttaggatttagtttttttttatagttcgggagtttttggagggtttaaagtttaattttgtttttgggtttttaggtttatttagtatagatgtttaagaaggatttttttagtttaagtgatttgaggttggttttgttattgatttagagcgtgtttttttttttttgttagttttagtatttttatttgttaaattggggggattttggtattttattggttttatagattttatgagataaggggtgtaggaaaattattttttaaggggtaaaggtttggttgttaggagttattttttgagaatagaggaggatagatttagtagcggaataggttcgcgtttataaatttttagttagagattagcgtaggtagttttgggtgggatatttggttgtagttgtttttcgttgttgtgtgattttaaggtttattggcggtttttgggtttttttttgttttgtttatggaatgacgggaggtcggtttcgatttttttacgattttgtgaagggttgagtttttttggggaggtgaaaaggggtttttttgaggatttagtattattgtatttttttatttaggaagtaggggtgaatttgggattttgggtggttattgtgggaggatagggttggggtatagagtaagaggttgtttgggtttagattagtttttttgtatttttttgttgttgttgttgtttgtttttgagatagtttcgttttgttgtttaggttggagtgtagtgacgtaattttagtttattgtaatttttgttttttgagtttaagcgatttttttgttttagtttttcgagtagttgggattataggtgtttattacgatatttagttaatttttgtatttttagtagagacggggtttcgttatgttggttaggttggtttcgaatttttgattttaagtgatttgtttattttagttttttaaagtgttgggattataggcgtgagttattaggtttggttatttttttgtatttttaaatattagttagtgatttttaggattttggggtggattttagggagggaatatattttaatttgtttggaaatttgggtatttatttttttttggtgttaagatttttttttaatgggtttttaaaaagattttataatttttggtttaaatgtttttcgggaggtatttggtttagttggaggatattttgatgttgggattttaatattagaggttgaaaggatggtagtttagaggagaagatgaggtttggggtttagtgttttagtaagttagagtttagggttttttaggacggaggaagacggaagggttataggagggatagggttggggaatttgttttaaaagatgaaaagttgtgattattttttggattttattttttttttttttttttttttttttttatagatgaattgggtgagtattatagggtaggtttgcggggaggttgagggatttaagtgtttatagaagggggttttggttttttttgtttagtgggggtgggggagaggtgttattgtgtgatttttaggattgtggagggatttgaacgaagttatgtttttaaggtatttagtagtgtttgatatttggaaaatatttagtacgtcgggggttgtgtgatttatatttgtaattttggtattttgggaggtagaggtaggaggattgtttgaggttaggagtttaggattagtttgggtaatatagtgagatttttatttttatataaaatttttaaaaattagtcgggtatggtggtgcgtatttgtagttttagttgtttaggaggttgaagtgggaggattatttgagtttgggaggttgttttggaagtcgaggttgtagtgagttatgattgtattattgtattgtagtttgggcggtagagtaagatcgtgttttaaaaagaaaattaattaaaataaaataatgttattaattttttagtgagtatagatagatattgttttaggttttggggatttagttatgaataaaattaagtttttgttttcgtagagttgatagttcggtgtgggagatagaggaaaatgaatagatgagtaagataatgttagtttgggttgagagttgtgaaagaaataaataggacgagggagagatggtttggagaagatatattaggttaggtttttttgaagagataatatacgagttgagattaggaggagaagtagttagtatgggttgaatgggggatcgtgtggaataggtagttggaggagtaagtttttttttatttatttatttaagttattttttgagatagagtttcgttttgtcgtttaggttggagtgtagtggtgttgttttagtttattgtaatttttattttttaggtttaagtaatttttttgttttagtttttcgagtagttgggagtataggtatgtattaatatatttggtttatttttgtatttatttatttatttatttagagatggaatttcgtttttgttgtttaggttggagtgtaatggtatgattttggtttattgtaatttttattttttaggtttaagtgatttttttgtttttgtttttcgagtagttggaattgtaggtatatattattatgtttaatttttatatttttagtggagatggggttttattatgttcgttaggtaggttttaaatttttgattttaggtgattcgtttgtttcggttttttaaagtgttgggattataggcgtgagttattatgtttagtttatttatttatttattattattattttttgagatggagttttgttttgttgcgtaggatggagtgtagtgacgtaatttcggtttattgtaattttcgtttgacggttttaagcgatttttttgttttagttttttgagttgttgggattataggtacgtgttattatgtttggttaattttttgtatttttagtagagatagggttttattgtgttagttaggatggtttcgattttttgattttatgattcgttcgtttcggtttttcgaaatgttgggattataggtatgagttatcgcgtttagtttattatttattgagagacggagttttattttgtcgtttaggttggcgtgtagtgttacgattttgatttattgtagtgttcgttttttgggtttaagttgtttttttgttttagttttttgagtagttgggattatagacgtgggagattattcgggttaatttttgtagagacggggttttattatgttggttaggttggtttcgaatttttgattttaattgatttatttattttggttttttaaggtgttgggattataggcgtgagttatcgtatttggtttttttgattttgtgtgtgtgtgtgtgtgtgtgtgtgtgtgtgtgtgtgtgtgagagagagagagagagagagagagagagagagagagataaatgggatggaaaacgtttcgggggtaattaagtttttttttttttttttaattttttaaagaatgggcgttattattcgtttttttttttttcgtaga

SEQ ID NO: 230 - DNA, 15500 bp, Artificial Sequence
  chemically treated genomic DNA (Homo sapiens)
tttgcgggagaagaaaaaacgggtggtgacgtttattttttaaaaaattaaaaaaaaaaaaaaaggtttgattattttcgagacgttttttattttatttattttttttttttttttttttttttttttttttttttttatatatatatatatatatatatatatatatatatatatatagagttagggaggttaggtgcggtggtttacgtttgtaattttaatattttgggaggttaaggtgggtgaattaattgaggttaggagttcgagattagtttggttaatatagtgaaatttcgtttttataaaaattagttcgaatggttttttacgtttgtaattttagttatttaggaggttgaggtaggagaatagtttgaatttaggaggcggatattgtagtaagttaagatcgtgatattgtacgttagtttgggcgatagagtgagatttcgttttttaataaataataggttgggcgcggtggtttatgtttgtaattttagtatttcgggaggtcgaggcgggcggattatgaggttaggagatcgagattattttggttaatatagtgaaattttgtttttattaaaaatataaaaaattagttaggtatggtggtacgtgtttgtagttttagtaatttaggaggttgaggtaggagaatcgtttgaaatcgttaggcggaggttgtagtgagtcgagattgcgttattgtattttattttgcgtaatagagtaagattttattttaaaaaataataataataaataaataaataggttgggtatggtggtttacgtttgtaattttagtattttgggaggtcgaggtaggcggattatttgaggttaggagtttgagatttgtttggcgaatatggtgaaattttatttttattaaaaatataaaaattgggtatggtgatgtgtgtttgtagttttagttattcgggaggtagaggtaggagaattatttaaatttgggaggtggaggttgtagtgagttaagattatgttattgtattttagtttgggtaataagagcgaaattttatttttaaataaatagataaataaatataaaaatgagttaggtatgttggtgtatgtttgtatttttagttattcgggaggttgaggtaggagaattgtttgaatttgggaggtggaggttgtagtgagttgagatagtattattgtattttagtttgggcgatagagcgagattttgttttaaaaaataatttaaataaataaataagaaagaatttgtttttttaattgtttgttttatacggttttttatttaatttatgttggttgtttttttttttggttttagttcgtatgttatttttttagaaaagtttaatttaatgtgttttttttaggttatttttttttcgttttgtttattttttttatagtttttagtttaggttaatattattttgtttatttgtttatttttttttgttttttatatcgggttattagttttgcgagggtagggatttggttttgtttatggttaaatttttagggtttaaaatagtgtttgtttgtatttattaggggattaataatattattttattttaattggttttttttttgagatacggttttgttttgtcgtttaggttgtagtgtagtggtgtaattatagtttattgtagtttcggtttttaaggtaattttttaggtttaggtgatttttttattttagttttttgagtagttgggattataggtgcgtattattatgttcggttaatttttaaaaattttgtgtagagatgggggttttattatgttatttaggttagttttgaatttttggttttaagtagtttttttgtttttgttttttaaagtgttaggattataggtgtgagttatatagttttcggcgtgttgagtgttttttaagtgttaagtattgttaagtattttaggagtatgatttcgtttaaatttttttatagttttggaagttatatagtgatattttttttttatttttattgaataaggaaggttaagatttttttttgtaggtatttgggttttttagttttttcgtaaatttgttttgtgatatttatttaatttatttgtggaaggaagagaaagagaaagagaaaggtaaggtttagaaagtggttataattttttattttttaagatagattttttaattttgttttttttgtgattttttcgttttttttcgttttgggaaattttgggttttgatttgttggggtattaaattttaaattttatttttttttttgggttattatttttttaatttttaatgttggggttttagtattagggtattttttaattaagttaaatgtttttcgaaaaatatttagattagggattatgaagtttttttgggaatttattagaaaggggttttagtattaggaaaaagtggatgtttaaatttttaaataaattggggtgtgttttttttttgaagtttattttagggttttggaggttattggttggtgtttaaagatataaagaggtggttaggtttggtggtttacgtttgtaattttagtattttgggaggttgaggtgggtagattatttgaggttaggagttcgagattagtttggttaatatggcgaaatttcgtttttattaaaaatataaaaattagttgggtatcgtggtgggtatttgtaattttagttattcgggaggttgaggtaggagaatcgtttgaatttaggaggtagaggttgtagtgagttgagattgcgttattgtattttagtttggataatagagcgagattgttttaaaaataaataataataataataaaaagatgtaaagaggttgatttgaatttaggtagttttttgttttgtattttagttttgtttttttatagtgattatttaaaattttagatttatttttgttttttaagtgaggaggtatagtaatgttgggtttttagggaagtttttttttatttttttaggaaagtttagttttttatagaatcgtggaggaatcgaaatcgatttttcgttattttatagataggataaggggaagtttagaggtcgttagtgagttttagaattatatagtaacggaaggtagttgtagttaggtgttttatttagggttgtttgcgttggtttttggttggggatttatagacgcgaatttgtttcgttgttagatttgtttttttttgtttttagggagtggtttttggtagttagatttttgttttttgaaaggtagtttttttgtattttttattttatgggatttgtgaagttagtagggtgttaaggtttttttaatttggtagatggggatattgaggttggtagagaggaagggatacgttttaggttagtggtagggttaattttaagttatttgaattgggaaaattttttttaggtatttgtgttggatgaatttggggatttaaagatagagttagattttggattttttagaggttttcgggttgtagggggagattgagttttgggcggttgtggttggagttttgggtttattgtttttgtttaaattttggttttgtaatttgttagttgtggggttataagtttattattttatttttttgtgttttggtttttttatttgtaaaatgggtataataataatgtttattttgttgggttaagatatttttatttaatattttattttattttattttatttatttttatttttttgagacggagttttgttttgttatttaggttagggtgtagtggtataattttggtttattgtaatttttgttttttgggtttaagtgatttttttgttttagtttttcgagtagttgagattataggtgtatattattatattcggttttttttttttttttttttttttgtatttttagtagagacggggttttattatgttagttaggttagtttcgattttttgattttatgattcgcgtatttcggttttttaaagtgttgggattataggcgtgagttattacgtttagtttattttttattttttgagatggagttttgttttgttatttaggttggagtatagtgtggtgtatttttggtttattgtaatttttgtttttcgggttttagcgatttttttgttttagttttttgagtagttgggattatagtttcgtattattatgttcggttaatttttgtatttttagtagagacggggttttattatgttggttaggttggtttcgaatttttggttttaagtgatttatttattttagttttttaaagtgttgggattataggtgtgagttattacgtttggttatgggtatgattttagagtatggagtgtagagttatatagagttgatttgaattttagttgttatttattggttgtgtagttttgggtaagttatttatcgtttttgagttttttttataaaatgaggtgtgagtttttattttaggaattaatatgaggatttagaattatataggtaaattatttagtgtaggttttgattacgcgatattttttagaaagtttagttaatattattattattttaagttttttattagttaggaaattatttaagtttttgtttaaatagtagtgtttttttttatttttaacgtggatttgttattatttaggggtagttaggatgggttacgtgagagtagatgtgagagtaggaaattgattatgtatgtgttgttttagtttttgtataggttggtttttgtttgaatgttttttttttagttttttgtatggcgtgattttttttttttttatttttagttttttggttaaacgttatattttagatagtttttttttgattattttatttaagagagtttttttattttttattttagttttttaaagttaggtgtttttgttttattatttttttttttttttttttttttagatggagttttgttgttgttatttaggttggagtgtaatgatgtaattttagtttattataattttcgtttcgtaggtttaagtgatttttttgttttagttttttgagtagttgggattataggttattatatttagttaattttcgtatttttagtagagatgaggttttgttacgttggttaggttggttttgaatttttgattttaggtgatttatttatttcggttttttaaagtgttgggattataggtatgagttattatatttagtttgttttattatttttatggcgttgatgaagatgttatatgattttatattatattgatttatatttgttttttatagattgggagtattgaagagtgggaataatgtttgtttttttttattttatttttagggtttagtatatgtttggttttttataatgaaggggattttttcgttgggtatagtggtttatgtttgtaattttagtattttgagaggtcgaggtggttggattagtggaggttaggattttgagataagtttggttaacgtggtgaaatttcgtttttttaaaagtataaaaattagttgcgtgtggtggtatacgtttggaattttagttgtttgagaggttgaggtaggaggatggtttgaattcgggagtcggaggttgtagtaagtttagattacgttatcgtattttagtgtaggcgatagaatgagattttgtttttaaaaataaaaagggaatttttttttttattttattttattagttttcgtatttttattttgttattaaatattattgattttaaggtttttttatagtttttattatattttataattttatatttaatttattgtttacgtgtttgtttttttatttaggtagggaattttagggttaggtttgtttttagtattgttcggtataaggttaggtatagaataggcgtataataaatatttattgaatggatgatattagaaataatttttatttgaaattaaagatttaggttttggattagaaaagttttagttttggtcgggtacggtggtttatgtttgtaattttagtattttgggaggttaaggtaggtagatcgtttgaggttaggagttttagatcggtttggttaatatggtaaaatttcgtttttattaaaaatataaaaattaggtggatatggtggtatacgtttataattttagttattcgggaggttgaggtaggagaattatttgaatttgggaggcggaggttgtagtgagtcgagattgtgatattatattttaggttgggtgatagagcgagattttgttttaaaaaaaagaaaagttttagttttgtttttgcgtaggattatcgtttgggtagtgtttgttattgatgttattttttttaaatttatagatttgttggggaatcggttttatttttttaatggttaagttagaatttgggtttattttaagattatatttttagagaaaggtttagatttagttaattggagttattgagtatttataataataggattatttttgttttttaaattttggtaaatgtatataagaaaaaatgttataatttggttgagattttgtatttttttgggtagtattgaattttggttgggggattttatagattagtagttttaggtattttttgggagtttgttaaaaatgtaaataattttttattttaaatttattgaattagaaattcgagaggtggggtttgatatggttttttgtttttttttttgagacggaggtttttgttttgttatttaggttggagtgtagtggtacgattttcgtttattgtaattttcgtttttcgggtttaagtgatttttttgttttagttttttaagtagttgggattataggtgtttgttattacgtttggttaattttttttgtatttttagtagagatggggttttaatatattggttaggttggttttgaatttttgattttgtgatttgtttgtttcgattttttaaagtgttgggattataggagtgagttattacggtcggttgtttttttgtttgtttgtttgagacggagttttatttttgttgtttaggttggagtgtaatgttatgatttcggtttacggtaatttttattttttaggtttaagtgatttttttgttttagttttttgaatatttgggattataggtatgcgttattacgtttagttaattttgtatttttagtagagatggtgtttttttatgttggttagtttggtttagaattttcgattttaggtgatgagtttatttcggttttttaaagtgtcgggattataggtatgagttattatattaggcgatattatgttttaattagcgttatggatgattttgatgtatatggtttaagaattattgtttggttaggtacggtggttcgcgtttgtaattttagtattttgggaggtcgaggagggcggattttttgaggttaggagttcgagattagtttgattaatatggagaaattttgtttttattaaaaatataaaaaattagttgagcgtggtggtatatgattgtaattttagttatttgggaggttgaggtaggagaattgttcgaatttgagaggtggaggttgtagtgagtcgagatcgcgttattgtattttagtttgggtaataggaatgaaatttcgttttaaaaaaaaaagaattattgtttggttaggcgaggtggtttatatttgtaattttagtattttgggaggttgaggcgggcggattatttgaggttaggagtttaagattagtttggttaatatggtgaaattttatttttattaaagatataaagtgggttgtggtggcgggtgtttgtaattttagttatttaggaggttgaggtaggagaattgttgaattcgggaggtggagattgtagtgagttaaaatcgtattaatgtattttagtttgggtgatatagcgagattttgttttaaaaaaaaaaaaaaaaaaaaaaaaaatataaaaaatagataaaaaaaatttatatatatattaaaaatgaattattgttatagattgtttagtaataataattattatcgttattattattatattattaatagttaatatttattgaatttttattgtgtgttagatattgtttggaaagtgtatttgtattaatttattgaatatttttaatttttttgaaagagaggtattgttattttgtttattttatagatgaggaaaattgaggtttgaattggggaattgatttgtagatatttatatagggaggggcgatgatagtagtatgtaaattttagttttaaagtttaggatggtagtgattattttttattaagttatagtgaatttttaaagaagtttttgcgtatggataggtggtaagatttatttgttacgttttttttttttttttttttttttttgagtcggagtttcgttttgttttttaggttggagtgtagtggtgcgatttcggtttattgtaagtttcgttttttaggtttacgttatttttttgttttagtttttcgagtagttgggattataggagttcgttattacgttcggttaattttgtttttgtatttttagtagagacggggttttatcgtgttagttaggatggtttcgattttttgatttcgtgattcgttcgtttcggttttttaaagtgttgggattataggcgtgagttatcgcgttcggttatttgttacgtttttaatagtttaagaggtaagaaaatttagggggtttattttaattggtagggagggatgtattttgttaggagaaagttgaggtggatttcgtgaatttttaaatagagatatttttgtggagtttttttaattttattttgtatgagcgagtgggtaggaattgtggagggttgtttatttgtgtttttggaaacggcgagcgagagtgaggagaggtcgggggattttgtagagaaggagaaacgttttaggaggtgatggggggtagttagaggattagagaatattttaaggaagttttattttttttttttttagttttttttttttggattaggtttttcgttttgattgtttttttgcgtttggttaggtttattagttaaattatggataggttttggtttttagtttttgtggttcgttttattttttattatatttagggttcgtttttttttttttttaaagttgggtttggaggggattttattttaattttagtttaaaaagtttttatttcgttgggtataagggtttatatttgtaattttagtattttgagaggtcgaggcgtgcggattatttgaggttagaagttcgaggttagtttgattagtatggtgaaatttcgtttttagtaaaattataaaaattagtcgggtgtggtggcgggtatttgtaattttagttattcggggggttgaggtaggagaattgtttgagttcgggaggtagaggttgtagtgagtttagatcgtgttattgtattttagtttgggcgatagagcgagattttattttaaaagaaaaaaataaaaaataaataaaaaaaaatatttttttgttagggttagattatttttaatttttttaatgttaaggtttcgttttttcgtttggaggtaagttttattttttttttattttttgtgtcgggtttcgttttgtttttttgggtaataggttttttttttttattcggttagagttaggtttcgttttttttttttttttcggttaatttaggtttcgttttttttttgtttttacggttaggtttcgtttttttattttttagcgtagggttttgtttttttttttgagttaggttcggttttttttttatagttcgggtcggatttcgttttttttttttttttttgggttcggtttcgtttcgatatcgtttaagagtagttttcgtttcgttttttttgagttaggttacgtttttttttttgttttagggttaggtttcgtttttttttattttatagcgggacgtttcgttcgaatttcgggtcgtatttttttattattttttgttttttttttacgttttaatatagtgttttaggaatttttattttgttttcgcgaaatttttagatttttataggaatttttagattatttcgggatcgttagaattttcgtatttttagtttcgttttagattttttttttgaattttagtttcgtttatttaaggtttttagtttcggcgtagtcggcggtttggcgacgcggcgattcggtatggttcggttagtggggacggacggtttagaggttggtttagatcgaagtatgtacgcgggtcggtcgggcggtcgggaggtacggtttggtggacgatcgcgggtcggacgagcggcgtaagggttggggtcgtaggtcgggtaggacgcgcggcgttcggggttgcgcggggcgcggggtcgggtcgggcgggcggcgggcgggggcggggcggcggaatttttcggcgtcgtcggtttgcgcgtttattggtttgtatttcgtcgtgacgttacgtttggggaacgggaaaatttttacgcgttacgtgatcgcgggggcggggtcggtcgggaaagggaggttgggcgtttaggaggggttgggtaggcgtcgttgtttattgttttggacgagataattgaggtttgtttagagttattacgttttatttattgagtaagtcggtaaattgagtcgtttttcgttttggttttttagtgggatttgaatttgtcgttttttaggttggaaggggagttttaggatcgagaggttggtagggttttatatttgttatttataataatatttcggaaatttttaaggtttcgttatattttagtttttttaatcgtaaattgaggatgaagatatttaaggaacgtttaaagttagcgtgttagttttagaatttatgttttgtgcgttgttgtaattttaacgtttagattagcgtttggaatatcgtaggtgtttaataaatgtttattggaggtcgggcgcggtggtttatgtttgtaattttagtattttgggaggtcgaggtaggtatattacgaggttaggatttcgagattagtttgatcgatatggtgaaattttatttttattaaaaatataaaaattagttgggcgtgttggtgtgcgtttgtaatgttagttatttcggaggttgaggtaggagaatagtttgaatttgggaggcggaggttgtagtgagttgagatcgtgttattgtattttagtttgggtaatagagcgagatttttattttaaaaaaaaaaaagtttattggatgaatgtatggatgttttatttattggtttgtttttttttgtagtttttgaaagttatttataaatagtttagattattttgagtttaaaagtttagttatttagtttgcgaatggtagtagtgtagttttcgtatatattttgagttgtgtgtttaaattttgagtttatttttattattagcgttagaagtatatgataggattattgtagaagggatttaggttgaaagaggggtagttatttggttagattatatttttaagttttttatatttttgagaacgattaggtgatttattaggttttaagttggatgttaggcgtttttagattatagatgtagggtttgttgttttttttttgtttgtataaaatttgggtgttttggttaggtacggtggtttatatttgtaattttaatattttgggaggtcgaggtaggaggattgtttgagtttgggaggttgaggttgtagtgagttgtgatgacgttattgtattttagtttgggtgatagagtgagattttgttttaaaaagaaaaagaaataattttgtaagttgaatgtttataataattgtgtgaagtatatggtgttattgatttttatatagtagatgagaaaattgaaattcggtaaaattaatttttttaaggttatataaattaatagatataaatatttaaaatataaaatttttagaatagggtttggtatatgtgggtgttatatataaatgtgaattttttttttttttttgaggtagggtgttattttgttatcgaggttggagtgtagtggtaggaatatggtttattatagttttaattttttggattaaggggatttttttattttagtttttagagtagttgggattataggtatatattatcgtattcggttaatgttttttttttttttttttttttttttttttgagagatggagtttcgttttgttatttaggttgtagtgtagtggtgcgattttagtttattgtaatttttgtttttcgggtttaagcgatttttttgttttagttttttaagtagttgggattataggtatgagttattgcgtttagtttgttttttatttttgtagagagaggatttgttgtttaggttgagttagtgtatttggttaaagggtaattaattattaatattattttatttaatatttatgatcgttttattattagatttattttatagacgggaaattgaagtttagagagatgaagttagttgtttgaggttatatagttggtgagttgggattataggtgtgcgttattatgtttggtttaatttttgtgtttttagtagagatgaggttttattatgttgtttaagttggttttaaatttttggatttaagcgagttgtttattttagttttttaaagtgttgggattatatttttttttttttttttttttttttttttttagtagagatggggttttattatgttgtttaggttggttttgaatttttgattttaggtgattcgtttgttttggttttttaaagtgttgggattatagtcgtgagttattgtgtttagttttatttttttttttttttttttttgttgagatggagtttttttttgttatttaggttggagtgtagtggcgcgatttcggtttattgtaagtttttattttcgggtttacgttattttgttttttagtttttcgagtagttgggattataggcgttcgttattatgtttggttaattttttgtagttttagtagagatagggttttatcgtgttagttaggatggttttaattttttgatttcgtgattcgtttgttttggttttttaaagtgttgggattataggcgtgagttattatattcggtttttttttttttatttaagatatgggattttgttgttgtttaggttgattttgattttttagttttaagtgatttttttgttcgaattttttaaagcgttgggattataggcgtgagttattgtgtttggttttttaatttatagttattatatatagcgtaatagtgttaggtattgttttaaaagttagggatatagtaaggtatatagtagataaaaagtttttgttattaaggaaatttaagtgaggagatagatggaaaatagataagtaaatattatgtttgatggtgatggtagtattataggatagagtaggataacgagaaggagttcggaagatagtttgggttaggaagattagggtttgagaggtgttatttgaatagggagttaaaggaggtgagggatttatgtggatatttgggggagagtgtttaaagtataggggttagtacgtgtaaaggttttgtggtaggaatatgtatggtatgtttaaggaatagtaagaaggttggtgtagagtgattgataggaaaggggtagagatgagggtagagtgatggattagtaaggtgacgaggatattgaataatattaaatgtaatggatgaagttaattatatgtagtatttatattagtgtttggtttatgataaggatgataaatagtagttttaattgttataggattagaagtttttttgatttttttttgttttttgttaatgttaggttttaaaaatgtttgttgaggttgggtgtagtggtttatgtttgtaattttagtattttgggaggttaaggtaggcggattatttgaggttaggagtttaagattagtttggttaacgtggtgaaatttcgtttttattaaaaatataaaattaattgggtgtggtggtatgtgtttgtagttttagttattagggaggttgaggtaggacgattatttgaatttaggaagtggaggttgtagtgagttgagattacgttattgtattttagtttaggtgatagagtgagattgttttaaaaaaaaaaaaaaaaaaaaaaagtttgttgaatgattaaaaggatatgttagggttaggtacggtggtttatgtttgtaattttaatattttgggaggttgaggtaggtagattatttgaggttaggagtttaagattagtttggttaatatggtgaaattttatgtttattaaaaatataaaaattagttggtgtggtggcgggtatttataattttagttatttaggaggttgaggtaggagaattatttgaatttaggaggcggaggttgtagtgaagtgagatcgtgttattgtatttattttagtttgggtgatagtgattttattttaaaaagaatataaataaataaaaaggggttaggtatagtggtttacgtttgtaattttagtattttgtgaggttgaggcgggtggattatgaggttaggagtttgagattagtttgattaatatggtaaaatattatttttattaaaaatataaaaattagttggacgtggtggcgtatttttgtaattttagttatttaggaggttgaggtagaagaattgtttgaatttgggaggtagagtttatagtgagtcgagatcgcgttattgtattttagtttgggcgatagagtaagattttgttttaataaataaataaataaataaataaaggatagttaggcgtcgtggtttatgtttgtaattttagtattgtgggaggtcgaggtaggtagattatttgaggttaggagttcgagattagtttgattaatatggtgaaatgtgaaattttgtttttattaaaaatataaaagttagttgggtttggtagtaggtgtttgtagttttagttatttaggaggttgagataggagaattgtttgaattcgataggcgaaggttgtagtgagtcgagatcgtgttattgtattttagtttgagtaatagagcgagattttattttaaaaaaaaaaaaaaaagtaaataaataaaaataaaaattaaaaaggatatgttagatatttttagtgtttaggatttttgttgggttgtgagttttatgacggtaggtttgggtttgttttggttttggttgtatatataaaatattttagtatacggtattatttaggggtagggtttagttgttatatttgttgattgtttgttatagtttttagtgtttgaatatgagttttatcgaggtttatatttttg

SEQ ID NO: 231 - DNA, 12356 bp, Artificial Sequence
  chemically treated genomic DNA (Homo sapiens)
taatagttggagatttttatattttatttttagtattggatagattatttagatagaaaattaataaagaaatattagatttaatttgtaatatagattaaatggatttaatagatatttatagaatattttatttaagggttgtagaatatatttttttttttttttttttttttttttgagatagagttttagtttattgtaagtttcgtttttcgggtttatattatttttttgttttagtttttcgagtagttgggattatagttatttattattatgtttagttaagtttttgtatttttagtagagacggggttttattatgttagtcgggatggtttcgattttttgatttcgtgatttatttattttaggtttttaaagtgttgggattataggtatgagttattatatttagttagaatatatattattttttttagtatatgaatcgtttttaaggataggttagatgttaggttataaaacgaattttaaaatattaaaaaaattgagataatattaagtattttttttgataaaaataaaattagaaattaataataagagaaattttggaaattatttaaatatatagaatttaaataatatgtttttgaacgattagtgagttaatgaagaaattaagaaggaaattgaaaaattttttgaaataaatgataatgaaaatataatatattaaaatttatgggatatagtaaaagtaatagtaagatagaattttatagttttaagtatttatattaaaaaaaaaggaaaaattttaaatgataatttaatgatgtattttaaagaattagaaaagtaagagtaaattaaatttagaattagtagaagaaaagaaataataaagattagagtaggataaaatggaaaaaataaaaaaaaagaaataaagttttatttttttgaaaagttaaataaaatggataaatttttagttagtttaagaaaaaaagaaagaagattaaaataaataaaattagaaatgaaaaaggagatattataattgatatttgtagtatttaaaggattattagtggttattttgagtaattatatgttaataaatggaaatatatagaagtaatggataagtttttagatatatataatttgttaaaattgaattaggaagaaatttaaaatttgagtagattaataataagtaatgagattgaagttgtaataaaagttttttagtaaagaaaagtttgagatttaatagttttattgttgaattttagtaaatatttaaagaaaaattaatacgaattttatttaatttattttgaaaaatagagaaggagggaatatttttaaatttattttatgaggttagtatttttttgatattgaaattagataaagatatattaaaaaagaaaattataggttaatttttgatatatattgatgtaaaagtttataattaaatattagtaaattgaatttaataatatattagaaagattatttattatgattaagtgggatttatttttgggatggaaggatgatttaatatatataaattaattagtgtgttatattatattaaaagaatgaaggattaaaagtatatgattattttaattgatgttgaaaaagtatttggtaaaatttaatatttttttatgataaaaattttaaaaaaaaaaattggggatagaaggaatatatttgaatataataaaagttatatataatttatttatagttagtattatattgaatggggaaaaattgaaagttttttttttaaggtttggaatatgataaagatgtttattttattattgttatttaatatagtattggatattttagttagagtaattagataagagaaagatattaagggtatttaaattgtaaaggaggaagttaaattatttttgtttgtagatgatatattttatatgttgagaaatttggagattttataggaaaattagtagaattgataaataaatttagtaatttagtagtagtatttttgtatgttaagagtgaataatttgaaaaagaaattaagaaagtaattttatttataatagttataaataaaattaagtatttaggaattaattaaagaagtgaaagatttttgtaatgaaaattataaaatattgattaaagatattgattaggatatataaaaaatggaaaaatattttatgtttattaattggaaaagttaatattgttaaaatgtttatattttttaaagtaatttatagatttaatgtaatttttataaaaatattaatgatattttttatagaaatagaaaaaaataattttaagatttatattgaattataagagattaagaatagttaaagttattttaagtaaaagaataaaattggaggaattatattatttgattttaaattatattatagagttatagtaattaaaatagtatgttattggtataaaaatagatatatagattagtgaaatagattagggaatttagaaagaaatttatatatttatagtaaatttatttttgataaagatgttaagaatatatattggggaaaagatagtttttttaataaatggtgtggggaaaattggatatatatatataaaggaataaaattagatttttatttttttttatatataaaatttaaattaaaatggattaaagatttaaatttaagattttaaattatgaaattattataaaaaatattggggaaatttttaggatattggttggggtaaaaattttttgagtaatatttaataagtataggtaattaaagtaaaaatggataaacgagattatattaagttaaaaattttttttatagtaaaggatataattaataaagttaagagaaaatttatagaatgggagaaaatatttgtaaattatttattagataagggattaataattagaataaataaaaagtttaaataattttatagaaaaaaaattaaataatttaattaaaggatgggtaaaagatttgaatagatattttttaaaagatatacgaatgataaataggtatatgaaaaggtgtttaatattattaattattagaaaaatgtaaattaaaattataatgggatattattttatttagttaaaatggtttatgtttaaaagataggttataataaatgttggtggtaatgtggagaaaaggaaatttttgtatatttttgatgagaatgtaaattaatataattattatggagaatagtttggaagttttttaaaaaattaaaaattgagttattatatgatttagaattttattgttgggtatatgtttaaaagaaagaaaattagtatattaaagaaatatttgtatgtgaatgtttattgtagtattgtttataatagttaagatttggaagtaatttaagtatgtattaatagatgaatgggtaaagaaaatgtggtatatatatataatggagaattatttagttatatttagttacgtttaataatatggatggaattggagattattacgttaagtgaattgagttaggtatagaaaggtaagtattgtatgtttttatttatttatgggatttagaaattaaaataattgaatttatggataaagagagtataaggatggttgttagaggttgggaagggtggtggtgggtggggtgggggatgggagatggggatagttaatgggtataaaaaatgtagaaagaataaataagatttattatttgatagtataatagggtgattatagttaataataattgtatatattaaaatgatttagaatatatttggattgtttgtaatttagtggataaatgtttgaggggatggatattttattttttatgatgtgtttattttatatggtatgtttgttttaaaatattttttgtattttataaatatatatatttattatgtatttataaaaattaaaaaataaataaataaaaatttaattaaaagacgtttagtttaaaataaaattttatgtatgtgttatttatagggagaattttatattattaagaaaaggttaagttatatttagtataatttatttaagaaaataaggaggttggtttgttgtatcgcggtggtttacgtttgtaattttagtatttttggaggtcgaggtgggcggattacgaggttaagagatcgagattattttgggtaatatggtgaaattttatttttattaaaaatataaaaattagttgggtatggtggcgggcgtttgtagttttagttattcgggaggttgaggtaggagaatcgtttgaatttgggaggcggaggttgtagtgagttgggattatgttattgtattgtagtttgggcgatagatagaaatttagttttaaagaaagagagagagagagagagaggaaggaaggtaggtaggaaggaagtttgtataatgttttttttttaaagtagatatttgaatatattttaggtttttggtaattagttttagttgtttcgatagatttgataagttagtattttagttaatatgtagtaaagttttgagagtattttaattaatttttttgtttttaatttttttttagggtatttgtttattaattttagttttgtttgtttttaaatttaaaaatatgtatttggtttttgagttttgtttttttttttagttgtattgtttgatttgggtgtttttatttttttaataattttttattataatagtgttattgtttgttaaagtatacgtggttaaaatttaattttttgtagagttgaaaagagtttagagaagtaaggtggtggacgatttattgaaatgttttagttttagattgtatgtgttatatttttgttgaaatataattcgttttttttaatttttatgtgaagtgtatttttaagaattaatttttagttattgggtgattttatgggagtaaaaggaagttgttatgaaatagtttttatggaattgttataagtttttaagtatttaaaggtttaaatgaaaaaggttaagtattattttaaaaggtaagtatattttaatatagtaaaataaataaagtaaaatttattagttatttttttaattgaagtgatgaagtttaaataatttatatagtaaaatggagaaaattagatcggttatttaaaaatttgttattggtgaagtgatgaagaatatttattgttttatttcgaagtttgttaattttgtaatttttggttgtttatggatttttgtggtgtagtgtatagttttaaatagttgtttaaagtcgtgtgtaattaatttggtaagttttataatttaatatttgtttttgtaggaattagaatatgtagtatttagtttgttataattgatagaattgttttttttttatgaggagtttttttatgagaagtggtggtaataaggtaagatagattatttttttttaaataagttaggagtttttataattgtagaagataaagtaggttattttatttttttagggtatgtggttatatattttttgggttagaggattgggtaaaggaggtttaaatggaattaattttgttaattttgtatatttaaaaattttttatttaaatttatttattataaagttattagtagttgttttgaaatttgaaatcggtttggttataggataatgtttgttaattttagttgtgtagggagttggatgaaaaaggaagtagatatagttgttatgtaaaataatattttaaagtaataattatttgtatatttttttatttttgtttgtgtatttattattttagttagtgagttttttatatggaaatttatgtttttatttttatttttgggtgttattttttttttaattattgtattatttttttttagttgtaatttagttgtgtttaaaatagttattgaattaattttaaaaattaagtattttatagatagagaaaatgtattttttttgtttaaagataaataaaatattatgatagtttgtatatgattttatttatagttatatttttaaatataatgtaagtattaaatatagtatttattatattattttaaagtattggagatagaattatgtggtagattaaaaagaaatttgtatttatatatttttgatttaaattgtagtttaaaatattatttaggtttattatggttagtagtatttttttaaaagtttagtattttatataaatttttgtcgaagattttattgtttttaatatagaattgtatgttttagttttttatatttgtaatttaaatttaaaaatggaagaatggaattattaaatgttttaattattgaatggaaaattaaatgttttaaaaaagattttaatttttttttaattataataagagtatatattttaaataaaatatttataatatagagaattatagaagaataaaaaatttttaattttagttttagtaattttttgattgaatttttttttagtatttttttttatatatatatatgtatatatatatatttataatttatatttagttatgtaattagtttttttattatattgtattgtgagtttttttttagattttgagatttttttagaaatagaatttttattatttttagagtattttattatatgaatgtattattataatttatttgttaatttttttgttattgaaattgattttagttgtttttaatattgtagtttttattttattttattgtcgttttatttatttttatttttttgtgtgggttttttgtttttagggtttggtagtaggaatagatagtttgtttttttgttgagttgtttttcgtttattatttatagagaatggtatagttgatgtgtggtaatagtaagagagatacggtttgttaatttgattagtgaaagtattatatgtttttatatagggtttggagggataaaagtgaagtgaatgtataattgaatgtaattatggtttataggagaggatatataaagtgtttaagtttattatattttttgtattatttttaaaaatatggatatttattttgaaggttatttataattttattgggtgatttttgatattgagaaatgtttttttaaaaaaaaaaagttattataagaatgttttgtttaaaaataaaatgttagaattgtgggttaaattgtacgaagtagagttttatgtttgagtattggtattttatattatttttattttacgttaatagagatttgtatgtattagttgaaagtattaattgaaaagtttttttgaattttagaagttatgtgttgtagaaaataataaataattaatgttttttagaattttagtattgtgagattttttatgataaagaaaaaagaatttacggttgaattatttgtggaagtgtattttgttatgttttttttttgtagatttatagggtataataatatgttaaaagttttgtttaattataatttttttatttttagtaataaaatttttttttaatgtttttataagttattgggggaataggtgttatttggttatatgagtaaattttttagtggtgatttgtgagattttggtgtatttattagttatgtatatattatattatatttgtagttttttattttttattttgtttttatttttttttttaagtttttaaagtttattgtattatttttatgtttttgtatttttatagttttgtttttatttattagtgagaatatacgatgtttggttttttatttttgaattatattataaatttttttttttttttgaattaataaattataataattgaggaattaatattgagaagggtttaggagtattaattttatttaataaattttatttaatattaatttattgaatggattttatttaataaatttttttaggtatttatgtatatttagttttgtggtggatgtaattcggaatataaaagaagtgaattatgtaattaatgttttaaagtaagttattaaatattgagatattaaggtttttattattagatagttaaaggttgttataaatatgatgtgtttttataatattagagggtgatgataatatatttatttttgatttgtattttaagttttaaagaaataaattgaaaattaattgaaagattattagaaataataggatttggaagatttttaaaaaattaatgtatagatatgaaaaattgttttgtatattaatatataatattaaaataaaataatataataagattataatttagaaattttataaaatatttataaattagtatagtttttattgttataggaataaatttgtgagtaaaatagaatataattaagaaataaaattatgtatataaagaatgtgaaatatgataaagatgataatttaaattaatgagttgttatttatgtagtataaaaaatttttatataattgttagatttaaataaattttaggatatattttgtaaaaaggtatgatttttggttaagtgcgatggtttatgtttgtaattttagtattatgggaggttgaggcggatagttttttttagtttaggagtttgagattagtttgggtaatatggtgagatttttgtttttataataaatataaaaattagttaggcgtggtggtatgtatttgtagttttagttatttaggaggttgaggtgggaggattgattgagtagggaggtcgaggatgttgttagttgtgattatattattgtgttttagtttgggtgattttgtttttaagaaataaaaatagaaaggtttatttaaatgtaaatagataaataaataaaataaagtaagtgtttattttataaaaatattagaagaaattggggtgattgtttttgtaattttgaagtagaaatgttttaagaagtttaattaaaaaatttagattttttaaaaagaaattattaataaatttgattatttagaaatttaaattgttatgataatagtatataataattgtaaagttaaaaagtggaaaaaaagtattatatatgataaataatgtttttaaagaaaaaatttttgatatatataaaagtatgtaagatgaatttagaatataaatagttattttaaaaaagaagtataagtgtttattaattgatgagtggataaaaaaatgtgatatatatatattatggaatattatttagttataaaaaggaatgaaataatgtttttgtagtaatttggatggagttggaggttattattttatggaggttattatttggttaggaatagaaaattaaatatcgtatgtttttatttataagtggtagttaagttatgggtatataaaagtatgtagagtggtataatggattttggagatttagaagggggagggaaggagaggagtgagggatgaaaaattatatgttgggtataatgtatattatttgggtgaaaggtgtattaagattttagattttattattatataatttatttatgtaattaaaaattatttgtattttaaaaggtattggaaatatatatatattttttatatatatatatattgtaatataatatatataattttaatataatatgtattttaatttatatattttaatataatatataatatatattataaaaatggttaaaaagtatgtgatagatatttaattttatagtaattatagaattgtagaataaaaataaattattaattttttttttattaaattggtaaagataaaaatatttatagttgggaaaaggtataggtaaatttttatttttatgaattgttggttggatgtaaatggataaatttttagaaaagaatgcgttattaaattttaaaattgaaagagaaaatatatttttaatttatgtattaaatttatttgaggatattattgtttaattaattaaagatatgtatgtaaaaggttgttaatagtaagttgggatataatattattaatatatttttaagtgtttgtattgtattataataattattgtatttaattgaatttttatagaagtttatgaattaagtattattttatttatgtttcggatacgattattaagtttagatggtataggtaattttgagaatattatattgggagtaaatattatgtggaattaaaatatagattattttgttttgttttatttattattattattattattattatttaaaattttattattattatattttaagttttagggtatatgtgtataatgtttagttttgttatatatgtatatttgtgttatgttggtgtgttgtatttattaattcgttatttagtattaggtatattttttaatgttattttttttttttttttttattttataatatttattagggtaggaagtaaagaatgagattagttttgtttgaggtgggtagaatagaaaagtttatgttaagaagtgggtattaggttaagaaagtttgagatttgggattgaatttgattattggaagtagataattggcgtagttggagttaaggtaaattagcggggattttaatgtttaaaatgaaaaatgtgattttggtggagattatggaaggtattcggttaagagtataggttttggagttaattattttgttttttttaaattttaatttaggtaatttattaaatttttttgtgttttagttgtaaaatgaggttaattatagtagttattttatagggttgttgagatgatttaatgagatttagtgtaaaatatttataagagtgtttgaaatatagtaataatttaataaatgttagttattgtaattgtgaggagaagaatggggaatgagtggagattagggaagagtgttgataaaatttgttttattagaaatttttagatttgattgtgaggttattttgtttaagattatttgatggttattttatttagttcgttaaatttatttttgagaagagttattaggatttattatcgttatagtgtgattatgattattaagaaatatttttgtttttttattgtttaaaatggaatataaagattatttagtatttatttttttgtttttatgagttaatatgtatttttgaaggggtaggaaaagatttaatttttaatttattattttttatttgatttttatttgtttgcgatttaattaatttttgaataaaattatgaaaatatagtattattaagtattcggttgtaaaatttatttaatagatagaatttttattgtttaaatgtttattatttaaaaataaaagttaataattattttttttttttttttataaatataatcggttagggaacggagtttaaaggaatttttatttatgttttaaattaaagaaaaaaataggtaatatttgttttttggtttttgagtttgattattttttaagttaatttatataatattaagttattggataatgtttttaagggatttttggagtatttttatatgggaaattattttgaattaatggatttatttttttagtatattagtatttattgaatatttgtttttagtaggtagtgttttaggtgttgaggatggagtgaagagttaaatggatagaaagtaggagtatgtttagtgagtttagtgatagaatgttgtttttttttttttagtaagtatagaatattatgtgggtatttatttgattatttgatggtttagattatttgattgttattttttgtaaattgttttgtttatgaaggattttatttaaattatgattagagagataacgagtaatttatagatttttgtttttagtttttattttttttatttttttttagtataaaaaagtttttaaaatttgtatgtgagttataaaagagtaattttatgttttattatatattaatttgtattttttttttgtttttaattttaaaaaggaaaagtttgaatatagtttattatttatttaggagttttttgatttgattaattgattaatgttataggattatttaattttgtatgagattttttttttatagttatatttttatttttatttttgtagtatttgtaaagtttttaagatattatatttataatttgtattagtattttgtttggtagtgatgaatttaatgtttttaaaatatttggttttttattttagagttataaaatgcggaggaggtaacgttattttaggaagtttttttaaaaggtgtgttagttatacggaatttagtattgatggttggtgtttattatttttttttttattttagg

SEQ ID NO: 232 - DNA, 12356 bp, Artificial Sequence
  chemically treated genomic DNA (Homo sapiens)
tttgaaatgaagaaggaggtagtaaatattagttattagtattgggtttcgtgtaattaatatattttttaaaaaagttttttgaaataacgttgtttttttcgtattttgtaattttaaagtaaagagttaaatgttttagaggtattaaatttattattattagataaaatgttggtgtaaattatagatataatgttttaagaattttgtaggtattataaaggtggaagtaagaatgtggttatagggagagagttttatgtagaattaaataattttgtggtattggttagttaattaagttaaaggatttttaggtgagtgatgaattgtgtttagattttttttttttaaaattaagagtagggagaaaatgtaaattggtatgtagtaaaatataagattatttttttatggtttatatataaattttaagaatttttttatattggaggaaaataaaagaaataggaattaaggatagagatttataaattgttcgttatttttttggttataatttgaatagagttttttataaataagatagtttataaaggatggtaattagataatttgggttattagataattagataagtatttatatagtgttttgtgtttgttagagagaagagagtagtattttattattgagtttattgagtatgtttttgttttttatttatttggttttttattttatttttagtatttggaatattgtttgttagaaataggtgtttaataaatattgatgtgttaaaggagtaaatttattaatttaaagtggttttttatgtaaggatgttttaaaagttttttgaaaatattatttaatggtttaatattgtgtgggttgatttgaaaagtaattagatttaagaattaaagaataaatgttgtttgtttttttttttaatttgaagtatgagtgaggatttttttaaatttcgttttttaatcggttatatttgtaggaaaagaagaaggatgattattggtttttgtttttagataataaatatttagatagtaagaattttatttgttagatgaattttgtaatcgagtgtttaatagtattgtgtttttatgattttgtttaaaagttggttgaatcgtaagtaaataaaaattaggtgagagataatgagttgaaaattgaatttttttttatttttttaaaaatgtatgttaatttataaaagtaaaagggtggatgttgggtagtttttgtgttttattttaaatagtaggagagtagagatattttttgatgattatagttatattgtaacggtagtgagttttgatggttttttttaggagtaaatttaacgggttgagtgaaatgattattaaatggttttgggtagggtagttttatagttaggtttaagggtttttaatgaggtagattttgttaatatttttttttaatttttatttattttttatttttttttttataattataatagttaatatttattgaattattgttatgttttaggtatttttataggtgttttatattaaattttattgaattattttagtaattttataaggtagttgttataattaattttattttatagttggggtatagggaagtttagtaaattatttggattaggatttgaagggggtagagtgattgattttagaatttgtgtttttaatcggatgttttttataatttttattaaaattatattttttattttgaatattaggattttcgttggtttgttttagttttaattacgttaattatttgtttttagtagttaaatttagttttagattttaaatttttttaatttaatatttattttttgatataagtttttttattttgtttattttaggtagaattaattttattttttattttttattttaataaatgttgtggggtggggggaggggggagggatagtattaggagatatatttaatgttaaatgacgagttaatgggtgtagtatattaatatggtataagtatatatatgtaataaaattgaatattgtgtatatgtattttaaaatttaaagtataataataataaaattttaaataataataataataataataataaatggaatagagtagaatgatttgtattttaattttatatgatatttgtttttaatgtgatatttttaaagttatttgtgttatttaaatttagtggtcgtattcgggatataagtaggataatatttaatttataagtttttgtgaagatttaattaaatgtaataattattatagtgtagtgtaggtatttagaaatgtattagtagtattatgttttaatttgttgttaatagttttttgtatatatatttttggttagttaaataataatatttttagataaatttgatgtataaattagaggtatatttttttttttaattttgagatttaataacgtatttttttttagaaatttatttatttatatttaattaataatttatgaaaatagaagtttatttgtatttttttttaattataaatgtttttatttttgttaatttgatagaagaaaaattgataatttatttttattttgtaattttgtggttgttgtgaggttgaatatttattatatgttttttagttatttttataatatatattatatattatattggaatatatgaattggaatatatattatattggaattatatatattatattgtaatatatatatatataggaaatatatatatatttttaatattttttggggtataagtggtttttggttatatggataaattatatagtggtgaagtttgagattttagtgtattttttatttaagtagtatatattgtatttaatatgtagttttttattttttattttttttttttttttttttttttgagtttttaaagtttattatattattttgtatgtttttgtgtatttatagtttagttattatttataagtgagaatatacggtatttggttttttatttttggttaaataatggtttttatagaataatggtttttagttttatttaagttgttgtaaagatattattttatttttttttatggttgagtagtattttatggtgtatatatattatatttttttatttatttattagttgatggatatttatattttttttttgaagtggttgtttatattttaaatttattttatatgtttttatgtgtattagggattttttttttaaaaatattatttattatgtgtaatattttttttttattttttggttttgtagttattgtatattgttgttataatagtttaagtttttaagtagttaaatttattgataatttttttttagggagtttaaattttttaattaggttttttaaggtatttttattttaagattatagaaatagttattttaattttttttaatatttttatgaagtaaatatttgttttgttttgtttatttgtttgtttgtatttaagtaaatttttttgtttttgttttttagaaatagagttatttaggttggagtatagtggtgtaattatagttgatagtattttcgatttttttgtttaattaatttttttattttagttttttaagtagttgggattataggtgtatgttattacgtttagttaatttttgtatttgttgtagagataggagttttattatgttgtttaggttggttttaaatttttgggttgaagggaattgttcgttttagttttttatagtgttggaattataggtatgagttatcgtatttaattaaaagttatatttttttataaaatatattttgaaatttatttgaatttggtagttatgtaggaattttttatgttatatggatagtaatttattggtttgaattgttatttttattatattttatattttttatgtatatggttttattttttgattgtattttgttttatttataggtttatttttgtagtaataaaaattatgttaatttgtaaatattttataaaatttttgaattatgattttattatattattttgttttaatgttatatattgatatataagataattttttatgtttgtatattaattttttaaaaattttttaaattttattatttttaatagttttttagttgatttttagtttatttttttggaatttaagatataaattaaaaataaatgtattgttattattttttaatattataaaagtatattatgtttgtaatagtttttaattgtttagtgatagaaattttgatattttagtatttgataatttattttagggtattgattatataatttattttttttgtatttcgaattgtatttattatagagttgaatatatatagatatttaggaaaatttattgaatggaatttatttaataaattgatattgaatgaaatttattgaatggaattgatatttttgagttttttttaatattagttttttagttgttgtgatttgttaatttaaaaaaaaaagggggtttgtgatgtaatttaggaatggaaaattaaatatcgtatgtttttattgataagtgggagtaaaattatgagaatgtaaaggtataaaaatgatataatgggttttggggatttaggggaaagagtgggagtagggtgagggataaaagattataaatatggtgtagtgtatatatggttgatgggtgtattaaaattttatagattattattaaagaatttatttatgtaattaaatagtatttgtttttttaataatttatggaaatattaaaaaagggttttgttgttaaagatgggaaaattatgattaaataaagtttttaatatgttattgtgttttgtgaatttataaaaagagggtatagtaaaatatatttttataaatgatttaatcgtgaatttttttttttttattataaaggattttataatattagagttttgaagagtattaattgtttgttgttttttgtagtatatggtttttagaatttaaaaaaattttttagttaatatttttaattagtatatgtagatttttgttaacgtaagataaaagtaatgtaaaatattaatgtttaagtatagaattttgtttcgtgtaatttggtttataattttaatattttatttttggataagatatttttgtggtgattttttttttttaagaaaatattttttaatattaagaattatttaataaaattatagatgatttttagagtaaatgtttatgtttttaaaaatgatgtagaaaatataataaatttgagtattttgtatatttttttttgtgaattatggttatatttaattgtatatttattttatttttgtttttttaggttttatgtgggaatatgtagtatttttattggttaaattggtagatcgtgttttttttgttgttgttatatattagttgtgttattttttgtaggtggtgaacggaaggtaatttaataaaggaataaattgtttatttttattgttaaattttggaagtaaggagtttatataaaaagataagaataaataaaacgatagtaaaataaaatggagattgtaatattggaaataattaaaattagttttagtagtagggaaattaataaataaattatggtggtatatttatataatggaatattttaaagataataaagattttgtttttaaaaaaattttagggtttaggggaaaatttataatataatgtaatgaaaaagttggttgtatagttgggtgtaaattatagatatatatgtatatatatatatatatgaggaaaaatattaaaagaaaatttaattaaaagattattagggttagaattagaagttttttatttttttgtagttttttatgttataaatattttatttaaaatgtatatttttattataattagaaaaaagttaaaattttttttagaatatttagttttttatttagtagttgaaatatttagtagttttatttttttatttttaagtttgggttataaatataaaaaattaaagtatgtaattttatattaaaggtaatgaagttttcggtaaagatttatataaaatattaaatttttaaaaaaatgttattaattatggtaaatttaagtagtgttttaaattatagtttaaattaaaagtgtataagtgtaagtttttttttaatttgttatataattttatttttaatattttagaataatataatgaatattatatttagtatttgtattatgtttaaaagtatggttatagatagggttatatgtaaattattatgatattttatttgtttttagataggaagagtgtattttttttgtttatagagtatttggtttttaaagttaatttagtgattgttttaagtataattaaattataattgaaaagagatggtataatagttagagaagggatgatatttagaaatgagaatgaaagtatgaatttttatataaaaaatttattaattaaaataataaatgtataaatagaaataaagaaatgtataaataattattgttttaaaatattattttatatggtaattgtatttgtttttttttttatttagttttttatatagttggaattagtaggtattattttgtggttaaatcgattttaggttttaagataattattaatgattttgtaataaataagtttaaatagaaagtttttaagtgtgtaaaattggtaaaattgattttatttaaattttttttatttagttttttagtttaaaaaatatatgattatatattttaaagaaataaaatagtttgttttattttttgtaattataagggtttttaatttatttaagaaaaaataatttattttgttttgttgttattattttttataagaaaattttttataaagagaaaataattttattagttataataagttgaatgttatatgttttagtttttgtaaagataaatattagattgtgagatttattagattagttatatacgattttaggtagttatttaaaattgtatattgtattatagaaatttataggtagttaagagttgtaaaattgataagtttcggaataagatagtaaatgttttttattattttattaatggtagatttttagatggtcggtttaattttttttattttgttatatgaattatttgggttttattattttaattggaggagtagttgatggattttgttttgtttgttttgttatattaggatatatttgttttttgaaataatatttagttttttttatttagatttttgaatgtttgaaagtttgtaatagttttataagagttattttataatagtttttttttatttttataaagttatttagtgattaaaggttagtttttagaagtgtattttatatggaaattaaagaaaacgaattgtattttagtaagggtgtgatatatgtagtttgaaattggaatattttagtgggtcgtttattattttatttttttgagttttttttagttttgtagggaattgggttttgattacgtatgttttagtaaatagtagtattattataataaagaattattggaaaaatagaggtatttaaattaagtaatgtaattgagagagaaaatagaatttagaagttaaatatatatttttaaatttaagagtaaataaagttgaaattaatagataaatattttgggagagagttaaaaataaggaagttggttagagtatttttagaattttattatatattaattaaaatattgatttattaggtttatcgagatagttgaaattagttattagaaatttaagatatgtttaagtgtttgttttgagaaggaaatattgtataagttttttttttgtttgtttttttttttttttttttttttttttttttttttgagattgaatttttgtttgtcgtttaggttatagtgtagtggtatgattttagtttattgtaattttcgttttttaggtttaagcgatttttttgttttagtttttcgagtagttgagattatagacgttcgttattatgtttagttaatttttgtatttttagtagagatggggttttattatgttgtttagagtggtttcgattttttgatttcgtgattcgtttatttcggtttttaaaagtgttaggattataggcgtgagttatcgcggtataataggttaatttttttgtttttttaaataaattatattaaatgtaatttaatttttttttaatgatataaggttttttttatgagtaatatatgtatgaggttttgttttgagttgaacgttttttgattggatttttgtttgtttgttttttaatttttgtgggtatatagtaggtgtatgtatttatggggtataggagatgttttgaaatagatatgttatgtgaaatgagtatattatgaagaatggggtgtttatttttttaagtatttatttattgagttgtaaataatttaagtatgttttaagttattttaatatgtatagttattattgattgtagttattttgttgtgttattaaatagtaggttttatttattttttttatattttttgtatttattaattgtttttattttttattttttattttatttattattattttttttagtttttggtaattatttttatattttttttgtttatgaatttaattgttttgatttttagattttataaataagtgaaaatatgtaatgtttgtttttttgtgtttagtttaatttatttaacgtaataatttttagttttatttatgttgttggacgtgattgaatatggttgaatagttttttattgtgtatatgtattatattttttttatttatttatttgttgatgtatatttaggttgtttttaaattttagttattgtaaatagtgttgtaataaatatttatatgtagatatttttttgatatattgatttttttttttttaggtatatatttagtagtagaattttagattatatggtagtttaatttttagttttttgaggaatttttaaattgttttttatagtggttgtattgatttatatttttattaaaaatatataagggtttttttttttttatattgttattagtatttgttatagtttgttttttggatataagttattttaattgggtaagatgatattttattgtagttttgatttgtatttttttgatgattaatgatgttaaatatttttttatatgtttgtttgttattcgtatgttttttgagaaatgtttatttaaattttttgtttattttttgattggattatttgattttttttttatagagttgtttgagttttttatttattttggttattaattttttgtttgatgggtagtttgtaaatatttttttttattttgtgggtttttttttaattttgttaattgtattttttgttgtaaagaagatttttaatttgatgtgatttcgtttgtttatttttgttttggttgtttgtgtttgttgggtattgtttaagaaatttttattttaattaatgttttggagatttttttaatgttttttgtagtagttttatggtttgaggttttagatttaagtttttagtttattttgatttgaattttgtatatggagagagataggggtttagttttatttttttatatatgtatatttagttttttttatattatttattgaagagattgttttttttttagtgtatgtttttggtatttttgttaaaaatgagtttattgtaggtgtgtggatttttttttggattttttagtttgttttattgatttgtgtgtttatttttatgttagtagtatgttgttttggttattatagttttgtagtataatttgaagttaggtaatgtaatttttttagttttgtttttttgtttaggatagttttggttatttttggttttttgtggtttaatataaattttaggattgtttttttttatttttgtgaagaatgttattggtatttttatagggattgtattgaatttgtagattgttttggggagtatggatattttaataatattgatttttttaattaatgaatatggaatgtttttttattttttgtgtgttttaattaatgtttttaattagtgttttatagtttttattatagagattttttatttttttggttaatttttagatatttaattttatttgtagttattgtaaatggaattatttttttgattttttttttagattgtttatttttgatatatagaaatgttattattgaattattaaatttgtttattagttttgttagtttttttgtggagtttttaggttttttagtatgtgagatatgttatttgtaaataaggatgatttgatttttttttttataatttggatgtttttaatattttttttttgtttgattgttttagttgggatgtttagtattgtgttgaataatagtggtgaagtgggtatttttgttatgttttagattttagaggaaaggtttttagtttttttttatttagtataatattagttgtgggtaggttatatatggtttttattatgtttaggtatgttttttttatttttagtttttttttttagggtttttattataaaaggatgttgaattttattaaatgtttttttagtattaattaaaatgattatatgtttttgattttttatttttttgatatgatgtagtatattgattgatttgtatatgttgaattatttttttattttagggataaattttatttggttatgatgaatgatttttttaatgtattgttgaatttaatttgttagtatttagttgtggatttttgtattaatatgtattaaagattggtttgtagtttttttttttggtgtgtttttatttggttttagtattagggaagtattggttttatagaatgagtttggaagtattttttttttttttgttttttagaataagttgagtaggattcgtattagtttttttttaaatatttgttagaatttagtagtgaagttattaggttttaggtttttttttattgggagatttttattatagttttaattttattatttgttattggtttgtttaggttttggatttttttttggtttaattttggtaggttatatgtatttaggaatttgtttattgtttttatatgtttttatttattagtatatagttgtttagagtagttattaatgattttttgaatattgtagatattagttgtaatgtttttttttttatttttgattttatttattttgatttttttttttttttttttaaattggttaaaggtttgtttattttgtttaattttttaaaaaaataaaattttgtttttttttttttgttttttttattttgttttgttttgatttttattatttttttttttttattaattttgggtttggtttgtttttgtttttttagttttttaaaatgtattattagattgttatttgaagttttttttttttttttgatgtagatatttagagttataaaattttattttattattgtttttgttgtattttatagattttggtatattgtgtttttattattatttgttttaagaaattttttaattttttttttaatttttttattggtttattgatcgtttaggagtatattgtttaaattttatgtatttgaatagtttttaaaattttttttgttattaatttttagttttatttttgttagagaagatgtttgatattattttagtttttttaatgttttaaggttcgttttgtgatttaatatttggtttatttttaagaacgatttatgtgttgaggaaaataatgtgtattttggttgggtgtggtggtttatgtttgtaattttagtattttgggagtttgaggtgggtggattacgaggttaggagatcgagattatttcggttaatatggtgaaatttcgtttttattaaaaatataaaaatttagttggatatggtggtgggtgattgtagttttagttattcgggaggttgaggtaggagaatggtgtgaattcgggaggcggagtttgtagtgagttgagattttgttttaaaaaaaaaaaaaaaaaaaaaaaaaagtgtattttgtagtttttggatgaaatgttttgtaaatatttattagatttatttgatttatattgtagattaagtttgatgtttttttgttgattttttgtttgaatgatttgtttaatgttgaaagtgaggtgtggaagtttttagttatta

SEQ ID NO: 233 - DNA, 6583 bp, Artificial Sequence
  chemically treated genomic DNA (Homo sapiens)
tattatgagttaggtatttaatatgagaggaattatttttatgtaatagtggttttgagaggttgagtaatttgtttatagttatatagtttaatgatagaattagaatgaaggatttatattaaggattgtttggttgtaaaattttagtttttataatttttaggttatattgttgtttagtgttattattaatttgcggttttattttgggtagttagtgattagttttttagttttttaaggtaaatttgataatggatagatttttttgatttatttgttttatttttaggtatgagtgtagagtggggagagttgatgtggttgtagggttaggagagtattgtagacgtaatgattttttattttagggaagttggcgatgatacggtcgcggtttatagggggttttaaaggtgttagggaggattttatttttttatagttttgtggatttaattaggagaaagatagttaaggagttgtgtaaatatttggggatttatttatgagtttttatttaattttttattagatttaggttgggtgtagtggtttatgtttgtaattttagtattttgggaggttaaggtgggaggattatttgggtttaggaggttgagattagtttgggtaataaagtgaaattttagtttttataaaaaaaaattaaaaaaattagtagggtatggtggtttgtgtttgtagttttagttatttgggaggaaggtgggaggaatgtttgagtttgggaggttaagggtgtagtgaatcgtgaaggtgttattgtattttagtttgggtgatagagtaagattttgttttaagaattataaataaaattagatttaggtttttttttttgttaggaatatggggtagaggttattttttttaatttgtatatagtaggtagtatggtatgggggaattaggtttgttttattttgtttgggagttagaagatttgggtttttttttgataggtgtttattaaggaggagtttttttttgagtttattttattgggttgtgaggtatggtatagtttaggtagtggaagtagagtggggaggggttttttgtttttagtttgtaaaggacgaaggttttaggtgggtttgggggttttaatttttagttaattaggttttttttttgaaaatttttattttattaggtttttgatttttcgagtttttttaatagtttttttgttttttttttttgttcggatttttttttaggttgggttggggtggttttggcggagttcggttgttttttcgtatttgatttggtttttttttataattagcgcgggtttggtttagagtttgcgtttcggaaatgaggacgtttcggggtcgtaggtcgtttttaagttataggggcgggaagtgggcgcggacgttgtgttttcgcggttttggtttcgggatgtgttagtacggggttgggtgatcgggagggtcggatagagtgggcgagttgatttattagcgatggttgtgaaagttggggtttcgcgcggtttggttcgtttgagttagcggcggcgattattatggtaacgagagttacgcgggatttgcgggttatacgaatcgtcgacgtcgtgggcggggtttgcgttggattggtagcggcgcgtttaagtatttagtttgtatcggcgattattatagtaacgagaatttgtttggagtttgggcggggttggtagtagagagatttttggatattttggagagtcggagattattatgataataagggcggtgttggatgggtgggcggtgggcggggttatggaggttcgggggcggagtttgagttttgggtggggttgatcgtggagagattcgcgtaggttttggtgattagttcggttgggagaggttgggcggttatggtataagagtttttgatgtggtattgatgtttaattggagttaagtattttgtagttgtagaagatagatttgtttattatttattgattttagtttgtatagttttgaatttagtgttgtttgaatattatatgtttggtttttagagtttacggtataaaattaatttttttaataaaaagttgatttgagttagtgattttttttgaattagtttcggtttggaaagttagttgttttgggttagatggttttttgtggtttttataaaatcgtggaattagtttcgaagttcggggtttagtttgagaatttatttaatttagttttttaatttttttgtattataatatggaagttttggtatatagatttaatttagttatttttaatttaaagttaagtgtgttggaggttggtgtttgatgttttttttttttttttttaaagagatggagttttgttatgttgtttaggttggattcgaatttttaggtttaaggaattttttcgttttagtttttttagtttttgggattataggtaagggttattatatttggttttgtttaatgttttttagtgagttttattgttaaggttgaggtttagggggtgaatttaggtgagttgttttatttttcgtattttagtttatttaattataaaataaacgtaattatttattttaatggattatttgagatggtgaaagtgtttttatattgtaaagtttgatttaagtttattaattatttatttgttttatatgtattgaaagttttttggtatatgtttagtattggggagataaggaaagagaacggatatggtgtttatttttagggaaattggagtttattgcgggaagtagagaagtaaatagagaattaggggaagggagtgtgttaatgggatttaggagaagggaagattaagttgtggggttatttattaatttggatttggggatttggtaggagttagagattattttgaattttttttttagttgttttttttttttttttttttttttttttgagatggagttttattttgtcgtttaggttggagtgtagtagtgtgatttcggtttattgtaattttcgtttttcggtttaagcgatttttttgttttagtttttcgagtagttgggattataggtgcgtattaattatgtttggttaatttttaaatttttttagtagagatggggttttgttatgtgtgttaggttggttttgaatttttggttttatgtgattcgtcggttttggttttttaaagtgttgggattataggcgtaagttagtatatttggttttaatttttttttagtttttaagtgggttttttgtttagatttagaaattaaattgatattgggtagattagtaagagaaaagtatataagtgttattagttttatatgcgtatggggatttttattagagtgaagtttagagaagtggttaaagtaagatgtttttatattttttagataaaggatgataaatttgagaagaaatggtaggataaaggggatttggttagggtagtaaattttaggggatttattaggagataatatgaggggtataaatttagtggaagatagggttaagtatatttatttaggtttattgtagtttttaatttttagttttaggtgataagggttatttttttgttttggtatagtgagggtatcgtttttagaggaatttttatggtttgttgaatgtagaaagaagtatatttgtttgtttttttttgtatttttttttaaaattatatttatttatttatttatttatttatttatttatttatttattttagagttgaggttttattttgttatttaggttggggtgtagtagtgtgattatattttattgtaattttaaatttttgggtttaagtaattttttttttttagttttttaaagtgttaggattataggtatgagttattgtatttggtttagttagttttttttgaggttattatttttttaatgttgtttatttaaaatggttaatatattaatttagtatattttgggatggtttatattttatttttttagggagaaggaaggttttatggaagaagtgtttattaagttgtattttgaaggataaagaggtaataattagtgttatagagcgtttaggttttatgagcgaggtggtatttgaggggttaagagagagtttggtatggttggaggaggttattatttagggattggagtattaggttaggagtttggatttagttttgagattagtggggagttatggagggttttatgtaggtggtggttgggtttggtttgtttttgagaatagttacgttggttagtagtgtgttgggtttattgtagaggttaatttttgttattattaggcggttagtttgaagagtaaggggtatgggtagggttaggtagttttgagattaggtttatgtaatttgggggaaattggttgagcgtagtggtttacgtttgtaattttagtattttgggaggtcgaggcgggtggattatttgaggttaggagttcgagattagtttggttaatatggcgaaattttgtttttattaaaaatataaaaattagttgggtgtgatggcggtcgtttataattttagttatttgggaggtttaggtaggagaattatttgtattcgggttgggtgcggtggcgcggagtggagcggaggttgtagtgagttaagatcgcgttattgtattttagtttgcgtgaaagagcgaaatttcgttaaaaaaaaaaattgggagaaacgattgaatttttttgaggtttttgtttttaaattagatgttattattttatgaatttattttgaggattagaggtatgtaaagtatttagtatagagaagggcgtaaataagttatttttttttttttttgtattttgaataaagttgagttgtttttggtttttatagtaattttgtaaatgattgttttcgttttgtagtcggtcgtagttttgggttgtttgcgtttgcgtagtgggtgttgattatgtcgatcgcggcgtcgcggacgttgttggagtcgtttggtaacgatgtcgtttggtaattgaataggttggttagtggcgcgggttattggaagtagaaagggttgcggaggtaggtgaggcggcggtggtgggttaggggttcggggataggggggtttagtgatttatttagttttatttatacggggtcgtgtttttatatttaaaattacggttttttgttttcggtcggatttttttagtttacgtcgtttagaagaaggtaggtttttgtttttagtatttatcgtttttgtgaggggagtttaatttaaatatggttacgttttttttagttcggtttttatttttatcgttgttatttggtgtttcgcgtgagtatttggtttattttttattggagtagatttttataggtttgtggtttgtttattttattaattatgataataatcgtaataataattatagttaatatagttgaagttttggtatgttaggtttacgtgtattcgttaatatgataattttgggaggtagggaaggaggtattgttattattttttttttgaagttgtagaaagatatagatagaggaagtaatttgttaaggttatttaggtttgaatttggagttagtttttaattattaatttatattgtttatagttgttgaaagtgtgtgtgtgtgtcggtaataaaagttaattatttttttttttttttttttttttgagacggagttttgttttgtcgttaggttggagtgtagtggcgcgattttggtttattggaattttcgtttttttgatttaagcgatttttttgttttagtttttcgagtagttgggattataggtatgcgttattacgtttagttaatttttgtatttttagtagagacggggttttattatgttggttaggatggtttcgattttttgattttgtgattcgtttgtttcgggttttttaaagtgttgggattataggcgtgagttattgcgcgtggttataaattattttttaatattaatttttttttatggatgtgttagaagtatttgaatatgggtttttggtagtgaatgagttagatttagatttgaatattggtttttagttttattagttttatggtttttagtaagttttttggttagaattttagtttttttatttgtaaaatgtggataatattagttttttttttatggggtagttgaattggatattatttattgttggtataaggtaagtattaaatagagtgattaatttggagtttgtttgtttggtttgttttgttttttaatgtttttgattgaagatttagatgaaagtattagtggttttttttgtgaagtattattgtgtgggagggttttggagtttgtagtttgggttgttatttatttatttttattgggattttgagtaaatttttttattgtttttagttttagtttgtttatttgtaaaatgaaagtaaaaatatttatttgtttgtttttatagtttggaggattagatgagaagtagtttttaaattataatagaaataatgatagttttttggttttttttagt

SEQ ID NO: 234 - DNA, 6583 bp, Artificial Sequence
  chemically treated genomic DNA (Homo sapiens)
attaaaagagattaaaaagttgttattatttttattatgatttaaaagttattttttatttgattttttaaattgtgagggtaggtaaatgggtatttttatttttattttatagatgagtaaattgaggttgagagtaatgaagagatttgtttaaagttttagtgaaggtaagtaagtagtagtttaaattgtaaattttagagtttttttatataatagtgttttatagaagaaattattgatatttttatttggatttttagttaaaggtattaaaggataaaataaattaaataagtaaattttaagttggttattttgtttagtgtttattttgtgttagtaataagtagtatttaatttaattattttataaggagggggttggtattatttatattttataaatgaggaaattgaggttttggttaaggagtttattggaggttatgaaattggtaagattagaagttagtgtttaaatttgggtttagtttatttattgttaggaatttatatttagatgtttttgatatatttatgaaaaggaattaatgttaaaaggtgatttatggttacgcgtagtggtttacgtttgtaattttagtattttgggaggttcgaggtaggcggattataaggttaagagatcgagattattttggttaatatggtgaaatttcgtttttattaaaaatataaaaattagttgggcgtgatggcgtatgtttgtagttttagttattcgggaggttgaggtaggagaatcgtttgaattagggaggcggaggttttagtaagttaagatcgcgttattgtattttagtttggcgataaagtaagatttcgttttaaaaaaaaaaaaaaaaaaaaaagtgattaatttttattgtcgatatatatatatatttttagtaattatgggtagtgtaggttagtagttaagaattggttttagatttaggtttgggtgattttggtaagttattttttttatttgtgtttttttgtagttttaaaggggagatgataatagtatttttttttttgttttttagagttgttatattaacgaatatacgtaagtttggtatattagggttttagttatgttggttgtggttattattacggttattattatggttagtagaatggataggttataggtttgtaggaatttattttagtaaaaggtaagttagatgtttacgcgggatattagatgataacggtagaagtgggggtcggattgggagggacgtggttatgtttgagttgagttttttttataggaacggtgggtgttggagataggggtttgtttttttttaagcggcgtgggttgggagagttcggtcggagataaaagatcgtgattttgagtgtggggatacggtttcgtgtgaatgggattgggtgggttattgggtttttttgttttcgggtttttagtttattatcgtcgttttatttgttttcgtagttttttttgtttttagtagttcgcgttattggttaatttatttagttgttaggcgatatcgttgttaggcgattttagtagcgttcgcggcgtcgcggtcgatataattagtatttattgcgtaggcgtaaatagtttaaggttgcggtcggttgtaaagcgggaataattatttatagggttgttgtggagattaaaggtagtttagttttgtttaaagtatagaagggaaaggaagtgatttatttacgtttttttttgtattgggtattttgtatgtttttgatttttagagtaaatttataaggtggtaatatttagtttagagataagaattttagagaagtttagtcgttttttttaatttttttttttgacggagtttcgtttttttacgtaggttggagtgtagtggcgcgattttgatttattgtaattttcgttttatttcgcgttatcgtatttaattcgggtgtaagtgatttttttgtttaagttttttaagtagttgggattataggcggtcgttattatatttagttaatttttgtatttttagtagagatagggtttcgttatgttggttaggttggtttcgaatttttgattttagatgatttattcgtttcggttttttaaaatgttaggattataggcgtgagttattgcgtttagttagttttttttaaattatataggtttgattttaagattgtttagttttgtttatgttttttgttttttaggttgatcgtttggtaatgataaaggttagtttttgtagtggatttaatatattgttggttagcgtagttgtttttaaaagtaagttagatttagttattatttgtataaaattttttatggttttttattagttttagggttgagtttaaatttttagtttagtgttttagtttttgggtgatggttttttttagttatgttagatttttttttaattttttaaatgttatttcgtttatgaagtttgagcgttttgtaatattaattattatttttttattttttaggatgtaatttggtgaatattttttttatgaaattttttttttttttgaaggagtgaagtatgggttattttaaaatatgttggattggtatattgattattttgagtggataatattggaaaaatagtggttttagaaagggttaattgggttaggtgtagtggtttatatttgtaattttagtattttgggaggttgaagggggagggttgtttgagtttaagagtttgaggttatagtgagatatgattatattattatattttagtttgggtgatagagtgagattttaattttaaaataaataaataaataaataaataaataaataaataaatagatataattttaaaaaaagatataagaaaaggtaaatagatatgtttttttttgtatttagtaagttataaagatttttttaggagcggtatttttattgtattagggtaagaaaatagtttttgttatttgagattaagaattggggattgtaatggatttgaataaatatatttaattttgttttttattaagtttatgttttttatattattttttagtgaattttttagaatttattgttttagttagattttttttgttttgttatttttttttaaatttgttattttttgtttaaaaagtataaaagtattttgttttggttatttttttagattttattttggtaaagatttttatgcgtatgtaaaattaataatatttgtatgttttttttttgttaatttgtttagtgttagtttggtttttagatttaggtaaagagtttatttaagagttaaaggaggattggggttaggtgtgttggtttacgtttgtaattttaatattttgggaagttaaggtcggcggattatatgaggttaggagtttaaaattagtttggtatatatggtaaaattttatttttattaaaaaaatttaaaaattagttaagtatggttggtgcgtatttgtggttttagttattcgggaggttgaggtaggagaatcgtttgagtcgggaggcggagattgtagtgagtcgagattatattattgtattttagtttgggcgatagagtgagattttattttaaaaaaaaaaaaaaaaaaaaaaaaaaaatagttaaaggaggagtttagggtgatttttagtttttgttaaatttttaaatttaaattagtaagtgattttatagtttaattttttttttttttaaattttattggtatattttttttttttaattttttatttatttttttgtttttcgtagtggattttaatttttttgagggtggatattatgttcgttttttttttttgtttttttagtgttaggtatatattaggaagtttttagtatatgtaggataaatgaatagttaatggatttgaattaagttttatagtataaaagtatttttattattttaggtgatttattgaaatagatagttgcgtttattttatagttgagtaaattgaggtgcggaaggtggaataatttatttaagtttattttttaagttttaattttagtagtgaaatttattaaaagatattaaatagagttaggtgtggtggtttttgtttgtagttttaaggattggggaggttgaggcgggaggattttttgagtttaggagttcgagtttagtttggataatatagtaagattttatttttttaaaaaaaaaaaaaaaagatattaaatattagtttttagtatatttagttttgaattgaagatgattgagttagatttgtgtattaaggtttttatattgtgatgtagaaaagttaaggagttgaattaagtaggtttttaaattgaatttcggatttcgaagttggttttacggttttataagggttataagaggttatttagtttaaaatagttaattttttaaatcgaaattagtttagaggaaattattgatttaggttagttttttattaaggaaattaattttgtatcgtgagttttagaagttaggtatatgatatttagatagtattggatttagaattatgtagattaaggttagtagatggtaggtaggtttattttttgtagttgtagggtgtttgattttaattaaatattaatattatattaggagtttttatgttataatcgtttaattttttttagtcgagttgattattagaatttgcgcgaatttttttacggttagttttatttagggtttaggtttcgttttcgggtttttatagtttcgtttatcgtttatttatttagtatcgtttttgttgttatggtgattttcggttttttagggtgtttaggagtttttttgttgttagtttcgtttagattttaggtaggttttcgttgttatggtgatcgtcggtgtaagttggatgtttggacgcgtcgttgttagtttaacgtagatttcgtttacgacgtcgacgattcgtgtagttcgtaggtttcgcgtggttttcgttgttatggtgatcgtcgtcgttggtttaggcggattaggtcgcgcggagttttagtttttatagttatcgttggtgagttagttcgtttattttgttcgattttttcggttatttaatttcgtgttggtatatttcgaggttagggtcgcgagggtatagcgttcgcgtttatttttcgtttttataatttgaaagcggtttgcggtttcggggcgtttttattttcggagcgtaaattttgggttaggttcgcgttggttgtggaggagagttaggttagatgcgggaagataatcggatttcgttaggattattttagtttagtttggagaggagttcggatagaaaaaggagatagaggggttgttgaggaggttcgaggagttagaggtttggtgaagtgagggtttttagggaaaaggtttagttggttgaaagttaaggtttttaggtttatttagagttttcgttttttgtagattgggagtaggagatttttttttattttatttttattgtttgagttgtgttatgttttatagtttagtaaggtaagtttagaggggagtttttttttggtagatatttgttaaggggagatttaggttttttgatttttaggtagggtggggtaggtttggtttttttatattatgttgtttgttgtatgtagattgagagaaatggtttttgttttatatttttgatagagagggaagtttggatttggttttatttataatttttgagataaggttttattttattatttaggttggagtgtagtggtatttttacggtttattgtatttttgattttttaggtttaagtattttttttattttttttttaagtagttgggattgtaggtataggttattatgttttgttaatttttttggtttttttttgtagagattgaggttttattttgttgtttaggttggttttaattttttgggtttaagtgatttttttattttggttttttaaagtgttgggattataggtatgagttattgtatttagtttggatttgatgaaaagttaggtggaaatttatgggtgaatttttaggtatttgtatagttttttaattgttttttttttggttgggtttataggattgtggaagaatgaggttttttttgatatttttggggttttttgtgagtcgcgatcgtgttatcgttagtttttttaaggtagagagttattacgtttgtagtgtttttttggttttgtagttatattagttttttttattttatatttatgtttagaagtaaagtaggtgaattaaggaggtttgtttattgttagatttattttgaggagttgggagattggttattgattgtttaaggtgggatcgtaagttaatggtgatattgggtagtagtgtggtttggaggttataagggttgggattttgtagttagatagtttttgatgtgaattttttattttgattttgttattaagttgtgtggttgtgggtaaattatttaattttttagagttattgttatatgaaggtaattttttttatattgggtgtttggtttatggta

SEQ ID NO: 235 - DNA, 5297 bp, Artificial Sequence
  chemically treated genomic DNA (Homo sapiens)
gttgtaatttttaaatagtttttaagaagttttaaatttttttttatttttttgttttttgagttttttaaatttttttaatttttatttattattttgttttaaagttagttttatatttttaggtatttttataataaaattttatttttggtattaattttttgtaatagattatttttgtattgttataaagaaatattcgagattgggtaatttataaagaaaagaggtttaatttgtttatagttttgtaggttttataggaaatatggtgttgatatttgtttggtttttggggtagttttaggaagtttataattatggaggaaggcgaaggggaaataggtatgttatacggtgaaagtaggagtaagatagcgagagtatgggataggtgttatatatttttaagtggttagtttttatgtgaatttagagtaagagtttatttattattaagggtatggtttaagttatttatgagggatttatttttacgatttaaatattttttattaggtcgatttttaatattggtttttataatttaatatgagatttgagtagggataaatatttaaattttattatgtatttacgtttaggagtataaagtttttataagtattattattgtttattttttaatataatatgttaagttataaataaataatatggtttgttatttaataagaagtagaaagtttagtagtatatttttatttttaatgttgttagatatgtaattaagtgaggtagttattagttttttttttataagaaaatttaatgtttttataaagttttttagtgtttttagaaaagcggaagtttttataaaggagatttgttttatgttaattatgtaaaattaagggttattaataaaagattatgtgaatgagagaagttgaggaatgtaattttattttattttaatatttaaatggtagataattatttttggatagagtatggagttatagaaataaaatattttaattttgaaaatttagttatttaggaggttgaggttggataattatttgaatttaggaggcggaggttttagtgagttaatatcgcgttattttattttagtgtgggttatagaatgagattttattttaaaaaaataaataataataataataatttttgttttttttttgtattatggatagatatattaattttatgggtgataattatattggaaaggatagtgaatgcgataagtaatattattaaatttaaaaggttttgataagttataataatgggttaattgtaatagacgaaatgtgatagatataagattttttttttttattaaaaaatgaattgtaaaagtatagaatatagggaaagtttaataataatatgaaatgatatagtatttttttgaaagaaagattaatatgatgttattgttaaaaaaatgatgtttagagtatggattgtattattagagtaacggtattatttttatttagaagggtatgtttttttaggaggtatattggaatatttgggaagtgtgtatttgaaattgaggaaagtatagttaatattattatgtaattttaaaattaaaaatatagaaaaaaagagataaaatgaagttttataaaattttttaggttgggtatttaggaaataagtagtgatttttttagtgggttagggatggttaggtttgggagtatgatattttcgtgtatagttaagggaagtagttattgagtaatttagtttttgagtaatttagttggaagaaggagaaaagagttaattgtatttttattcgtaagatttatcgtatattttttggttttgttttatatttaatttatttgtttttaaatgtttattgagtattagttatgtgatacgtatttagcgtattgaggataaagtagagaataagatagttatataagattattagttgatgttttttagttttataaagtatattttttagttttattttgtttgattttttgagttagttttgaggtaaaaattttaatatttttatttggtgaaatatatattgagttaattttttagatttagtggttaagggataagttttttgattttaaattgtgttattatgaagttttattgttagtaattaggattttggataggttaattattattttagtaaattaattaaatttgagaagggggtgtgggaattttgatttatagttggttagttagaagtgtaggtgatagttaatttaaagttttgtggaaatgaatttttaatttgtgggatttgattataagttgaggtagatagtgttagaattaagttaaattgtaagatatcgagttggtgtttgttggagaattgttttatgtgtgggggattttttggtgttagaagtgttgagttagtggagagtagtaaaaatagtttggttttttttattttaaataggagtgaaaataaatttttatgaaatagaagtgaatggaggtatgtagtttaaaataattttaagagagatatgtaggagggttgggattttttgttttaggtgtaatttggatgtggggttggttggtgtagtgtgaggggttaaaattaaagttagggagttgttttaattggtatttataatttattatttttttttatttgtaaaggtagtcgggtgatgatttgtaggtataatattgggtttttgtttttgaagaaattcgattattagtttagggatttaggaggaaaataatataaataaataagagattattttagttatttagaaaaattagtttagatttttatatttgaatttaaaagaataattaagaattaattattagagaggggaagaattttttttttttagggaaaagattagataaatatacgtaagaatggatttttgaagaaatataattgagtgaatagaagagaggtttaaaaattattattttcggtgatatttgagaagagagtatatttatgaaataaatgtagggtgttattataggtcggtagtttaataggattggtgtttttagaagaagagatattaagggtgtgattgtatagagaaaatgttttggagggatattaagagaagatagtcgtttacgaggtaggggagaggttataggataaattaaatttgttggtattttgatttagaatttttaggattgtgagaaatttttgttgtttaagttatttaggttgtggtatattgttacgatagttttagtcgattaatataggtattgtatgtttttagtttatttaggtaagatttattattagaaattgatagaataagaaaaattttgattgttttaaaataggatttttgttttaaaagagttaatgatttaagaaataaatgtattaggagattatttattaatacgtattgatgaaattatgaagttagaaaattattagtggatgttaaaatttgtgggtaaaaattagatgaggaatggggtgtaattaagtagtatttttttttagtattatttttaattataaagaaaaaaatagtaattttatggtgaagaaatttggtagatattattttatttaagtgaatattatttatattgggagaaatcgatgttatttgtattttgatattatgtattggaaaagatatatcgttttagtggtgtttttttaaaaatttataatttgaaagggaatattaaatttattttgaaggatattttatataatatttggtttgtatttttaaataatgtttagtttaataaatataaaagttaaggacggttttagattaaagaagattaatggaggaataatttttttatttggaatgttttttaagtaagaaatatttgttttcgaatttaagagtgtagattttttttttatttaattggttcggagatataattatattattttattatatttttttaaggttttgatttttgttataatttataatatataaatgtatatgtgtggtattcgttttattattaatttaggtgattagtagaagaaaagtgtttggtgttaatttttattttatagtataaaatagttttttaggatagggtttttggtgagagaagtataggatgtcgttgggtgattgagattgggttaggaaatagggaggtagagggtaatagtttttttagaatttaaaatttggttgtttttggaagagaaagtaagagatttttggaagttagaacgttatgttttataaatgtaaaagttttagttgggaaagatatatcgttttagtggtgtttttaaatgatttttaaaatagtagggttttatttgtaggttttagttataagtaaaaaggttaaaagttagttttagaaatttgttaaaaaagatttttagtagggcgttggggaaacgtagatcgcgtcggaattttcgtttggagaagtttttaatagggcgggaaattgcgtgttttataaggttttttagaggtatattgtggagacgggtttagggtagtaatttttggcgagtggagcggttattatataagcgaaatattcggaagtaatttatttttagttttcgtaatatttattttgagttattatttttttttatatagttacgttataaatttttttattttcgtttatagttttttgggtttcgatttattaattgagtttgcgttaagtttattgcgtacgcgttaatttcggtttaattagcgttttaaatcgtggggtggacgttacggggataaattatttttagcgtggggcggggtttcgaagtcgaataacgaacgtgattagttagttttttttatagatttttaagggcggagtttggttttggagatacgtttggagagttgtttttttaatatgggtagggtcgggcgtggagttggtagcggcgttgtgtgcgtttgcgcggggcgtcgagatagggcgtgttcgttgtttagtgtcggtgttgtagggagtgagggtagttggagtgcgttttgtcgaagtttgtggttgtacgtttatcgttttaggggttatttttcgtggtgagtgtgtgcggtgttgtatttggggttgtttttcgttgcgtggtcgtagcggggttgaattttttttattttatttttttttcgtattcggattagtttttgggacgttttcggacgtttattcgttttaattttggggaagttttagagtggtagcgaaggttttttgttttttcgtttttgcgtttgttgttatcgtttacgtgttttgttgttgttcggtgtaga

SEQ ID NO: 236 - DNA, 5297 bp, Artificial Sequence
  chemically treated genomic DNA (Homo sapiens)
tttgtatcgaataataataaagtacgtgggcgatgatagtaagcgtagaggcggaaaggtaagaggttttcgttgttattttgaggtttttttagggttggagcgggtgggcgttcgagggcgttttaggggttggttcgggtgcggggaggggatggagtgggaagggtttagtttcgttgcggttacgtagcgagaagtaattttaagtgtaatatcgtatatatttattacggaaggtagtttttaagacgatgggcgtgtaattataagtttcggtagaacgtattttagttgtttttattttttgtaatatcggtattgaatagcgaatacgttttgtttcggcgtttcgcgtaggcgtatatagcgtcgttgttagttttacgttcgattttatttatattaggagaatagttttttagacgtgtttttagggttaggtttcgtttttaaaagtttgtggaagaggttggttaattacgttcgttattcggtttcgagatttcgttttacgttgaggatagtttattttcgtggcgtttattttacggtttgggacgttgattgggtcgaagttggcgcgtgcgtagtagatttggcgtaagtttagttgatgggtcgaagtttagagggttgtgggcggaagtggggaagtttgtggcgtgattgtgtaagggagggtggtggtttagggtgggtgttgcgaaagttggaagtaaattgttttcgaatgtttcgtttgtgtaatagtcgttttattcgttagaagttgttattttgagttcgtttttataatgtgtttttgagggattttgtggggtacgtagtttttcgttttattaagagtttttttaggcggggatttcggcgcggtttgcgtttttttagcgttttgttggaaattttttttgataggtttttaaggttggtttttagtttttttatttgtagttagaatttataagtaaaattttattgttttaaaagttatttgaaaatattattaaagcgatgtgttttttttaattaggatttttatatttgtgaaatatgacgttttggtttttaggaattttttgtttttttttttaaaagtaattaaattttaaattttagagaaattgttgttttttgtttttttattttttgatttagttttagttatttagcgatattttgtgttttttttattaaaaattttgttttgagagattattttatattatggaataaaaattggtattaggtattttttttttattggttatttaaattgatgataagacggatgttatatatatgtatttatatattgtagattgtagtagggattaaagttttaaggagatgtggtaaaataatgtaattatattttcgaattaattggataaaaaaaggatttgtatttttaaattcgaaagtaggtattttttgtttaaaaaatattttagatgaaagagttatttttttattagttttttttgatttggaatcgtttttggtttttatgtttattgaattagatattatttaagaatatagattaggtattgtgtggaatattttttaaagtaagtttgatgtttttttttaggttatgaatttttggagaaatattattaaagcgatgtgttttttttagtgtatgatattaaggtatagatggtatcggttttttttagtataggtgatgtttatttaaataaggtagtgtttgttaggtttttttattataaagttattatttttttttttatgattaaaaataatgttggggggaggtgttatttgattatattttattttttatttaatttttatttataagttttagtatttattgatgattttttaattttataattttattaatacgtattagtaggtaattttttaatatatttattttttgaattattaatttttttaaagtaaaagttttgttttgaagtaattagaattttttttattttattaatttttaatagtgaattttgtttaggtaggttgaagatatatagtatttgtgttagtcggttagggttgtcgtaataatatattatagtttggatggtttaaataatagaaattttttataattttggaagttttagattaaggtgttagtagatttgatttattttgtggttttttttttgtttcgtggacgattgtttttttttggtgtttttttagggtattttttttatgtagttatatttttggtgtttttttttttaaggatattagttttattggattgtcggtttataataatattttgtatttgttttatgaatgtattttttttttaagtattatcgaggataatagtttttaaattttttttttgtttatttaattatgtttttttaagggtttatttttacgtgtatttatttagttttttttttagaaaagaaagattttttttttttttggtgattgatttttggttgtttttttgagtttaagtgtgaagatttgaattggtttttttagatagttggagtggttttttgtttgtttgtattgttttttttttagatttttagattgatagtcgaatttttttagaggtaagaatttagtattatgtttgtaggttattattcggttatttttgtaggtggagggaaatggtggattgtgagtgttagttagggtaattttttgattttggttttagttttttatattgtattagttagttttatatttaggttatatttggaatagagagttttagtttttttgtatgttttttttgaagttattttgagttgtatgtttttatttatttttgttttataggaatttgtttttatttttgtttgagataggaaaaattaaattgtttttgttattttttattggtttaatatttttgatattagagaattttttatatatgaaatagttttttagtagatattagttcggtgttttatagtttaatttaattttgatattgtttattttaatttatagttaaattttataagttaagggtttatttttataagattttaggttgattgttatttatatttttgattgattagttataaattagggtttttatattttttttttaggtttgattaatttgttaggatgatggttagtttgtttagggttttgattgttagtagtgaaattttatggtgatataatttggaattaggaaatttattttttggttattagatttgggaagttggtttaatgtatgttttattagataagaatattaaggtttttgttttaggattggtttaggaaattaagtaagatggagttgggaagtgtgttttgtgaagttgggagatattagttgatagttttgtatggttgttttgttttttgttttatttttagtgcgttgagtacgtattatatagttgatgtttaataaatatttggaaataagtgaattaaatgtaaagtagaattagaggatatacggtgggttttacgaatgagagtatagttgattttttttttttttttttagttgaattatttaaaaattgaattatttaataattattttttttggttatatacgaaaatgttatgtttttaagtttgattatttttaatttattaaaaaaattattgtttattttttagatgtttagtttggaagattttgtaaagttttattttgtttttttttttttgtatttttaattttaaaattatataataatattgattatgttttttttaattttaggtatatattttttagatattttaatatgttttttagaaaagtatgtttttttgagtggaaatgatatcgttattttaatgatgtagtttatgttttaagtattatttttttgatagtgatattatgttaattttttttttagaaaagtattatgttattttatgttattgttaaattttttttgtattttgtatttttgtaatttattttttgataaaagaggaagattttatatttgttatatttcgtttgttataattggtttattgttgtagtttattaagattttttggatttgatggtgttatttatcgtatttattgttttttttaatataattgttatttataaagttgatatgtttatttataatataaaaagggagtaggaattgttgttgttgttgtttgtttttttgagatggagttttattttgtaatttatattggagtgaagtggcgcgatgttggtttattgaaattttcgttttttaggtttaagtgattgtttagttttagttttttgagtagttgaatttttaaggttagagtattttatttttgtggttttatattttgtttagaaataattatttgttatttgagtattagagtaagatgaagttatattttttagttttttttatttatatggttttttgttaataatttttgattttgtataattaatataaagtaaattttttttgtaaaggttttcgtttttttagaggtattgaaaaattttataaaagtattgaatttttttatgaaaaggaagttaataattattttatttagttatatgtttggtagtattggagataaggatgtgttattgaattttttattttttgttaagtggtaaattatattgtttatttataatttaatatattgtgttaaggaataggtaatggtggtgtttatggaaattttgtatttttgagcgtaaatatataatagagtttggatatttgtttttgtttaaattttatgttgagttataaaagttagtgttggagatcggtttggtgggaggtgtttagatcgtgggggtagattttttatgaatggtttgggttatatttttggtgataagtgagtttttgttttgagtttatatgagagttggttatttaaaagtgtgtggtatttgttttatattttcgttgttttgtttttgtttttatcgtgtgatatgtttgtttttttttcgtttttttttatgattataagttttttgaggttgttttagaagttaagtagatgttagtattatgttttttataaagtttgtagagttgtgagtagattaaattttttttttttataagttatttagtttcgggtatttttttatagtaatgtaagaatgatttattatagaaaattggtattaggagtggggttttgttataaagatatttgaaaatgtggaattgattttggaataagataatgggtagaggttggaagagtttggaaggtttagaagatagaaagatgagggaaaatttggaattttttagagattgtttaaaagttgtaat

SEQ ID NO: 237 - DNA, 5989 bp, Artificial Sequence
  chemically treated genomic DNA (Homo sapiens)
  unsure 1201, 1205, 4182, 4225, 4353: n is a or g or c or t
ttaattgagtttcgggaggttgagattgtagtgagtcgagattatgttattgtattttagtttgggtaatagagtgagattttgttttagaagataaataaaaattaataaataaaaataattttaaaaaaaatagtgtttaattttattaatcggtagagaaatgtaagtgtagatataaagagagattattgtatatttattagagtggttggaatgaaagagtaattgtatagcgattgagcgaaagtggtatagttggaattttcgagtatttttggatttcggtttttatatagatatttagggttatggtttaaaggttagatagaattttaaagaagagtttttttaggattgagattaattaatcgaggaaaagtattttattttagggcgagatagaatttttaaggttaggtgtttttttttatggttgatatagagtttttcgagttttattataagtttagagaatttaaagaatagtattttattttttcgtggtatcgagagagagaatttatagataatattattttaaaatttagtattaagagaaagtatttggtaagcgtttttattagggataaatagatttaaagaaaagcgaatatattttagttgagaacgagcgatatttaaggataaatgcgttttacggtcgatattagtatttaaggaagagtttttcgcgggttgagataaagttttcgatggagagtaattttatagggcgacgattatgtatttagagaatagttatttttattttagtttttgagtatagatagagtgtttaaggtagagtttttatttagggttgtgattgaatggggaagaaatattttttaattcgagtttgataaagggaattaaggtagggtttttattttcgggtttaggttattttagtaggaaaagttttttatattatcgagagggagtttttaagaaaagttttttggttttataatatagtcgagataaggtgtttaaggaaaacgtttttttacggttaatataggtatttacggtggtgtttttagagcggaattatattacgtaggttgtcgtattatatattcgatattcgatgtagtgagtttagaaaagatattttttagggcgaaattaaaatatttagagaaaaatcgtttatttatagttttgaagttttgagtttgtcggagatgcggtnggtntattttagtaaatggtagcgaaattgtatattggttgattttttgaatttgtttttgaagtttgggaattgttttacgtttagtttttagttatattttttatatttgtttaatttattacgatttttttacgtggattttttaaagttgtaagtttttaaaaaggttaagaatttttttttcggggaatttagtttttatgatgtaagttggttgatgtttttagtcgaataaattatttttttttttaatttagtgtttgaggagttttgtttgcggtttattttgttatattttttggttttttgattaacggatagtcgaggtagttttttaggtagtttatgtttgttttgtagagtatttttgttgggaattttggttagtttgagcgatgtagattttgagagcgtttcggggtaggtatttgtttttgtggaacgttttgttagagtagtgtatagtaggttttcgcggaggattaacgtagtggttgaatattaggaaggaattggtattttaagtttggatatttaaaatttggtaagattggtttttggaatttgtcgattttatttgagtggaagtatggttagattatttacggtgtatttgtattagttttttggtttttgtttttgatttgatttgaattgtttgataattttagttttgattttgatttgatttgaattgtttgataaaaaggcgtgtttttattggtattttggtttattttttatggaatggaagatattattaagagatattattgttaatttttttagaatgaatatattaattatttaaaattttatcgtgttaataaaattttttttgaaaattgataaatagataattgttttaagtatgtgtaaatcgaaggtttggtaaagttaagataatttttaagaaaaagaattaagttggtaaatatatattattaaatatgagatttattataaaggtagagtaattaaaatcgtgtggtattggagtaatgataggtaaatatattaagggtagaggatatagaggttagaaataatttggaaatggaaaatagttagatttattataggagagtttttgtaaattattgtggaaagattagtgtttttaataaatgtattttataaatgtagggaaaatataaattttgatttttattttattttattgtagaaaatattattaaagatagatagtgaatttagtaaaaaatataagatattagttttatagttttagaataggttaaggtgtttttgattaggataaaaaagttttaattataaagaatatattgtttaattagatataattaaatgtaaaatttttattttttaaaagatatttttaagagagtggaaaagtaaagtatatatgtagattatatattatataatgtataggataggttatatataaaaatatatattaattatatataaatatatatagtatatataatataatattttatatatatatatatatatgtatttgataataattgagtggaatttagagtatatttagaattataaattaattttaaaagtaaatatcgtaataaaatttggggggaaaagttgaatatgtatattataagagttatatttaaatatatttttagtaattatataaaatatattcggattttgattttattttattttatgaaaatttatttgaggtgaataggagatttagaagaaaatttagaatattatcgttatggtattgggggaggtaaagatttttatttaaaataataaagagttttagttataaataagattgattaataagattaagagaatttgtttatttaaaatatattattgagatagtgtaaaagtaaaatagatttgtagaagatattaaaattgtatatgtattttaatatatgtatatatatgtttgtgtgtatgtgtgtataattgaaatttagaatatatgtaaattataaatttatttttaaaatataaatattttaataaaatttggtagaaaagattttaaagggaattttttaaaagatatggttaaatgattaataaatatatgaaaaagtgtttcgaaaaaaaaaaaataataaatagttgggcgtagtggtttacgtttgtaattttagtattttgggaggtcgaattgggtagattatttgagtttaggagttcgagattagtttgggtaatttggtaaaattttatttttattaaaaaatataaagattagttaggtttggtggtatgcgtttgtagttttagttattgaggtacgagaatcgagcgagtttgggagtttaaaaaataattaaaaatcgataaattaatatttttaaaaagggtgtttaattttattaattagtataaaattgtaagtgtagatataaggagagattattatatttttaaagagtggttggaatgaaagaataattgtatagtgagttgtgtgtatgtggcgaatttggaatttttaaatatttttggatttcgatttttgtatagatatttgaggttatggttgaaaggttagatagaattttagggaagagtttttttaggattgagaattaattaaggaaaagtatttaattttggggtgagatagagtttttaaggttagttgggtgttttcgtggttgatataagagtttttcgagttttattataggtttagagaatttaaggaatagtattttatttttttatagtattaggagatagtatttatagataataattttaaaaatttagtattaagagaaagcgtttggtaagcgtttttattatggataagtagaattatagaatagttaatatattttagttgagagcgagtaatatttaaggataaatgtgcgtatagtcgagagtagtatttatggaagagtttttataggttgagataaagttcgcgatagagagtgattttatagttttgtgattatgtgtttagggtatanttattattatttcggtttttgaatatagatagagtttttaagntagagtttttttttaggattgttatcgagtaggaaagaaatacggttatattcgaggttgatataggtaattaaggtagggtttttaattttgggtaaaggttatttagtaggaaaagtttttataantattgagggagtttttaaaaaaagtttttcggatttataataaagtcgagatggggtgtttaaggaaaacgtttttttatggttgatataggtttttatggcggtgtttttagagtgagttatttttttaggaattttattatatattcgatagagaatattttagaaaagatattttttgaggaaaaaggatattttttcgggcgaaattaaagtatttagggaaaaattgttttatttatagttttgaagttttgattttgtcggaggaggggcggtagtattttataaaatggtagtgaagttgtggcgtttttttattgttgtaattttgtagaaatttgtcgtttgggagttatgggaaacgtgttttttcgcgtgtttgggagtgatgtttatggggaggcgttttattagaagtattaattcggaaaggtttaaggcggatggaaggaagggaagttgtagttttcgcgtgtttttttttagtttaatattgggaatttgtgtggggcgttagagttcggaagagaagttttgcgtttagtaggatcgtggcgttagcgggagaattaggaagcgtagttttttttttagttgattttggtgttttttataggtggtttttattattaattgtatagcgggtagaggtagaggaatatagaatttttttatatagcgggataaaagggtgaatttggagttgataggtaaatatattttgtgatatatttttttggttttgatattagggtaatattggtcgtatagaatgaagtagtgttttttcgttattttttggaagatattgttaagtattggtattattttttttttaaatgtttgatagaatttgtacgcgaagttattttggtttggtttgtatttttggggagattttaaattattaattaaatttttttttatgttatagttttaagtcgattttttatttattatttatttatttatttatttatttattttgagacggagttttatttttgttgttcgtttttgttgttcggggtggagtgtaatggtatgattttggtttatttaattttcgtttttcgggtttaagtgatttttttgttttagttttttaaatagttgggattataggtatgcgttattacgtttagttaattttgtatttgtagtagagacggagtttttttatgtttgttaggttggttttaaatttttaattttaggtgattcgttcgttttggttttttaaagtgttgggattataggcgtgagttattgtatttagtttgtttttttttgagtcggtaatttgttttttaagaattttttttattttatttaagttgtttagtttgttggcgtaaagttgtttataatgtattttttttaatttttgtaaggttagtattaataattttttttttatttttgattttgataatttgtgtagttttttttattttttttggttagttaagttaaaagattgttagatttttttttttattttttcggtgaattaatttttgattttattgatttttttgttttttattttattgatttttttttattttaatttttattatttttttttttttgtttgtttgtattaaatatattagtttaaaattttagg

SEQ ID NO: 238 - DNA, 5989 bp, Artificial Sequence
  chemically treated genomic DNA (Homo sapiens)
  unsure 1637, 1765, 1808, 4785, 4789: n is a or g or c or t
tttgaagttttaaattgatgtatttaatataagtaagtagaaggaggggaatgatgaaaattagagtagaagaaaattaatgaaataagaaatagaaaaattaatgaaattaaaagttggtttatcgaaaaggtgaaaaaaaaaatttaataattttttagtttgattgattaagaaaaatagaaaggattatatagattattaaaattaaaaatgaaaggggggttattaatattgattttatagaaattaaaaggaatatattatgaataattttacgttaataaattaaataatttaggtaaaatggaaaaaatttttggaagataaattatcgatttaagaagaaataggttgggtgtagtggtttacgtttgtaattttagtattttgggaggttaaggcgggcggattatttgaggttgggagtttgagattagtttgataaatatggagaaatttcgtttttattataaatataaaattagttgggcgtggtggcgtatgtttgtaattttagttatttgggaggttgaggtaggagaattatttgaattcgggaggcggaggttgggtgagttaagattatgttattgtattttatttcgggtaataagagcgaataataagagtgaaatttcgttttaaaataaatgaataaataaataaataaataataagtagaaaatcgatttaggattatagtatgaaaagagatttaattagtaatttaaaatttttttagaaatataagttaagttaagatggtttcgcgtgtaaattttattaaatatttaaggaagaaataatattagtatttagtaatgttttttaaaaaataacggaggaatattattttattttatgcggttaatattattttgatattaaagttagagaaatatattataagatatatttgtttgttagttttaaatttatttttttatttcgttgtgtgagaaggttttgtgtttttttgtttttgttcgttgtgtagttgatagtgaaggttatttgtagagagtattagagttagttaaggggagagttgcgttttttggttttttcgttggcgttacggttttgttgagcgtaaaatttttttttcggattttggcgttttatataggtttttagtgttaggttgggggagggtacgcgaaagttatagttttttttttttttattcgttttgagttttttcggattggtgtttttggtgagacgtttttttatgagtattatttttaagtacgcgagggggtacgttttttataatttttaaacggtaagtttttataaagttataatagtggggaggcgttataattttattgttattttgtgaggtgttgtcgtttttttttcggtaaggttaggattttaggattgtgagtggggtagtttttttttggatgttttaatttcgttcgggaaagtgttttttttttttagaaagtgttttttttgaggtgttttttgtcgggtgtgtggtagggtttttgggaaagtggtttattttgaggatatcgttatgggagtttgtgttaattatgggggagcgttttttttgggtattttatttcggttttgttgtgggttcggggggttttttttgggggtttttttagtgnttgtgggggttttttttgttgaatgatttttgtttagggttggggattttgttttggttgtttgtgttagtttcgggtgtggtcgtgttttttttttgttcggtggtagttttgaggggggattttgntttgggagttttgtttatgtttaagggtcggggtggtggtggntgtgttttggatatatgattatagggttatggggttattttttgtcgcgggttttattttagtttgtgaggatttttttatgagtgttgttttcggttgtgcgtatatttgtttttagatgttgttcgtttttagttaggatgtgttggttattttatggttttgtttatttatgatggagacgtttattagacgtttttttttggtgttgggtttttaaaattattatttgtgggtgttgttttttggtgttgtgggggagtggggtgttgttttttggattttttgagtttgtggtgggattcggggaatttttgtgttagttacgagggtatttagttgattttgggaattttgttttattttagggttgggtgtttttttttggttggtttttagttttgagggagtttttttttgggattttatttgattttttagttatagttttagatgtttgtgtaggaatcggggtttagaaatgtttgaaggttttagattcgttatatgtatataatttattgtgtaattatttttttattttagttattttttgggagtgtagtgatttttttttatgtttatatttgtaattttgtgttaattaatgagattgagtattttttttaaaagtgttaatttatcgatttttgattgttttttgggtttttaggttcgttcgattttcgtgttttagtagttgggattataagcgtatgttattaagtttggttaatttttgtattttttagtagagatggggttttgttaaattgtttaggttggtttcgaatttttggatttaagtgatttgtttaattcggttttttaaagtgttgggattataggcgtgagttattgcgtttagttatttattgttttttttttttcggagtatttttttatgtgtttattggttatttaattatgttttttaggaagttttttttgaggttttttttgttaaattttattgagatgtttgtattttaaaaatggatttgtagtttatatatattttgggttttagttgtatatatatgtatataggtatatatgtatatgtattaaaatatatatataattttaatgttttttataaatttgttttgtttttatattattttaataatgtgttttagatgaatagatttttttaattttattaattagttttgtttatggttagagttttttattattttaagtgaaaatttttgttttttttaatgttatgacgataatattttaagtttttttttagattttttatttattttaaataaatttttatggaatggagtaaagttagagttcgggtatattttatgtgattattaaaggtatatttgagtatgatttttatgatatgtatatttagtttttttttttaaattttattgcgatgtttgtttttaaaattgatttgtagttttggatatattttggattttatttagttgttgttagatatatatatatgtatatatataaaatattatattatatatattatatatatttatatatgattaatgtatatttttatatataatttattttatatattatataatatgtaatttatatatatgttttgtttttttatttttttaagagtgttttttgaggaatagaagttttatatttaattatgtttaattaaataatgtattttttatggttagagtttttttattttaattaaaaatattttggtttattttaaagttgtaaagttaatattttatattttttattggatttattatttatttttaataatgttttttgtagtgggatggggtaagaattaaagtttgtattttttttgtatttatgaagtgtatttattaaaagtattagtttttttataatgatttataggagtttttttgtggtaaatttagttattttttatttttagattgtttttggtttttgtgttttttgtttttggtgtatttatttgttattgttttaatattatacggttttaattattttatttttatagtaaattttatatttagtagtgtgtatttattaatttagtttttttttttaaagattgttttagttttattaaattttcgatttgtatatatttaaaataattatttgtttgttaatttttagaaaaaattttgttaatacggtggaattttaaatgattggtatgtttattttgagagaattaataataatgttttttaataatgttttttattttatggaaggtaaattaaagtgttaataaaggtacgtttttttattaagtaatttaagttaagttaaaattaaaattaaaattattaagtaatttaagttaagttaaaaataaaaattaaagggttggtataggtatatcgtgggtgatttggttatgtttttatttaaatggagtcggtaagttttaaagattagttttattaagttttagatgtttagatttaaagtgttagtttttttttggtgtttagttattgcgttgatttttcgcgggggtttgttgtgtattgttttgataaggcgttttataggggtaaatgtttatttcggagcgtttttaggatttgtatcgtttaagttggttagagtttttagtagggatgttttatagggtaggtatgagttgtttaaggggttgtttcgattgttcgttaattaggaaattaagaaatgtagtaggatgagtcgtagataaaattttttaggtattggattaaagaaggaagtggtttattcggttgggagtattagttaatttgtattataagagttgagtttttcgaaaaagaaatttttggtttttttagaggtttataattttaaggggtttacgtgaaagagtcgtgataaattgagtaagtgtgggaaatgtgattgggggttaggcgtagggtaatttttaaattttagaggtaggtttagaaagttagttagtgtgtaatttcgttgttatttgttgaggtgnattngtcgtattttcggtaagtttagaattttagaattgtgagtgggcggtttttttttggatgttttaatttcgttttggaaagtgttttttttgggtttattgtatcgggtgtcggatgtatgatacggtagtttgcgtgatgtggtttcgttttgggagtattatcgtgggtgtttgtgttagtcgtgggagagcgttttttttgggtattttgtttcggttatgttgtggggttagggggttttttttgggggttttttttcgatgatgtgagggattttttttgttgaaatgatttgagttcgggggtggggattttgttttggttttttttgttagattcgggttaggggatgttttttttttatttagttatagttttgagtggggattttgttttgggtattttgtttgtgtttaggagttggggtgggggtgattgttttttggatgtatgatcgtcgttttgtggggttattttttatcgggggttttattttagttcgcgagggatttttttttgggtgttgatgtcggtcgtggggcgtatttgtttttggatgtcgttcgtttttaattaggatgtgttcgtttttttttggatttgtttatttttgatggggacgtttattagatgtttttttttggtgttgggttttaaaataatattatttgtgggttttttttttcggtgttacgggagggtggagtgttgttttttggattttttaagtttatggtgggattcggggagttttgtgttagttatgagggagggtatttgattttgggagttttgtttcgttttagggtggagtgttttttttcggttggttgattttagttttgaaggagtttttttttggggttttgtttgatttttgggttatagttttgggtgtttgtgtggaaatcggggtttagaaatattcgaaggttttagttgtgttattttcgtttaatcgttgtatagttatttttttattttagttattttgatgggtgtgtagtgatttttttttatgtttatatttgtatttttttgtcgattaatgagattgagtattattttttttaaaattgtttttatttattgatttttgtttgttttttgagatagggttttattttgttgtttaggttggagtgtagtggtatgatttcggtttattgtaattttaatttttcggggtttaattga

SEQ ID NO: 239 - DNA, 5026 bp, Artificial Sequence
  chemically treated genomic DNA (Homo sapiens)
tttttgagatagagttttgttttattatttaggttggagtgtaatggcgtaatttcggttaattgtaattttcgtttttcgggtttaagtaatttttttgttttagttttttaagtagttgggattataagtattcgttattacgtttagttaatttgttttgtgtttttaatagagatggggtttcgttatattggttagtttggattttaggtgatttattcgtttgggttttttaaagtgttaggattatagacgtgagttattacgtttggttgtaatattttttagttttcggtgtatattttgtatattttttgttagatttattttttagtatttaatattttgatgttattatatatgttatgattttttgtatttaaaattttgattgttattgattttgttttaaattttttttttgttgaagtataaatttggtaaagtgtataaattttttaaaaatttttttttttttttttaaatttttttttgggaaagttttattgtgaaaaagatataaataagagattttgttagatttagtttgaaattattaagtgtaatatatttaaggatggttttaatgttagattgggatggtttttttttttaaatgaaaaggattttttttttaggaaaatgttaggtaatatagtataagtgattatttttattttttaatttgaagattaattattttttaataaatgtttatttaatttagtatggttatttttttttttttttaaattattaaagttaagtatattggtatatttagttgtgttatttgtatatgaaaatttttttttttaattttttttttttttttgtaataagtttcgtttttgttttttaggtttgagtgtaatggtttaatttcggtttattgtaatttttgtttttcggatttaaacgatttttttgtttttgttttttaagtagttgggattaaggtgtttgttattatgttcggttaatttttgtattttttagtagagatgaggttttattaagttggttaggttggtttcgaatttttgattttaggtgatttgttcgtttcggttttttaaagcgttgggattataggcgtgagttattgtgttcggttgaaaatatttattaataattttttaagtatttgtttgtttttttttttaagattttaataaattgatgttaagaatttatggagaaaattataaaaattttattaaaagatatacgaataattgaatgaaataagtaattatgtttatggattggaagaggtaatataagggaaatatattatttttttttaaacgaatttgtaaaattaaagtgaataatttgttgttgttgttgagatttatattgttacgtaagttggagtgtagtaatacgataagagttttaattttttgggtttaagcgatttttttgttttagttttttaagtagttgaagtacgcgttattatgtttggttaatgttttttatttatttattttttgtagagacgaggttttattattttgtttaggttggttttgaatttttgggtttaagtgatttttttgttttggttttttaaagtgttgggattataggcgtgagttattgtatttagtttgtataaattttgtgtataatttgataaaattttatgtttgaatatattgttgtgattattagttagattaagatatgtaatatttttcgtattcgagatttttttatgtttttgttttttattttttttgataattaggaggtttttttatgatattttttatttaagtggaattaattatgatgtatttcgtttggtttttttttttttttattataatttatgtatataagttttatttatatcgttgtgtgtagtagtcgtttatttttattgttatgtaatattttttttttttatttaaggatatttagattatttttagtttttgttattttgggtaatgttgtaatgaatatttttttatatgattataaataataaatatttttgggtatatgtttagtggtagaattattgggttatggtttgtgtataattagttttagtagatagtgtttgatatagtttggatatgtgtttttatttaaattatatgttaaattgtaatttttaatgtcggaggtggggtttggtgggaggtaattggattataggggtgggttttttatgaatggttaagtattattttttttggtattgtttttgtaatagtgaatttttgtgagatttggttgtttaaaaatgtgtagtatttatttttattttatttgtttttgttatgtaagatggttgttttatttttgttttgtgcggtgattggaagtttttttaggtttttgtaaaagtagaaattgttatgtttttcgtatagtttgtaaaattatgagtgaattaaatattttttttttataaattatttagttttattgatagtaatgtaagaatagtatttggtattatagttttttaaaatgattaaatttttattaataaatatgaaagatatagttgttatatatttttgttagtgtttggtattggaagtttttttaatttaagttattttggtggtagttttggtattttattgattttaatgtttataatatatagaatttttttttatgttgggtttatagggcggttttggaatttatttttttagaggttatatatatatgtgtattggtgtatggtagaggttggtgtatatatattagtgtatggttgagttataatcggagtatatttgagattaattttatggtttaagaagaatttacgtttggagttttgggttaaggaatttaggagtagttaatttagagatttattttttatttatgaaggatatttatatttttggttcgtattttacgttgtatagattaaggttttttggggttaaatggaggttgttagaaggagagtgttaagtgaaaatgttatatagattacgtgttttttataaatggtagtagttttttaggttagttttttattatcggattatttttgtatgtaaattttgaataaattttgttttttttattgattttgtttttttttttatagtgttattttaattggagttagtggggtttagaaggataattggttatttagataatatttgaaaattaattaaggtaatttatagtaatattaaaaaatataaatgaatattttaataaaggtagaaaaagtagttgatatttaatgttttttttttgatgttatgattaagataaggaagtttattattattgtttttatttaatagtggaaatattagttagtaataaaaggtaaaaataaataaaaataaaaggtataaaggttatagagaagttaaattatttttattcgtggattgtaagattttgattatagaaatttcgaaagaatttatagagtattataaataataagggaatttagtaagatgtttgtatataaggttagtatgttaaaattaatattgtttatttttacgagtagaatataaaaaagttaaaatgttatttaatattgtatataaaatattaaatatttaagaataaatttaatgaaagatatatatgatttttatattgtaatttatttaagtatagttgtattaaaatatagatatatgtgtaatttataaaatattgttaggagaaattaaagatcgtttaaataaatggtgggggaagaatgatatttatggattgaaggatttgttgttaagatattagtttttttaaatagatttatagatttaatgcgagtttaataaaaaatttttttttttttttataaagttaattttaaatttatttaggaatataaaggtcgtagaataagttaaaataattttgggagaataagttataggatttaaagatttattataaaattatattaaattaatatagtttggtattggtataaagttagataaagattattttttttcgttttttaatttgtttttatttttagaacgtgttggtagttttttttattcgatttgtaagggttaaagggcgttgaggaagggttgatcgattggggtgggaaataaagcggtattgagataattttaggttatttttttttttttagtattttcggatgaaaggtttttttttttggtttgggaagtttattaagaagaaagtttgggttgtggcgttttggggaagtgaatagtacggtcgtcgggcgcgtcgttttaggaattagaaggttttttgtcgttattagtgtagaatgattttcggtaagttttagtcgtttagaatttttagtttaaagatcgcggggatttacgcgttattcgggtttttgttttcggaagagattacgtagtcgttaaagacgtaatggaggcgaaagggtttggttagttgtggtagttatgataaaaattagggaaaatgggagttcgaagtagttttcgttattaatagatatataaacgtttttaatcgttatacgttttttagggatgatagtacgttataaaagtgtttttaaagtattattgaaagtttcgtgggagtgttcgttggcgtgggcgcggtggaagggaggaagaacgtgtacgttttaggttttcgtaattatggttgcgaggggcggggattgggagcgcgggttttgggtcggggtgcggttgggaggaatcggttttttattgttttagtcggtttcgcgtcggcgtgtcgtttttcgtttttttagtagtacgttgcgtggttgttcgttggttatttaggacggaagttcggttggtgtttttttagaagttttttttttgggcggtggtggaggtggtaatcgtgatagtagtagtttcggcggtagtaatagcgattacgagggatggcggcggttgtagtaggaattgtaatattttagaggtgtatgtttttttttttttttggtatttattttatttttttttttttggttagtgagttttgttgaagtcgttgtttttttgatagg

SEQ ID NO: 240 - DNA, 5026 bp, Artificial Sequence
  chemically treated genomic DNA (Homo sapiens)
tttgttaggaaaataacgattttagtagggtttattagttaaggaaagggggataaaataaatattaaagggaaagaaaaatatgtatttttgggatgttgtagtttttgttgtagtcgtcgttatttttcgtagtcgttgttgttgtcgtcggagttgttattattacggttattatttttattatcgtttaagggggaaatttttggagaaatattaatcgagttttcgttttaaatagttagcgagtagttacgtagcgtgttgttagggggacgggaggcgatacgtcggcgcggggtcggttgggatagtggaggatcgattttttttagtcgtatttcggtttaggattcgcgtttttagttttcgtttttcgtagttatggttacggaggtttggggcgtatacgtttttttttttttttatcgcgtttacgttagcgggtatttttacggagtttttagtagtattttagaagtatttttgtaacgtattgttatttttaaggaacgtgtggcggttaggggcgtttgtatgtttgttaataacggaagttatttcgagtttttattttttttagtttttattatggttgttatagttagttaagttttttcgtttttattacgtttttagcggttgcgtggtttttttcgggagtagaggttcggatgacgcgtggattttcgcgatttttgggttggggattttaaacgattgggatttgtcggaagttattttgtattaatagcggtaaaaagttttttggtttttggggcgacgcgttcggcggtcgtattatttatttttttagaacgttatagtttaggttttttttttagtgggttttttagattaagaagggaaattttttattcgaaggtattgaggggaggaaggtggtttgaagttattttagtgtcgttttgttttttattttagtcggttagtttttttttagcgttttttaatttttgtagatcggatggagaaagttgttagtacgttttagggatgggggtagattgaggagcgggagggagtagtttttgtttaattttatattagtattaaattatgttaatttaatgtagttttataataaatttttaagttttgtaatttatttttttaagattgttttggtttattttacggtttttgtatttttaggtgaatttggaattagttttgtaaaaaaggggggggattttttgttgggttcgtattgaatttatagatttgtttgggaaaattagtattttaataataagttttttaatttatgaatattattttttttttattatttatttaagcggtttttaattttttttggtaatattttgtagattgtatatatatttatattttaatgtagttgtgtttggatagattgtagtatagagattatatatattttttattagatttatttttgagtatttagtgttttgtatataatgttaaatggtattttgatttttttatattttattcgtaagaataaataatattgattttaatatattgattttatatgtaagtattttgttaagtttttttgttatttgtaatattttgtagattttttcggaatttttgtgattaaaattttgtaatttacgaataaagatggtttaatttttttgtaatttttatattttttatttttatttatttttgttttttgttgttggttagtgtttttattattgaataaaaatagtgataatggatttttttgttttggttataatattaggaggaaagtattgaatattaattgttttttttgtttttattgaaatgtttatttgtattttttaatgttattgtgaattattttggttagtttttaaatgttatttaaatggttaattgtttttttggattttattgattttagttgggatggtattgtaagaagagaggtagagttagtgaaggagataaggtttatttaggatttatatataagggtggttcggtggtggagggttgatttggagaattgttattatttgtaaaaagtacgtagtttatatagtatttttatttagtattttttttttagtaatttttatttaattttaaagggttttgatttgtatagcgtaagatacgggttagggatgtggatgttttttatagataaggagtgaatttttgggttggttgtttttggattttttagtttaggattttaaacgtaagttttttttagattatagggttagttttaggtatgtttcggttatggtttagttatatattaatgtgtgtatattagtttttgttatgtattaatatatatatatgtatggtttttgaaagggtgaattttaagatcgttttatgggtttaatatgaaaagaagttttatatattatggatattgaaattaatgagatattaaaattattattagaatggtttaaattaaaaggatttttaatattaagtattgataaggatatgtagtaattgtattttttatatttgttggtgagagtttaattattttggaaaattgtggtattagatgttgtttttgtattgttattaatgagattaggtaatttataaagaaaaaatgtttaatttatttatggttttgtagattgtacgagaagtatagtagtttttatttttgtagaggtttggggaagtttttaattatcgtataaggtaaaggtagagtagttattttatatggtaggagtaagtagggtgggggtaggtgttatatatttttaaataattagattttataagaatttattgttgtaaggatagtattaagagaggtggtatttaattatttatgagaaatttatttttatgatttagttattttttattaggttttattttcgatattggggattgtaatttgatatgtgatttgggtggggatatatatttaaattatattagatattatttattaaagttagttatatatagattataatttaataattttattattgggtatatatttaagagtatttattatttatgattatgtagaagaatatttattgtagtattatttaaggtagtaaaaattggaaataatttaaatgtttttaaataggagaaaaaaatattatatagtaataggaatgaacgattattatatataacgatatggatgaagtttatatatataagttgtggtaaaaaaaaaaaaaagttagacggagtatattatgattgattttatttagatgagaggtattataagggaattttttggttgttagggagggtggggaataggagtatgaagaaatttcggatgcgggaaatgttatatattttgatttggttggtaattatagtagtgtatttaaatataaaattttattaagttatgtataagatttgtgtaggttgggtgtagtggtttacgtttgtaattttaatattttgggaagttaaggtagaaaaattatttgagtttaggagtttaagattagtttgggtaagatggtgagatttcgtttttataaaaaataaataaataaaaaatattagttaagtatggtggcgcgtgttttagttatttgggaggttgaggtaggaggatcgtttgagtttaggaggttgagatttttatcgtgttattgtattttagtttacgtaatagtgtgagttttaataataataataaattgtttattttgattttgtagattcgtttgaggagaaatgatatattttttttgtattgttttttttagtttatgaatataattgtttgttttatttagttattcgtatgttttttagtaaagtttttataattttttttataaatttttggtattagtttattgaaattttgggaggaaggatagataaatgtttaagaagttattaataaatgtttttagtcgggtatagtggtttacgtttgtaattttagcgttttgggaggtcgaggcgggtagattatttgaggttaggagttcgagattagtttggttaatttggtgaaattttatttttattaaaaaatataaaaattagtcgggtatggtggtaggtattttaattttagttatttgggaggtagaggtaggagaatcgtttgaattcgggaagtagaggttgtagtgagtcgagattgagttattgtatttaagtttggaggataagagcgagatttattgtaaaaaaaaaaaaaaagttaaaaaaaaaagtttttatgtgtaaatgatataattaaatatattaatgtatttagttttggtaatttaaagaaggggaggagtaattatgttggattaagtgggtatttattgaaggataattgatttttaaattgaagagtgaaaatagttatttatattgtgttatttaatatttttttaggaaagggattttttttatttaaaagagaaaattattttagtttaatattgaagttatttttaagtgtattatatttgataattttaaattgaatttaataaaattttttatttgtgttttttttataataaagtttttttaaagagaagtttaaaaaaaagagagaaaatttttaaaagatttgtatattttattaagtttatattttaatagaaaaaagatttaaaataaaattagtaataattaaaattttaaatgtaaagagttatgatatgtatagtaatattaaaatattaaatattgaaaaataaatttgataaaagatatgtaagatgtgtatcgaaaattaaaaaatattgtagttaggcgtggtggtttacgtttgtaattttggtattttgggaggtttaggcgggtggattatttgaggtttaggttggttaatatggcgaaattttatttttattaaaaatataaaataaattagttggacgtggtggcgggtgtttgtaattttagttatttgggaggttgaggtaggagaattgtttgaattcgggaggcggaggttgtagttagtcgagattgcgttattgtattttagtttgggtaatagagtaagattttgttttaaaaa

SEQ ID NO: 241 - DNA, 15872 bp, Artificial Sequence
  chemically treated genomic DNA (Homo sapiens)
tttatcgaaggttgaatatataaatattatttgttattttattgatttttttagtttttgaagtttttgattatagtagggaaattttattttgtttaataaattttagttatttaagaatatattttttttgtatttgtaggtggtaaggtagggggagtaggttgtaaatggaataaaatgaagttttagtttttggggattttattatcgagaaaagtagaatattgtgttagtaagattaataatttttgagtatttgttttgtattaggtattgtgttaggtatttggtatgtgtgatttaagggtaatttaaggtttaaagtgtgatgagagtttagagagattttagaagttttttgaagaagtgatattggaattgatatttgaggaatagtatgattttaataggttgaattggtgaaagtaatggaaggagttaggatttttttttttttttcgagatggagttttttttttgttgtttaggttggagtttaatggtatgattttaggttattgtaattttttttttttttgtttaagttatttttttgttttagtttttcgaatagttgggattatcggttttcgttattatgttcggttaatttttgtatttttagtagagatagggttttattatgttggttagattggttttaaatttttgattttaggcgatttatttattttgggtttttaaagtgtcgagattataggtgtgagttatattaggttagaagtaagaatttattttttaaagtttaagaggtaaggaacgggggttgtattgtaggaattgggaatattttttttggttttgtattttttgttttttaaaatgaaatatttgtaggaattttttatttgattttattgttttttttttttttttggtgtattttaaaaggattgttagatttatttttatgaaattaatatttgattaaattataattttattaagaaggaagataggaagatagaaaagtaggaggtagtgatagaatgaagagggaagtttttaatattattttatagaataatgtttaaattttttattttaagtttttaattggtagtgttagttggtgtatttttagttttattttttgttattttaattttatagtgtttttgttttttatattttagggattttttagagtaggtattttattttttcgcgtttttatttttgtttttttttttgtttgaaatggtttgtatttcgttaaaattagattaagattttaaattttagtttaagtgaattttttttaagatatttttaattatttatttaaaattaagtttttttttttttgtggttttataggattttttgtttttattttagtatttgttattttggagttagaagatttgggttaaattttagttttgttatataaaagttgaatgaattgggggggatttttattgatatttttgaggttgtttttttttttttttttttttttttttttttttttttttttttttttgagatggagttttgttttgttgttaggttggagtgtagtggtacgattttggtttattgtaatttttgttttttgagttgaagtgatttttatgttttagtttttcgagtagttgggattattggtatgtgttattatatttagttagtttttgtatttttagtagagatggtattttattatattggttaggatggttttaattttttgattttatgatttgttagtttcggttttttaaaatgttggaattataggtgtgagttatcgcgtttggtttgtttttttttttgtaaaaatgggatatttaagatttattttgtcgtatataataagataatgtatgtaaaatttttatatatgtaatatatttatattttaaatatgtaaacggttaaaagtttttattttattaaaatgtaaggttttagggaataggaattttaaaatgaaaaattttttttttaaaataatatttataggttgggtgtggtggttttcgtttgtaattttagtatatcgggtggttgaggtaggtagattatttgaggataggagttcgagattagtttggataaaatggtaaaattttatttttataaaaatataaaaaatttgttaagtatggtggtatacgtttgttattttagttattcgggaggttgaggtaggagaattgttatgggaggtggaggatgtagtgagtcgagattgtgttattgttttttagtttgggtgatagagcgagattttgttttaaaaaaaataaaaataaatatataaataaaaattaaaaataaatttttatagaatagttgtaaaggtatatagagaatttttatatattttttatttaattttttttattgttaatattttaaataattatggtatatttattaataataagaaattaatattgataaaatattattagttaaattgtagattttatttttatttttataatagttttttaatttatggtttttttttgttttaggatttaatttagaattttatattgtatttagttgttatttttttagtttttataatttgtgatagttttttagtttttttttgttttttatgattttgatatttttgaggagtattggttattttgtagaagtagaaaaattttttatatgaatttttttgatgtttttttatgattagattgaggttataggtttgggaagtatattatagagttaatgtgtttttttttatattaggggttttattataataatatggtttattattggtgataaaagaggggttttttgtttgtttgtttgtttttatcgatttttattttgttgtttaggttgaagtgcggtggtgtgattttggtttattgtaatttttgttttttgggttttagtgatttttttgttttatttttttaagtagttggagttatatgtaggtattattacgtttggttaatttttgtttgtttgttttgagatagagtttcgttttgtagtttaggttggagtgttgtggtgcgattttagtttattataatttttgttttttaggtttcggtttaagaaatttttttgttttagtttttcgagtagttgggattataggaacgtattattatgtttagttaatttttgtatttttagtagagatagggttttattatgttggttaggcgggttttgaattgttgattttaggtgatcgttcgttttggttttttaaagtgttgggattataggcgtgatttattatattcggtttaatttttgtatttttagtagagatggagttttattatgttggttaggttggtttcgaatttttgattttaagtgatttatttatttcggttttttaaagtgttgggattataggcgtgagttattacgttcggtttatttttgtttaaattataaatttagttttttttatagttagtttagtttatgtttaggaatgtataaggatagtttggaggttaaaagtaagatggagttggttaagttagattttttttattgttttagttattattttgcgaaggtaaatttataagtgggaagaaaggacgggtagatgtagggtagagagagggttttgtgtttcgagtttggatgatatagatttggtaatattattttaaggagagattagagaaagaagtttagggtagaaggtaattaattagagtatgttgaatttgttttgtagaaaaattttgtgaaggaaatttttgggaggttgttgtaaatgttgggttggggatggggtgggtttagagatttagatttgaagtaatttttagtttattgatagttgaagtttaagaagagagttagatgagtagaggtgaagagagaagaggatattagatttttgagtaaatttagtttaagtttagggaggagtaagaaagggagatagtgaaggaagtagataaggaatattgggaagttggataaataagaattgggtagttgataatattaatgaagagggaagaggagaggattttaattttttcggagatgttagatgagaaaaaattaagaaatgagtgagaaaaaaatgatggagtgattaaatatttatgttgtttttttttgagaatgttaattatgaaaagaagaaaagggtggtggtggttgtaaattataggaaggttgagaaagggttttattttggttttgtttttaatttttgacgtatttaatttttttaagttatttgtttgtaaatataattggtataaataatatttgatatgtttattttataggataagtgttttttttttagattatatattcgaggatagcggtcgtttacgttttatttatatttatttttttaatataatagttatttggaagatgtcgagtggcgtgggaagaataagcgggaacgagcgtcgattcgttcgcggtttgattgttagcgtatcgttgtgcggtcgttttatcgcgtatttttttttgaattatttattatcgagacgaggacggtgatcgtttttattttatagaggatacggagtgaaggcgtagttataggtttaaagtttttagtcggcgggttttggaaatggacgatttttttatttaaaagttacgaggtaataaagtatgtggatgaggagggaagggagtcggggttaataatttattttaaagtaaaagacgttttcgggggtggggaataaataaataataaaattcggttttgtgttttcgcgtttgcgtttttttaggtttgttaggttgtcgttcgcgtttaggttagagttttagtgcgtttgcgtcgagttcgattttcgttagggttcgattggtttttaggttatttttttcggtttagggagggtttgcgttgtggttagagaagggagtttggtgattgggtgcgcgtgttgatgacgaaatcggaagtgttcggagtagaggcgggattagaatttagagggtttcgggattgcggaagtttggtggggagggtcggagttttggtggagagagtgtcgtttaaaataagtttcggaagggaggttgtttttcgcggttcgagaattatcggtttttttagtttgagggttgttatttcgtgcgcgtttcgacgttgttgttgttggtttttttcgtttttcgtttttttgggaatcgtttgggaatttcgttatgttatttatttcgtttaatttttaggtattattgtttatttttcgtttttttagggagttgggatcgaggggaggcgcgagaagcgggtggggggcggggagaagggaggaagcggtcgcgtttgtggtcgaggcgtaggagggcgggttcggggatttgtagtaggtgggagaggggttcgttttttaacggaaaggtcgtttttggttcgtttttggggtttttcgagttattggttttgtgagattttttatttttgttgatatttttcgtttttaaattagttaagatttgggtaggtttttttaattagggttaacggagaaagaaagaacgtaatttttgtaaagttttattttggattagttgaagatagggtggttatagttcggttttagttttttaagttgatagtagatttttttattttgagttgttaggtgagtagagatatgggaatagattaagaatttgagattatagttagtttgtatgtaattttcgtgaagttattgaatttatgtgtatatttttgtggtttttagatggtagtgtgtaagatcgaggagtatttttaaatttttgtgtggttttatttttttttttttatcgtaatgagtatagtgttttgtatataaattatggaattttaagattttaggtttaatcgttagttttttgtggaatggaattcgtttagaaaagaaattttttaatgtaatggtgttttttatttttagaatggatttagggttttagtggcgtttagaatgtaatgtggtttaatgtagaggatttttagtttagtaagttaataaggtataaaagagtagtttaaaatatttgtattgagttttcgtcgtggattttcggtagtttgttgaataagtagttattggagtgtttgatagaggtattaaaggtaatggaagaattttttaatttatgataattgattttgaagaaagattatttaaagtagatttatttaaatagagattaaaattttatatatatatatataaaaagagtgggaaaggaggtttgtttgggatttttattttgaaaatcgatttagaagattattaaaataattgttattttttataaaatattataattgtataattgtaataatgatttattttgtggaataagttaagtgttgatttgtttgtgttttttttttttttttttttttttttttttttttttttttgagacggagttttgtacggtcgtttaggtttgagtgtagtggcgtgattttagtttattataatttttattttttaggtttaagcgatttttttgttttagttttttgagtatttgggattataggtatttattattacgtttagttaatttttgtatttttagtagtagagatgaggttttattatgttggtttaggttggttttttgattttaggtgattcgtttattttagttttttaaagtgttgggattataggcgtgagttatcgtgttcggatgattattttttttattaaggttgtattaaattaagatttagtaatttttatttgagttttttgtagttttttgtagttttatttggaaaggttttttttggtaaacgtatttggaaaaagcgttggttatttggtaaaagtattttttttttgagtattaaaggtgatttttttgaagtgtttattttgttatcgttggttttttaataatttttattttattagttttttatttgttagagattttgtatgtgatttcgatattttataatataatttttattatttgtaggtttttgttgttgttgttttgagatagttttgttttgttgtttagattggagtgtagtggcgtgattttggcgtattgtaatttttattttttaggtttaagtgatttttgtgttttagtttttcgagtagttgggattataggtgtttgttattacgtttggttaattttttttatttttagtagagatagggttttattatgttggttacgttggttttgaatttttgattttaagtgattcgttcgttttagttttttaaagtgttgggttataggtgtgagttatcgtgttcggttttagaatgtattatatttgaattggattgttggttgttttttagtgaattagttagagattgattaatatgaaaggtataattgttatttttaagtaggaaggattttgaattgtaattttgttagtggtaggtttatatgtgtgtttttttatttaatttttttaattttttaatttaggaaatttggattaatatttatgtagtgattaattttttgttgaataaggtaaaaatttttgtggttagatgtttataatttaatgagggaatgtagataattaaaaattaaaattatataatgtaataaagttgtatagtattttttatttttttgtggttttattttttatagttttaataattcgaagttaatttgggtttaaaaattttaaatgaaatattttagaataaatagtttataattttgaaatattatgttataatgtttgtgttatttattttagtttatattatgacgtaggtattttattattttatataattataagaaggttgagaatagtgtaataagatgttgagagagagaaattatatttatattatttttattatagtatattgtaataaaatgtattgggtaaggaggtaaggtttgtgggatgggaggcggtaaggggttaaattagtagagtatttatttaaatgaagtggaaaggattgattaaaggagaaaaattgaagatggagaagagttaagtttgtatttgtatttatttttttttttttgagatagagttttattttattgtttaggtaggagtgtagtggtatgatttcggtttatggtaatttttattttttaggtttaagcgatttttttgtattagttttttatgtagtagttgggattataggtatgtattaatatatttagttaatttttgtagagacggggattcgttgtgttggttaggttagttttaaagttttgaatttaggtgatttattttcgttggttttttaaagtggtagaattataggcgtgagttattgttttttgttgtatttgtattttaaaagtgagggaggaggaagagtttgagtttttttttagatttttgggttgggtatttgagtatttaatttaggtagggattggttttgggaatataaaaggagagttatttggggttagggtaagggagtaaaataatttggttttaaatttgtcgagtttgagatgtttgtggagataattaaatggaaatgttcggtgaatatttgtatatatatgtgtagaagtagggagagtggattaggttggaaataaggatttattagcgtataggtggtagtagaggttgtaggtatatagagttatattttggagagtttatagaataaggtaaaataaagattacgttagaaattttatggattagcgatagttaaggagagagaaatgggagtttggaaaagaattatgaattaaaagtaaaattaggttaggcgtagtggtttatgtttgtaattttagtgttttgggaggtcgaggtagtagatcgttttagtttaggatttcgagattagtttgggtaatatggtgaaaatttttttttataaaaattagttaggtgtggtggtgtatgtttgtagttttagttattttagaggttgaggtgggagaatggtttgagtttaggaggtggaggtaatattgaggcgtgattatattcgtgtattttagtttgggtgatatagtgagattttgtttaaaaaaaaaaaaatattaaaattagaagaaaatggtgttatgatagttaggtaaggagatattgttagggtatttgttgtgtgtgttaaatgttgcggagagggagtgagataagtatatgatttggttattaggaggtagaaagtattgttgtgggagaaataggagattaggaaattgggatgaatatgggtattttttgggattttgttgtggaggtaaagagatgagtgagatgtagggagaggagaatcgaggagttgaggagtgatggtgtgtagtttgtgttttgtagatgtgagtttgagataggataatatatttttttgttgagggaaaaaaggaaaggttggagagaatagttgataggtatgttattgatggagtaaatgttagtagaggaaggtggggattagttttatagtagaggagaaagaattggttttaatagatagggtttgggatattttttttgaggtaggtaattgtagaatttattttattttttagggttttttaaggtggatgtgtttgggatttttaagtggaataggataattttatatgtttttaatttttatattttcgtatggataattggattttgattgattttggggtgatatagttatttagttttgtgttagttattgtgttagattttgggaatataaagaagtgaagataatagatagaattgttttttttttggagtttatattttaatagaagagagaggttaataaattaaaaaaaaataaaaaaaatatatgtatgtttagatatatatatgtatatataaagattattagttttaagttattgatgtagggggggaggaaatagagagaaatgagttttagtttatatttgatgaatatattttattgttatataagagaggaagaattaatgaaggacgttgagaaggaggagttagaatggtgggaggaaaattagtaaagtggtggttgggggtttagtagaggatagtgtttaagaaggaggaaataattaattttgtaaaatgttagaagattaagaagatagagttggtgtttggatttagtatgttagagagttttgatatgagtcgttttattatgtgatataggaaagagaatagaggttattttggtgagatttttggttttaaaaggtagtagagaaatagaattaatatcgaatagtgttttgttaaataagattttttaaaggagggttgtttgtatgtcgatggaaatatttagtggagagaaattgttaagaatgatagaagtgaagtaattaaaaggaagaagatattgaaaaaggagtagggaatttttttttttattcgttaaataatttcgagtatttgttgtatgtcggtattattttaggtatgggtagtttaaggtgaagttttgtttttatggaatttatttttttaaaggagatagttagtgggtgagtatataggtaaatataatgatagtgatgggatgagagagtgtagtgggggtagatagtaaagagaaggaatgaggtgtagtttttgttatagtaaattagggaggtttttttaaggatttgttatttgaattaggattgaaaaggagatattatgtatttgtttggggaaaggagggaagagtattttaggtggaagggtttaattgtttgggttgtttgagtgtaggaggattttagggttcggggagaattatacgtagttagggtttaggttattttagattttgtagattagttttagtattaggattttattgtttttaatgggagattattaaggttattttttatgttttgaggtagtaagggtgggaatagattgattatttacgaggttgggtagtagttttgatatatatgatagtagtttgaattagggtgttagtaagggagatggtgaggattatatttagaaagaaaattagttttggttgaaaagggaagataatgtttgatggattagagtagatggagttggaagaggggaagataggtaatagattttgttagtattatttgtttgagattgaagaattttagttagtagtgaatgataatagttaggatttttagaggttgtaggtataaatgaatgaatttaatgtaaaagtttatttattgtaggaggagttatagttgttgtaggaatagggtttttgtataagggaagtagttcgggttatgaataaggagaaagtgttagttaaggtgtattttaagggtaagtttgttttagatgtggatagaaatagtaatattaatgatatgagatttaattgttaggggggcgttaagaaatgatagcgatatattgtataatattatatttagtaaagtagatttattggtgttattagtgatggtggagaaggtgttaattttgatttaagagatgattggtggattggataagtagattaaggatattatagaagtgatcgagtagtttgttaagtattttaagttttttgaagtattgggtattatataatttagggtggtattgttgtacggatttttaggtattgggaagatattgtttgtttaggttgtggtttattatatagattgtatttttgtttatatttttggttttgaatttgtatagaaatttatcggggaagggttaagaatggtgagggagttgtttgttatggtatgaggatttgttatttgttattagttttattagtttttcgtagttggaggggggttttggaggggatagtgaagtgttgtatatcgtgttggaattgtttaattaattggatagttttgaggtttttaagaagattaaggttattatggattattgttttatttagggtatattaatagaaaaattgaattttagttggatattttgaagatttattttttgaaaaggaatttgatttaggggattaattagagaaaaattgttaagtttatgttaggagtattaggggttgaagtgaaagttatatatagagaaagtagtatatatgttttgagggaacggcgagtgtatgttatttaggaggattttgagatagtagtagttagcgttatgtagaaggatagagagtaaaatatgtttattaagaaattatggaagtgcggggatgttttttgtatggattttttcggtaaagttttttggaatgaaaaaataaaataattagttttttagaattaattatagaagatatggttaattttattttaaatgaaaaatgttaatagatatggttaattttattttagatgaaaaatgttaatagaaataaggttgaaatggtatttattagtagaaaaaaaatagatgtatatttttttaatttatcgttttcgattaaaggtttaacgtgtgttatttagtatagtggttgtatgtggttattttaattatataaatttattttttagttatattagttatattttaagtgtttagaagttatatatagatatttttattattagggaaaggttggtttaattagtattatgtttggagttagatgtttaaataatatttattgtagtataagagatttaatttaataaaaattagtgtggtgttttagtgaggtttgattgaatgagaggaataagtggttgaagaggtgagtggtatagtattttaaaattatttgagaagaaaattatagttaggataagaaagagtttatttttaggttaggtacggtggtttacgtttgttattttagtattttgggaggttgaggtaggtgtattatttgaggttaggagtttgagattagtttggttaatatggtgaaattttatttttattaaaaatataaaaattagttaggtatggtggtgggtgtttgtaattttagttattggggaggttgaggtaggagaattatatgaatttgggaggtagagattgtagtgagttaagatggcgttattgtattttagtttgggcgataagagtgagattttattttaaaagaaaaaagaaaaaggatttatttttgttatgtggtttaattattgaggttttgagatgtattttttttttttttttttgagatagagttttgttttgttatttaggttagagtgtagtggtatgatttcggtttattgtaatttttgtttttcggatttaagcgatttttttgatttagttttttaagtagttgggattataggcgtttggttaatattttttgtatttttagagatggggttttattatattggttaggttggtttcgaatttttgattttaagtgattcgtttttttcggttttttatattgttgggattataggcgtgagttattgtgtttggttttattttgttatttaggttggagtgtagtggtataattttggttgtggtgtatttttatatgattagtttgatttaattattatttgattgtgtgattttatgttttatgtttatatattagttgataaaatttgaaaatttagttttgaatttaggttatttgatttgtgagatacgtaattattatattttattaattttgaagtaaattatttattttttttttttgttataatagaggaagtatggttttttagcgggagatttgttttttttatttatagattttagtttagttatatttaatttatgtttaattgttttaaaatgtaatatttttatatataattggtttttgtattgtttgaatgattttttgtttatgttatatatttattttttaatatttttaataattgttaatttttatttttttttattggtatttatttttgttgaatagttttattatttaaattaatttagttggaatgttttaataagttatgtttgttttttatttgtatgtatttgtgtataatttttttttttttttttttgaggtggagttttattttgttgtttaggttggagtgtagtggtatgattttggtttattgtaattatcgtttttcgggtttaagtaatttttttgttttagttttttaagtagttgggattataggcgtatgtcgttacgtttggttaattttttgtgttttagtagagacggggttttattgtgttgtttacgttggtcgtaaatttttgagtttaggagaattttagtttgagataattgtagatttatacgtagttgtaagaaatattgagaatttagtattttttttatttagttgtttgtagtggtagtattttgtagaattgggataatattataattaggatattgatattgatatattttattatttttatttatatttttttagttttatttgtttttatgtgtttttatgtgtgtgggtgtggttgtttgtgtagttttattatatgtagatatgtgttatattttgagagttttttatgtattttcgatattagttttttgttagatatgttttgtaaatattttttttagtttatagattgtttttttatttttttaataaaattttttagagagtaaaagttttgttataagatttagttattttttttttttttttatatagtatgtttttgatgttaaatttaagaattttgcgtatttttagattttaagttttttatgttttttttaaaagttttagttgggtgcggtggtgtggatttgtgattttgttatttggggaggttgatgtaggatgattatttgagtttaggagtttgaggttagtttggtcgatatagtgagatggagtttcgttttaataaataaataagaattaaagttttgtagttttatatttaattttatgatttatttttgagttaatttttgtaggaagtattaagtttaagttagaatttttttaggtgtatgtttatggatgtttagtttttttagtattattttttaaaaagtttgattcggtgttattgattggttttttgtattatttttaaaaattttttggttttattagtatggatttatttttgggattttttaaaaaaatgttataaaagtagtttatgttttttatggatattttttagaagatgtgaaaaagtagaaaatgaaaaatatatgttttattaaagataaattttgtttaataattttttttttattttttttttgtgttgtttttttttgttgttgttttaaataaatttttgttatatataaaaagttgtgttttgttttttaaaaatgtttattattaatattttttatattattataaatattttttaatgttattttagtgattttttggtgttttgttttgtggtattttttatgatttaagtttttaggttttgtttttgttatttaaaagatttttttgataatatttgtgtttagtaaattttttagttaattattggattgaaatatatgagtattttttagatttttgatattttattgttttattgtttttgaagaggttttattttatttatatttttattattgttatattttttagattaaagtagtatttaatttttgagaatttttttaaatgtttgtttagtttgaatttttatattttattattttttattagttttaaatttaattttagttaagtgaaaattatatgtaaatgttagcgattggtattaaagtaatatttagtagtatttatttttataatatgtaatttgtatttttttaatttgtaatttataataaaatatagttgtgagttagaaaaaaatgattttttagttattgtttattttttatttatttttgtttttttttatagtttagtaagttgagaagttttaaaaaaaaaaaaaatttttagtatgattatttattttaaatttatgtttatgttttgatttaaatgttgttattttgttttttttaaataga

SEQ ID NO: 242 - DNA, 15872 bp, Artificial Sequence
  chemically treated genomic DNA (Homo sapiens)
tttgtttgagggaggtaaaataataatatttaaattaaagtataaatataaatttgaagtaaataattatattgaaagttttttttttttttaaagttttttagtttgttgggttgtgaaagaaaataaaaataagtaaaaaataaatagtaattaaaaaattatttttttttaatttataattgtattttattataaattataagttgaaaagatgtaaattatatgttataggaataaatgttattgaatgttattttagtattaatcgttaatatttatatgtaatttttatttagttaaagttaaatttagggttaataagaaataatagaatgtgaaaatttaaattaaataagtatttagagaaatttttaaaaattaaatgttgttttaatttaaaagatataataatagtggaaatgtaaatggggtgaaatttttttagaagtaatggggtaatgaaatattaagaatttgaaaaatatttatatattttaatttagtaattaattaaaaggtttattgagtatagatattattagagaggttttttaaataataaaaataaaatttggaaatttaaattataaaggatgttataaaatagaatattaaaggattattaaaataatattaagaaatatttgtaataatatggaaagtgttaataatgggtatttttaaaaagtaggatataattttttatatgtagtaggaatttatttgaaataatagtagaaaaaagtagtataggaaaaagatgggaaggaaattgttaaatagagtttatttttgataaaatatatattttttattttttatttttttatattttttaaaaaatgtttataaggaatatggattatttttgtggtatttttttaaaaagttttagaaataaatttatattaataaagttaagagatttttgaaaatgatgtaaaaagttagttaatggtatcgagttaggttttttaagaagtggtgttagaggaattagatatttataagtatatatttaaaagaattttgatttaaatttaatattttttataaaaattaatttaaaaatggattatagaattaaatgtaaaattataaaattttgatttttatttatttgttgagacggggttttattttattatgtcgattaagttagttttaaatttttgggtttaggtgattattttgtattagtttttttaaatagtaggattataagtttatattatcgtatttagttaaaatttttagaaaaaatatggaaaatttaggatttggggatgcgtagagtttttagatttgatattaaaagtatattatataaaagaaaaaaaaaggtaattggattttatgataaaatttttgttttttggaagattttgttaaaaggatgaaaggataatttatagattgggagaaatatttgtaaaatatatttaataaagaattagtatcgagaatatataaagaatttttaaaatgtaatatatatttatatgtgataaaattgtataaataattatatttatatatataaaaatatataaggataagtaaaattgggaaaatatgagtaagagtggtggaatgtattaatattaatattttggttgtgatattgttttagttttataagatgttgttattgtagataattggataaagggaatgttggatttttagtattttttataattgcgtgtgaatttataattattttaaattaaaatttttttgagtttaggagtttgcgattagcgtgggtaatatagtgaaatttcgtttttattaaaatataaaaaattgattaggcgtagcggtatgcgtttatagttttagttatttgggagattgaggtaggagaattgtttgaattcgggaggcggtggttgtagtgagttaagattatgttattgtattttagtttgggtaatagagtgagattttattttaaaaaaaaaaaaaaaaaaattatgtatagatatatataaataaagggtaaatatgatttattaaaatattttaattgggttaatttaggtagtaaaattatttaatagaaataggtgttagtaaaaaaaaatgaaaattgatagttgttagagatattaaaaagtaagtatataatataagtaaaaaattatttaaataatgtaaaaattaattatgtgtaagaatattatattttggggtagttgagtatggattggatataattgggttgagatttgtaaatgggaggaataggtttttcgttggaagattatgttttttttattgtagtagggaagaaaaataaatggtttattttagaattgataaaatgtaatagttacgtattttataggttaagtagtttaaatttaaagttaaatttttaagttttattagttagtatatgaatataaaatatggagttatatagttaagtggtggttaggttagattggttatataaaaatgtattatagttaagattgtgttattgtattttagtttgggtgatagagtgaggttaagtatagtggtttacgtttgtaattttagtagtatgggaggtcgaggagggcggattatttgaggttaggagttcgagattagtttggttaatataatgaaattttatttttaaaaatataaaaaatattagttaggcgtttgtaattttagttatttgggaggttgagttaggagaatcgtttgaattcgggagatagaggttgtagtgagtcgagattatgttattgtattttagtttgggtgatagagtaagattttgttttaaaaaagaaaaaaaaaaatgtattttaaagttttagtggttaagttatatagtagaaataaattttttttttttttttttttgagatggagttttatttttgtcgtttagattggagtgtaatggcgttattttggtttattgtaatttttgttttttaggtttatgtgatttttttgttttagtttttttagtggttgggattataggtatttattattatgtttggttaatttttgtatttttagtagagatgggattttattatgttggttaggttggttttaaatttttgattttaggtgatatatttgttttagttttttaaagtgttgggataataggcgtgagttatcgtgtttggtttagaaataagtttttttttattttaattataattttttttttaggtgattttgaaatgttgtgttatttatttttttagttatttgttttttttatttagttaggttttattgaggtattatattgatttttattaagttaaattttttatattgtagtgggtattatttaagtatttagttttaaatatagtgttaattaaattagtttttttttgatgatgagaatgtttgtatatggtttttgagtatttgaaatgtggttagtgtgattgaggagtgagtttatgtaattaaaatagttatatgtagttattgtattgggtggtatacgttaaatttttaatcgaagacgatgaattaagaggatatgtatttgttttttttttgttgatgaatattattttaattttatttttgttaatattttttatttgaaataaaattaattatgtttgttagtattttttatttgaaataaaattaattatgttttttatggttaattttggagagttaattattttatttttttattttagaaagttttatcggagggatttatataaaggatattttcgtatttttatagttttttgatggatatgttttattttttatttttttgtatgacgttggttattgttattttaaagtttttttgggtgatatgtattcgtcgtttttttagggtatatatgttgttttttttgtatatgatttttattttagtttttgatgtttttggtataagtttggtaatttttttttggttgattttttgggttaggtttttttttagagaatggatttttaaaatgtttagttggaatttaatttttttgttgatgtgttttgagtgaagtagtggtttatgataattttgatttttttgggggttttaaagttgtttagttggttgagtagttttagtacgatgtgtagtattttattgttttttttagaatttttttttagttgcgaggagttgatggagttgatgatagatggtaggtttttatgttatgataaatagtttttttattatttttggttttttttcgatgaatttttatataaatttagagttagggatatgaataaaggtatagtttgtatggtgagttatagtttaggtaaatagtgtttttttagtgtttagaggttcgtatagtagtattattttgggttgtgtgatatttagtgttttaaagagtttggaatgtttaataggttgttcgattatttttgtgatgtttttaatttgtttgtttagtttattaattattttttaaattaaggttggtattttttttattattattggtgatattagtgggtttattttgttgggtatgatattgtgtagtgtgtcgttattattttttagcgtttttttggtaattgggttttatgttattgatgttgttgtttttgtttatatttaagataaatttgtttttgggatatattttgattaatattttttttttatttatggttcggattattttttttatataggagttttgtttttgtagtagttgtagttttttttgtaataggtgaatttttgtattgagtttatttatttatgtttgtagtttttggaggttttggttgttattatttattattgattggagttttttagttttagatagataatattggtagagtttgttgtttgttttttttttttttagttttatttgttttggtttattaaatattattttttttttttagttagagttaattttttttttgaatataatttttattattttttttgttaatattttagtttaagttgttattatatatgttaaaattattatttagtttcgtgagtggttagtttgtttttatttttgttattttaaaatataaaaggtaattttgatggttttttattaaaaataataaaattttgatgttagagttgatttataaggtttgaaataatttgggttttagttacgtgtggtttttttcgaattttagaatttttttgtatttaggtagtttaagtagttgaatttttttatttagaatgttttttttttttttttttagatagatgtatgatgttttttttttagttttagtttagatggtaagtttttagagaggtttttttaatttgttatagtaaaggttgtattttattttttttttttgttatttgtttttattgtatttttttattttattattgttattgtatttatttgtatgtttatttattggttgttttttttagggaggtaggttttatgaggataggattttattttgagttatttatgtttagaatggtgtcggtatataataggtattcgaaattgtttaacgaatgaaaaaaaaaattttttattttttttttagtatttttttttttttggttattttatttttgttatttttaataatttttttttattagatatttttatcgatatataaatagtttttttttaaaaagttttatttgataaaatattgttcggtgttagttttgtttttttgttattttttagagttaaaaattttattagagtggtttttatttttttttttgtattatataataaaacggtttatattaaggttttttagtatgttagatttaaatattagttttgtttttttgattttttgatattttataaagttgattatttttttttttttggatattgttttttgttgagtttttaattattattttgttggttttttttttattattttggttttttttttttagcgttttttattgatttttttttttttatgtgataatgaagtatatttattaggtgtgggttgggatttatttttttttgttttttttttttttatattagtgatttaaggttgatgatttttgtgtgtgtatgtgtgtgtttgagtatgtatatgttttttttgtttttttttaatttattggttttttttttttattagaatgtaagttttaggagaagagtagttttgtttgttgtttttatttttttatatttttagagtttagtatagtggttgatataagattgaatgattgtgttattttaggattagttaggatttagttatttatacggaagtataaaggttgggaatatgtggaattgttttgttttatttaggagttttagatatatttattttagaaaattttgagaaatggggtaaattttataattatttattttagaagaggtgttttaggttttgtttgttgagattaatttttttttttttgttgtggagttgatttttatttttttttgttgatatttattttattaatgatatgtttattaattgttttttttaattttttttttttttttttagtagaaaaatgtgttgttttattttagatttatatttgtagaatataaattatatattattattttttagtttttcggtttttttttttttatattttatttatttttttgtttttatagtaaaattttaaagaatatttatgtttattttagttttttgattttttattttttttatagtaatgttttttgttttttgatagttaaattatatgtttattttatttttttttcgtagtatttaatatatataataaatattttgatagtgtttttttgtttggttgttatgatattatttttttttagttttagtatttttttttttttagatagggttttattgtgttatttaggttggagtatacgggtgtgattacgttttagtgttatttttattttttgggtttaagttatttttttattttagtttttggagtagttgggattataggtatgtattattatatttggttaatttttgtagagaggggtttttattatgttgtttagattggtttcgaagttttaagttgaagcgatttgttgtttcggttttttaaaatattgggattataggtatgagttattgcgtttggtttggttttatttttgatttataatttttttttaggtttttatttttttttttttaattgtcgttaatttatagaatttttaacgtggtttttgttttgttttattttgtaaattttttaggatgtgattttgtatgtttataatttttgttattatttgtacgttaataaatttttatttttagtttagtttattttttttatttttatatatatgtatgtaaatatttatcggatatttttatttgattgtttttataagtattttaaattcgataagtttagaattaaattattttgtttttttgttttggttttaaatagttttttttttgtatttttagaattaatttttatttgagttgggtatttagatatttaatttagaaatttgggagaaaatttagattttttttttttttttatttttaaaatgtagatatagtagggagtagtggtttacgtttgtaattttattattttgggaggttaacgggggtggattatttgagtttaggattttgagattggtttggttaatatagcgaattttcgtttttataaaaattagttgggtgtgttggtgtatgtttgtaattttagttgttatatggggggttgatgtaggggaatcgtttgaatttgggagatggaggttattataagtcgagattatgttattgtatttttgtttgggtaatagagtgagattttgttttaaaaaaaaaaaaataaatgtagatataagtttgatttttttttatttttaattttttttttttgattaattttttttattttatttgaatggatattttattaatttggttttttatcgttttttattttatagattttgtttttttgtttagtatattttattataatatattgtaataaaagtgatgtgaatgtggttttttttttttaatattttattgtattgtttttaatttttttgtgattatgtgaaataataaaatgtttacgttatgatatgaattgaagtgaatgatataggtattgtgatatagtgttttaaaattatgaattatttattttagaatattttatttaaaatttttggatttaggttaatttcgggttattgaaattgtggaaagtaaaattatagggaagtggagaatattgtgtagttttattatattatataattttgatttttagttatttgtatttttttattagattataagtatttggttatagagatttttgttttgtttagtaggaagttaattattatatgaatattaatttaaattttttaggttagaaggttgaaaaggttgaatgagaaagtatatatgtgaatttattattaataaaattataatttaagattttttttgtttaagagtaataattatgttttttatgttggttagtttttggttgatttattgaagaatagttaatagtttaatttaagtatgatgtattttggggtcgggtacggtggtttatatttgtaatttagtattttgggaggttaaggcgggcggattatttgaggttaggagtttaagattagcgtggttaatatggtgaaattttgtttttattaaaaatagaaaaaattagttaggcgtggtggtaggtatttgtaattttagttattcgggaggttgaggtataagaattatttgaatttgggaggtggaggttgtagtgcgttaagattacgttattgtattttagtttgggtaatagagtaagattgttttaaaataataataataaaaatttgtaaatgatgaagattatgttgtagagtatcgaaattatatgtaaagtttttgataaatgaaaagttggtggaataaaaattgttaaaaagttaacgatgataagatgggtattttagaagagttatttttaatatttaagggaaaaatatttttattaaatgattaacgttttttttaaatacgtttattaaaaagaatttttttaaataggattataaaaagttataaaaaatttaagtgaagattgttgaattttagtttaatataattttggtgaaaaagatagttattcgggtacggtgatttacgtttgtaattttagtattttgggaggttgaggtaggcggattatttgaggttaagaggttagtttgggttaatatggtgaaattttatttttattattaaaaatataaaaattagttgggcgtggtggtgggtgtttgtagttttaggtatttaggaggttgaggtaagagaatcgtttgaatttgggaggtggaggttgtagtgagttgaaattacgttattgtatttaagtttgggcgatcgtgtaagatttcgttttaaaaaaaaaaaaaaaaagaaagaaaagaaaaggaaaaaaatatagataaattaatatttgatttattttataaaatgagttattgttgtaattatataattataatattttgtgaaagataataattattttaataattttttaggtcgatttttaagatgaaagttttaagtaagtttttttttttattttttttgtgtatgtgtgtgtgaaattttaatttttgtttaagtgggtttattttgagtggtttttttttagaattaattattatgggttaaggagtttttttattatttttgatgtttttgttaggtattttaataattgtttgtttaataaattatcggaagtttacgacggggatttaatataagtattttaggttatttttttgtgttttattgatttattggattgggagttttttatattaagttatattatattttaaacgttattgaagttttagatttattttggggatgggagatattattatattaagaaattttttttttgaacgaattttattttatagaggattaacgattaagtttaaaattttaagattttatgatttgtgtataaaatattgtgtttattgcggtagaggaggggaagtggagttatatagaggtttaagaatatttttcgattttatatattattatttgggagttataggagtgtgtatataaatttaatgattttacggagattgtatgtaggttggttgtaattttagatttttggtttgtttttatatttttatttatttgatagtttagaatgaaggggtttgttgttagtttgagaaattaagatcgaattatgattattttatttttaattggtttagaatagggttttgtaaaaattacgtttttttttttttcgttaattttgattggagaaatttgtttagattttggttggtttggaagcgggaagtgttaataaaagtgaagagttttataaagttagtagttcgggagattttaagagcgggttagaaacgattttttcgttggaaaacgggttttttttttatttgttgtaggttttcggattcgtttttttgcgtttcgattataggcgcggtcgttttttttttttttttcgttttttattcgtttttcgcgttttttttcgattttagttttttagggggacgggagatgagtaatgatatttggaggttgggcgaagtggatgatatggcggagtttttaggcggtttttaagggaacgaggggcgaggagagttaatagtagtaacgtcgaagcgcgtacggggtaatagtttttaaattggggaggtcggtggttttcggatcgcgaagggtagtttttttttcggaatttgttttagacgatattttttttattagagtttcgattttttttattaaattttcgtaatttcgaggttttttaggttttggtttcgtttttgtttcgggtattttcgatttcgttattagtacgcgtatttagttattagatttttttttttagttatagcgtaggttttttttgggtcgggagaagtagtttggaagttaatcgagttttggcggaagtcgggttcggcgtaggcgtattgagattttggtttaggcgcgggcggtagtttggtagatttaggagagcgtaagcgcggaagtatagagtcgggttttgttgtttgtttgttttttattttcggggacgttttttattttgagatgaattattggtttcggtttttttttttttttatttatatgttttgttgtttcgtagtttttgagtgaaaaagtcgtttatttttaagattcgtcgattgggggttttgggtttgtgattgcgtttttatttcgtgttttttgtggaatgggggcgattatcgttttcgtttcggtggtgaataatttaggagggagtgcgcggtgaggcggtcgtatagcggtgcgttagtagttaggtcgcgggcgggtcggcgttcgttttcgtttgttttttttacgttattcggtattttttaaatgattgttgtgttgggaagatgaatgtaaataaggcgtggacggtcgttgttttcgagtatgtggtttgagagggaagtatttgttttgtaaaatgggtatattagatattatttatgttagttatgtttataagtaaatggtttgaggaggttgaatgcgttagggattagaggtagaattaaagtaaaatttttttttagtttttttatggtttgtagttattattattttttttttttttttatagttaatatttttaaaggaaagtaatatagatgtttaattattttattattttttttttatttattttttaatttttttttatttggtattttcgaaagaattaaagttttttttttttttttttttattggtattgttaattatttagtttttgtttgtttagttttttaatattttttatttgttttttttattgttttttttttttatttttttttgagtttaagttgaatttatttaagagtttgatgtttttttttttttttatttttgtttatttaattttttttttgagttttagttattaatagattagaaattgttttaaatttggatttttagatttattttatttttagtttagtatttataatagttttttagaggttttttttatagggtttttttgtaagataaatttaatatattttaattaattattttttattttaaatttttttttttggtttttttttagaatagtattgttaaatttgtattatttaggttcgaagtatagagttttttttttgttttgtatttattcgttttttttttttatttgtgaatttgttttcgtaaaatgatgattgagatagtgaaagagatttaatttaattaattttattttatttttaatttttaagttgtttttgtatatttttgagtataggttgaattaattgtgggagaaattgagtttataatttaagtaaagatgggtcgggcgtggtgatttacgtttgtaattttagtattttgggaggtcgaggtgggtggattatttgaggttaggagttcgagattagtttggttaatatggtgaaattttatttttattaaaaatataaaaattaggtcgggtgtggtgagttacgtttgtaattttagtattttgggaggttaaggcgggcgattatttgaggttagtagtttaagattcgtttggttaatatggtgaaattttgtttttattaaaaatataaaaattagttgggtatggtggtgcgtttttgtaattttagttattcgggaggttgaggtaggagaattttttgaatcgggatttaggaggtagaggttgtggtgagttgagatcgtattatagtattttagtttgggttatagagcgaaattttgttttaaaataaataaataaaaattagttaggcgtgatggtgtttgtatgtaattttagttatttgggagggtgaagtaggagaattattagaatttaggaggtagagattgtagtgagttaagattatattatcgtattttagtttgggtaatagagtgagaatcggtaaaaataaataaataaataaaaaattttttttttattattagtaataagttatgttgttatgatggaatttttgatgtggagaagggtatattagttttgtggtatgttttttaaatttgtaattttaatttaattatgagaaaatattagaaaaatttatatggagggtttttttatttttataaaataattagtgttttttaaaaatgttaagattataaaagataaggaaagattgaggaattgttatagattgtagagattaagaagatgataattaaatgtagtatgggattttggattggattttgaaatagaaaagggttatgagttgaaaaattgttgtaagaatgagaataaagtttgtagtttagttaatagtattttattaatgttaattttttattgttgataaatgtattatggttatttaagatgttaatagtaggggaaattgggtgaagaatatatgggaattttttgtatatttttgtaattattttgtaagagtttatttttaatttttatttgtgtatttatttttattttttttgagataaagtttcgttttgttatttaggttggagagtagtggtataatttcggtttattgtattttttattttttataataatttttttgttttagtttttcgagtagttaggatgataggcgtgtgttattatgtttggtaaattttttgtgtttttgtagagatggggttttgttattttgtttaggttggtttcgaatttttgtttttaagtgatttgtttgttttagttattcgatgtgttgggattataggcgggaattattatatttagtttgtaagtattattttaaaaggaaaattttttattttaaaatttttattttttgggattttatattttagtggagtagaaatttttaatcgtttatatatttaaaatgtaaatatgttatatgtgtaagagttttgtatatattattttattgtatacgataaggtaaattttaagtattttatttttataaaagaggaaataggttaggcgcggtggtttatatttgtaattttagtattttggaaggtcgagattggtagattatgaggttaggagattgagattattttggttaatatggtgaaatgttatttttattaaaaatataaaaattagttgggtgtggtggtatatgttaataattttaattattcgggaggttgaggtatgagaattattttaatttaggaggtagaggttgtagtgagttaagatcgtgttattgtattttagtttggtaatagagtaagattttattttaaaaaaaaaaaaaaaaaaaaaaagaagaagaagaagaaaaagggaaatagttttagaggtattagtagaaattttttttaatttatttagtttttatatggtagagttggagtttgatttaggttttttgattttagggtgataagtgttaggatagaggtaggaagttttgtgggattataggagagagaaggtttaattttgaatgagtggttagggatgttttagggaaagtttatttaaattgaagtttaaaattttaatttgattttgacggagtgtaggttattttaggtagaaggaaaagtagaaataaaggcgcggaagaataaagtatttgttttgagggatttttggaatgtaggaagtagaggtattgtggggttggagtggtaggagatgaagttaaaaatatattaattggtattgttagttagaggtttggaataaggagtttggatattattttgtaagataatgttgaaagtttttttttttattttgttattattttttgtttttttgtttttttgtttttttttttggtagagttgtgatttggttagatgttggttttatgaaggtggatttgatagtttttttaggatatattagaaagagagaggaggtagtaagattaaatgggaggtttttgtaagtgttttattttagaaaataagggatgtagagttaaaagggatatttttagtttttgtagtgtagttttcgttttttgttttttgggttttgaagaatagatttttgtttttggtttggtgtggtttatatttgtaatttcggtattttgggagtttaaggtgggtggatcgtttgaggttaggagtttgagattagtttggttaatatggtgaaattttgtttttattaaaaatataaaaattagtcgggtatggtggcgggggtcggtaattttagttattcgggaggttgaggtaggagaatggtttgaataagggagggggaggttgtaatgatttgagattatgttattgaattttagtttgggtaataagaggagaattttatttcgagaaaaaaaaaaaaattttggttttttttattgtttttattaatttaatttgttaaaattatattattttttaagtgttagttttaatgttatttttttaggaaatttttgaaatttttttgagtttttattatattttggattttgaattgtttttaaattatatatgttaagtgtttaatatagtgtttggtgtagagtagatgtttaaaaattgttgattttattagtatagtgttttatttttttcgatgataaaatttttaagggttaagattttattttattttatttataatttattttttttgttttattatttataagtataaagagggtgtgtttttaaatagttaaggtttgttgaataaaatggagtttttttgttgtgattaaggattttagaaattaggaaggttagtggggtggtaggtggtgtttgtgtatttagttttcgatagg

SEQ ID NO: 243 - DNA, 7033 bp, Artificial Sequence
  chemically treated genomic DNA (Homo sapiens)
gttttttttttttttttttgtattttaatatcgagaaatttgatttttgttattttaaatttattttttgattggattaatttttttattttagtgtttgttttttatttttttgcgttttggttagggtagtttttgggatggttttgagttttgggttttgttttgaggatttagttttaggtgtttagcggtaagaggttttgtagatttttttttagggttcggttttttttttttcgtttatttgttttgatttttttttgtgtttttttggatcgttttttaagtaaagtattcgaatttaaatttttgttttggttgggcgcggtggtttatatttgtaattttagtattttgggaggttgaggggaggagcgtttgagtttaggagtttgagattaatttgggtaatatagtgagattttatttttataaataaaaaattaaataaaaggttaggtatagtggtttacgtttgtaattttagtattttggaaggttaaggcgggcggattatttgaggttaggagtttgagattagtttggttaatatggtgaaatttcgtttttattaaaaatataaaaattagtttggtgtgatggcgtatgtttgtaattttagttattcgggaggttgaggtatgagaattatttgaatgtaggaggttgaggttgtagtgagtcgagatcgtgttattgtattttagtttggatgataaagcgaagattttgttttaaaaataaagtaataaaataaaataaagtaaaataaaaatttttgttttagggtttatgtttgggggaatttaaagtaagataaaggtttttttaaaatttttattggtcgggtacggtggtatagtttgtaattttagtattttgggaggttgaggtaggtggattatttgaggttaggagtttaagattagtttggttaatatagtgaaattttgtttttattaaaaatataaaatattagttgggtatggtggtaggcgtttgtaattttagttattcgggaggttgaggtaggagaatcgtttgaatttgggagatggacgttgtagtgagttgagatcgtattattgtattttaatttgggtaataagagcgaaattttattttaaataaaaataaaaataaaataaaattatacgaagttgatgttatttgagtaatttttatttttatatttgaaggttttttttttagtaattgagtatgtttttgttaatggtagtttatgtttggttgttataaggttttttttttgttttttgaggaggagagagtgggtggtagtagggtagggtaaggtagggtggagtagagttggtttgcgatgtatttttttattaaggtttttaagtttttttaaagtttggggtattttttgttttgttagtgtttttttttttttggttttggggcgttatttaatttatttttatattgttggttttttaaggtgggggttttaattttaaggttagttttttaggaggttttttttgtttatagttagttttagttatttcgcgttttttggggatttgaaagatttcgttttcgtattagtaggtttgttgattgattgttgttttttatattagaatggaattatacggggtataatttggtttttttattttgattttagtgtttatagtggtaggagtttatcgaataaggggataaatttatgattagttgattaagtttgttatcgtggtaggggttagggagaaagttgggaggtttttgtttttgttcgtatgttagggtttttttgggtaggtattacgtttattttattttatttcgcgttgtggttgtgtttgtagttttaattcgcggtttgttagtatggtggttcgcgtgggcgattggtttgggtagttgttgggcggggttggagggtggaaggttagtaggcgggagatattttttatttttttttttgttaagtttagggagaaaagtggattttggtggttttttttaggcgtggttgttttgatttttggtggggtgggtgtttttttttggaagttttgatatattgggggaaggaagttttaagagtttataaaggtggaggtagttttagagattaattggaggtttttatttgttttcgtatttttattttatggtatatttatggttattttttaggggttcgtattttggataaagtgttggtttttggttaggattttgaaaagttagaggtatagaaggaagtagaggttttgggtgggtattgtttatgttaggggttttgtatagagtttttggtttattagaggagttagaggaattttttgtttgattggagatattttttagtaggtttggttgtaattattttttttgagttataatttgattgagttgtatggaatttaaatttagatggaaggaagtgataacgttaagtgtaatattagttgtgttttgtttaaaacgtgggttaacgaaattatttttaggaaaataaataagttttttttttattttttttttttttttttttgagatagagttttattttatcgtttaggttggagtgtagtggtgtagttttagtttattgtaatttttattttttaggtttaagcgatttttttgttttagtttttcgagtagttgggattataggtatgtgttattatgttcggttgatttttgtatatttagtagagagggggttttattatgttggttaggttggtttttaatttttgattttaaataatttattcgttttagttttttaaagtggtgggattataggcgtgagtttttgcgtttggattgaatattttttttttttttttagacggagtttcgttttgtcgtttaggttggggtgtagtggcgtagtttcggtttattgtaagtttcgttttttaggtttacgttatttttttgttttagttttttgagtagttgggattataggcgtttattattacgtttagttaattttttgtatttttagtggagacggggttttatcgttagttaggatggtttcgattttttgatttcgtgattcgtttgtttcggttttttaaagtgttgggattataggtatgagttattgaggttgattttttttttttttttgagatagggtttgttttaaaaaaagggtgtgtttttattatttaggatggagtgtagaggtttaagtacggtttttcgtagttttaattttttgggtttaagtaatttttttattttagttttttaagtagttgagattataggtgtaggttattatgttcggttaattaaaaaaaaaaattattttttgtagatagggttttattatatcgtttaggttagttttgaatttttgggtttaagcgatgcgtttgttttatttttttaaagtgttgggattataggcgtgagttattttgtcgggttaaatattatttttaaggaaatgatttttttatttagttttttggtgtgtgaatatatagagaaagtttggtttttaattgtgggggttaacggagtgaatgggaagagtcgggggatagcgtggagtgtgaggataaggagataatttttaaggtagcggagagagggagtatggagtcgttttggggttatttataggtaggttttggttgtttttttagatatttgttttgtcgtaggttcggttaagatttgtatagggatttcgggtcggtttttttaggataggaattgcgtttaggagtgttggtttgaggtaggttttagtttttattggggaagtgaggggtaggaggttttagttgaaggttatttaggttgtagcggcgtggttttttcgttttcgtttagtatttaggttagtttgggtattttcggttcgtggggtatgttttttcgttttaggcgagtatagatcgagttttgtttttttttaaatatattattgcgtttttgcgttcgtaggtttcgttggaagttgttttttttggagattattcggtcgattgtttaatttcggggtttcgggtttttcgtttttcgttttgttaaggtttgagttttttttattgcgtggttaggcgtggagggtcggtcgattcgatttcgaaagacgttttagcgttttacggtttcggggcggaggttaggggtttcgtcggttcgaacgtcgggtttcgcggggtcgaagttttgataagttatttggtaggagtggttggtagatcggttgcgtttggggtatcgggcgtcgttttttttaggttcgaagttttcggttcgcgtagtagggatatttcgttaggggtcggcgggcggggcggggtcggcgcggtcgggagtcgcggatattcggttatcgagttatcggttacggcgtagcgggggtcgtcgggttgcgtcgttagggttacgcgacgcggtgttcgtttcggcgtagggtttttgggcgtggtcgttgtttttttcgtgtgtgggattttaggttatcgtgtggcgtttcggtagtgtgtgggattttagaggcgttcggggttttttcgttgtgtggtgttttattttgggagaatttcgggtgcgtggcgtggtttttcggtcgtttttagttggtttgcggtcgtggcgggggtttgtgggtttttgggtttcgacggcggcgagacgggcgtttttttagcggcgtaggaagcggtttcggtcggaaggggggtttcgggcgttatcgtcgttttcgttttcgttcgcgtttagcggttttcggcgggcggggtcgagcggggtcgagcggagtcgagtatggtcgagcgtagtcgagtttcggtcgagcggagtcgagttatggtagggcgggttcgagcgtggtcgagtttcgggcgagcggagtcgagcgcggtcgagttcgggcggggagcgcgcgtttttggaagagttcggttggggagcgggttatatttttggttagcgttagggttgaggcggacgtacggtaataaatagcgcgggggtcgggggggttcgggcgcgcgggagcgggagcggtcgggggagtcggagcgtattatggaggcggcggtaggcggtcgcggttgtttttagtcgtattcggggttgtagaagacgttggagtagttttatttgagttttatgagttcgttgggcggttcggtcgttttttcggcgcgttgggcgtaggaggtttataagaaggagagcgttaaggaggcgggcgcggtcgcggtgtcggcgtcggtgttcgtagttatcgagtcgtcgttcgtgttgtatttgttcgttatttagtcgtcgtcgttcgtgttgttcgggtttttttttatgtcgttcgatcgttttatcgagcgttgcgagatcgtattggaaggcgagattatttcgtgtttcgtggtgggaggcgagaagcgtttgtgtttgtcgtagatttttaattcggtgttgcgcgatttttcgttgtagtagattaacgcggtgtgcgacgagttttatatttattgttcgcgttgtacggtcgattagttggagatttttaaagttatgggtattttgtttttttcggcgttttcgtgcgggtttattattaagacggacgtcgagcgtttgtgtaacgcgttgttttacggcggcgtttattcgtcgttttgtaagaaggagttggtcgttagtttggcgttgggtttggagtttagcgagcgtagcgttcgcgtgtattacgagtgtttcggtaagtgtaaggggttgttggtgttcgagttttatagtagttcgagcgtcgtttgtatttagtgtttggattgtcgttttatgtattcgtcgtataagttcgtggtgtattcgtataaggttttggagaatcggatttgttattggggtttcgattcggttaattggcgggtttatattttgttgagttaggattatacgggtaaggaggagtaggcgcgtttcggtcgttgtttggacgacgtgaaggagaaattcgattatggtaataagtataagcggcgggtgtttcgggtgagtggttttaggtttgggagttggggaggatgcgtttggggtgggggttttttttggattataggttttggttttcgaaggttgggatttgtgtttttgtcgtgttttatgtttttagttttcgttttgttttagggaaatttagagtgtttcgattggtagggttagagagtttggtaggaaggtttttttgttcgttttttaggacgagtttggagtgcgggttgtggcggtggggtggggggttaggtttggtgtgtggggaaggttcgtaggtttataggtattgtttagataggaaggtataggttttatgttttcgagaaagcggtttgttttaggttagggaagttaggtttagttgggttacggttcggatgttttaggtttaggttttttttggggttggggtgaaggtggttgttttcgtttcgaaggtatttagtttcgaagacggagggttgtttgtttttgggttttaggagatagagtttgggtgaggcgaggtttggttttgttattggttttcgttttttgtttggtgttttgaagttttgggatatagatataaaatgaagttaggtgtttaggttttagtggtaggggttcgagatttggcggttttagtattgtgttggttggtttttttgggtttgttagggattaaattttagagttcgtcgtgtggggtgagggttatttggtattcggttgaggggtttggttagtaggtttttgggttcgcgtgttggagttattggcggtttgcgatttgttttggatttatttatttttttttttttttttgaaacgtagaggggtgcgtcggagagggaggttgttggtttggttttgttgtttgttagttggaggatttatgggattcggtatgggtagtttttaggttacgaggtgtcgaaattatttagtggggtttttaggaatttttcgttgcgtatttttttaagtatttgtaattttttttttaaatatttag

SEQ ID NO: 244 - DNA, 7033 bp, Artificial Sequence
  chemically treated genomic DNA (Homo sapiens)
ttggatatttaaaagaaaagttataaatatttggggaggtacgtaacggaaagtttttgaggattttattgagtaatttcggtatttcgtggtttgggagttgtttatgtcggattttatagattttttaattggtaaataataaagttaggttagtagttttttttttcggcgtatttttttgcgttttagagggagagaaggaaatgggtgagtttaaagtaaatcgtaggtcgttagtaattttagtacgcgggtttaggagtttgttgattaggttttttagtcgggtgttaaatggtttttattttatacggcggattttgggatttggtttttggtaggtttagggagattaattagtatagtgttggagtcgttaagtttcgggtttttgttattgaagtttggatatttggttttattttgtgtttgtgttttaaaattttaaggtattaaatagggagcgggagttagtaataaaattaggtttcgttttatttaagttttgttttttggggtttaaaggtaggtagtttttcgttttcgaggttgggtgttttcggggcgaggatagttatttttattttaattttaagaaagatttgggtttgaggtattcgggtcgtggtttagttggatttaatttttttgatttggggtaggtcgttttttcgggagtatgaggtttgtgtttttttatttgggtaatgtttgtgggtttgcgggttttttttatatattaggtttggttttttattttatcgttatagttcgtattttaggttcgttttggggaacgggtaggagggtttttttattaaattttttggttttgttagtcggaatattttgaatttttttaaaataaagcgaagattggagatatggggtacggtagaagtataggttttagttttcggagattagagtttgtagtttagaaggggtttttattttaagcgtattttttttagtttttaggtttggggttatttattcggggtattcgtcgtttgtatttgttgttatagtcgaattttttttttacgtcgtttaggtagcggtcgaggcgcgtttgtttttttttgttcgtgtaattttggtttagtaggatgtaggttcgttagttggtcgagtcgaagttttagtggtaggttcggttttttagggttttgtgcgagtgtattacgaatttgtgcggcgggtatatgaggcggtagtttaggtattggatgtaggcggcgttcgggttgttgtagagttcgggtattagtagttttttatatttgtcgaagtattcgtggtatacgcggacgttgcgttcgttgagttttaggtttagcgttaggttggcggttagtttttttttgtagggcggcgggtaggcgtcgtcgtagagtagcgcgttgtataggcgttcggcgttcgttttggtgatgagttcgtacgagggcgtcgagaagggtaggatgtttatgattttgaggatttttagttggtcggtcgtgtagcgcgagtagtagatgtggagttcgtcgtatatcgcgttgatttgttgtagcgagaagtcgcgtagtatcgagttgagaatttgcggtagatataggcgtttttcgttttttattacgaagtacgagatggtttcgttttttagtacggtttcgtagcgttcggtggagcggtcggacggtatgaagaagggttcgggtagtacgggcggcggcggttggatggcgggtaggtgtagtacgggcggcggttcggtggttgcgggtatcggcgtcggtatcgcggtcgcgttcgtttttttggcgtttttttttttgtaggttttttgcgtttagcgcgtcgagaaagcggtcgggtcgtttagcgagtttatggagtttaggtggaattgttttagcgttttttgtagtttcgggtgcggttggaaatagtcgcggtcgtttgtcgtcgtttttatggtgcgtttcggttttttcggtcgttttcgttttcgcgcgttcgggttttttcggttttcgcgttgtttgttgtcgtgcgttcgttttagttttagcgttggttaagaatgtgattcgttttttagtcgggtttttttaggaacgcgcgtttttcgttcggattcggtcgcgttcggtttcgttcgttcgggattcggttacgttcggattcgttttgttatgattcggtttcgttcggtcgggattcggttacgttcggttatgttcgatttcgttcggtttcgttcggtttcgttcgtcgagggtcgttgggcgcgggcggaggcggaggcggcggtggcgttcggggtttttttttcggtcgaggtcgttttttgcgtcgttgggaaggcgttcgtttcgtcgtcgtcggggtttagaaatttataggttttcgttacgatcgtaaattagttgggggcggtcggggggttacgttacgtattcggggtttttttagggtgggatattatatagcggggaggtttcggacgtttttggggttttatatattatcgggacgttatacggtgatttggggttttatatacgagggggatagcggttacgtttagggattttgcgtcgagacgggtatcgcgtcgcgtgattttggcggcgtagttcggcggttttcgttgcgtcgtggtcggtggttcggtggtcgagtgttcgcggttttcggtcgcgtcggtttcgtttcgttcgtcggtttttggcggagtgtttttgttgcgcgggtcgggggtttcgggtttgggaggggcggcgttcggtgttttagacgtagtcggtttgttagttatttttgttaggtggtttattaggatttcggtttcgcggggttcggcgttcgggtcggcgagatttttgattttcgtttcggggtcgtggagcgttgagacgtttttcggggtcggatcggtcggttttttacgtttggttacgtagtgggagagatttaagttttggtagggcggggagcgggaagttcggggtttcgaagttggatagtcggtcgggtggtttttaggggaggtagtttttagcgaggtttgcgggcgtagggacgtaatggtgtgtttggggaggggtagggttcggtttgtgttcgtttgaggcggagggatatgttttacgggtcgggggtgtttaagttggtttgggtgttgggcggaggcgagagggttacgtcgttgtaatttgagtgatttttagttgggattttttgttttttatttttttagtggaggttggaatttgttttaaattagtatttttgggcgtagtttttattttgggggagtcggttcggagtttttgtgtaggttttggtcggatttgcggtagggtaggtgtttagagaggtagttaggatttatttgtaggtgattttagggcggttttatatttttttttttcgttgttttgggggttgtttttttgtttttatattttacgttgtttttcgattttttttatttatttcgttggtttttataattggaggttaggttttttttgtgtgtttatatattagaaagttgggtaagaagattatttttttaaaagtgatatttaattcggtaaggtggtttacgtttgtaattttagtattttgggaagataaggtaggcgtatcgtttgagtttaggagtttaagattagtttgggcgatatagtgagattttgtttataaaaaataatttttttttttaattagtcgggtatggtggtttgtatttgtggttttagttatttgagaagttgaggtgggaagattgtttgagtttagaaggttggggttgcggggagtcgtgtttgagtttttgtattttattttgggtgatagggatatattttttttttgagatagattttgttttaaaaaaaaaaaaagggttagttttagtggtttatgtttgtaattttagtattttgggaggtcgaggtaggcggattacgaggttaggagatcgagattattttggttaacggtgaaatttcgtttttattaaaaatgtaaaaaattagttgggcgtggtggtgggcgtttgtagttttagttatttaggaggttgaggtaggagaatggcgtgaatttgggaggcggagtttgtagtgagtcgagattgcgttattgtattttagtttgggcgatagagcgagatttcgtttaaaaaaaaaaaaaggatatttagtttagacgtaggggtttacgtttgtaattttattattttgagaggttgaggcgggtggattatttgagattaggagttggagattagtttggttaatatggtgaaattttttttttattaaatatataaaaattagtcgggtatggtggtatatgtttgtaattttagttattcgggaggttgaggtaggagaatcgtttgaatttgggaggtggagattgtagtgagttgagattgtattattgtattttagtttgggcgatggagtgagattttgttttaaaaaaaaaaaaaaaaaaaatagaaaagggatttatttgtttttttggagatagtttcgttggtttacgttttggataaaatatagttagtgttgtatttgacgttgttatttttttttatttggatttgaattttatataatttagttaaattgtaatttagagaaggtggttgtagttaggtttgttgggaagtgtttttaattaagtagagaatttttttggtttttttggtggattaggggttttgtgtagggtttttagtatgggtagtgtttatttagagtttttgtttttttttgtgtttttggttttttagggttttagttagggattaatattttgtttagagtgcggatttttgggaagtagttataggtgtgttatggagtgaaggtgcggggataggtgagggtttttagttggtttttgaagttatttttatttttgtggatttttgagattttttttttttaatatgttagagtttttagaggaaggtatttattttattaagggttagagtagttacgtttagagggagttattagggtttatttttttttttgagtttggtagggaagagggtggggggtgtttttcgtttgttggttttttattttttagtttcgtttagtagttgtttaggttagtcgtttacgcgggttattatattggtaggtcgcgggttaaggttgtaggtatagttatagcgcggagtagggtgggatggacgtggtgtttgtttagagaagttttggtatgcgggtaaaggtagggattttttagttttttttttggtttttattacggtgataggtttggttagttagttatgagtttgtttttttgttcgatgagtttttattattgtagatattgggattagggtaaggagattaggttgtatttcgtgtggttttattttggtgtgagagataatagttaattaataaatttgttagtacgggagcgagattttttagatttttaaaaggcgcggagtggttggggttggttgtaggtagggagggttttttgggaggttggttttggagttgagatttttattttaaggagttagtagtgtggagatgagttggatggcgttttaggattagaaagaggaagatattggtaaagtaaggggtattttaagttttgggggaatttggaaattttggtggggaaatgtatcgtagattagttttgttttattttgttttgttttgttttgttgttatttatttttttttttttaggaagtagaaggaaggttttgtagtagttaggtatagattgttattggtaaaaatatgtttagttattgggaaagaaatttttaaatgtgaaaataaaaattgtttaagtaatattagtttcgtataattttgttttgtttttgtttttgtttgagatgaagtttcgtttttgttgtttaggttggagtgtaatggtgcgattttagtttattgtaacgtttattttttaggtttaagcgatttttttgttttagtttttcgagtaattgggattataggcgtttgttattatgtttagttaatattttgtatttttagtagagatagggttttattatgttggttaggttggttttgaatttttgattttaggtggtttatttgttttagttttttaaagtgttgggattataggttatgttatcgtgttcggttagtagaaattttagaaagatttttgttttattttggatttttttaaatataggttttgagataaagatttttattttattttattttattttattattttatttttgagatagagttttcgttttgttatttaggttagagtgtaatggtacgatttcggtttattgtagttttagttttttgtatttaagtgatttttatgttttagtttttcgagtagttgggattatagatatgcgttattatattaggttaatttttgtatttttagtagagacggggttttattatgttggttaggttggttttaaatttttgattttaggtgattcgttcgttttggttttttaaagtgttgagattataggcgtgagttattgtgtttggttttttatttaattttttatttatagagatgagattttattatgttgtttaggttggttttaaatttttgaatttaagcgtttttttttttagttttttaaagtgttgggattataggtgtgagttatcgcgtttagttaagataaagatttgagttcgagtgttttgtttgggaggcgatttaaggaagtataggaaagggttagagtaagtgagcgggggaggggaagtcgggttttaaagagggatttgtaaagttttttatcgttgggtatttggagttgaatttttagggtagaatttagggtttagagttattttaggggttgttttggttagagcgtaagggagtgagggataagtattggagtgggggggttgatttaattaggaaatgagtttaaggtagtaagagttaggtttttcgatgttaaaatatagaaagggaggaaggaagt

SEQ ID NO: 245 - DNA, 9656 bp, Artificial Sequence
  chemically treated genomic DNA (Homo sapiens)
ttgtatgttttattgatgaggaaattgaggttgggagagtttgtggtaggggttaagtaggtttatagtggcggggtatggtagtggtggttgggtaggtttttgtagtttttttttttcggtaggtgtttagtattgggtgtacgacggtgaaaagttagttttgggtttcgtattttttatcgagttgggtttggtgaggttttcggtttatgttgttttggtttggggtttcgagaagaataagatttatttttttcgaggtagggattattggcgtttttattttagtattcggcgtgtagatagtttcgtgtttcgtagggttattgattggagaggggtgttttttgagatcgacgttgttttttaggatgttgatggtgcgttgggggtgaggtagttggtgggaggtgggtatagtagtcgttttttttatttggtggtggttgggtttttatatgtttgttataggaagtttggttttttattataggttttttgtttagagttatttgtttttttttcggtggtcggttagtgttatattttatattgtagatgaggaaattgagggttagagaagtgtaaggttttattttggttttttagttatagttagtagaataataaattgttgtatattgagggttaataatgttttaagttttttattggttttatttagtttttagaatagttttttgatgtgatatttgttgtgaatttagtttttagaggagtaaatagaggtttaggtaatgaggtttttaatttggattattttggtggtttttgtttttaattattgatttatttagttttttataattatagggggttagagttagtttagtgtttttttttttgttaggttttttttttgtgtttttttttttatattaggatttattgggagagttattttagggtagtttttagttttaggattttagggtgttcgttaatagtttggttaatttaatagatgtaggagagagtgatgtggagggtggtgggggtaacgggatttgtttttttgagaggtgggatttaggtttttgaggttttgggtatttgttaggttgggtattagtttagtttagatttcggggtaggtagaagggttttttagagggaagagaggttttgaaaggtcggttttggattttgtaggattcgaggaatttagtagtggttaagggttttttatttagtttttttttagtgtttatttttgggtatagtttgataggtaggagtagggtttagtgttcgttcgtttaggtttgattattttttttttttaggttatgtttattttttgcgcggtcgtttttattggaagtttgattttgtgaaggtgaaggttttggaaggtttttttcgtttcgtgggttttgatttttttggttgtgtcgagtttgttaatatttttttttgattatggtttggatgtttttaggggtgttgatttttgttaggttacgaatattaggttagagatttatggttatttttgtggttgtgggtattaggtatgggattgagtttatgtttttttagggggatggggtggggtataattattatgataattgtcgggagggttacgtaggtcgtggttatttgttagcgattgttttagattgggtagggaggttttggtatgatttaagaggaagggtagttttgggttcgttatgtaggttttggtaaatttggttgttttgtttttatttttgttttttagggtagtattatggtaggattgggggaattggagtgtttttgttgtatttttgttgtgaggttttttttaggggttggtattgaagtaagggtgttggggttttatggtttttagttttggttgagtaattgggttgtagggtagggttattttttgaggttaggttttggtaggtgtttgtatttgtttgttttttggttgataattttggaaatttgttttttagaatttaggttaaaaagtttatagttaaatggggaggggtattttttatgtaggagattttaggttttggaggttgtaatatattttaattttgttttaggtcggatttttttgaagtttttttcgtagtattgttattttttaaagttattgtaaatgtgtgtatagtgtgtataaattttttttttttttttttttttttaaattgaggattgttattaaatatagttgttttttatttgtttgtttggtttttttttgtgaatgtttagttaggatggggaggtttggttattgtttagttttattttgggagttagggtcgaagtttattatttttaagtttttggtttttggggttgggtatagtgtttagggttttttttgttttatttttatattatattttgttatagtggttttttaattggttttttatttttttatttgttttttttgtttattttttagagtggtggtttatttgtttatgttatagtttagtttgttatatatagttgtggtttttgtattcgtaggtttaattaatttcgggtagaaaaaataatgtttaaaaaaaggatgcggacgggcgtagtggttcgtgtttgtaattttagttttttgggaggtcgaggtgtgtggattatttgaggttagaagtttgagattagtttggttaatatggtgaaaatttatttttattaaatatataaaaattagttgggtgtggtggtttatgtttgtaattttagttatttgggaggttgaggtaggagaattatttgaacgtggaggtagaggttatagtgagttgagatagtgttattgtattttagtttgggtgataagagtaaaatttcgtttaaaaaaataataaagtaaataaataggttgggtgtagtggtttatgtttgtaattttagtattttgggaggttgaggttagtagattacgaggtcgggagatcgagattattttggttaatattatgaaatttcgtttttattaaaaatataaaaaattagttaggcgtggtggcgggcgtttgtagttttagttattcggaaggttgaggtaggagaatggcgtgaatttaggaggcggtgtttgtagtgagtttagattatgttattgtattttagtttggacgatagagtaagattttgttttaataaaataagtaaataaataaataaataaataaataaataagggatggttatttttgtattgaatatgtacggatttttttttttattattgttttttaaataatagtataataattatttatataatatttgtattgtattaggtagtataaggaatttagagatgatttaaggtatataggaaagtgtgtgtaggttatatgtaagtatgatattattttatataatggatttgagtatttgtggattttattatttgtagggggttttggaattaatttttatggatattgagggatgattgtattttggttttttattattgtgaggatatagaataaagtaattttagttattgttttttttaattttttagtgtttttttgttttattttttagttttatgtgtgttttcgtaatagtatagttgtattttttttttttttaagagaggtagggtttttttttgttgtttaggttgtagtgtagtggtgtaattagtttattataattttgaatttttgggtttaagggatttttttttttttattttttaagtagttggggttataggtgtatatcgttatgttatatttagtttatttattttagaatttttgtagagatagggttttgttgttttgtttagtttggttttaaatttttggttttaagtgattttttttgttttggttttttaaagagttgggattataaggtcgggcgtagtggtttatatttgtaattttagtattttgggaggtcgaggggggcggattacgaggttaggagatcgagattattttggttaatatggtgaaattttgtttttattaaaaatataaaaaattagttgggcgtggtggcgggtgtttgtagttttagttatttgggaggttgaggtaggagattttagttttaaaaaaaaaaaaaagagttgggattataggtatgagtcgttgagtttagttatagttgtaattttattagattgaacggtgtgaaattattagtagtgggttattgttttattttttgtattatttaattatgattgtttttagatttttattagttttattagtttcgcgttgtaagagttaagaggtagagttatagggttgggttgtttggttttattttttattgtagggttcggttaagtagagtgtaggttaagagaggaatggagaaggtggaaggtgttttttttttttaacgtttatttgatgtattagttaaattaaatattatttgggtttttgaatattgttaagttttattcgttgttgttattttgtttatttttatagttgtagggatagtcgtaggttcggaattgggatatttttttttaggggtttgtttatttgtttagttgtattgcgttttaggggtggggaagttaaggtacgagattggggttttaaagtatgtttagattatttaggtttttagatattaggttttttttttttaggttttatttcgttgttttttttttgggtttagttttagttttggttgtaagattgggaaagttattgtttgagttaggattttattggttatttttgttcgtgagaagttttttatattacgatttgggaggtagtttgggagaaagagaaattagtcgtggtttttttaaggggttcgcggaggcgcgttcggttttttgtttgagcggcggcgcgcgcgttagcgttaacgttagcgtttgcgtattgagggcggtttggtcgtcgtttgcggcggcggcggcggttgaggagttcggttgaggcgttagtattcggttcggttcgtatttcgtttttcggtttcggtttttttcggtttagtacgtttcggtttcgttttagtttttttgatttttcgtagttcggtttcggtcgttcgtttttgtcgtcgtaatgatgatgatggcgttgagtaagattttcgggtagaagttcgtgaagttttagttggaggacgacggcgagttttatatgatcggtttcgaggtagttcggggcgcgttttcgtttttttcgggttcggtttcgcgggagtttcggggcgggtttatgcgtcgagagcgcgcgtttttatttatcggggcgggcgggcgcgcgcgcgcgcgttcggggttgtggggcgtggtttagtgggcgtgtcgggtgtggttttcgtttttttatcgatttgggatttttttatttatttcgtcgaggttcgtcgtttttagtgttgttaagattttggcgtcgcgaggggttttagtggtttcgcgttgggttggtttttagttagacgtaaagaaacgggatattgagttagtttttgcgacgtttgggggattgtattgttgtttttgattttttttagatgtcgtaaattttacgtgtattttttttcgtattgttatttgtgggaattttaaatggtaggttggaaattttggatttagtgagggtttatttttattgtgtttgttgttttttaggtgagtagtggaggttttttgatttttgtttatcggtgaagaaatagattggaggaagatgtttgtttttgggtgaataagggttttatgtttaagttagattttttagtagttttgaagcgattgatattttttatatttgtgaattgattttgaattattataggggaaagagtttaaggatgtttaatttttaattagagtggttgtattttgttgtattaattggatgattgattttaggaaaattttattggtttttgaatgggtgtttgttttaagtttattaggtttttgttttttgttttttatagagatagggtttggttatgttgcgtaggtaggtttttaatttttgggtttaagtagtttgttcgtttgggttttttaaagtgttaggattataggtatgagttattatattcggttatatattaggtttttatagattgttttaaattagttttttttgttttaaaggtagtttttagttagtatatgttatttttttaaaaaaattatggatatatagtttagatgtataaatgttaagtagtagaattttatgtaaggaagtaagtgttaattttggagaattaaagttattatgaaatgttaagagttttttttttttatagtagtttttagtattatattttagtattttattcgtattttatttttttttatttttgaaaaaagattttattttgtgtagtggtgtgatttcggtttattgtagttttgattttttgggtttaagcgatttttttgttttagttttttaagtatttgggattataggtgtgtattatcgtgttcgattaatttttgtattttttgtagagatagggttttgttatgttgtttaggttggttttgaatttttgggtttaagtgatttttgtattttagttttttaaagtgttggaatgataggtgtgagttattgtatttatatttagcgtatttatattttttaaatttgtgggttttattttttataattgagtatagtatgaatgaatgaagttttaagatggttatattgagttttatggatgagattaaggttaatagtattagaattttagtgttagtattttttattattttttttttttggacgaggtttgattttattatttaggttggagtgtagtggtgtaatttcggtttattgtaattttcgttttttaggtttaagtcgtttttttattttagttttttaagtagttgggattatacgtatatattattatattcggttaatttttatatttttagtaaagatggggttttattatattgtttaggttggttttaaatttgtgagtttaagtgatttgttcgtttcggttttttaaagtgttcgattataggcgtgagttattgtgtttggtttttattaatttttataaaataaaaaatataggatttaataaaatttttacgttgttatttaaattataattgtttaaagatgttagtgttggggaggtagagttagtgtttgtttatttgttatagtttagaatggtttttattggttagtaggtatttgtttaattgtagaatgtaaaaggtgttaaattttagtttgtgatattaggcgagttgtttatttgatttaatgggtgtaaaagtaattagtttggttttaagtaggtgatattttaaaagaaagtttttatttattagttggagtaaattgagaagttgtgcgtggttaagtgggaagaattttgggaggtttggttttagttttgttttgttttgttgtcgtgttttttatgtgtataatgtgatgtttagattagatggtttttaagattttttttaaaatatattttagtttttagaaagttaattatagttttgttttttagttttttgatttttgggttttttagtaagaataatttttttgagatttaggttgtaagagatttagttggagaggtagtttgtttttttgggtttgatttaattattagattttcggagtttagggaagagtttaaggttagagttttattgaaatttagtagttttagtgatagtagtggatggacggttttagtttattgttttgtggaaaataggtattgtatttagagaggtgggttagttatagtaatatatttagtgtttttatgcgttatttgtggagttgttttgggaaggtatttgtatttattaagagtgtgtgttattgttttgttattaatagatagttgtatttattaagtcggagttatggagttttgaggattttaatagatttttaagtttagtattttgattttatatttaggaaatttgggttttaagagggtgaaggttggtttagaggaaagttaggaaggtaagtttagttttttaagttttgaaggggttttggggggtatttaggagatttagagttttgtagggtttgtaaggtagttataggggggagtattgttaattttttttaaaaaatttaatggaaattttatatttattatgatattggatgatattgatatataagttaaataatatagaggggtttgtgttttttatgtggaaagcgagtgatttgttgtgtttgttttttttttagcgtttagtagttttggttgttgattatagttattgttgaaaatggagaaatattttatttaatattatgtttgggttttatatttataattttagtattttgggaggtttaggtaggagaattatttgaatttaggagtttaagattagtttgggtaatatagtgagatttttgtttttatagatttttatttttattttttttaattaggtcgggtatgtggtttatattcgtaattttagtattttgggaggtcgaggtgggtagatcgtttgagtttaggagtttgagattagtttgggtaatatggtgaaatttcgtttttataaaaaatataaaaattagtcggttgtggtggtaagtaattatagttttagttatttaggaggttgaggtaggaggatcgtttgagtcgaggagttcgaggttgtagtgagttatgatcgatcgtattattgtaatcgagtttgggtgatagagcgagattttgttttaaaaataataataaaaattaaaaataaatttaaaaatgtaaaatatatattatgttgcgtagataaaatgggaaatataatagaagtggttttttatgggggtgaagtttagagttgttgagtatttggtagatgagtaaagggtatttagaaaatgggaagtgattttaggttatagatggagttagtatttggtatttagtttattggttattttttgtaatgtgatttcgaagtgattatatttgaaaagttaacgagataatagggtatttttataaaaattttaggtttagatttattttttttaaggaagttatatttttagtatttgttataagtaaattgaagttattgtttgagttagtgatgatttatatagtagtttggtgattgttttgtaaattttttggaaaatttttttggtatttttggtttgggttttgttattaaataaagtaatataggttatgggggaaattatttggtatttgtttaaaattaaaagatttttttggtgtttattatattgtaaagatattaaagttttgtttttaagataaaagaaggttaaggaggttttgtatttttggaaagtgttagagatttttagtttaaaattaaaattattacgaattttttgttaagttttgggggttttttatttaggtatttgtttaggtttttcggaatttggttttgttgttaggatgtatatatgtaggttagatgtgtattgttggtgaattttttatattagtagaatgtgttttaatgttgtcgaaagcgtggcgtttgggggttattttaaggtttgtttgtttgttgtttgatgtagtttgcgttaggattttttttttttttgtggtgttgcgatttttataatgagtttttttgttttatttatagg

SEQ ID NO: 246 - DNA, 9656 bp, Artificial Sequence
  chemically treated genomic DNA (Homo sapiens)
tttatgagtaaagtaagaaggtttattataagggtcgtagtattatagggaaggggagggttttggcgtagattgtattaagtaatagataaataggttttgaggtggtttttaggcgttacgttttcggtagtattaaaatatattttgttgatatgaagggtttattagtagtgtatatttggtttgtatatgtgtattttgataatagaattaagtttcgaaaggtttgggtagatgtttgagtgggaggtttttagagtttagtaagaagttcgtggtgattttgattttggattaaggatttttggtattttttagaaatgtaaggtttttttgatttttttttattttaaggataagattttgatatttttataatgtaataaatattaaaaaggttttttaattttagatagatgttagataattttttttatggtttgtgttgttttgtttagtaataaaatttaaattagggatattaaaggaattttttaaaaggtttataaggtaattattagattgttatataaattattattgatttaaataatggttttagtttgtttgtagtaaatattgaaagtgtgatttttttaaggaaaataaatttagatttaaagtttttatgagggtattttattgtttcgttgattttttaagtatgattatttcggagttatattgtaggggatggttaatagattgggtgttaggtgttggttttatttgtaatttgggattattttttattttttgggtattttttatttatttgttaaatgtttagtaattttgaattttatttttatgaaggattatttttattatgttttttattttatttacgtaatatagtatatattttgtatttttaaatttatttttaatttttattattatttttgagatagggtttcgttttgttatttaggttcgattgtagtggtgcgatcgattatagtttattgtagtttcgaatttttcggtttaagcgatttttttgttttagttttttgagtagttgggattatagttgtttgttattataatcggttaatttttgtattttttgtagagacggagttttattatgttgtttaggttggttttaaatttttgggtttaagcgatttgtttatttcggttttttaaagtgttgggattacgggtgtgagttatatattcggtttaattaaaaaaaataaaaataaaaatttgtagagataagagttttattatgttgtttaggttggttttaaatttttgggtttaagtgatttttttgtttgggttttttaaagtgttaggattataggtgtgagatttaggtatagtattaaataaaatgtttttttatttttagtagtgattgtaattaataattagggttattgaacgttgagagaagagtagatatagtaagttattcgttttttatatagagggtatagatttttttatgttatttggtttgtgtgttagtattatttagtattatggtaaatgtagagtttttattaggttttttaaaagaaattgataatatttttttttatgattattttgtaggttttgtagggttttgagttttttagatgttttttaaagtttttttagaatttaggaaattgggtttgtttttttggtttttttttgaattagtttttatttttttgggatttaggttttttgaatataaaattaaggtgttggatttggggatttgttagggtttttaaagttttatgatttcggtttggtaaatatagttgtttgttaatggtagaatagtgatatatatttttagtaaatgtagatgtttttttaagatagttttatagatggcgtatggaggtattgggtatgttgttatggttggtttatttttttgaatatagtgtttgttttttatagggtagtgggttgagatcgtttatttattattattattggagttattgaattttaatagagttttgattttgaatttttttttaaatttcgaaggtttgatgattaagttaggtttaaaagaataaattgtttttttaattgagttttttatagtttgggttttaggaagattatttttattgggaggtttaggagttaaggggttgaaagataagattgtaattagttttttagaaattaaaatgtgttttggggaagattttggagattatttagtttaagtattatattatatatatgagaaatacgatagtaaggtagagtagggttggaattaggttttttaaggttttttttatttggttacgtatagttttttaatttgttttaattaataaatgaaagtttttttttgaagtgttatttatttagagttaaattgattatttttatatttattagattaggtaaataattcgtttagtattataggttgaaatttgatattttttgtattttgtagttaggtaggtgtttattggttaatgaggattattttgaattgtggtagatggataggtattggttttatttttttagtattggtatttttgaatagttgtaatttaagtgataacgtgaaaattttattgaattttatattttttgttttataaaaattagtggaggttaggtatagtggtttacgtttataatcgagtattttgggaggtcgaggcgggtagattatttgagtttataagtttaagattagtttggataatatggtaaaattttatttttattaaaaatataaaaattagtcgggtgtggtggtgtgtgcgtgtagttttagttatttgggagattgaggtgggaggacggtttgagtttgggaggcggaggttgtagtgagtcgagattatattattatattttagtttgggtgatagagttaaatttcgtttagaaaaaaaaaatggtggaaaatgttaatattaaagttttgatgttattgattttagttttatttatgggatttagtgtgattattttgaggttttatttatttatgttatgtttaattgtgaaggataaaatttataagtttaaaaagtatgaatgcgttgagtgtgagtgtagtagtttatatttgttattttagtattttgagaggttgaggtgtaaggattatttgagtttaggagtttaagattagtttgggtaatatggtaaaattttgtttttataaaaaatataaaaattagtcgggtacggtggtgtatatttgtagttttaggtatttgggaggttgaggtaggaggatcgtttgagtttaggaggttaaggttgtagtgagtcgagattatattattgtataaagtgagatttttttttaaaaataaaagaaaataaagtacgaataaaatgttggaatatgatattaaaaattgttataaggagaagaaatttttggtattttatgatagttttaattttttaggattggtatttatttttttatatgagattttattgtttgatatttgtatatttgaattgtatatttataatttttttaaaaaggtaatatatattagttggggattgtttttggagtaaaaaaggttagtttgagataatttgtaaaaatttaatatatggtcgggtgtggtggtttatgtttgtaattttagtattttgggagatttagacgggtagattgtttgagtttaggagttggagatttgtttgcgtaatatagttagattttgtttttataaaaaataaaaaataagaatttaatagatttggaataaatatttatttaaaggttagtagagtttttttgaagttagttatttagttgatgtaataaaatgtagttattttagttaagggttaaatatttttaggtttttttttttgtaataatttagaattagtttatagatatggaaagtgttaatcgttttagaattgttgaaagatttagtttaggtatggggtttttatttatttaaaagtaaatatttttttttaatttgtttttttatcggtaaataaaggttaaaagatttttattgtttatttaagaggtaataaatataatggggatgagtttttattaagtttagggtttttagtttgttatttgaggtttttataagtagtaatacggggaggggtgtacgtgaaatttacgatatttaaaaagggttaaaggtagtagtgtagttttttaagcgtcgtaggggttaatttaatatttcgtttttttgcgtttgattggaaattaatttagcgcggaattattggggtttttcgcggcgttaaaattttggtagtattgaaggcggcggatttcggcgaaataagtaaggaaattttaggtcgatgagggggcgggggttatattcgatacgtttattaggttacgttttatagtttcgagcgcgcgcgcgcgcgttcgttcgtttcgatgaatggagacgcgcgttttcggcgtatgggttcgtttcggggttttcgcggggtcgagttcggggagggcgagaacgcgtttcgggttatttcggagtcgattatgtagaattcgtcgtcgttttttagttggaattttacgggtttttgttcgaaggttttgtttagcgttattattattattgcggcggtagaggcgggcggtcggagtcgggttgcgagggattaggagggttggggcggggtcggggcgtgttgggtcgagggaaatcgaagtcggaaggcgaaatgcggatcgggtcgggtattggcgttttagtcgggttttttagtcgtcgtcgtcgtcgtagacgacgattaggtcgtttttagtgcgtaggcgttggcgttgacgttgacgcgcgcgtcgtcgtttaaataaaaggtcgggcgcgttttcgcggattttttaaaggagttacgattaattttttttttttttaggttgttttttaagtcgtggtgtagaggattttttacggataaaaatagttaatgaggttttgatttaagtagtggtttttttagttttatagttaggattggaattgagtttaggggaaaagtaacgaagtgaggtttgaaggaggaggatttagtatttggaagtttgggtggtttgggtatgttttgggattttaatttcgtgttttagtttttttatttttaaaacgtagtgtagttgagtagataggtaggtttttaggaagagatattttagtttcgggtttacggttgtttttgtagttgtggaggtgggtaaaatgataatagcggatgaggtttggtaatgtttaaaggtttaggtggtatttggtttggttggtgtattagatgagcgttggaagggagagatattttttattttttttattttttttttagtttatattttgtttaatcgagttttgtagtggggagtgaaattaggtagtttagttttgtggttttgttttttggtttttatagcgcgaagttagtgaaattaatgaaagtttgaaagtaattatgattgaataatgtagggagtaaaatagtggtttattattgatgattttatatcgtttaatttaatgaaattgtagttgtggttgggtttagcggtttatgtttgtaattttaatttttttttttttttttgaggttggagttttttgttttagttttttaagtagttgggattataggtattcgttattacgtttagttaattttttgtatttttagtagagatagggttttattatgttagttaggatggtttcgattttttgatttcgtgattcgtttttttcggttttttaaagtgttgggattataggtgtgagttattgcgttcggttttgtaattttaattttttaggaggttaaggtagggaggattatttgaagttaggagtttgagattagattggataagatagtaagattttgtttttataaaaattttaaaataaataagttgggtgtggtatggcggtgtgtatttgtagttttagttatttgggaagtggagaggggaagattttttgagtttaggagtttaaggttatagtgagttgattgtattattgtattgtagtttgggtaataaagggagattttgttttttttaaaaaaaaaaaaaatgtaattatgttattacgaagatatatatggggttggaaggtagggtaaggagatattggagagttgggaagggtagtgattgaagttgttttgttttgtatttttatagtggtgggaaattaaagtatagttattttttagtatttatgggaattggttttaggattttttgtagataataaagtttatagatgtttaagtttattatataaaatggtgttatatttgtatataatttatatatatttttttgtatattttaaattatttttagattttttatattatttaatataatgtaaatgttatataaatagttgttatattattgtttagggaataatgatagggaaaaaagttcgtatatgtttagtatagaggtaattattttttatttatttatttatttatttatttatttatttattttattgagatagagttttgttttgtcgtttaggttggagtgtagtggtatgatttgggtttattgtaagtatcgttttttgggtttacgttatttttttgttttagtttttcgagtagttgggattataggcgttcgttattacgtttggttaattttttgtatttttagtagagacggggttttatggtgttagttaggatggtttcgatttttcgatttcgtgatttgttggttttagttttttaaagtgttgggattataggtatgagttattgtatttagtttatttatttattttattatttttttagacggaattttgtttttgttatttaggttggagtgtaatggtattattttagtttattgtaatttttgtttttacgtttaagtgatttttttgttttagttttttaagtagttgggattataggtatgagttattatatttaattaatttttgtatatttagtagagatgggtttttattatgttggttagattggttttaaatttttgattttaggtgatttatatatttcggttttttaaagaattgggattataggtacgagttattgcgttcgttcgtattttttttttaaatattgttttttttattcgaggttagttgagtttacggatgtagaaattatagttatgtatggtaggttgggttgtggtatgagtagataaattattattttggaggatgaatagaggggataagtaggaaagtggggagttagttaagaagttattgtagtaaaatgtgatgtagaaatggagtagaaggagttttgagtattgtgtttagttttaagggttagaggtttgggggtggtggatttcgattttggtttttaggatagggttggatagtggttaggtttttttattttggttgaatatttataaaaggagattaagtaggtaggtagaaaataattgtgtttaatgataatttttagtttaaaaaaaaaaaaagaagaagaaggtttatatatattgtatatatatttataatggttttggaggatagtagtgttgcgaaaagggttttaggaggattcggtttgggataggattgaggtatgttgtagtttttagggtttggggttttttgtatgaagaatatttttttttatttgattgtgaattttttggtttggattttggagaatagatttttaggattgttagttagaaggtagatagatgtaggtatttattaagatttgattttaggaagtggttttgttttatagtttagttgtttagttagggttgaaggttatggggttttagtatttttgttttagtgttagtttttggaaggaattttataatagggatatagtaaggatattttagtttttttagttttgttatggtgttattttgagggatagggatggagatagggtagttaggtttgttaggatttgtatagcgggtttaagattgtttttttttttaagttatgttaaagtttttttgtttagtttgagatagtcgttggtaggtgattacgatttgcgtggttttttcggtagttgttatggtggttgtattttattttatttttttgaggagatatgggtttagttttatgtttggtgtttatagttataaagatggttatgggtttttagtttgatattcgtggtttggtaggggttagtatttttgagggtatttaagttatggttagaggaaagtgttggtaggttcggtatagttaaagaagttaggatttacgagacgggggaagttttttagagtttttatttttatagggttaaatttttagtagaggcggtcgcgtaggaagtaggtatagtttgagaagagaaggtggttaagtttgggcgagcggatattgggttttatttttgtttgttaggttgtgtttagggatgggtattaagggagggttgagtgggaagtttttggttattgttgagtttttcgagttttgtaggatttagggtcggttttttagaattttttttttttttagggagtttttttgtttgtttcggaatttgggttgggttaatatttagtttgataggtatttagagttttagaggtttgagttttattttttaggaaagtaagtttcgttgtttttattattttttatattatttttttttgtatttattaaattagttaggttattgacgggtattttggagttttggagttggaggttattttaggatagtttttttagtgggttttgatgtgggagaaagagtatagaagaggagtttagtaggggagggagtattggattggttttagttttttgtggttgtgggaggttgggtgggttagtggttaggagtagggattattagggtagtttaggttaggggttttattgtttgagtttttgtttgtttttttggaaattgggtttataataggtgttatattagagggttgttttgagaattggatgagattagtaaggagtttagagtattgttggtttttagtgtatagtagtttattgttttattggttgtggttgaaaaattagggtaagattttgtatttttttgatttttagtttttttatttgtaatatggaatgtagtattagtcggttatcgagaggagggtagatggttttggataaaggatttgtgatgaagagttagattttttgtggtaggtatgtgggagtttagttattattaggtgggagaagcggttgttgtgtttattttttattagttgttttatttttaacgtattattagtattttggaaggtagcgtcgattttagagggtatttttttttagttagtggttttgcggggtacgggattgtttatacgtcgggtgttggggtggaaacgttagtagtttttgtttcggaagaagtagattttgtttttttcgggattttagattaaggtagtatggatcgggaattttattaggtttagttcggtgaggggtgcggggtttaggattggttttttatcgtcgtatatttagtattgagtatttgtcggagagggaaggttgtaaggatttgtttagttattattgttatgtttcgttattgtggatttgtttgatttttattatagatttttttagttttagtttttttattagtaaaatatgtag

SEQ ID NO: 247 - DNA, 6749 bp, Artificial Sequence
  chemically treated genomic DNA (Homo sapiens)
tttgaaatttttgttgtttgagacggaattttattttgttattagggttggagtgtattggtaggttattagttcgttgtaatttttttttttcgggtttaagcgatttttttgttttagtttttcgagtatttgggattagaggtattcgttattatatttagttatttttttgtatttttagtagagacggggttttattatgttggttaggttagtttcgaatttttgattttgtgattcgttcgttttggttttttaaagtttagggattaaatgtgtgagttatttcgtttaggtaagtttttgaaaattttgagggtttgtttttttacgttgttaagtgtatatatggaaatgaagtatattgtcgtttttttttttttttttaaaagaagggttttggttttgatgtttaagatggagtgtaatggagtaattttagtttattgtagtggtaaagttttgggtataagtaattttttcgttttagtttttagagtagttggaattataggttcgcggtattatgcgtggttaatttttgtttagagacggcgttttattatgttggttaggttggattcgaatttttggttttaagtgattttttcgttttagttttttaaggtgttgggattataggcgtgagttattgcgttcggtttgaagttgtatttttttttgtttaattattcgttagaggaaatgttttttttatagtgttatattacggggagttttgtttgtgggtagggtagttacgtggtttaataattatttaatttaaatcgaacgagagcgtatatttttttagttatgtaggtggggagaatattagtggggcgaaggaatttgtaggcgtatttttttttttttgttcgttttgttataggagacgtttttaggttttcgacggggaaggttagaaaggttttattagaaggatttttttatatttgttagaattaaaatttaggtagcggtaaaaattcggcgtttaaaacgcgttcgaaagtttttcgatgtttgtaggacgttggagttagttcggttgtagtcgttattgtataaggtcgcgcgtttagtattggttgtttagaagtcggagggtagggaaggttttttgtattagaaaggttgtttatggtataaattttgatttcgtgttttgtgttaaggaaaggaaaggtaaataaaggaaagaaaaggcgaaggagatttatttgattgaggttacgcgttaacgggaaaggtttagttcgttttacgtttcgtagtcgtattttagatatggggtaggatgttttttttttatttttgggaggtgagggttgaaagaattcggggaggggaagggagaggaattcggtttttttagagtttgtttcgtttagggtaggagtggggtgtttttagtttgtttttggtgtaagaaggggcggagagaggtagttttgggaaagttgggtgggaaattttttgttttagttaattgttgaggagtatttatttgttttatttgttttttttgagtaaggttttcgttggtaagagggtaaaggagattgatgtatcgagaaaatgaaaagtttattgtttaatatttataaaacggtttagaggaaaaagaagtttaagtaagtatatttttaggcgatgttataagtttgtattatttgtatgtttgacgttattgaaagttttaattgttttttttttaggtgagaggcgtttttttaagattagatattgtcggtgttttattattttttattttttttttggaattgttaggggtttagcgttgtttttgtagttttttaggggatgttgttggtggcgcgtatgtcgtttaggtgggtggggatgtgttgaggtcgaaggagtgatagcgattcgtaggttttttttgtttgattagttttttgattgatatttttttttgaaaaaagggatttgcggtcgggcgcggtggtttacgtttgtaatttaatattttgggaggtcgaggcgggtggattatttgaagtcgggagttcgagattagtttgattaatatggagaaattttgtttttattgaaaatataaaattagtcgggtttggtggcgaatgtttgtaattttagttatttaggaggtttaggtaggagaatcgtttgaatttgggaggcggaggttgtggtgagtcgagatcgcgttattgtattttagtttgggtaataagaataaaatttcgttttaaaaaaaaaaaaaaaaaaaaagggatttgttgtttttgtagaatggagatatttgtagcgtattaaggaaaatgaagataatttgttgatgatagtattttgaggagtgttaatttggggtatgtatttttttagtattttgttttttaaggggaggggagatgtaaataaaggttttttaaaaataatagtttggtgagtttttaaggtttatgggaattatgtaagttattcgggttgtttaaaaatttgattgtgaagatgttgtggaatttttttttttttttttataatgtagtttttgattggtttttgggagaatttttttttttataaatggaaacgtgtttttagtgggaattaaagttatttttgtttacgtatattttttagtgaatttattttaaaagagatatttaaaaagaaatttaaggtttttgagggtattataattggtttttgattagttttaattttttagaattttttggttttattttattttttattaattgacgtttatatttttagttcgttatttttattttaagattatttgttgttagatatttttagatttttttttttatttatttttttgcggtttgggtagaggtgggtgggaattattaggaggtggggggaggaggagtataaatgggtataggtgatgttttatttttgttaggtagttgtttttatttgttaaggggagagttgggggagggtttaaggttttgtataattttacgttgtagaaaatggaaattgaaaagagttttttttttattttaggtggaattatttaaaaagtaattgagttatgaattttagttgtttttttttggatatttttttgtttttttttttttttatttaagggaggaatgtttatcgtttgatatagagaattaagttatagttttttttttgtttatattttttgaacggatagatttaataagtatttattgtgttaggaaattaaggtttatagaggttaaatggttttgttaaggtgaattaaggtggtaggatggaattaaatatgttaggtttttatgttgtaaattttttgttttttttatgtaaacggttaagtagtttagtataggatgtttgtttgggtaataagagcgaaattttatttaaaaaaaaaaaaaaaaaaaaaaaaaaaaatttgttgtttaatattatttatttaggtaaataggtaaatataaaggaaatttataaggagatatattttatatttattaggatggttagaaaaaaaattaaattgaaaataataagtgtgtgaggttaggcgcggtggtttacgtttgtaattttagtattttgggaggtcgagatgggcggattacgaggttaggagattaagattattttggttaatatagtgaaatttcgtttttattaaaaatataaaaaattagtcgggcgtggtggcgggcgtttgtagttttagttatttaggaggttgaggtaggagaatggcgtgaatttaggaggcggagtttgtagtgagtcgagattacgttattgtattttagtttgggcgatatagtaagatttggttttaaaaaaataaaattaaaataaataaataaaaaagtatgtgaagatgtagagaaattgaaattgttatatattgttagtgggaaagtaaaatgatgtagatagatatttaatattatcgaaagtaatttggtatttttatagaaagttaattatagtgttatttgatttagtaattttatttttgggtatttatttagaggaaaagaagttattatatagaaaagatatttgtatacgtatgtttgtagtagtattattcgtaattgtaaaaatattgaattagtttaaatgtttattaatgagtgacgaatatatgtgtatgtatgtgtgtgtgtatatatatatatatatatatatatatatatatatatatatattatggattattatttagttataaaaggaattaaataatggtatttatagtaatttgggtggaattggagattattattttaagtgaagtaatttaggaatggaaaattaaatattgtttatttttattaataagcgggagttaagttgtgaggatataaaggtataagaatgatataatgggttaggcgggatggtttatatttgtaattgtaattttagtattttcggaggtcgaggtagatggattatttaaggttaggagtttaagattagtttggttaatatagtgaaattcgttttttttttcgattaaaaatataaaaattagttgggtgtgatggtacgtatttgtaattttagttatttaggagggtgaggtaggagaatcgtttgagattaggaggtagaggttgtagtgagttaagatcgttttattgtattttagtttgggtgatagaaagagattttatttaaaaaatagatatatagtggattttggggatgtgggttgggggagggtgggaaggaggtaagggataaaagattatatattgggtacggtgtatattgtttcggtaatgggtgtattaaaattttagaaattattattaaagaatttatttatgtaattaaatattatttgtttttttaaaatttattgaaataataaaaaaagttaaatagaatgggaggtttcggcggttcgtgttcgcgtacgtagggtggaggtagggagcgtacgacgtgcgcgtattttttgttttggtttatcgttgtcgttttttttttttgtagtttttggtgttgtttgtgtgttcgtttggtgcggatttggtattttttttgtgaaacggtagttgaggagatttcggcgtttgttatggtcgacgaaaaatttaaggaaggagttaagattgagaataacgattatattaatttgaaggtggcggggtaggatggttttgtggtgtagtttaagattaagaggtatatattatttagtaaattaatgaaagtttattgtgaacgatagggattgttagtgaggtagattagatttcgattcgacgggtaattaattaatgaaatagatatatttgtatagttggaaatggaggatgaagatataattgatgtgttttaatagtagacgggaggtgtttattgaaaagggaatttgtttttttattttagaattttgttttttaaagattaagattatatttttaattagaaaattgtaatttggttttattatattttgattattatcgtatagttttttttatttttttattttttttttttttatttttttattgtatataaagtaattggtatatgtatataagtatattgtattttttttaattaaatagttaatgatatgttttgattgatattaagtggagatgggatggggaaaaatattgattttgtgaaaatattttttttttttattagtggtatgtttatttagtttttatttttatattttagtaagttattttgtttttattgttttaataaaaataataataataataatataaaaatttttgtatattttttttaattggagaattttaatgatttttatttattattgtaaaattaaggataattttataattttttcgtatatagttgttatatgtagggtaatttgtttttaagtagggataaattattttaaaataaaaaagaattttagatatttttttttttaagttaagcgttttgtttaaataaattgtttgtttaaaatgaaaaaaaaaaagttaaatataggtttattatgtgatttagtaattttatttttaagtatatattcgagagttaaaaatagatatttaaataaaagttatgtatgaatgtttgtggtagtattatttataaaatttaaaaggagaaataatttaaatgtttatgaattggtgaatgtttaaataaatgtgttatatgtatattatggattattttagttataatatggaatgaagtatagatatataatataatgcggatttaattttaaaaatattataataaagaattagatataaaagaatgtagattgtatgattttatttatatgaaatggttagaataggtaaatttaaatagatataaagtagattagtggatgttaggggttggggaagggggaataaggaatgattattaatagagatggagtttttggttgggtgttatggtttatgtttgtaattttagtattttgggaggttaaggtaagaggattatttgaggttaggagttcgagattagtttgattaataggaagaaaatttatttttattaaaaatataaaattagttgggtatggtggtgtatatttgtaattttagttattttggaggttgaggtaggaaaattgtttgaatttgggaggcggaggttgcggtgatttaagattgtattattgtattttagtttaggaaataagagtaaaattttggaaagaaggggaggggaggggagtttttattttagaaaaatgttttaaaattggttgtgtt

SEQ ID NO: 248 - DNA, 6749 bp, Artificial Sequence
  chemically treated genomic DNA (Homo sapiens)
agtataattaattttagaatatttttttaaaatgaaagttttttttttttttttttttttttagagttttgtttttgttttttaggttagagtataatggtgtaattttggattatcgtaattttcgttttttaggtttaagtaatttttttgttttagtttttaaagtagttaggattataggtgtgtattattatgtttagttaattttgtatttttagtagagatgggttttttttttgttggttaggttggtttcgaatttttgattttaggtgatttttttgttttggttttttaaagtgttgggattataggtatgagttatggtatttagttaaaagttttatttttattagtagttattttttatttttttttttttagtttttggtatttattaatttattttgtgtttgtttagatttgtttattttggttattttatataaatgagattatgtaatttgtatttttttgtgtttggttttttattataatatttttagggttaaattcgtattgtattatgtatttgtgttttattttatgttatggttaaaataatttatggtatgtatatagtatatttgtttaaatatttattagtttatgggtatttgggttgtttttttttttgggttttatgaataatgttgttataaatatttatgtataatttttgtttgaatatttgtttttagttttcgggtatatatttaggagtggaattgttggattatatggtaaatttatatttaatttttttttttttattttaaataagtagtttatttaaataagacgtttgatttgaagggaaaagtatttaggatttttttttgttttagagtaatttatttttatttaaagatagattgttttatatgtagtagttatgtacgaaaaagttataaaattgtttttggttttataatgataaatgaaaattattaaaattttttaattgaaaaaggtatgtaaggatttttatgttgttgttgttgttgtttttgttaaaatagtgagagtaaaataatttattggaatataaagataagagttgaatgagtatgttattaatggagaaagggggtatttttatagaattagtatttttttttattttatttttatttgatgttaattaaaatatattattggttgtttagttaaaaaaaatgtaatatgtttgtgtatatatattagttattttatgtataataaaggaatagggaagggggaaatgaaagaatagagaaaattatacggtagtagttaggatgtggtggaattaaattgtagttttttaattgagaatgtaattttggtttttaaagaatagagttttggagtaaagaagtaggttttttttttagtagatatttttcgtttgttgttggaatatattaattgtatttttattttttatttttaattgtgtaggtgtgtttgttttattgattggttgttcgtcgaatcggaatttgatttgttttattgataatttttgtcgtttataataggtttttattagtttattaagtggtgtatgttttttaattttaaattgtattatagaattattttgtttcgttatttttaaattaatatgatcgttgtttttagttttgattttttttttgggtttttcgtcggttatggtaagcgtcggaatttttttagttgtcgttttataaaagaggtattaggttcgtattaaacgagtatataagtagtattaggagttgtagaagaaggaggcggtagcgatggattagggtagagggtgcgcgtacgtcgtgcgttttttgtttttattttgcgtgcgcgagtacgagtcgtcggagttttttattttgtttaattttttttattattttaataggttttggggaaataagtggtgtttgattatatggataagttttttagtggtgatttttgagattttggtgtatttattatcggagtagtgtatatcgtatttaatgtgtagttttttattttttgttttttttttatttttttttaatttatatttttaaagtttattgtgtatttattttttagatggagtttttttttgttatttaggttggagtgtagtggagcgattttggtttattgtaatttttgttttttggttttaagcgatttttttgttttatttttttgagtagttgggattataggtgcgtgttattatatttagttaatttttatatttttagtcgggggggggggcgggttttattatgttggttaggttggttttgaatttttgattttaagtaatttatttgtttcggttttcgaaagtgttgggattataattataggtgtgagttatttcgtttgatttattgtattatttttatgtttttgtgtttttatagtttagttttcgtttgttagtgagaataaataatgtttggttttttatttttgagttattttatttagaataatggtttttaattttatttaggttgttgtgaatgttattatttaattttttttatgattaagtagtagtttatggtatgtatatatatgtgtgtgtgtatatatatatatatatatatatatatatatatatatatatatattcgttatttattgatgggtatttgggttggtttaatatttttgtaattgcgaatggtgttgttataaatatgcgtgtgtaagtgttttttttgtataatgatttttttttttttggatagatatttaggagtgggattgttggattaaatggtattatggttaattttttgtggaagtgttaaattgttttcgataatattaaatatttatttatattattttatttttttattagtagtgtatgatagttttaatttttttatatttttatatatttttttgtttgtttgttttgattttgtttttttgagattaagttttgttgtgtcgtttaggttggagtgtagtggcgtgatttcggtttattgtaagtttcgttttttgggtttacgttatttttttgttttagttttttgagtagttgggattataggcgttcgttattacgttcggttaattttttgtatttttagtagagacggggttttattgtgttagttaggatggttttgattttttgatttcgtgattcgtttatttcggttttttaaagtgttgggattataggcgtgagttatcgcgtttggttttatatatttgttatttttaatttggttttttttttagttattttaataagtgtgaggtgtatttttttgtgagttttttttgtatttgtttatttgtttaaatgaatgatattgagtagtaggtttttttttttttttttttttttttttttagatggagtttcgtttttgttgtttaggtaggtattttgtattgagttgtttggtcgtttgtatggagaaagtaaaggatttgtagtatgagagtttggtatgtttggttttattttgttattttaatttattttggtaaaattatttagtttttgtagattttggttttttggtataatgagtgtttattgaatttgttcgtttagggaatgtagatagaaaaaaggttatgatttagttttttgtgttaggcgatggatattttttttttaaataaaggaggagaaagatagggaagtatttagagaggggtagttgagatttatagtttagttattttttgggtaattttatttggggtgaggggaaagttttttttagtttttattttttataacgtggagttgtgtagagttttaaatttttttttaattttttttttagtaggtgaaggtagttgtttgataagaataaagtattatttgtgtttatttatgttttttttttttttattttttggtaatttttatttatttttgtttaaatcgtaagggaatgagtaagagaaaaggtttgggagtatttggtagtaggtggttttggggtgggggtggcggattgagagtgtgaacgttagttggtgaggagtgaaatggagttaggaaattttgagaagttggagttggttaaagattagttgtagtgtttttagaggttttagatttttttttaagtgttttttttaaggtgagtttattggagagtgtacgtgggtaggaatgattttggtttttattgaaaatacgtttttatttgtgaaaaaaaaaatttttttaaaaattaattaaggattatattgtgaagagaaaaaaaaaaattttataatatttttatagttaagtttttaagtaattcgaatagtttgtatgatttttatgagttttgggaatttattaggttattatttttaaaggatttttatttgtattttttttttttttagggaataaggtgttgggaggatgtatgttttaagttaatattttttagagtattgttattaatagattatttttattttttttaatacgttataggtgtttttattttgtaagagtagtaagtttttttttttttttttttttttttgagacggagttttgtttttgttgtttaagttggagtgtaatggcgcgatttcgatttattataattttcgttttttaggtttaagcgatttttttgtttaggttttttgagtagttgggattataggtattcgttattaagttcggttaattttgtatttttaatagagatagggtttttttatgttggttaggttggtttcgaattttcgattttaggtgatttattcgtttcggttttttaaagtgttggattataggcgtgagttatcgcgttcggtcgtaagtttttttttttaaaagaaaatattaattagaggattggttaggtaggggaaatttgcgagtcgttgttattttttcggttttagtatatttttatttatttaggcggtatacgcgttattagtagtattttttggaaggttgtagaagtagcgttgggtttttagtagttttagaaaaaaagtgggaggtgatagggtatcggtagtgtttggttttgggaagacgttttttatttggggagggaataattgaagtttttaataacgttaggtatatagatgatataaatttataatatcgtttgaaagtgtatttgtttaagttttttttttttttaaatcgttttgtgaatgttaaatagtaaattttttattttttcgatatattagttttttttgtttttttgttagcgaagattttatttaaaggaaataaatgggataaataggtattttttagtaattagttaagataagaggttttttatttaatttttttaaagttgttttttttcgtttttttttgtattaggagtaggttgaggatattttatttttattttgggcggagtaggttttaggaagatcggattttttttttttttttttttcggatttttttagtttttattttttaggaatggggagggggtattttattttatatttgaggtgcgattgcgggacgtagagcggattgggtttttttcgttggcgcgtggttttaattaggtaggtttttttcgtttttttttttttttatttgttttttttttttttgatataggatacgagattagggtttgtgttatgggtagtttttttggtgtagaggattttttttgtttttcggtttttgggtagttagtgttgggcgcgcgattttgtgtaatggcggttgtagtcgagttggttttagcgttttgtaggtatcggagggttttcgggcgcgttttggacgtcgagtttttgtcgttgtttaagttttagttttggtaagtgtagggaggtttttttagtagagtttttttggtttttttcgtcgggagtttggaagcgttttttgtggtagggcgggtagagggagaagggtgcgtttgtagattttttcgttttattggtgttttttttatttatatggttgaggaggtgtgcgttttcgttcggtttagattgagtggttgttaaattacgtggttgttttgtttataggtagggtttttcgtaatgtaatattgtagaagaaatattttttttaacgaataattgaataaaaagaaatatagttttaggtcgggcgtagtggtttacgtttgtaattttagtattttggaagattaaggcgggagaattatttgagattaggagttcgagtttagtttggttaatatggtgaaacgtcgtttttaaataaaaattagttacgtatgatgtcgcgggtttgtagttttagttattttggaggttggggcgggaggattgtttgtgtttaggattttgttattgtagtgaattgggattgttttattgtattttattttgggtattagagttagagttttttttttaaaaaaagaaagaaaaacggtaatatattttatttttatatatgtatttaataacgtggaaagataagtttttaaaatttttagggatttgtttgggcgaggtggtttatatatttaatttttggattttgggaggttaaggcgggcgaattatagggttaggagttcgagattagtttggttaatatggtgaaatttcgtttttattaaaaatataaaaaaatagttgggtgtagtggcgggtgtttttaattttagatattcgggaaattgaggtagaaaaatcgtttgaattcgggagggggaggttgtagcgagttgataatttgttaatgtattttagttttggtgatagagtgagatttcgttttaaataataaaaattttagg

SEQ ID NO: 249 - DNA, 5309 bp, Artificial Sequence
  chemically treated genomic DNA (Homo sapiens)
ttttttaagtagttgggattataggtgcgtgttattacgtttagttaatttttgtatttttagtaaagatagagttttattatattggttaggttggtttttaatttttgattttatgatttatttgttttagttttttaaagttttgggattataggcgtgagttattgggttttgttaatttttgtatttttagtagagatggggttttattatgttggttaggttgatttcgatttttcgattttagatgattcgtttatttcggttttttaaagtgttgggattataggcgtgagttatggtgttgggtatatacgtagatttttgattgtgaagggattagtatttttgatattgtattatttaggggttaattgtatatttatattttttttattatttattagttttatgtgtgattttggttaagttattgtttttgtttatagtaggaataaagtatttgatttagtagttagtaatatggaggatttgtttaatgatgtcgattttttttgttttttatggacgtaattaatttatgattatttgcgatatatgtttattttatttttttgtttaatagaatatttttgttttgaattaagtttttttttttttttttagtagttaatgtgttttttgaggatgtaatttaatcgtaattttgttcgaagtggggaaaaaaattaagtttatattgaaattttaatatagttttataattatttttttttttagtttagattattttattttggtaatttaagtattatttttggttttattaataatattatttttgtaaaggataggttataattaatttttagatttttgtttggataagatttgtgattttaaattttaaaaaagtagaaaaaaattttataaattataggtaggaagaaagaaaaataagagaatgtagttaaggtaattttattaatgattagtttatgttaaagtatgtggaaataatgttttataggaggatatttagtaataacgatttttttaaatttatttttttttgtaggtatagaattgtaagttttttttgattttaaatgtgtatagttgattgcgtgtgtgtgtgtgtgtgtgtgtgtgtgtgtgtgtgtgtgtgtgtgttagggttttttttttttgtttagattggagtaaggtgatataattatagtttattgtagttatgaatttttgggtttaagtgatttttttgtttttagttttttggcgtagttaggattgtaggtatatgttattatatttagttattgttttttggtagagatagagttttgttatgttgtttaagttggttttaaatttttggttttaagtaatttttttattttagttttttaaagagttgggattataagtatgaattattgtatttggttttatatttgattatattttttagttttttttgtggttaggttgtgttaggtagttttgtatttaaattttgattagtgagtagtaagtggaatttgttggatgaatttattataaaggatttttataatggagatagtggggttaggtatggtggtttatgtttgtaattttagtattttgggaggttgaggtaggtagattattttagtttaggagttcgagattagtttggttaatatggtgaaattttatttttattaaaaatataaaaattagttaggtatggtggtacgtatttgtaattttagttatttaggaggttaaggtaggagaattatttgaatttaggaggtggaggttgtagtgagtcgagatcgtattattgtattttagtttagtaataaagtaagatttttgattcggaaagaaaaaataaaaaaaggttgggggagatagtgggagtttagatttttgtttttttttttgtttagaagggagatgaggttgttggtgttgtggaagttattatggattatgaggtagttttgaagatagaaagtttgtatttttgatgatttaatggaattttattttaatttaggattgattgttttagatttttgttatatgagggaatatatttttttgtgtttaagaaattgtggttggatttgttattggaatatgaatgtagttaataattggtttaaaatgattttattttaatttatattggttgttttttttaaataatatataggtttgtattgtggtgggttttaggatggttgtgatgtagttttaggaagtttatttatgggaaatttatatttatggtgttttgatgttgtagaggatattttgagttggttggagtaatttgggatataggttaatcgattgtaatttaatttttgaggttatttagtattttttatagtggttatttaaaaaaaaggtagttaggtgtggtggtttaagtttatatagattttagaattttggaaggttgaggtgggaggattatttgagttaaggagtttgaggttagtttgggtaatatgaagaaattttgtttttataaaaaataaaaaaaattagttaggtatggtggtatgtatttgtagttttagttttttgggaggttgaggtggaagaatgatatgagtttagtaagtcgttgtaattagtcgtgattacgtcgttgtattttagtttgggcgataaaaagaaaaagaaaacggagtttgtttattgggtgtggtagataaggtaaatttttttttattttttatattttataattttggatgtgtttatagttatggtagtgttttgtaatgatgtagttgatgataggtgtgatgttggagatttttttatttgattgttgttattagttttattagtttttaacgtttggtgtttgttttaaagggtatgttttaggagtcgttttaaatttttaaagtattattttttatataaataagaagtgtaagtaagtagtttgagtttagttttttaataggaatattttattattattagattaagtttttttattataatgattgatttgtttttgaattttgtggatttattttttaaaatgttttttttttttagtttttatagttagtgttttaaaagtgatttgtagtattttttgttgagacgaatgtattagttttttaattagtttgtattttttttatttttttaagttagtgttagattattttgtttgaaaaattatttttagtgtgttttattttagtagaaatgttttttagtttttaattaataattatattaaatttttgtttttgtttgcgttttaagggtatttataggtcgggcgtcgtggtttttatttgtaattttagtattttggaaggtcgaggcgggtagattatttgaggttaggcgttcgagattattttgattaatatagtgaaatttcgtttttattaaaaatataaaaaaaaaaaaaatagtggggcgtggaggtgtacgtttgtaattttagttattcgggaggttgaggtaggagaatcgtttgaattcgggaggtagaggttttagtgagtcgatatcgcgatatagtattttagtttgagcgatagagcgaggttgtgttttaaaaataaataaataataaattaaaaaaataagagtatttataatttggttttagtttgaatttttttttttattttaatacgtagttttagttatatttttttgacgtttgtaaataagtttagttttttttgttgtgaagttaagtttaggtggttttttttcgtttgattgtttttttattttatttatcggaagtttagttatttttcggagggttgtacgggggttgtaagaagtaacggaaacggtttagtatttgttattttttattatattttttttaataaaggggtaattttcgttaatggtagtgtagattttttaatttttatatatggaagatttatattatttaggattgttgtttaattgttgagagagtatttgatatttaatagtttattaggttataagatagcgtaggaaagaattttttgttgtttttttatgttattttgaatagttggtttatagagttattgtaaatatataaaatatgattgttagggtttagtagtgaggaaggtgggaattagttttgatttagttaattgtgtttaggagaagttgtttaattttaaaggattttattattattagaattaataatattaattttaggggtaaaaataaagataaatgtgtgtaaattttgtttgtagtttcgggtacgtcgtgggtgtttaagaattgtttttaggtagtcggtggggataaagtttgtgtgttttttgttttggaataggttttaaggtcggtttatttgtaaagtaagggtacggcgtaagagtattgaatacgggttggaagggcgttggttttatttttagtttataggtcggttgggcggcgttgattagtagttaggtttcgttttttttaggaacggttacgggggttttgggagggtatgaatgtttttttgtagtgaggtttttggatttcgcggtttttcggtagcgtaattaaaatttaggggtaggcgtcgtagtcgtttagtgtagttagattttcgtcggtatttttaggggcggagtcggaggtagggttttcgggtcgtattaattttacgggggtaggggtcgttttttttcggtcgcgcgttatttaagtacggtagataggtagcgaggttgtcgaggtcgaggttagtttgtagttttttttttttcgtgttttgggcgcggggtgtacggtaagcgcgggcgggcgggataggtacgtagggtattttcggggttgggcgcggcgggcgcggggcggggttcgcggggggggggggcggggcggcggtgtttttgcggcgtagttggggtcgcggttttgtttttcgcgtttttttaaggttcgcgggcggcgtaggagcggtattcgtggttgtggtggtttcggtagcggttttagtagatcggcggtattagcggtagtattagtattagtagtatgttgagtcgggtagtgtgcgggtgagaagaaaggggattcggttacggttttaagggcgaaggggttcgcggcgggtagggttttcgcggtaatggcgatagtggtcgtatcgggtttggcgggatcggggtatttgtaggcggttttttcgggagtgttcggcgcggcggttggagcggggattcgtagggaggggacgcggggattcgggggacgtcgcgcgttgtcgtttttcggtagtttagtttgcgtagacggtttcgcggcgttgattgatcgggttgtgttttttcgtttttagt

SEQ ID NO: 250 - DNA, 5309 bp, Artificial Sequence
  chemically treated genomic DNA (Homo sapiens)
gttgaagacgagaaagtatagttcggttagttagcgtcgcgggatcgtttacgtaggttgggttgtcgaggaacggtagcgcgcggcgtttttcgagttttcgcgttttttttttgcggattttcgttttagtcgtcgcgtcgggtattttcgggagaatcgtttgtaggtgtttcggtttcgttaggttcggtgcggttattgtcgttattgtcgcggaggttttgttcgtcgcgagttttttcgtttttggggtcgtgatcgggttttttttttttttattcgtatattgttcggtttaatatgttgttagtgttggtgttatcgttgatgtcgtcgatttgttgaagtcgttgtcgaagttattatagttacgagtgtcgtttttgcgtcgttcgcgggttttaagaaagcgcggggagtagggtcgcgattttagttgcgtcgtaagggtatcgtcgtttcgtttttttttttcgcgggtttcgtttcgcgttcgtcgcgtttaatttcgggggtgttttgcgtgtttgtttcgttcgttcgcgtttgtcgtatatttcgcgtttagggtacgggagaaaggaggttgtaggttagtttcggtttcggtaatttcgttgtttgtttgtcgtatttgagtggcgcgcggtcgaagggaggcggtttttgttttcgtggagttggtacggttcgaaggttttgttttcggtttcgtttttgagggtgtcggcggggatttggttgtattaggcggttgcggcgtttgtttttgagttttggttgcgttgtcggggggtcgcggggtttagaggttttattgtaaaaagatatttatatttttttagggttttcgtggtcgtttttagggaagacggggtttagttgttggttagcgtcgtttagtcggtttatgagttgagggtagagttagcgtttttttaattcgtatttagtatttttgcgtcgtatttttgttttgtaagtaagtcgattttgggatttattttaggataggaggtatatagattttgtttttatcggttgtttaagaatagtttttggatatttacgacgtgttcgagattgtaggtaggatttgtatatatttatttttatttttatttttagggttggtattattgattttagtaatagtgaaattttttgaggttaagtagttttttttgggtatagttaattgagttaggattagtttttattttttttattattaagttttggtagttatgttttgtgtgtttatagtaattttgtgaattaattgtttaggataatataaaaggataatagaggatttttttttgcgttgttttgtagtttagtaagttgttaagtattaagtgtttttttaatagttaaataataattttgaatggtgtgaattttttatgtgtagaggttaggaaatttatattgttattggcgggagttgtttttttattgaaaagaatatgatggaaggtagtaggtgttgaatcgttttcgttgttttttgtaattttcgtatagtttttcgaaggatgattaggttttcggtaagtggaatgggaaaatagttaggcgaagaggaattatttgaatttggttttataataggaagggttgggtttgtttatagacgttagaagaatgtaattagggttacgtgttggggtgaaaaaggaaatttaggttgggattaggttatagatatttttatttttttaatttattatttatttatttttgagatatagtttcgttttgtcgtttaggttggagtattgtgtcgcgatgtcggtttattggaatttttgtttttcgggtttaagcgatttttttgttttagtttttcgagtagttggaattataggcgtgtatttttacgttttattattttttttttttttgtatttttggtagagacggggttttattatgttggttaggatggtttcgaacgtttgattttaagtgatttgttcgtttcggttttttaaagtgttgggattataggtaggagttacggcgttcggtttatagatatttttaaaacgtagataagagtaggggtttgatgtgattgttaattggaagttgagaaatatttttgttgaggtgagatatattgaaagtggttttttaggtaaggtggtttggtattgatttggggggatgaagggagtgtaggttagttaggaagttggtatattcgttttagtaggaggtattgtaggttatttttagggtattagttatgagaattggaagaaaagggtattttgaaggatgaatttataggatttagagatagattagttattgtaatggaaagatttgatttagtgataatgaaatatttttattgggaggttgagtttaggttatttatttgtattttttgtttgtatagagagtgatattttgagagtttaaagcgatttttaggatatgttttttagaataagtattaaacgttgggggttggtaggattgatagtagtagttaggtagaagaatttttaatattatatttgttattagttatattattataaaatattattatgattgtgagtatatttaaggttgtgggatatgggaggtaaagaaaagtttattttgtttattatatttagtgaataggtttcgttttttttttttttttgtcgtttaggttggagtgtagcggcgtgattacggttgattgtagcgatttgttgggtttatgttatttttttattttagttttttaagaagttggaattataggtgtatattattatgtttggttaattttttttattttttgtagaaatagagtttttttatgttgtttaggttggttttaaattttttggtttaagtgatttttttattttagttttttaaagttttgggatttatataggtttgagttattatatttggttgttttttttttaggtggttattgtagagggtattgaatggttttagaagttagattatagtcgattgatttgtgttttaagttattttagttagtttaggatgttttttgtaatattaggatattatgaatatggattttttatagataaattttttaaggttatattatagttattttgagatttattatagtatagatttatatattgtttggaagaagtaattaatgtgggttgagatgaagttattttgagttagttattaattgtatttatattttagtaatagatttaattatagttttttaaatatagaagagtgtatttttttatgtaataaagatttggggtagttagttttgggttgggatgaaattttattgagttattaaggatgtaggttttttgtttttaaagttgttttatggtttataatagtttttatagtattagtaattttattttttttttaggtaaggggaaggataaaagtttgggtttttattgttttttttaatttttttttatttttttttttcgaattaagagttttgttttgttgttgggttggagtgtagtggtgcgatttcggtttattgtaatttttattttttgagtttaagtgatttttttgttttagttttttgagtagttgggattataggtgcgtgttattatgtttggttaatttttgtatttttagtggagatggggttttattatgttggttaggttggtttcgaatttttagattgaagtgatttgtttgttttagttttttaaagtgttgggattataggtatgagttattatgtttggttttattatttttattgtaaggattttttgtggtagatttatttaataaattttatttgttgtttattggttaaaatttaggtataaggttatttagtatagtttagttataaaggaagttgagaaatgtagttaggtatggggttaggtgtagtggtttatgtttgtaattttagttttttgagaggttgaggtgggaagattgtttgaggttaggagtttgagattagtttaggtaatatagtaagattttgtttttattaaaaaatagtagttgggtgtggtagtatgtgtttgtagttttagttacgttaggaggttgaaggtaggaggattatttgagtttaagagtttatggttgtaatgagttatgattatgttattttattttagtttgggtaagagaaggagattttgatatatatatatatatatatatatatatatatatatatatatatacgtagttagttatatatatttgaagttagaaaaaatttgtaattttgtatttataggagaaaatgagtttaaaaaaatcgttgttgttaaatatttttttataaggtattatttttatatgttttgatataaattgattattaatggaattattttagttatatttttttgtttttttttttttttgtttgtggtttgtggggtttttttttgtttttttaaaatttggggttataaattttatttaggtaggaatttgagaattggttgtaatttgttttttgtaagagtggtattgttaataggattaaaagtagtatttaaattgttaaaatgaagtgatttaggttaaaagagaaaatgattatagagttatattaaggttttaatgtgagtttaatttttttttttatttcgggtaaaattacgattagattgtatttttaaagaatatattaattattggaaaggaaaggaggagtttggtttagaataaaagtgttttgttaaataaagggataaagtgggtatgtgtcgtaggtaattatgagttgattacgtttataaagggtaaagggagtcggtattattgagtagattttttatgttgttagttattaagttaaatgttttatttttgttgtaagtaaagatagtgatttgattaaggttatatatagagttagtaggtagtaagggggatatgaatgtatagttgatttttgaatgatgtagtgttaggggtgttggtttttttatagttagaaatttgcgtatatgtttagtattatggtttacgtttgtaattttaatattttgggaggtcgaggtgggcggattatttgaggtcgggaaatcgagattagtttggttaatatggtgaaattttatttttattaaaaatataaaaattggtagggtttagtggtttacgtttataattttaggattttgggaggttgaggtaggtggattatgaggttaggaattggagattagtttggttaatatggtgaaattttgtttttattaaaaatataaaaattagttaggcgtggtggtacgtatttgtagttttagttatttgggagg

SEQ ID NO: 251 - DNA, 7814 bp, Artificial Sequence
  chemically treated genomic DNA (Homo sapiens)
gaggttcgtgttgtttttttattttttgttttgttttttttttttttttgtttttttttttgattttgttattttgttttttttttttttttttttttttttttttttttttttttttttgttttttgttttagttttttagttttttttcgttttttttttagtttttttttttttttagaagatttagttttttttagagttttagaagttagggtttatgttttagttttttatttatatatgttgtgtaattttgggttagttattggttttttgggttttagtttaatagatggttgttttggtgatgtgagattatagggtggaagtatttagaatggtgttaggtatttaaaaatttttttttttttttttttaaggaattattaatcgtgaggttatggattattaaatcgtttttgtttttggaatttgggttttattatttttaagaatttgaattattacgggtttttggggatgtaaggggatgaggtttttgatgtattttgggagggggaggagtggaaagaggagttgggaggatattttagtattgtttagagggtagaggatattttgtttatttttagaggttattgattttggattttttttatggagttttttatttaggttttttgagtttggttatatttgaggtaatgggatatttttttttttttggagttttttgaattttaggtttcgggaatatatagtttattgtgttttttggttgtatttacggaggatagtttttatattttttgtttataattagtaaagattttatagttatttttgtatacgatttaggttttttggtttggtatttaaggttttttgtttttttgttttgttttgtttttagttgtaaagatggtggttttttgttttttttttcgttttttttgtttaagttgatttttagttagatatgttttttttttgtacgtttttttaagttattttatttgggattttgatttaattaatggttttttaatgtatttttgagattaagtgtatttggtatttttttttttgttttattatttgtttatatgattttttgtaggtttgtaagttgttggaggtttcgagtatgttttatttatgtttattttttttattaggtttagattatggaagatatttaataaaaagtaagtgattaaatgataatttttacggaaaagagtatggagattttttaaagaattaaaaatagaattattttttggttagatgtagtggtttatatttataattttaatatttgggaaggttgaggtaggtggattgtttgagtttaggagtttaagattagtttgggtaatatggtgaaattttatttttataaaaaatatagaaaattagatgagattataggtggtatatatttatagtattagttattttagaggttgaggcgggaggatcgtttgagtttaggaggtttaggttatagtgggttaagattacgttattgtattttagttttagtgataaagtggtattttgttttaaaagaaaaagaattggttaagtatggtggtttacgtttgtaattttagtattttgggaggtcgaggtaggtggattatatgagattaggagtttgagattagtttggttaataatgatgaaattttatttttattaaaaatataataattagttgggcgtggtggcgggcgtttgtaattttagttatttaggaggttgaggtaggagaattatttgaattcgggaggtaaagtgagttaagattgtgttattgtattttagtttgggtaataagagcgaaatttagttttaaaagaaaaagaaaaagagagaaaagaagaaaggaaaagaaatattatttgatttagtaattttattgagtatttaattaaaggaaaataaattattatattaaaaagatattgtatttttatgtttattatagtattatttataatagtaaagatatagaattaatttaagtgtttattaacggatgagtgaataaataaaatgttatatttttatatatatatatatatataatgaaatattatttagttataaaaaagaatgaaattatgtttttgtagtaatatggatggaattggaggttattattataagcgaaataatgtagaaatagaaagttaaatattgtttgtttttatgtataagtaggagttaaataatgtgtatatatggatatagaatgtggaatgatagatattggagatttgtaagggtgggagagtggggaggtatggtgagggatgagaaattatttaaagggtataatgtatattattttggtgatggataaattgaaagtttagatttttttattatgtaatatatttatggaataaaattgtatttgtattttttatatttatataaaaaagtgattaaatgaatgaatgaataaataagtatataaataaattaaagtaagataataatatatacgagtgaatgaatgaatatattaagtagggtttagattttgtggagtggataattttatattttattgtatttagttagttggggtttggtttttttgatggggaagtgggaataaggatggaattgatgttaagttaatttgtttttttttttttttttgggagaggttttggttaggtttttagggagttttgaggatttgtggtttggagtttttggagagttttaagtgtagatataaagttagtgaaggtggaagttaagtagatttaatggtgagtttagagttgtgaaattttggtgtttgttgttaatgaaaaaatatttgtggtttaggaatttattggtaagaaggtaggtttgttttagtggagtgggaatttaaagtaaggggttagattatataggggaggatattgaatgtttaaaatttttttttagtagaggggatttattagagattattgggttagaaaaataataataataataataataataaaataaaaatgtttttatttatttttttattttttagaaaagattaggaattttttgaaggtaggggttttgtataatatttttttgtttttttagcgtttagtttagagtttggaatttaatattgggaagatgtatggatggatagataagtggatagatagatagatgaatgagtggatggatggatagatggatgggtagatgagtggattggtggatgggtggattagtgaatcggtagatgtgtggatgagtggatggatggatggatgaatggatggatggatagataagtggatgagtggattggtggatggatgaatggatggatggatagataagtggatgggtggatttgtggatggttggatgaatgagtggatggatggataggtggatgagtggatggatgaatgggtagatagttggattggtggataggtggatgagtaaatgggtagatgggtagatgggtggataggtggatgaatggatggatggatgaatggatggttggatggatgagtgatattaaaaagatattgtatttgtatgtttattatagtattatttataatagtaaagatatagaattaatataagtgtttattaacgggtgagtgaataaataatatgttatattgtatttatatatatatataatgaaatattatttagttataaaaaagaatgaaattatgtttttgtagtaatatggatggaattggaggatattattatatgcgaaataacgtagaaatagaaagttaaatattgtttgtttttatggggtttttggaaatcgaagttgataggtgaatggatggataggtggatgaatagatgggtggaatggtaggtgggtggattggtagatgggtggatgagtggattggtggatggatggatgaatgaatgaaggggtaggtggatgatggatgggttgatggatagatgagtggatgggtagatgggtggatgagtggatgggtggatggatggataggtggatgaatggatgagtagatttatagatggataaatagatggaattgtggattgatggattgatagtaggtggacgggttgattaatggatatatagatggttagatagataagtagataaatagatgggtgggtggatgaattgattgatagatgaatgaataaataaacggatagttggataaatggatatataagtgaatgtatggtgggtttgatgaatggatagttggatggataaatagatagataaatagatgtatgggaaaatagatgaatggtggataggtaagaaaggtttgtaaattaggagggttagattgatatttaggtattgttaagggatggggaaattgagaaatttgggttggaaatagagttttagggatttgaatgtggtaattaagaagttgggaggggagggtataagaatttaggatttttttttggtggtagggaagtttatgtgaatagatttagagggaaggaagaaagtagtattatgttgaagattttatatttgagtttagttttagtttagggatagtttaggtagtgggggtgtagggttataggaagagttaggtttgatagtttgttagattagagtttttatttaggaaggttgattttagaaagtggaggttttaagaggttattttttttagttttgattttaatgaggtgattgttggttatatagggattttaaaagaagtaggtatttgttgggttagagtaaaagttttttagtggtgtggtagagttatacgtttttttttttattttttttttttagtttagtttttaaagttattttttttagttttagttttttttgggtagggggtttggattttatggttttttaggttagttttttgagtattatttgttttagtcggttagagattttttgtatgtagcgtaagagatttatgtaaacgggttggggcggtgatgttattttaaggggattattttttagcggtaggtttttcgataaaattaggaatttgtgttggttttgtaatgttaagggagggggtttatttagggtttttgtagtttagggggtaggtttgagttttgtattcgttttacgatcgtttagtttttgacgggtattttattttgaggggttttgtattggtttttatcgaggtaggggatttgatcgattcggagttcggttggatgttataggcgtgtaaaatggaagggttttttttcgttttttttgtgagtatcgggatttttttattagtttaattcgtggttttcggacgtttgtttgtttgtttacgaattcgttagtttatttattgtttttttggtttgttattagtgggaagttagggttttttttttggaatttttggtttgagatttagcgagggggttattggttttttcggagtatgttttggcgggttgaggttaggtttacggtggggttgtgatcggtggggtttgaatagttatttatagatagggttcgggtggtaggcggaggtcggggtttttggggagggtgttgggttgaggatggtgaaggcggtggtagagaggtagaggagggagatggggggattggtttgggggaggtcggttttttggatgggaaggggttgaaggtaggaggtaatgggtagaagttttggtttatggttttggggtttttggaaattaaagttgatggaattttgggtttttaacgtttagtttggggtttggtatagaggatatgattgttgattaaagggttagggttatgggttataggggtatttataggagatagggattggtgttggaaaggagttaggagtggagttgagatagtgtagttagggttggtttagggttggagtttagggagaggcgcggtaggggatagggttgggataaggttaggattgagattggggttgggtgggatttggggtgagtatgtgataagtgagaatgggggttgaggttgggataaggatagggattgggttttgtggggtgaagaagttggagttttagggatttcgagaagagaagggtagatcgttattgttttttatttttagttatagttgtagttttaggtaggtgttagattagggtttttcggaaaggatttttttttttttttttattttatgattttttaggagtgaggaggtttgaggggagtcgggaagggtttggtaggttgtttatttgaatttatttttttggtttagaggtagttttttttttttattatgttttggtttagagttattttaggaggttgggaggtattttaggtttgatattatattaattcgattagagtcgggttgatattttgtagcgaggttgtattatttggaaatttagaggggtaggtttagtgttgggtttttggtttttttatttggttagttataggtaggattaggtaggattagttagtttgttgtggtatttatatcgatatttttttttatttgggaatacgaagtgggcggtttaggtagagggtgacggaggttgttttagaaagagttaattttgttttaagaaagttataggtttattgtttttgatttttgattttttaattttgaattttaggtggagttagatgggtggtagagttttttgggttatttttaggtatttttagttttttttgtaagttttagggttattttgagtgttttttggtagggtgggtttttaaggtagtttcggttttttaagtttacgttaagggttatagtgattgttatgtaattttgggttatacgttgcgggggcggggaggtttgatgattgttgggaaggtttttgggtgtgtacggttttgtgtttgtgttagtagggggaggaggttagggaggagggaggaaggtgggaggaaagaaggaggatagggaagagggggaagaaaaggaggatagaggggagtgaggagggggaggaggaagtaaaggagacggggagggggatgtagtgaggagggaaggaggaggatagggaggatttaggagggagagtgaggggattaaggttttttatgcgttcggtttttaagtttgtttgggtgatttttgtattaatcgttagtgtggagggttattgtggtgttatttttgtttaggttgtgtgagaggtataggttgtgagagtggggttgggtaggtaagtgtgtgttgtgcggttgagtgtgtaggtggaatgtgagtggttttgggggtgtgagtgtgtgtgttgatggttggaacgtggtgttatgtgagtgttaattaaggagattttgcgtgtgtgtatgagttgagtgtataatgtttttgtgaggtgggtgatttttgagtgggtatgaagatgtgtgtgtgagggatagtgtgtaggcgtttgtatgggggtgggtaggggttgtgagagtgagttttcgtgtgggattatgagtgtgagggtgatatagggatcgtgtggatatgtgtattagtgtgattaggagaggtgtgtgggatgaggatgggggtatataggcgtgagtgtgagtgtgagcgtgaggtggttatggggagtagtttagtagaggggattttggtttttttttgattttttatttttaaggtttttgttatttttttttaggttttttgggttttttgttttattttttgttttagttttaggtagagggagggttgtaggtttaacgtagttattgagttagggaaggtgatggggatttagcgtgcgggggtgttgtaggtttggttggggttttttattatggtgtaggttttgatatttttttttttagtagt

SEQ ID NO: 252 - DNA, 7814 bp, Artificial Sequence
  chemically treated genomic DNA (Homo sapiens)
gttgttgagagaggaggtgttagggtttgtattatggtgggagattttagttaggtttgtagtattttcgtacgttgggtttttattattttttttggtttagtggttgcgttggatttatagttttttttttgtttggaattgggatagagagtggggtaggggatttagaaggtttgaaaaggggtgatagggattttgggggtgagaggttagaagaggattagggttttttttgttgggttattttttatagttattttacgtttatatttatatttacgtttgtgtgtttttatttttattttatatattttttttggttatattgatgtatatgtttatacgatttttgtgttatttttatatttataattttatacgaggatttatttttatagtttttatttatttttatgtaggcgtttgtatattattttttatatatatatttttatatttatttagaggttatttattttatagagatattgtatatttagtttatgtatatacgtagagtttttttgattgatatttatatgatattacgttttagttattaatatatatatttatatttttagagttatttatattttatttgtatatttaatcgtatagtatatatttgtttgtttagttttatttttatagtttatgttttttatatagtttgggtaagagtggtattataatgattttttatattgacggttggtgtaggggttatttaggtagatttaggggtcgagcgtatggagggttttgatttttttatttttttttttgagttttttttatttttttttttttttttttattgtattttttttttcgttttttttgtttttttttttttttttttatttttttttgttttttttttttttttttttttttttgttttttttttttttttttattttttttttttttttttggttttttttttttattggtatagatatagggtcgtgtatatttaggagtttttttaatagttattaggttttttcgttttcgtagcgtgtggtttaggattgtataatagttattgtggtttttagcgtgggtttgggggatcggggttgttttgggagtttattttattaggagatatttagagtgattttggagtttgtagagagggttgggggtgtttagggatggtttaaggagttttgttatttatttagttttatttggagtttagaattgagaggttagggattagagatagtgggtttgtggtttttttgaggtagaattggttttttttgagataattttcgttattttttgtttgggtcgtttatttcgtgtttttaggtgggaaggggtgtcggtgtggatgttatagtaggttggttggttttgtttggttttgtttgtggttggttaagtgaggaggttaggagtttagtattgagtttgtttttttgggtttttaggtagtatagtttcgttgtaggatgttagttcggttttggtcgggttggtgtgatgttaggtttggggtgttttttagttttttggggtggttttgagttagggtatagtgggggaagggagttgtttttagattaggaaagtggatttaggtgggtagtttgttaagtttttttcggttttttttaagtttttttatttttgagaggttatggggtgggaaaagggagaagggtttttttcgagggattttggtttgatatttgtttaaggttgtaattgtaattgagagtgaggagtagtggcgatttgttttttttttttcggggtttttggggttttaatttttttattttataggatttagtttttgtttttgttttagttttagtttttatttttatttattatatgtttattttaggttttatttagttttaattttagttttggttttgttttagttttgttttttgtcgcgtttttttttgaattttagttttgggttagttttaattgtattgttttagttttatttttggtttttttttagtattagtttttgttttttgtgggtatttttgtggtttatggttttgattttttggttaataattatgttttttgtgttaggttttagattgggcgttggggatttagagttttattagttttggtttttaggagttttaaggttatgggttaagatttttgtttattgttttttgtttttaatttttttttatttaggggatcggttttttttaagttagtttttttattttttttttttatttttttattatcgtttttattatttttagtttagtattttttttaggagtttcggttttcgtttgttattcgagttttgtttataaataattgtttaggttttatcgattatagttttatcgtgggtttggttttagttcgttagggtatgtttcgaggaagttaatggttttttcgttgggttttaggttaggagttttagggaggaaattttgattttttattgatagtaagttaggagggtagtgggtgggttggcgggttcgtgggtaggtaggtaggcgttcgagggttacgggttgggttggtggaggagtttcggtatttataggggggacgaggggaaatttttttattttgtacgtttgtaatatttagtcgggtttcgagtcggttagattttttgtttcggtgggggttaatgtagagttttttaggatggggtgttcgttaggggttggacggtcgtggggcgggtgtagggtttaggtttgttttttgagttataggagttttgggtgagtttttttttttgatattgtagggttagtataagtttttgattttatcgaagggtttgtcgttgggagatagtttttttggggtgatattatcgttttaattcgtttgtataaattttttgcgttatatataggaagtttttggtcggttggggtaggtggtgtttaaagggttggtttgggaagttatggggtttaggttttttgtttagaggaagttgggattgagagggatgattttgggggttaagttggggagggaggatgggagggagaacgtgtagttttgttatattattgggaggtttttgttttaatttaataaatgtttgttttttttgagatttttatgtagttaatagttattttattggggttagagttggaaggggtggttttttggggtttttattttttggagttagtttttttgggtgagggttttgatttagtaggttattaggtttggttttttttgtggttttgtatttttattgtttaggttatttttaggttgaggttgggtttaggtgtagggtttttagtatagtgttgtttttttttttttttttgaatttgtttatatgggtttttttattattagaagagggttttgggtttttatattttttttttttagttttttgattattatatttaaatttttagggttttgtttttagtttaggttttttagtttttttattttttggtaatgtttgaatattaatttaatttttttggtttataaattttttttgtttatttattatttatttgtttttttatgtatttatttgtttgtttatttgtttatttagttatttatttattaagtttattatgtatttatttatgtgtttatttatttaattgttcgtttgtttgtttatttatttgttagttaatttatttatttatttatttgtttatttatttgtttatttaattatttatatgtttattaattagttcgtttatttgttattagtttattagtttataattttatttgtttatttatttatgaatttgtttatttatttatttatttgtttatttatttatttatttatttatttatttatttatttatttatttatttgtttattaatttatttattatttatttatttttttatttatttatttatttatttattagtttatttatttatttatttattaatttatttatttattattttatttatttatttatttatttatttatttatttatttattagtttcggtttttaggagttttatgagaataggtagtatttgattttttgtttttgcgttgtttcgtatatgataatgttttttaattttatttatgttgttgtaaagatataattttatttttttttatggttgaatagtattttattatatatatatataaatataatataatatgttatttatttatttattcgttgatggatatttatgttgattttgtatttttgttattatgaatagtgttgtgataaatatataaatgtagtatttttttggtattatttatttatttagttatttatttatttatttatttatttatttatttatttatttatttatttatttatttatttatttatttatttgtttattaatttagttatttatttatttatttatttatttatttatttatttatttatttatttatttatttagttatttataaatttatttatttatttatttatttatttatttatttatttatttattaatttatttatttatttatttatttatttatttatttatttatttatttatttatttatttatatatttatcgatttattaatttatttatttattaatttatttatttatttatttatttatttatttatttatttatttatttatttgtttatttatttatttgtttatttatgtatttttttaatgttgagttttaggttttaagttgagcgttgggaaaataaaaaagtattatataagatttttgtttttagagagtttttgattttttttggggggtggagggatgagtagaggtatttttgttttgttgttgttgttgttgttgttgtttttttggtttagtgatttttggtgagttttttttgttgggaaggaattttgaatatttagtgtttttttttgtataatttaattttttgttttaaatttttattttattaagataggtttgtttttttgttagtggatttttaggttataagtgtttttttattagtagtaaatattagaattttatagttttgggtttattattagatttatttgatttttatttttattgattttgtatttgtatttgggattttttaaaggttttaggttataggtttttagggttttttaggaatttgattaaggttttttttaaaaaggaggggagggataggttggtttggtattagttttatttttgtttttatttttttattaagaaggttaagttttagttgattgggtgtagtggggtgtaaggttatttattttataagatttaggttttgtttgatgtgtttatttatttattcgtgtgtgttattgttttgttttggtttgtttatatgtttatttatttatttatttatttaattatttttttgtataaatgtaaggggtataaatgtagttttgttttatggatatattgtataatggagaagtttaggtttttagtttatttattattagaatagtgtatattgtgttttttaagtaattttttattttttattatgtttttttatttttttatttttgtaagtttttagtgtttgttattttatattttatgtttatgtgtatatattatttagtttttatttatatatgagaataggtagtatttgattttttgtttttgtattgtttcgtttatgataatggtttttaattttatttatgttgttgtaaagatataattttatttttttttatggttgaatagtattttattatatatatatatatatataaaaatataatattttatttatttatttattcgttgatggatatttaggttgattttgtgtttttgttattatgaatagtgttgtgataaatataaaaatgtagtatttttttggtatagtgatttatttttttttggttagatatttagtgagattgttggattaaatgatattttttttttttttttttttttttttttttttttttttttttgagattgagtttcgtttttgttgtttaggttggagtgtagtggtataattttggtttattttgtttttcgggtttaaatgatttttttgttttagttttttgagtagttgggattataggcgttcgttattacgtttagttaattattgtatttttagtagagatggggttttattattgttggttaggttagttttaaatttttgattttatgtgatttatttgtttcggttttttaaagtgttgggattatagacgtgagttattatgtttggttagtttttttttttttgagatagaatgttattttattattgaggttggagtgtaatggcgtgattttggtttattgtagtttggattttttgggtttaagcgattttttcgttttagtttttggagtagttggtattatggatgtgtgttatttgtagttttatttaattttttgtattttttgtagagatagggttttattatgttgtttaggttgattttgaatttttgggtttaagtaatttatttgttttagtttttttaaatgttgggattataggtgtgagttattgtatttggttaaaaggtagttttgtttttagttttttgagaaatttttatattttttttcgtagaggttgttatttaattatttattttttattgagtgttttttatggtttgggtttagtaagggggatagatatgaatgaggtatattcggagtttttagtagtttataggtttgtagagggttatgtgagtagatagtggggtaagagaggaggtgttaggtatatttggttttaaaggtgtattagggaattattgattgggttagggttttagataggatggtttagggaagcgtgtagggggaaagtatgtttggttgagaattaatttaagtaaaggaaacgaagaggaaaataggaagttattatttttgtagttggaagtaaagtaggataggaaagtaaagagttttgagtgttaagttaaggagtttgagtcgtgtgtagggatggttgtggagtttttgttggttgtaagtaaggagtatgggggttgtttttcgtgggtgtagttaagaaatatagtagattgtgtgttttcgaggtttaagatttaaggggttttaggagaaggaagatattttattgttttaagtatggttaagtttaaggggtttgggtgaggaattttataaaagagatttagggttaataatttttggaaataggtagaatgttttttgttttttgggtaatgttagagtgtttttttaatttttttttttattttttttttttttaaagtatattagaagttttatttttttatatttttagggattcgtggtaatttaaatttttgggaatagtaggatttagattttaagaataggaacggtttggtaatttataattttacggttagtagttttttaaaaaggaaaagaaaaaaatttttgagtgtttggtattattttgggtgtttttattttatgattttatattattaagatagttatttgttgaattgaggtttaagagattagtgattggtttagggttgtatagtatgtgtgggtagagagttggggtatgaattttggtttttggggttttaggaagggttgggttttttggggagggaaggaagttagaggaagaacggagagagattgagaagttgaggtagggagtagggaggaaggggagggaggagaagagaggaagggaaagagaagtaaaatagtaagattaaaggagggagtagagagaagggagaaataggataagaggtgaggaggtagtacgaatttt

SEQ ID NO: 253 - DNA, 7008 bp, Artificial Sequence
  chemically treated genomic DNA (Homo sapiens)
attaaagtttattatgtttataaatgtttagaaggtatggatttcgtatatattattaggtgttattggatttaatagtgtatttgattgtgtagataaaaggttatgatatttaggagtttagtaaaggagataaataagaaaaatgaaaaattagaatttttagtttaaagtgttgtaatagagacgtttaagtgtagggtttatatagacgagggggtaattttttttttgtggtagtattaaattaagaattttggttttttggagtttaatttaatgttttaattatgatattaagtttgtatatatatatatatatatatatatatatatatataaattagtaaatattatatttgttaatttgttattaggaataagaaaattgaaatttttgtgttttagtttttttttttataaaagagaaataataatgatattaggattaaaatgatgaaaataaaatattgtagtgattgatgaatagaagtttttgaaaaatattagtagtggttataatgataatgatgaggaggaggatgtaattaatgtaattattaagtgatagttttataaattgttatgagaggtaaaggaaagtgagtaaattttttttaattgtattaagtattatagatattttatttaagttgtagaggatgggtatagtaaataggtatatatgtaatttatttggagaataagtagtggaataaaaataagaggttatttatgaaaagttatgaagttttttaaataatgaaaaataaaagttgaagaattaagttgtagttatgttaaggaggtttttaaatgttaaggaggtttttaaatataataagttgtatatttttagtttttgttattttttttttattagttaaattttgggtatagaatgtgaaaattaataggtgttagtttaatatttttattttaatatgtattattaatatttattagagtagtttttttgagttttgttattattttttatttaggtgaataattagtttttgaattagaggggagtaggttataatatgtttatttgagtttttaaagatagatatgtataaatatgtatttagagtagtaaagaagaaaaggaaaaaatgtatataaggttgagtaatgtaaatatatttaatatgattaatagtttagtacggtggtaggatttttttggttaatgtattttttatttttcggggtaaataatatttattttgttaagaattgattgtatgaggttttagtatattttttattgttttaatttatggaaggagggtgatattattattagttagtaattataatttttggatatgtgaggaataatatttttgtataatatttatttatggttttttggtttatttttatattaaatgaatattgtatgatgtgtatttttgtagttgagaaaattgttttgtttatttatgttatagttgaaatggtagatttataattggagataggtttttttttttatgggttttttttattttttttaatttgttgtttgtaaagggttattttttattataaatttagggttagtttttaattagaatttattttagtattgtagtgatttaaaaaataagattgtttagggtttataggatatgtttttgtagtgaaatgttttttttaattatagattaggattggtaaattgggatggaatagaataaaaaaatttattaagagtttttatatataataagattgttttattttttaataattgtatttgtttgtttatatatttatatataatgtatatgttaggttataatttaaaatttttattttaggtttatagttaaaatgtttaaaaagtattgtttggtgaaaaaagtttaggttttggtattaggtaggtttaaatttaaagttattattgttgttattattatttaatgagtttttgtgattagattttagttaatttttttttttttatattgtttgtgagatttaagaaaaaaattttttttttatatatgaattttttttaatagtggttattggaagttttttattggttataaaattattatttaaataatgatttgagatgaaaagaattaatatatttttattttaaattaaattaaatatgatttaattaatatttattaatgttaagattaaattttatgagggtagatattatatttatttttttagtatttagttaaaaatttttgtatagtaaggatttgatgaatatttgaatatattaatagttgaatgaataaaaggtcgaatggtgaattaatgaatggttatttaatcggaggtatcggagatatagaagtgaataaggtataaattttggtttttagaaatatatatatttattatttaatttatgtttttagtaaatatttatttagtattaattattttttagatattttgttaggtgttataataaataaagtaattgtatttattttttaaaaataaagatattatataataatcgtatgaatagttatagagttggaattattttaagtgtaatgaagggttttatgaagatcgtataataggagggaataatttagatgtagaaagaagtaaaggaagatttagaaagaatggttttttgagaaaatattatttaattttttaattttagaaggtgaaaagttgttttgtattattttgttttgttggttttagtaaagggtaatagagaaatgattaacgtagtaaggaaatgattagattgagtaaggaagaattttttggggaataaagatagaaaggagttaagttatataggatttaaattttttttgagtattttgaataatgagaaattggatagatatatgattaaatttgtagtttataaagatttttatgggtttttttatgggtagtagttttaaggaagaaataataataaatattgagaaattttttgtaggaaatgtagaaatttagggggaaaggatggtattgttttagatatgatagtggaagttaatgagaagtgtttaggattgaggttattttgaatatgaatttaagaagagaatttggtagtaaattaagtgtggaagatgatgtatagaaaggggaaagggaaatattagggagaataacgaggtttgggtttgagtgatttattggaaagaaaagaagttgtagggagaatagagataaaaatattgtggtgaaagattaaaatagtagtatggaatatattagatttgaggtagttgtaaaatatttaaatagtgattttaagaattaaatatttttaaagtttttttttgataaaaattaaagtttttattttagattgtattagatttagatttttattgtttttattattttattttttattttgttttttattattttgtttaagttagagtgtttttttggatgttttttaaatatgttaaattagcgttagttttagaatttttgcgtttattattttttttgtttggaatgtatatttttggaataaatgtatagtttaaatttttattttttttatgtttttgtgtgatattatttgaaaagtaagattttttttgattacgttatgatatatatttttttaattttttagtatttttattttttttgtttttttttttataatatttatttgatatattttataattatttattattttttgttatttgttttttttaataaaaaggtaatggaagttttatgaagatagagattgttatttttatttattgatttgttttaagagataaatatagtttttgttatgatttgggaagggtttgagattttattttatttggaagttaagaagttagtttgttatattataatggtttttggtagaaggtatagatttttggtttagagaaaagggatttaattattttatagtaatagttagagtattggaatttgttttggttttttaagttttaatttttataggttaatttaaggggtattaagtgatagttgtagggaaagtatagtgtgttaaaggaaagaaaggttaagtttttaaaaattcgaaattttttgtaaagggtaattaatatggtttttgttttagaaggagatattaattttattatattaaatagtaaataaatttgttttttggtgtagagggagatattacgtattttttaaggtcgtttgttatataaatatttttaaaaagatagtttgaaataaaggttattagtatttttatttataagatatattaaaatatgagagaggatggagaatttttttttaataatatatggtagatatttagtatatatttttttttatttagtatatatttttagatgaaagagtaattttttgaattaggtgttattattattttaatttttagatgaatatatagaagtatagtaaaagtggttttaataagtattttttagttttagaatatacgttttagggaattgagtttttttttttttttgtttttttttttttttttatttgttattttattagttattttaggttttgtgaatgagtgagggaaaaatagagaaaagagaaagaagaataagaaaggaagagtggaggaaaggaaaaaagaatggagaggttttattttatttggaataaaattttttttagtagttatttatatttgtttatttatttagaattatagagtagaagggatttttgagtttattttataggtgagaaaataggtttgagaagggaatgatttttttataattatagagggagttagggattaaattaattattagaattatttttttgatagaatttttgttttgtatgttttaggtttatttggttttttttattttttttatataggtgatatttttagaatttggaggttaggttatgatatagagttaattaataattagggagatttgtgatatagtttagtaggtggggttttgttgttatttgttatatgatttttttagttttaggtttttgaagagacgtggtaagtgcggtgtagtttttaattgatttttggacgtagaattttagttatgaaggtaataggtatttttttttttagtgttttggttttgttgagtttatttggtaagtgttgtatattttttaaatttaaataaaattgttttgatttgttgttttgtgaagtatattattttttagatttttgatgtagtttagttttcgagagatgttttggatttaatgagatgaaataaaattaataggtaagaattattttttaagaggaatttttaatttattataaggaaaataattttattagtaagaaatttttagaaataaaatggtttttttttattgatgtggttgattttttgttgggatatggtagagaaaaaagggtaaaaatattttaattttaagtatattttttattttgtaaatgtgtaaggttaaattataaattttaaatttttatgggattgtataaaatagataaatggtttttagttatttagtataaaaggtataatttgattgattaaaaatttatttttttattgtataggttttagtgtatttgaattatgtatagtttgttagatttatttttgaatagttaatatatgtgatataaagggaattttttatttttaatttttggtattttttattagtatttggaaatataaaaattgtattttgtgtatttatattatatattttgaatgttttgaaagaaaatattttgtttgaatagatggtgtatatatatttttaattgtattttgataatgttgatagataattttgaattcgtagagttaagattagttttttttttattattggaaatggttaatatttttaattttattttttatgtagtgaaggattttgtggagagttaaattagtattttgttaagaagaggaagaatattgtttgttttatttgttgaatatttatggtaatagttagtgttttttttttttttttttatgtatgttaattaatataaatagatgtttgtgatgagtatttgttttttagtttttagatttaattagattttaaaagttagtgggtttttaataatattaagttttgattatttcgggggaaattttttaagtttatagatgttttattaatttttattatatttagatataaagaattatttttttgtttagattattttaaagattgatgatattaaaattaatttttaggaatgtttttttatttgattgttattatattagtttttttttttttttatgaatttatttatagttattattttttatatgttgttagtaaaatttttgttattttttgggggaatagagattagttattttgattatttgtaaatttaataaatgtgagttagatttatagtttatatgatgtaattgttggaaatagttttttgggaattgatagtgagttggtaaaagaattttatttttttaataatatttataaaagggaatttaaatgtaattgaaaaagttaattttgtattagaagatttggttattgtttatgataattgttttatagttagttataaaaattttttatatttttatttgtaaattgagataaaaattatattttattaattgtgagattaaagatttagtaattggttttgagaatgtttgtgagtatttaaaagataatttgtttagtgtttgatttatttttagtagtaagtgtataatttttgtttttaaggaaatagattaattttttaaaatattaaatcgagatattttggttataattaaagttttatttaaattttttaaggttttgttaaggaaggggtataggaaaattagttagatatttttggaagattagagaaattagaaagggtggggaatgaaagagtttagtaaagaagttatagtttgtaatgaaagtagagaattttgatgaagaatagatttgattttttttatttaggatttaatttattatatttgatttatttttagg

SEQ ID NO: 254 - DNA, 7008 bp, Artificial Sequence
  chemically treated genomic DNA (Homo sapiens)
tttagaaataaattagatatggtaagttgggttttaaatgaaagaagttagatttattttttattagaattttttgtttttattgtagattgtgatttttttattaggtttttttattttttattttttttgatttttttaattttttaaaagtatttgattgatttttttgtattttttttttggtaaaattttaaaaagtttgagtaaaattttgattatgattaaagtatttcgatttgatgttttaggaagttgatttatttttttgaaaatagaaattatgtatttattgttggaaatgaattaggtattgagtaaattattttttgaatatttataaatatttttaaaattagttattagatttttaattttataattagtgaagtataatttttattttagtttatagatgaaagtatggagagtttttataattagttgtgaaatagttattataagtagtaattaggttttttgatgtaaagttagtttttttaattatatttaaatttttttttgtaagtattgttgaaaaaatagagtttttttgttaatttattattagtttttaaagagttatttttaataattgtattatatggattatgggtttaatttatatttgttgaatttataggtagttaaaatagttaatttttatttttttagaaaatagtagaggttttgttgataatatataggaaatgataattgtggataagtttatggaagggaaagggaattaatatgatagtaattaaataaggaaatatttttgaaaattaattttaatattattaatttttgaggtgatttgagtaaagaggtagttttttgtatttaaatgtaatgaaaattagtgaggtatttatgagtttggagaatttttttcgggatagttagaatttgatgttgttgggggtttattggtttttagaatttagttgagtttaaaaattgaagagtaggtgtttattataggtatttatttgtattaattaatatgtatgaggagggggaaagggaatattgattgttgttataaatatttagtaaataaaataaataatattttttttttttttagtaaagtgttgatttggttttttataggattttttattatatgagaggtgaagttgaaaatgttaattatttttagtgataaaaaggaaattgattttggttttgcgggtttagagttgtttgttaatattgttaagatgtagttggaggtatatgtgtattatttatttaagtagaatatttttttttaaaatatttaaaatgtgtaatgtaaatatataaaatgtaatttttgtatttttagatattaataagaaatattaggaattgaaaataaaaaattttttttatattatatatattagttatttagggataaatttgataaattatatatgatttaagtatattgaaatttatataataaaaaaataaatttttaattagttaaattatgttttttatattgaataattggaagttatttatttattttatgtaattttatgagaatttaaaatttgtaatttggttttatatatttatagaatgagaagtatatttaaagttaaaatatttttatttttttttttttattatattttaataaagggttagttatattaatagaggaaaattattttatttttgggaattttttattagtagaattgttttttttatagtaggttaaaaattttttttaaaaaataatttttatttgttgattttattttattttattaggtttaaaatatttttcgaagattagattatattaaaagtttagaagataatgtgttttataaagtaataggttaaaatagttttatttaaatttgaaaaatatgtaatatttattagatagatttaatagggttaaggtattgagaagaaagatgtttgttatttttatggttgaagttttgcgtttagaggttagttgaaaattgtatcgtatttattacgtttttttagaagtttgggattggaagggttatatggtagatggtagtaaggttttatttattgggttatattatagatttttttggttattgattgattttgtgttatagtttggtttttaggttttgggaatgttatttgtgtaagaaaggtgaaaggagttaggtgggtttgaaatatgtaaggtaaagattttgttaggaaaatagttttagtggttagtttgatttttaattttttttgtggttgtgggaaagttattttttttttaagtttgtttttttatttgtaagatgaatttaaagattttttttattttgtagttttggatagatgagtaggtatggatagttattagaaagaattttattttaagtagggtaaaatttttttatttttttttttttttttttatttttttttttttattttttttttttttttttttattttttttttatttatttataaaatttaaagtagttgatggagtggtagatgagagggaaagagaaagtaagagagagagaggatttagttttttaaagcgtgtattttggagttagagggtgtttgttggagttatttttgttgtgtttttgtgtatttatttggaaattaaaataataataatatttaatttaaagggttatttttttatttgagaatatgtgttgggtaaaagagaatatgtgttggatatttattatgtgttattagaagagaattttttatttttttttatgttttggtgtgttttatgagtagaggtattgataatttttgttttagattatttttttaagggtgtttatataataaacgattttagaaaatacgtaatgtttttttttgtattaaaaggtaggtttgtttattgtttagtgtaataaagttaatatttttttttagggtaaagattatgttaattgttttttataaaagatttcgggtttttaaaagtttggttttttttttttttaatatattgtattttttttgtaattattatttgatgttttttaaattggtttgtggaaattggggtttgggaaattagaataaattttaatattttggttgttgttatggaataattaagttttttttttttgagttaggagtttgtgttttttgttagaaattattataatgtggtaggttaattttttagtttttaagtaggataaaattttaaattttttttaagttatgataagaattgtatttattttttaagatagattagtaaataaaaataataatttttgtttttatggagtttttattgtttttttgttgagggaggtaagtgataaaaaataataagtgattataaaatatattagataaatattatggagaaaaggataagaaggataagggtgttggagggttaaggagatatgtattatagcgtaattagagaaggttttgttttttaggtgatattatatagagatatgaaggaaatgaggatttgaattatgtatttattttaaggatgtgtattttagatagagagaatagtaagcgtaaaggttttgaggttgacgttggtttgatatgtttgagaaatatttaggaggatattttggtttgagtaaagtgatagagggtaaaatgggagatgaaataatggaagtagtgagggtttaaatttagtgtagtttagagtaaggattttggtttttattaaagggaagttttggaagtgtttagtttttgaaattattatttggatgttttatagttattttaaatttaatatgttttatattattattttgattttttattataatatttttgtttttattttttttatagttttttttttttttagtagattatttaagtttaaatttcgttgttttttttgatattttttttttttttttttatgtattattttttatatttaatttgttattaagttttttttttggatttatgtttaaaataattttaattttggatattttttattagtttttattgttatatttaagataatgttattttttttttttgggtttttgtattttttgtaaagagttttttaatatttgttgttattttttttttaaagttgttgtttatagaaaggtttatagggatttttatggattgtaaatttgattatgtatttgtttagttttttattgtttagaatgtttaggaagaatttaggttttgtatgatttggtttttttttatttttattttttaagagatttttttttgtttaatttggttatttttttgttacgttggttatttttttgttattttttattaggattaataaaataaaataatataaaatagttttttattttttaaggttaaaaggttaagtggtatttttttaagaagttattttttttgggtttttttttatttttttttgtatttagattatttttttttattgtacgatttttataaaattttttattgtatttaaaataattttaattttatagttatttatacgattattatgtaatatttttatttttagggagtaaatatagttgttttatttattgtagtatttaataaagtgtttggaaaatagttgatattaaataaatatttgttaaaaatataaattaagtgataaatgtatatatttttgaagattaaggtttatgttttgtttatttttgtgttttcggtgttttcggttgagtagttatttattggtttattattcggttttttatttatttaattattaatatatttaaatatttattaagtttttattatataaaaatttttggttgagtgttagggaaatggatatgatgtttgtttttatggagtttagttttagtattgatagatgttggttggattatatttgatttgatttgagatgaaaatatattggttttttttattttaaattattatttaaatagtagttttgtgattagtaagaaatttttaataattattgttaaggaaggtttatatatgagaaaaggattttttttttgggttttataagtagtgtggggagaagggaattggttgggatttggttatagaaatttattagataataatagtagtagtaataattttagatttaggtttgtttgatgttaaagtttggattttttttattaaatagtgttttttaaatattttgattgtgaatttaaagtaaaaattttgagttatggtttagtatatgtattatatgtagatatgtgagtagataaatatagttgttaaaaaataaaatagttttattatatgtgaggatttttgatagatttttttattttattttattttagtttgttaattttaatttgtgattagaaaaaatattttattatagaaatatattttatggattttagataattttgttttttaaattattataatattaagatgaattttagttaaaaattggttttaaatttgtgatagggaatggttttttgtagataataagttaaagaggataaaaaaaatttatggagaaaggggtttgtttttaattataaatttgttattttaattgtgatatgagtgggtaaaatagtttttttaattataaaaatatatattatatagtgtttatttggtgtgagaataaattaagaaattataagtaaatattgtgtaaaaatattattttttatatgtttaggaattataattgttagttagtaataatattattttttttttatgaattagaataatagaaaatatattgaggttttatataattaatttttgatagaataaatattgtttgtttcgggagatgaggagtgtattgattagagaaattttgttatcgtgttagattattagttatattgaatgtgtttatattgtttaattttgtgtatatttttttttttttttttttattgttttgagtatatatttatgtatgtttatttttgggaatttaagtaaatatattatgatttatttttttttgatttaaggattaattatttatttgagtaaagagtgatgataaaatttaagagaattgttttaatggatgttgataatatatgttggaatggggatattgggttggtatttgttgatttttatattttgtgtttaaagtttaattagtaagaaaaaaatgatagaaattagagatatatagtttattatatttagagatttttttgatatttggagatttttttgatatagttgtaatttaattttttaatttttattttttattatttagggaattttatggttttttataaatgattttttgtttttattttattgtttgttttttaaataggttgtatgtgtatttatttgttgtatttattttttatagtttgggtaaaatgtttgtggtgtttgatgtaattaggaaagatttatttatttttttttgttttttatagtagtttgtaaagttattatttaataattatattgattatatttttttttttattattattattatagttattattaatattttttaaaagtttttatttattagttattgtagtattttatttttattattttaattttgatattattgttattttttttttataagaaaggaaattgaagtatagagattttagtttttttgtttttggtaatagattaatagatatggtatttattgatttgtgtgtgtgtgtgtgtgtgtgtgtgtgtgtgtgtataaatttaatgttatggttagaatattggattaaattttaagaaattaggatttttaatttaatattgttataaagaaagggttgttttttcgtttatgtaaattttgtatttaagcgtttttgttatagtattttaaattggaaattttaattttttattttttttatttgttttttttattaaatttttggatgttatgattttttatttatatagttaagtatattgttagatttagtggtatttgataatatgtgcgaaatttatgttttttaagtatttgtgggtatagtagattttaat

SEQ ID NO: 255 - DNA, 6922 bp, Artificial Sequence
  chemically treated genomic DNA (Homo sapiens)
gttttttgtttgttgaggagtttagagtttacggtgaggagtggtttttcgaaggaaaggggttatttttttttgggaattttaggtagttttattgtggggtttttattgtttttttttgattttcgtaagggtttatttttattttggaggttgtaagtggcggaagagatgaggggggttggtttttttttaaggagtaatttatggtgattcggtagttgggttttagaattaggaagtgtaaggatagagttttgtgttagggaggagggtggttttttatgaggttttacggtatggaagtagtttttcgagattaatttttatttttattgagttatcgagtgaagagtcgtgtagttttcgagattagtttagtcgatatggtggaatttcgtgtttattaaaaatattagaattagtcgggagtggtggtatttatttgtaattttagttatttaggaggttgaggtagtagaattgtttgaatttgggaggcgaagggtgtagtgagtcgagattatattattgtattttagtttgggcgatagaggagattttgttttaaaaaaaaaaaataataataataattagttaggcgtggtattcggtgattgtaattttagttatttgggaggttgaggtaggagaatcgttggaattcgggaggcggaggttgtagtgagtcgagatcgcgttattgtattttagtttgggtaatagagtgagattttattttaaaaaaaaaaaaaaaaggaaaagaaaaagaacgagagagtttggagtaaaaaaaaaaaaaaaaaaaaaaaaaggaaaagaaaaaagaaaaagatcgagagagtttggagtggtttgagaagatgttttgaatatattaatatataaagtgaaaagagggaggcggtagtgtagaattttttttgggtattttagggttttagtttttttatttggaaagtgggggttatagtgttattcgtatgatttttagtgggttatttttgtttaaggacgttttgttcggagtttttttaggttttttttgggagtggggtgggttgttttatttttttattttttttttaaggttatttggttgttttgtgagagagatttttgggggtaggaggtggggtttgtgagttttagtttttgatttttatttgtttagtgtggtggtttttttttatttttatttatgttgtgtgattttaggtaagttttttaatttttttgtgttttaatgtttttaatagtaagataaagatatgattagtatttattttttagattattatgaggagtcgatgagttaatgtttgtaaagtatttagagtaaggtttaatttaaggtttgagttttgggagtatttgaatattacggaatgatatttagtttttttagtgtggtattgtaggaataaagtaggatgtaaattatatatttatgtttatttagttttttgtttattttgtaaatagttttagagtatttagtgggtgttaggttcgttttggtttttgggggtatggagatggattttgtttggttttgatagtcgcgagtgtatagtggagggtattgggtggattttagtttgttgatcgttttgcgttgttgtgacgttggaaggaaacgtattattatatttaggtgtttgttttttaggggtagaattatggggtatttttttttatttttttttttttttttttttaatttttttgtagtttttaaagagtttattttgaatgataaaagttattatttacggaggtttggtaacgtttcgtgttattttgagtatgtttcgtgtattttttttacggatttttttagtagttttgatacgggtgttattttcgatcgatagagaggaaaattgaggcgaagggcggtcggttaggatttaaattagggagtttgttttagtatttcggtttttaattttaatcgtttgtttttttataaatattaggattaattattaagattaaaaaaatagttttataaattattaaatattgtatttggtggtttaggattttagtttcgttttaaaggtttttgttatgttttttttgagtgttttagtgtggagtggttttcgtgtttgtgagtgtaggggttaggggttgtgttttttttttttgtttttttttaagaggtgatatgtatttttgatattggaagggtttttaaggtttagttttggttttttgtttttttttatggtatattagttaagtatttattttttcgtttttgattatttttagtgatagggagtttattttttaatatttattttattttaaagaaaatttaggtttttagatagttttttttttataaaaattttttaaaaaaatttttatttttttttaaagttttataaataagttttttgttttggggttttgaggtaggatttggttaattcgtttttatgtttttttatagtgaggagtatagggtttgttagtaggtattataaatgttgtattaggaagtaagtggttagggggcgggttggttgggtttttattaatttttgggttgtaggtaattaggttagtagtttttgtgggatattagttgggtgagtgttgatgggtatcgtgattttaatggaataggttgttatagaaattgattttggatttgtttttaggtttattgatttgttttttaggagattatggtaattttttgagttttttagtaggtttttttagggtttttttaattttatattttttgagttgggtggtttttagggagtatgtaaattatatttttattgtgtagttgggtagtttgaggttttaggggtataggggataggttgaaatttatataggtagggggcgttttatagttgggttgggcgtttagggtaaatagttttgttcgaggatttagttagttagggggttttttttttatttatgggtttttagaggaaattttggatcgatttttaggttttttgtttttttaaagaataatcggaatttgtttttttggtgtgtttagaattatataatattaataacggttgaggtgatttgtgatgtttttagtattttatagtgttttgtgtatttattataatgattttatcgttatagatgaggaaacggtatagagagaagttaagttatatgtttaaggttatatagttatttaggggtagagttaggatttggatgtggagagtttagttttagagtttatttttattattatgttatattttgtttcgtttttgttttgagagggttgaaaagattttgggagggttgaaggatattttaggtttaggaggtttttagtacgggtttgttagagttatagtttgatgaatagtgattagagagtgggcgttattatgatttttttttttaatgatatttttaaaatagtgttgagatgtttgttttatttttgttttgtagatgaggacgttgaggtttagagagggaaagttatttgtttagggatatatagcggggagaggtggagtagggtttttatttcgagatttttgattttatatttggtgtttgtgttaagattttaggttgttttttaggttttttgggatagtttttgttttttattaggtgagatgatggttttattagggtttaagatgggtggggagattttagcgaatttgggtgggagttgggattagttagggtttgcggatggggaaatgggaggtagagggtggtggtaggattgtgggcgttagggggagtttttaatttggtttattttgtgttttcgtttttttggattttttaggtttttggttttgaagttttttagtttttaaatagttatttattcgtttagttgtttattgagtatttattgtgtgttatattttatgttaggtattgggagtatagtagtgaataagatgaataaaagtttacgatagtagttatataattatatgaatttaaataataaaaataaaataggattatatgttattaaagatagatataagttagggggatttagtgaaaggatttggggaatattttttaaggaggggatttttgagttgagaacggaaggaggtattagttattttggtgaagtggttagggaatagtatttgggtagtgggaatggtatgtgtgaaggttttgtggttggagtgagtttttagttatttttgttttaaattttttgttgtatggttttggttgttatttttagtatttttttttagcgttaggtaattttcgttagttacgtatttatttaataaatttttaatgagttttttttatgtgttaggtgttcgggatataggcgtggtttagatattgtttttgttaggagggagggaaatagtgatttagggggaggtgggtgggtaaggttagggtttttgattatgaggtatttttttcgtttttggcgttggatcgaggaagttttttacggatggatgttatttttacgtttattttatagatgaagatatcgaggttttgagaggttaatttttttaaaaaggttggtgtttttgttttttatttttttttttttttttttttttttttgagatagagtatttttttgacgtttaggttggagtgtagtggtaggatttgagtttattgtagtttttgttttttttgtttaagcgatttttttgttttatttttcggagtagttgggattataggcgcgtgttattatgttcggttaattttttttttttttttaagtagagttcgggttttcgcgtgttggttcggtaggttttaaatttttgattttaagtgattcgttcgtttcggttttttaaagtgttgggattataggcgtgagttatcgcgttcggttttgttgtttttttttgggtttcgttttttttatttgtggaatgggtgggagggaggtcggttaaggggtttcggtagttttgtttgttttagtgtttttttttttttttgttaggattatgggtagtaataagagtaagtttaaggatgttagttagcggcgtcgtagtttggagttcgtcgagaacgtgtacggcgttggcgggggcgtttttttcgtttcgtagatttttagtaagttagtttcggtcgacggttatcgcggttttagcgcggttttcgttttcgcggtcgtcgagtttaagttgttcggaggttttaatttttcggatatcgttattttttcgtagagggcgggttcgttggtcggttagtgcgcgggcggcgcggggttttcgtttatttggggttacggcggggaggcggcggggttgtgtgttcggggtcgttttttttgcgtaggttttttttttcgttaggggtagcgtttttgggtgatttgggtgttcggggggtgggggggcggtcgtatatattgtgaagcgttcgcgtcgtcgtcgttggttttggggtggagtaagcgtaaaagatacggggtgtggttaatgggttttaattggacgtttaagtttaagaagaagaagggcggcgcgggatcgggtttgttgttgttttggcgtttagttttttttcgttgtttgggttcgtttagagatgagtcgggacgcgcggtttacgtgcggcggaggggtagttgggtcgttcggggaacggggtatcggatggtttcggttgggttcgcgttaggatgcgtttttgcgttttttgttggcgttttgcggttatcgtagtttcggagagggtcgttttggagagtcgcggcggtgttttagatattttacgtagattttatttttttatttagattcgtttattttttttataggtatacgttgggttatatatacggttatattttcgttagggatacgtatatatgcggggtggaggtagggttatagatattcgtagatatatttttaacgtagatgtatttagatataaatttatatgtataggtgattttatatttgtagttgaagatatacgtatatgtcgttagaagcgtatttagagatatacgtttagttggaaattataattttattatcgtggtcgtttaggagatagatatatataggtgtatcgagaatatgagaatatttagagatatacggataggcgtggattttttagacgtagacgtacgtttaagcgagagaaatagatttatagatatattatttatttgtttaataagtatatgtggagtttttattataggttagggtttttttgttgttcgggttttagcggtgtagatagaatttatttgggggaaggaagtaaagggtagttcgtggagggtgttagaaggggcgttgttgcgaaggcgtaaaataggtagggagggagggttgggggatgtgaggaggtggaggttgtagtttaaaatggtggaagggggtacgggggtttttttgagggggtagttatttggagttaaatttttttggatattaggagcgtttagagtgatatattttatagagagagagcgagttttttgggggagtgttttttatttatcgttttttttagtttatagtttttttttgagtatttattatgtgtttggttttggaaataaaataaagatgttggttattggcgatttttgtttttagagtaagataggtattaaatagataagttagtatttagtattgtttaaagtttcggggacggacgcggataggaagggatgttttcgtttttatacgtttttgtagggatgcgtagatatacggatgtagtggatacgtgtataggtttatttttattgaatttgattgtgtttttgggttgagtatttgcgtgtgggagataaatttattttttttgggtatagggttattttgtttatgttttttttggttgtggttttattgttttgatatattttatttttttttgtagg

SEQ ID NO: 256 - DNA, 6922 bp, Artificial Sequence
  chemically treated genomic DNA (Homo sapiens)
tttgtagagaggggtggggtgtgttagaatagtggggttatagttagggaaggtatgggtaggatggttttgtatttaggaggagtggatttgttttttatacgtaagtgtttagtttaaagatatagttaggtttagtgaagatgggtttgtgtacgtgtttattgtattcgtgtatttgcgtatttttgtaagggcgtgtgggagcgggagtatttttttttgttcgcgttcgttttcggggttttgggtagtgttgggtgttggtttatttgtttggtgtttgttttgttttaggagtagaagtcgttaataattagtatttttgttttgtttttagagttaggtatatagtaggtgtttaagaaagagttataggttgaaggaagcggtgaatgaagaatatttttttaggaggttcgttttttttttataaagtgtgttattttgggcgtttttggtgtttaggaagatttggttttaagtaattgtttttttagaaaggttttcgtatttttttttattattttaagttatagtttttatttttttatattttttagttttttttttttgtttgttttgcgttttcgtagtagcgttttttttaatattttttacgagttgttttttgttttttttttttaggtgggttttgtttgtatcgttggggttcgggtagtagaggagttttggtttgtagtaggagttttatatatatttattgaataaatgaatggtgtgtttgtgggtttgtttttttcgtttgggcgtgcgtttgcgtttgaagggtttacgtttgttcgtgtgtttttgagtgtttttatgttttcgatgtatttgtgtgtatttgttttttgggcggttacgatggtgagattgtgatttttagttgagcgtgtgtttttgaatgcgtttttgacggtatgtgcgtgtgtttttagttataagtgtgaggttatttgtgtatgtgagtttgtatttgggtatatttgcgttggggatgtgtttgcgggtgtttgtgattttgtttttatttcgtatgtgtgcgtgtttttggcgggggtgtagtcgtgtgtgtggtttagcgtgtgtttgtggggagagtgaacgggtttgagtgaaggagtgaagtttgcgtggagtgtttggggtatcgtcgcggttttttaaaacggtttttttcggggttgcggtgatcgtagagcgttagtagagggcgtaggggcgtattttggcgcgggtttaatcggggttattcggtgtttcgtttttcgagcgatttagttgttttttcgtcgtacgtgggtcgcgcgtttcgatttatttttgggcggatttaggtaacgaaaaaggattgggcgttaaggtagtaataggttcggtttcgcgtcgttttttttttttttgggtttaagcgtttaattagaatttattaattatatttcgtgttttttgcgtttgttttattttaaagttagcggcggcggcgcggacgttttatagtgtgtacggtcgtttttttatttttcggatatttaagttatttaggggcgttatttttggcgagaggaagggtttgcgtagagggggcgatttcgggtatatagtttcgtcgttttttcgtcgtggttttaggtgggcgaggatttcgcgtcgttcgcgtattgatcggttagcgggttcgttttttgcggggaggtgacggtgttcgaggagttgaagttttcgaatagtttgggttcggcggtcgcgggggcgaaggtcgcgttggggtcgcggtggtcgtcggtcgaggttggtttgttgggggtttgcgaggcggggaaagcgttttcgttagcgtcgtgtacgttttcggcgggttttaggttgcggcgtcgttggttggtatttttgggtttgtttttgttgttatttatggttttggtaggagagagagaagatattggaataggtagggttgtcggggttttttggtcggttttttttttatttattttatagatagggaaaacgaggtttaaggagaggtagtagggtcgggcgcggtggtttacgtttgtaattttagtattttgggaggtcgaagcgggcggattatttgagattaggagtttgagatttgtcgggttaatacgcggaaattcgggttttatttgaaaaaaaaaaaaaaattagtcgggtatggtggtacgcgtttgtagttttagttatttcggagggtgaggtaggagaatcgtttgaataggggaggtagaggttgtagtgagtttagattttgttattgtattttagtttgggcgttagaggaatattttgttttaaaaaaaaaagaaagaaaagaaaaaaatgggggataggggtattagtttttttgggagagttagttttttaaaatttcgatgtttttatttgtaaaatgagcgtaaggatggtatttattcgtaaagggttttttcggtttagcgttaggaacggaagaaatgttttataattagaagttttgattttatttatttatttttttttgagttattgttttttttttttttggtagggatagtatttgagttacgtttatgtttcgggtatttagtatatggagggggtttattgagggtttgttgaatgaatacgtggttgacgggaattgtttaacgttggggaaaggtgttaaaagtggtagttaaggttatatagtaggaggtttgaagtagagatggttgggagtttattttagttatagggtttttatatatattatttttattgtttaaatgttgttttttggttattttattagggtgattggtgttttttttcgtttttaatttaaaagttttttttttgggaagtgttttttaaatttttttattgggtttttttgatttgtgtttgtttttgataatatgtggttttgttttgtttttgttgtttgaatttatgtggttatgtgattattgtcgtgggtttttgtttattttgtttattgttgtgtttttagtgtttagtatggggtgtggtatatagtaggtgtttagtaaatagttgaacgaatgagtgattatttaagagttaagggattttagagttagaaatttgggaggtttagagagacggaaatatagagtaaattaagttgaaaattttttttgacgtttatagttttgttattattttttgttttttatttttttattcgtaggttttggttggttttagtttttatttagattcgttgggatttttttatttattttgagttttgatagggttattattttatttggtagaaggtaggggttgttttagaggatttgggaggtagtttggggttttggtataaatattaggtgtggagttaggggtttcgaaatagaggttttgttttattttttttcgttgtgtgtttttaggtaagtggttttttttttttgggttttagcgtttttatttgtaaagtagggataaagtagatattttagtattgttttgaggatgttattagaaagagaaattataatggcgtttattttttgattattgtttattaggttatggttttagtaggttcgtgttaagagttttttagatttgaaatattttttaatttttttaaagtttttttaatttttttaaagtaagagcgagatagggtatggtatggtggtgagagtgggttttggagttgggttttttatatttagattttggttttatttttaaatagttgtgtaattttaggtatgtgatttaatttttttttgtgtcgtttttttatttgtaacgatggggttattgtgataaatgtataagatattgtagggtgttaggggtattataggttattttagtcgttattgatattgtgtaattttggatatattagggaggtaggtttcgattattttttggggaggtagaaggtttgggaatcggtttagaattttttttgagaatttatgagtggggaaaaggttttttgattggttgggttttcgggtaaggttgtttgttttgagcgtttagtttagttatgagacgttttttgtttgtgtgaattttagtttgttttttgtgtttttggggttttaggttatttagttgtataatgggggtatggtttgtatgttttttggggattatttagtttagagaatgtggggttggggaggttttggggagatttgttgaagagtttaagggattattatggttttttgagggataagttaatggatttggggataggtttaaagttagtttttatggtaatttattttattgaggttacgatatttattagtatttatttagttggtgttttataagaattgttgatttggttatttgtagtttaaggattgatgggggtttaattagttcgttttttagttatttgttttttggtgtagtatttatagtatttattagtaggttttgtgttttttattatagggggatatagagacgaattagttaggttttgttttaggattttaaagtaggggatttgtttatgagattttaagaggaagtaaaaatttttttaaaaaatttttatggaggaagaattatttaagagtttgaattttttttagaataaaataaatgttgaggagtgagttttttgttattggaggtaattaaagacgggagaatgggtatttggttgatgtgttatgaagggagatagagagttagggttagattttaagggtttttttagtattaaggatatatgttattttttggaaggggataagaagaaaagatataatttttgatttttgtatttataaatacgaagattattttatattggggtatttagaaaaagtataatagggatttttaagacgaagttaaggttttgagttattaagtgtaatgtttgatggtttgtgagattgtttttttggttttggtggttgattttggtgtttgtggagaggtagacggttgaggttaagagtcggagtgttggagtagattttttggtttgaattttggtcggtcgtttttcgttttagtttttttttttatcgatcgggaataatattcgtgttaggattgttgggagaattcgtgagaaaagtatacggaatatgtttaggatggtacggaacgttattaggttttcgtaaatggtaatttttattatttagagtggattttttgagaattataagaagattaaaaaaaaagaaaagaaaaaataaaagaaaatgttttataattttgtttttagaagataaatatttgggtgtggtggtgcgtttttttttagcgttatagtaacgtaagacggttaataaattggggtttatttagtgttttttattgtgtattcgcggttgttagggttaggtaggatttatttttatgtttttagagattaggacgggtttgatatttattaggtgttttggaattatttgtagaatagataaaagattaaatgggtatggatgtataatttgtattttattttgtttttgtaatgttatattgaaaagattaaatattatttcgtggtatttaaatatttttagagtttagattttgaattggattttgttttaagtattttgtaaatattgatttatcggttttttatgataatttaggaggtaaatattaattatgtttttattttattgttgaggatattaagatatagagaggttgaagaatttgtttgaagttatatagtatgggtgagagtgaaaaggggttattatattgggtaggtgggaattaggggttgaaatttataggttttattttttatttttagggattttttttataaagtagttagatggttttggaagaggggtgagaggataaagtagtttattttatttttagagaaagtttgagaaagtttcgagtagaacgtttttgagtaagaatggtttattgagggttatgcgggtagtattgtggtttttattttttagatgaggaaattgaggttttgagatatttagaggagattttatattgtcgtttttttttttttattttatgtgttagtgtgtttagagtatttttttaggttattttaagttttttcggttttttttttttttttttttttttttttttttttttttttttttttattttaagttttttcgtttttttttttttttttttttttttttttttgaaatggagttttattttattgtttaggttggagtgtagtggcgcgatttcggtttattgtaattttcgtttttcgggttttagcggtttttttgttttagttttttaagtagttgggattatagttatcgaatattacgtttggttaattattattattattttttttttttgagatagagttttttttgtcgtttaggttggagtgtaatggtgtgatttcggtttattgtatttttcgttttttaggtttaagtaattttattgttttagttttttgagtagttgggattataggtgagtgttattattttcggttaattttggtatttttagtagatacggggttttattatgtcggttgggttggtttcgaaagttatacggttttttattcgatgatttagtgagggtgggagttagtttcggagggttgtttttatgtcgtgggattttatgagagattatttttttttttggtatagagttttatttttgtattttttggttttggggtttaattgtcgagttattatgagttgttttttggagaggggttaattttttttatttttttcgttatttgtagtttttaaggtagagatagatttttgcgggggttaaggggaagtagtgggggttttataatggggttgtttgaggtttttagggaaaggtggtttttttttttcgggaagttattttttatcgtgggttttggattttttagtagatagggggt

SEQ ID NO: 257 - DNA, 5989 bp, Artificial Sequence
  chemically treated genomic DNA (Homo sapiens)
  unsure 4210..4211: n is a or g or c or t
atattttttttttcgggaatattattggatttagtttgggggtattagaaattaggttttttagaggtatttgaaattagattgttattttttaggtattttaagatttaattaataatattgaaagaatagtttattttatttgaatttttttgattttaaagtaaggaatgatttgaaaagatttattttgtttttgtgtttttaggtttagaattttagttgtttttaaagagataagaaagtattataaatttttttagtgatttaatttaaaattcgatttatatatatgtatttttttgtataatgtaggtttatttatttaaatttttttattttaagagaggaaatagttgtttttgtttgtttgtttggagagtttttttaatgattcgtttattttatatatatttattgtatatattgaatgaaatattaaagtggatatatttcgaggagtttaggtttgtgggggagataggtgtgtaagtaatagtgataaagtgatattaacgttatagtaaaggtatttttaaattgttgttgatttgtagaagagataaatagattttattaggagattgaaaaatattttatagaggaggtgataaatgagttggattttgaaggtagtaagattttgttagtgggggaaggagaggtatttagataaaggtaatagtatgagttatagagggagggagaggaaaatgtaggtagtgtttaaagaattaggtagtgtattgtggttgtgtttgtaatcgggtggttggtagtaggggaggtgtgggtaagagatgaagttagaggattttagatttgggtgggagcgtaggttagaagagggaacgttggatgtagttatattgttgttggtgttatttagatttttatttttttattagattgtagtgtttaaaattttttttagtaagagaattttttttttttgaattttttataattatttttaaattatgaaatataagatttttttttttagtaaaaatgtatttttttataagtatagtgttttgtattatggaggggagaggaggtgttttgtttttggagttgttggtttgagagaattttgttatcgtgggagttgggttatttttatatagtggtttggtaatgattcggtggtggtggaggtttgtgagtgggtattggtaatgggagtagttgtaaaattttggagggtagttttaggagagtgattttattaggaaagttttgggaaataaattatagggaggttttataggaatttttggttgtgtttataggtaaggtatatgaggaaaagaaatgtaattatagtttgtaagtcgatgaaaagaggtaatgagtgatatgaaatagttgttttaagttttttttttttgtcggataggaagaaatggggttttatgtattttatttagtagatatttattgagtgttagttgtgagttgggttttgtataaagtgtagggaatattggtggttagtaaaatagttaaggttcgtattttaaggaatttttttgagggaagattgagattaagtagataattgtataaatgtataattatatagtatggtgagtgttttgaaggataagtgtggggagttttatttagattggaggattgtgaaagttaagagataggagagttaaggtgaggtaaggtgagtaagagttatttaggtaaagattgtttggtaggggagtgttttagtaacgggaaataatttggaaaaaatatgatattttaggggaattaaaagtagttgtatgtggttgatgtatagatagggaagggtaggaagtgtgttgaaagaaggtaggaggagaattatgttgggttttgtaggttttggtaagaagttagattttattttaagtgtagtgggaagttaatgaagtgtgttaagtaggaaatgatttgatttggtgttaaaaaaaaaaaaaaaaaaggtgatttagatagttttaatgattttgtgaggggagagtggaagttggggtaattaggaggtttttgtaataattaaggtgagagatgggtagtattagaggtggagaaaagtggatagataaaagatatattttggaagtagaattgtttgtagttgggaaatgggttggatgtgggtagaaataagaagggagagttgaggatgttttttaggtttttggtatatgtatgtttgtaggttttttagtagatagtagagagtttatataaggttgttaaatttttattttttagaagggttaggtaggattggtttaaatttagttttgtagaggtagtggtgggatttagttgtttttgattttgtttagtttaaggagtgtgtatatagtagtattatttaagtagggattttagtttttttagtaatggggttttttttttgtttttttttttaggataaggttttaaggaatttttataattttagtatgttattagggggagtatggttcgtattttgggtttggtttggagggttttttaagtttggattattttaggaattgatttgtattagttttagtatttagttttgatttttggttttttatattgtttaaaagaatgtttggtatatggtaggtgtttaataagtgttaattgatgttattattgtattattaatattattttattatagaaaggggtgggattatttttttttttttaggatggagattgggtaagtggaatgtgtattttgaggattaggaggagagtagagggatgttttttggataaggaagaggcggaaatttagtgatttgatgatattgtatttgtttttttgttttgtttttttttgtttttttttgtagatttgggattttttagttggggtttgggtggggttggggatttatagtgggtgattaggtttatttttttttaagttttgattgttttattaaagtagtagtgttttttatttaggatttgtgttattttgttattttttgttggattttataatatttttttattttaatttttggtatatatttattttttaaatttaagttaattagaattttgttttgagaatgttgtgatatgttggaaattaatgaaaaaaatttattagattttgtataggatgttgtattaaagattttattaggttgggtgtggtagtatatatttataattttagttatttaggagtttgaggtgggaggattgtttgagtttaggagtttaagattagtttgggtaatataataagatttcgtgttaataaataaataaataaataatattaggattttttttttgggagtattgtttttgggagtagtattggaaaatattttttttaagttttagtgtttttattttggggagggtattaattgttttagtgttttttgtttgtttttggtgaggagttgttaagaggagtaaagtttttagtttagtttttgatttgagagtgtttttacggatagtatttttttcgatgtttagttttagttttgttagtaggttttgtaggtggaaagggggaagttatgggatttgtttaatggtatatggttcgttagtggtggagttaggtattgttaaggttttttgatttttggtgttgttgtaattattgtgtttaatgtatttaagagatttgaaaggtttggggattgtttttagattttattttttggttttatgatttggggtaagtaattttatttttgttgtagaattaaaaaaaaaaaatttgttaaattagtataataatgttaattttaatttttagatttgttatgttgaatagacgagttaagattttgagagtcgtttagaaaagtgtaaggttatatatagttgtagggtagggtttttttttcgagttgtgtattaggacgttttatattttagagatgttgttttaaggtttttaggttgaaaggatggtagttagtttatttcgttataatttataaggattttttatttttttttgggagtttagcgttattttataattagttattaaaaagttgatagtttttgaaattaggtggtaatatattttagttgaaagtgtgttggattagggcgaatttggttgattttttagttttttgattgtttaattgtataagtgtagattaaatgtttaatttttttgagttttagtttttttatttataaaatggttataaggttagtatgnntcgtacgtttgtaattttagtattttgagaggttgaggtaggaggattgcgtgaagttaggagtttaaaattagtttgggtaatatagtgagattttgtttttataaaaataaaaattaaaaaagtagttaggcgtggtggtgtatgtttgtagttttagttattttagaggttgaggtaggagggttgtttgagtttaggagtttgatgatgtagtgagttatgattgtattaatgtattttagtttgggtaatggagtaagattttgtttttaaaagaaatttaagaagaataataaataaatttgaaaaaatggttataaaaatatttgtgtagtgtattttaaaaggttatgaggattaaataaaatgatatatgtaaaaagaatgttataaagtagaaatgtatgttgggtaggggggagaggaagggataggatggggatggggatgggattaaatttagggggtttgtcgtgttttagggattgtgtttattttttgataggagtaatattattatcgattgtgatagtagtttttattaagtttgtattttagttgtagatttttagtagggtagagagataaggttgtatttgtattaggtttgtcgtttgggttgtgattttcgatttgtttaggattttttttggttttgatcgagttgtttttgttttttattttaggaagatgagagattgtttaggcgttattattagtattatgagtttttgtattggttaaagttatcgttataatttggataggtagtaaggtaagtagagaggttagtttaggcgagtttttgggatgtgagtgtattttcgttttaattgttgttcggaaaaattttaagtgtataaataagttaaggtagcgtattagggttttttttattcgagttttaggatttagaggaagttgggttttttttaagcgttttagttagtttttttttttttggtagggatttttttaagttataaaaaatgagatattggaggggaagaaaataagtttatttattgttttttttttttttttttttgagttgtttaagtaagtttttaggagtagtttagagtttttgttggattggaagggaggtaggaggagtggaatgtatgtaaaaatcgagttgattaaaagatagtgttgttttatggaagttttttagaattgagagagagagagagagagagagagagagagagatagtgagaaagaaagaaaaagagagcgtttttgtgtacgcgttaggttaagagcgcgtcgttgtgcgcgcgtcgtttagcgaggatagggtttttatgataatcggtttggtcggttagtagtgttttgtttatttggttgcgaggagcgttacgaaaggttagaggaaggagttgtgggaagttcgtagtaggtatcggagtttaagttagtggatttgggggttttgggttttttagtcggttgcggtgtgagaatggagtgggtaggaaagtagcgggatttttaggtaagggtagtttcgggttgggattatttggtttttttttttggttttttttttcggttgttttttgggagttaggcgagtgtttgtagtttttgttcggggtttggggtttaggaatgatgttatgttttaatagttggattttattagtttaaggaggagggaaatagttaatttttttgattttgtaaatttagttgattttatttttgttgaatttgaggtgtttagattttattttaaaaagtattattttatttttatttagtat

SEQ ID NO: 258 - DNA, 5989 bp, Artificial Sequence
  chemically treated genomic DNA (Homo sapiens)
  unsure 1779..1780: n is a or g or c or t
gtgttaaataaaagtaaaatgatgttttttagagtgaagtttaaatattttagatttagtaagagtgagattagttagatttgtaaagttaagaaaattggttgttttttttttttttaagttaatagaatttaattgttggagtatgatattatttttgagttttaaatttcgagtagagattatagatattcgtttgatttttagaaaatagtcggagagaagggttaggaaaggaggttaaatgattttagttcggagttgtttttatttgaaagtttcgttgtttttttgtttattttatttttatatcgtagtcggttagggagtttagggtttttaaatttattggtttaagtttcgatatttgttgcgagttttttatagtttttttttttgatttttcgtggcgtttttcgtagttaagtgagtagagtattgttagtcggttaggtcggttgttatggagattttgttttcgttaggcggcgcgcgtatagcggcgcgtttttggtttagcgcgtgtataagggcgtttttttttttttttttttttattgttttttttttttttttttttttttttttttttttagttttgggaggtttttatgaaatagtattgttttttgattagttcggtttttgtatgtattttattttttttattttttttttagtttaataggggttttgaattgtttttgggaatttgtttgaatagtttagaggggagaagggagaagatagtgagtggatttgttttttttttttttagtgttttattttttataatttggaagaatttttgttaggggggagggagttagttgaagcgtttgaaggggatttagttttttttgggttttggagttcgggtaggagggattttgatgcgttgttttgatttgtttgtgtatttgggattttttcgggtagtagttggggcggaaatgtatttatattttaggagttcgtttggattggtttttttgtttattttgttgtttgtttaggttgtggcgatggttttaattagtgtagggatttatggtattagtggtggcgtttaagtagttttttatttttttgaaatggagagtaaagataattcggttaggattaggaagaattttgggtaagtcgagagttataatttagacgataaatttgatataaatatagttttgtttttttgttttgttaaggatttgtagttaaggtgtaggtttagtgggagttgttgttatagtcggtaataatattgtttttgttagaaaatgagtatagtttttgggatacggtagattttttaagtttagttttatttttatttttattttgttttttttttttttttttatttagtatatatttttgttttgtaatattttttttatatgtattattttgtttgatttttataattttttgaaatatattgtatagatatttttatgattatttttttaagtttatttattattttttttaaattttttttagagataggattttgttttattgtttaagttggaatgtattggtgtaattatagtttattatattattaaatttttgggtttaaataatttttttgttttagtttttgaagtagttgggattataggtatgtattattacgtttggttatttttttaatttttatttttatagagatagggttttattatgttgtttaggttggttttgaatttttggttttacgtaatttttttgttttagttttttaaagtgttgggattataggcgtgcggnntatattggttttatgattattttatagatggaaaaattgagatttagagagattaaatatttgatttgtatttatatagttaggtagttaaagaattaagagattagttaagttcgttttagtttagtatatttttaattaaagtatattgttatttgattttaaaaattgttaattttttgataattggttatgagataacgttgggtttttaagggaaggtggagaatttttgtaagttgtggcgagataggttgattattatttttttagtttaaagattttaagatagtatttttaagatgtaaaacgttttgatgtatagttcggagaaaaagttttattttatagttatatgtgattttgtatttttttaaacgatttttaaaattttggttcgtttgtttaatatgataggtttgaaagttaggattggtattattatattaatttaatagattttttttttttaattttataatagaagtaaaattatttgttttaggttatggaattaggaaataaaatttagaaataatttttaagttttttaagttttttgagtatattaagtatagtggttgtaatagtattaggggttagaagattttggtagtgtttgattttattattaacgggttatgtgttattgggtaagttttatgatttttttttttttatttatagagtttattgatagggttgggattgagtatcggaagagatgttgttcgtgaaagtatttttaagttaggaattgaattaagaattttattttttttgataattttttattaaaaataaataaaaaatattgggatagttaatattttttttaggatgaggatattgaggtttaaggaggatattttttaatgttgtttttaaaaatagtgtttttaaaaaaaaggttttgatgttatttatttatttatttattgatacgaggttttattatgttgtttaggttggttttgaatttttgagtttaagtaatttttttattttagatttttgagtagttgggattataggtgtgtattattatatttagtttgatagaatttttaatgtaatattttatgtagaatttagtgggttttttttattaatttttagtatattataatatttttaaaataagattttgattgatttgagtttaaaaggtaaatatatattagaagttaaggtaggaaagtgttataaaatttaataggaaatgatagaatggtataaattttaaatggggggtattattgttttagtgaagtaattagagtttgaaagggagtgaatttaattatttattataaatttttaattttatttaagttttagttgaagaattttaagtttataaagaaagataaagaaagataagatagaagggtaaatgtagtattattaaattattaaattttcgttttttttttgtttaaaaggtatttttttgttttttttttgatttttaaaatgtatattttatttgtttagtttttattttgagaaagaaggggtgattttatttttttttataataagataatattaataatatagtagtaatattagttaatatttgttgagtatttattatatgttaggtatttttttaagtagtatgaggggttaggggttaggattgagtattagaattgatataagttagtttttgaagtaatttaaatttaagaagttttttaaattagatttagaatgcgggttatgttttttttagtggtatgttggagttatggaggttttttagggttttgttttgggggaagggataaaggaagggttttattattgagagaattggaatttttgtttgggtaatgttattgtgtatatattttttgaattgggtagagttagggatagttgaattttattattgtttttgtaaggttggatttagattaattttatttgatttttttgaaggataaggatttgataattttatataagttttttgttgtttattgagaggtttgtaagtatatatgtgttagaaatttgggagatatttttaattttttttttttatttttgtttatatttaatttattttttaattgtaaataattttatttttaaaatatattttttatttgtttatttttttttatttttgatgttatttattttttattttaattattgtaaaaattttttaattgttttagtttttattttttttttataaagttattagagttgtttgaattattttttttttttttttttttaatattagattaggttattttttgtttaatatattttattgattttttattatatttaagataaaatttaattttttattaggatttataaggtttagtatgattttttttttgtttttttttagtatattttttgtttttttttgtttgtgtattagttatatataattgtttttagtttttttgaggtgttatattttttttaggttgtttttcgttgttgggatatttttttattaagtagtttttgtttggatagtttttatttattttgttttattttgatttttttgttttttgatttttataattttttaatttaaatgaggttttttatatttattttttagagtatttattatgttgtgtaattatgtatttatatagttatttgtttaattttagtttttttttagaagagttttttaggatacgaattttgattattttgttaattattaatattttttgtattttgtgtagggtttagtttatagttggtatttaataaatatttgttgaatgaaatgtataaaattttatttttttttgttcgataggaagaagaaatttagagtagttattttatgttatttattgtttttttttatcgatttataaattataattatattttttttttttatgtgttttgtttgtgggtataattaaaaatttttgtaaagtttttttgtggtttgttttttagaatttttttggtaaggttatttttttggggttgttttttagggttttatagttgtttttattattagtgtttatttataggtttttattattatcgggttattgttagattattgtgtaggaatggtttagtttttacgatgataaggtttttttaggttagtagttttaaggataaaatatttttttttttttttatggtgtaagatattgtgtttgtaaaaaaatatatttttattaaaaaaaaaagttttatgttttataatttggagatggttgtaaaaagtttagaaaaaaagggtttttttattaaaaagaattttgaatattatagtttggtggaaaaatgaaggtttaagtaatattaatagtagtgtgattatatttaacgtttttttttttggtttacgtttttatttaaatttgaaattttttggttttattttttgtttatattttttttgttattaattattcgattataggtataattatagtgtattgtttggttttttgaatattgtttgtatttttttttttttttttttatggtttatgttgttatttttatttgaatgttttttttttttttattaataaaattttattgtttttaaggtttaatttatttattattttttttgtaaaatattttttaattttttgatagaatttgtttgttttttttgtaaattaatagtagtttaaagatgtttttattatagcgttgatattattttattattgttatttgtatatttgttttttttatagatttgagtttttcgaggtgtatttattttagtattttatttaatgtatgtaataagtgtgtgtgagataaacgaattattgaaaagattttttaaataaataaatagaaatagttatttttttttttaaggtgagggaatttgagtggatggatttatattgtataagaaaatatatatatgtaaatcggattttggattaggttattagaggggtttatagtatttttttgtttttttaaagataattgaaattttgaatttgaaaatataggaatagagtaaatttttttaagttattttttattttgggattaaagaaatttaagtaaaatgggttgtttttttaatattattggttggattttagaatgtttaagagatggtagtttaattttaaatgtttttgggaagtttagtttttaatgtttttagattgggtttagtggtattttcgggggaggggatgt

SEQ ID NO: 259 - DNA, 5695 bp, Artificial Sequence
  chemically treated genomic DNA (Homo sapiens)
tatttggaaggtcgggtgtgatggtttatgtttgtaattttagaattttgggaggtttaggtgggtggattttttgaggttaggagtttaagattaatttggttaatatggtgaaattttatttttattaaaaatataaaaattagtcgggtatggtggcgggtatttataattttagttatttaggaggttgaggtaggagaatcgcgtgaatttaagaggcggaagttgtagtgagttaagatggcgttattgtattttagtttgggtaatagggtgagattttattttaaaaaaaaaaaaaaaaaaaaaaaaagaggtatttggaatggttttcggggtagtagtttaaatataagtgtttttaaattttaataattggtttagttttattaatgtttatagtttagtattagttttaaatataaagaaggttaagaagtgtttttcggggggagttatagtagaaataattatatataattataatacgaggttatataagaagagttatgtgaataacgagaaaaaagagagagagagaaattataggtggtttttagtagttttgtggagttttaggtttttttttttttttttgtggtaaaagaataaggaggatttttttttaatatattattattaataagattgattttaattttttggggatttagtgtatttttatattataagtagtgattacgtaaatttttaattttaatatggtgtttatttgtttatatattttttttttttatttaggattttttattttttatttttttttatttttttttattgtatggatgatatagttttttgtttatagttattattagaatttttttaatttaggaggtgatataaaggttttgaaatattttttagtgtaggaattttttttgtaggatttaggagttgtttttatttaatttatttatttatttatttttttttttttttttttttttttttttttttgattatatgtttgttttgtgttaggttttaggttaggttttgaagatatggaatttgttaattaggatatttaggtttatggggagagagttatgtattgtaagttttggttatgtgtttgtgattttattcggattttattgtgtgtgtattttgagtgttgttagtattatattattatttttttttttttttaaatttagaattagttttagtgttttttttttttttgttttttatatttaattagtgttagattttgttaattgtattttggttagttttattatgttttttttaagtttagtattgatggttttgttagtgttttaggtatattttaaagatttatgtaggagttttttagtttttttttttttttttatagggtttcgaaggttgagtgttgtttatttagtatgttttataaagttgtgtattatagttttattgtttatttattttttttattgttgttagcgttatttgttttatattaaattgtttagaaatttttaaatgttttgtttgtttatagagaggaaaaatttaatttgttttggttttaaaggtttttgtattagttagtttttatttttttttttaattttattttttattttttttttttttttttttaggtttatgttttagttaaattgggtaaataatttttgtagtttttgtagtttagaatatttttttgttttttttatttttataaatttaatttttatttatttttatagaattagtttatttatttttatttttaggaagttttttttgattgttgtatttggatttggtttttttttttttttaatgtatttttcgtgatttttgttttgttttattggcgtaatggttatttgtttttatattttttttttaaaaaggttattaggtttttgtttattttttttggttttttatttggtacgtggtagtagattaaatttataacgaatttttaatatttattgggtgaataaatgaatagtaagtattggtaatatattggttgttatatatatttttttagatttgttttttttttttttgtgttttaattggggtttttttagtttttaatttaattattttttttagatagtttttgtttttttttttttgtggtttttttttagttatattttgttgtaggcgagagaagtaggtttttggtttgatttttaatgatttttttttttttcgttttttaaatataggtttagaggaggaattcgaggagttgtgtgaataggttgtgtgagatgtttaggtttagttttaattaagagtgtgttttagatgtgtttgggttttatttggtatagagttttgtttttgggaaaggaaaggattatagtaaatattattttttttgtcgtattttttagaagtattggaagaggattggtgatggtggagggtgagagggtgtcgttttttgttttagttttagattttgtttgtagaaaatatttgtagtgtagtaaatttatgtttagttaggtaattagttgttgtttgtggcgtgtgtgggttggattttttgaaggttgagtttttgagggtagaaagttagttatgggtagttaggtgttataaaggtgttgttttttttttaatttttatttggttttttttattttaagttttatgtttatattagttagtgggtttagtagaacgtatgatattttattatttttttttttgggtgagttttgaatattagttttggtttttttatagtaaggttgttatattaggggtaattttggttttattattttttttttttgttaaaaggattagtagtataggtgagttttgagtattaaaaggaggggtttttgaagtttttttattatagtgtggagttttgtttttgaggtgggtatagtagttttggtttttttgggggttgagaataagaatagtggggagggaaaaatttttttttgaagattttttgttttagagttttagagaggtagaaaggaggaatttttgttggattttatttgggtagaggaaggatggaatgaaggtagaaaaggtagaattatagttgagcggggataataaagagtttttttttgggaaaagttttgttttagagtaaggatggaaaatggggataataaaggaaaagtaaagtgtgatttttgggtttggatagtttagaggtttagttttttagtataagttatataggttagggatttataggagagtggattagagtataagtttggttttattgagtggataagagttgatgggttttattagggtgatatttattttagggtagtttgattatttttggttttttaggtattattttatttggaatgtgaatgtggtggtaaagtgggtagaggattttatttgggaattttttttttttagttagtggggagattagtatttaggtatttatatgggtatttatatttgaattagatagacgtttgaattaggtattatgttaagaaatatatttatttgttaatatatttatttataaatgtggtttggttttgtggttttgttttgtcgtgattgttatttagggtaataacgttatttttttttatattaagagaagtaaattatttatgttattagaggttaggtttcgatttatgaaaggatagggtagagtagagggtttggtaataagaattggtttgtaagtttttaaaagtgtggtttagtgagattagggaaggagaaagtatgattggatttttattgtgttttagttattattattatattgtttattttatatattattatattttagtgatttagattttgggtaaatattttgtgtttcgtttttttagtttataaaatgggtttatttaatagttgttgtaggatttatatgagataatagagtgtagaaaatatgttttaaagtggaaagttttatttagtgatagaaaatatttaaatttgttatagagtttatttgaatatagtatgggatcgttaataagaagaaagttcgttcggaagtagtttaattaggaggttgggttggaatgatagcgtagcggggtttgaaattatttatattttaaagttttttttagataaatataaatgattgcgttttgtttgtattcgggttattgcgaggatagagagttggtgttttattggcgtgaagtttttagggttagaaggggtttttgtcgtttttttataaggtataagttttttttttgttttttcgagaaaggtttggtaggggtggtggtttagtgtttatagaataaggtatttcgttttttagacggtgaaatgaaagggaaaaaaaggatatttaattttttataaatggtttttagtaaaggaatcgtgtttaagcgttaagaattgcgtaaagtataaattattagtcggaacgagtaaatagacggagttttaaaagataaatacgtattttttttcgtcgtagtttttaggttagtatttttgtgggaagtaagtggaaattttatagcgttttcgtagttaggaaggaggggtggggttgtttttggattttttttcggtttttgtagagataatttagagggagatagtggatttattgtttttaatgtttttaaaacggggagataaaataaaaaaaaataaatttcgggttattatcggggaataggatcgacgtttagggttattagtttagattaaatagttcgcgtttcggcgttgcggtttagttcgatatattttcgcgtaagcgtagtcgttttttcgtttcgggggttcgttgattattttatatagttttcgtcgcgttttcggcgggtttaggtggttgcgacgcgtttcggtttaggtggcggtcggtcgtttagttttttcgtttgttggcgggagaaattattttttttggcgggggtaggggcggagttggcgttcgtttatatcggaagaggaagtttaagcgtcggaagtggtgggtattttgggtaacgagttatttattttttgcgggtgtataggttgtggtcgtttatttttttgttgttttttttatcggcgaagatggttttggagacggtgtcgaaggatttgcggtatttgcgggtttgtttgttgtgttcgttggttaaggtgttagtcggggatttggttgtagggtttatgggggattaaggtcggggaaagagggcggaatggggttgtgggatagtaaagagaaaagttaagttttagaatttagaggtggtagggggagtgagaagtcgaaggaggttatcgtttatttcgtaggatcgcggataggttttgtagttgagggtaggggcggttttatatgtttttgaatttttagtttttagacgttcggtgaatttacgttggagtcgaaagatattgggagttagaggcgggtggggattcgttgttgagtgagtagtcggaaaggatgtttgattttgagtagattagagaaaggaatagataaaacggaattgggaacgagagaggaaggagtgggagggtgggatttaggaatgaagttttgagagtagtaggtggggaattttaggatatatagttaatatagggaaataagaaattgagtaggtcgaagtattgagaaagttatttttttttttggttttgtttatgtttattttttttttttttttattttttttttatttttaga

SEQ ID NO: 260 - DNA, 5695 bp, Artificial Sequence
  chemically treated genomic DNA (Homo sapiens)
tttgggagtgaaagaaaaataaaggaaaaggagagataagtatgaataagattaagagaaaaagtagtttttttaatatttcgatttgtttaattttttgtttttttatgttgattgtgtattttaaggttttttatttattatttttaaagttttatttttaagttttatttttttatttttttttttttcgtttttaatttcgttttatttatttttttttttagtttatttagggttaggtatttttttcgattatttatttagtagcggatttttattcgtttttgatttttagtgtttttcggttttaacgtaagtttatcgaacgtttaagagttgaggatttaaaggtatgtaagatcgtttttgtttttagttgtaagatttgttcgcgattttacgaggtaaacgatggtttttttcggttttttattttttttgttatttttgagttttgagatttaatttttttttttattgttttatagttttatttcgtttttttttttcgattttggttttttatgggttttataattaggttttcgattgatattttgattagcgaatatagtaaataggttcgtagatgtcgtaggtttttcggtatcgtttttagggttattttcgtcgatgggaagaataatagggagatagacgattatagtttgtgtattcgtaggaagtaaatagttcgttatttagaatgtttattattttcggcgtttagattttttttttcggtgtgggcggacgttagtttcgtttttattttcgttagaggagatggtttttttcgttagtaggcggggaggttgggcggtcggtcgttatttgggtcggagcgcgtcgtagttatttgagttcgtcgagggcgcggcggaggttgtgtggggtagttagcgggttttcggggcgggggggcggttgcgtttgcgcgggagtgtgtcgggttgagtcgtagcgtcgagacgcgggttgtttgatttgggttggtggttttgggcgtcggttttgtttttcgatggtaattcgaagtttgtttttttttgttttgttttttcgttttagaagtattgggggtagtgaatttattgtttttttttggattgtttttgtagagatcgagaagaaatttagggatagttttattttttttttttaattgcgagagcgttatagggtttttatttgttttttataggaatgttggtttgggagttacggcggaaaaaaatgcgtatttattttttaaaatttcgtttgtttgttcgtttcggttgataatttatattttgcgtagtttttagcgtttagatacggtttttttattaaagattatttgtaggagattaggtgtttttttttttttttttattttatcgtttaggaagcgaaatgttttgttttataggtattaaattattatttttattaaatttttttcggggaagtagaaggggaatttgtgttttgtgaggaagcgataaaggttttttttggttttggagattttacgttaatggagtattagttttttgttttcgtaatagttcgagtgtaggtagaacgtagttatttgtgtttatttgagaggagttttgggatataaatagttttaggtttcgttgcgttgttattttagtttagttttttgattgagttgttttcgggcgggttttttttttgttggcggttttatgttgtgtttagatgggttttgtgataggtttggatgttttttattattgaataaaattttttattttggaatatattttttatattttattattttatgtaagttttgtaataattattaagtaggtttattttatggattgaaaaagcgaggtatagagtatttgtttaaggtttgagttattgaagtatgataatgtgtgaagtgaatagtataataataatgattgaagtatagtaagaatttagttatgttttttttttttttgattttattaagttatatttttaggggtttataaattagtttttattgttaagttttttattttattttatttttttatgaatcggagtttagtttttgataatataaataatttattttttttgatgtagaaagagatgacgttgttattttgagtgatagttacgatagaataaaattataagattagattatatttgtggataaatatattagtaaataaatatattttttaatatagtgtttgatttaagcgtttgtttggtttagatataaatatttatgtgggtatttaggtgttagtttttttattaattgagggaaaaaggtttttaggtggggttttttgtttattttgttattatatttatattttaaatgggataatgtttgaggggttaagagtggttaggttgttttggggtgaatgttattttgatgaggtttattagtttttgtttatttagtgaggttagatttgtgttttaatttatttttttgtgggtttttggtttgtatggtttatattggggagttgggtttttgggttgtttaaatttaagggttatattttgttttttttttgttgtttttattttttatttttgttttaagataaaattttttttagagaagaattttttgttgttttcgtttagttgtaattttgttttttttatttttattttattttttttttgtttagataaagtttagtagaaattttttttttttatttttttgggattttgagataggaaatttttaaggaggagtttttttttttttattatttttatttttaatttttagaggaattaaggttgttgtatttattttagggatagaattttatattatagtgggaaagttttagggatttttttttttagtgtttagggtttatttatgttattggtttttttggtaaaaaaggaaaatgatagagttagggttgtttttgatgtagtagttttattgtggaggggttaaagttggtgtttagagtttatttaaggagggaggtgataaggtgttatgcgttttgttgaatttattggttggtatgaatatgaggtttggggtgagggaaattaagtaggggttggagaaggagtagtatttttgtaatatttggttatttatagttagttttttgtttttaaaaatttagtttttaagggatttagtttatatacgttataggtagtagttggttgtttggttggatatggatttgttgtattgtagatgttttttgtagataaggtttggagttggagtaggaaacggtatttttttattttttattattattagtttttttttagtgtttttaggaagtacggtaaaaagaatggtgtttgttgtggttttttttttttttaggagtaggattttgtgttaggtagggtttaaatatatttggagtatatttttggttggagttaggtttgaatattttatatagtttgtttatatagtttttcgagttttttttttgagtttgtatttagagagcggggaggaaagaggttattgagggttaggttagggatttgtttttttcgtttgtagtagagtgtggttgagaggggattatagggagggagaagtagagattgtttggaaagggtggttagattgaaagttaagggggttttagttgggatataggggagagaaaaataaatttaaagaaatatatatagtaattagtgtgttattaatatttattatttatttatttatttaataaatattaaggattcgttgtgaatttggtttgttattacgtgttaaatagaagattaaaaagaataagtagggatttggtaatttttttggagagaaagtatgaaaataaatggttattacgttagtgggataggataggagttacgagagatgtattaaggaaggagagagattaggtttaagtgtagtaattaggaaaagttttttggaagtggggataaatgagttgattttgtaggaataggtaagaattagatttatgggaatagagaaggtaggagaatattttgggttataggaattataagaattgtttatttagtttggttaaagtatgggtttggggaagggagggaagagaatagaaaataaggttgagaaggaagatgggggttggttggtgtaggaatttttgaggttaaagtaggttggattttttttttttgtggataaatagaatatttgaagatttttggatagtttagtgtaaggtagatgacgttggtagtaatagggagggtaggtgagtagtggagttgtggtgtataattttatgggatatattggatgggtagtatttagttttcgaggttttgtaagagggaagggaagagttaggaggtttttgtatggatttttagggtatatttaagatattggtagggttattagtattggatttgaaaagaatatgataaagttagttaagatatagttaatagaatttggtattgattagatgtgaaaggtaagaaaaagagaggtattgaaattagttttgagtttgagagaaaagggagatagtggtgtggtattggtagtatttaaagtatatatataatagggttcgaatggaattataaatatatagttaaagtttgtagtatatggttttttttttatggatttggatgttttgattggtaagttttatgtttttagagtttagtttggaatttagtataaagtaggtatatagttagaaggaaaaaaaggaaggaaggagaaaggaaatgaataaatgaatgaattggatgagggtagtttttaggttttgtaggaagaatttttatattgaagaatattttaggatttttgtgttattttttgggttggaagggttttagtgatggttgtagataaagaattgtgttatttatataatgggggaagatggggaagagtagaaggtggaaggttttgaatggaaaagagagatatgtgggtaagtaaatattatgttaaagttgagaatttacgtgattattgtttatgatatagggatgtattgaatttttaagaaattaaggttagttttattaataatgatgtgttgaagggaagttttttttgtttttttattataggggaagagaagaaaatttaaggttttatagggttgttgggaattatttgtggttttttttttttttttttttttcgttgtttatatagttttttttatatagtttcgtattatggttatgtgtaattatttttattatagtttttttcgaggaatattttttagttttttttgtatttagaattaatattgagttgtgagtattggtagaattaaattagttattaaaatttagaaatatttatgtttgagttattatttcggggattattttaaatgtttttttttttttttttttttttttttttgagatggagttttattttgttatttaggttggagtgtagtggcgttattttggtttattgtaattttcgttttttaggtttacgcgatttttttgttttagttttttgagtagttgggattataagtgttcgttattatattcggttaatttttgtatttttagtagagatagggttttattatgttggttaggttggttttgaatttttggttttaagggatttatttatttaggttttttaaagttttgggattataggtatgagttattatattcggttttttaagtg

SEQ ID NO: 261 - DNA, 5283 bp, Artificial Sequence
  chemically treated genomic DNA (Homo sapiens)
ttttttattttagtttttagagtagttgggattatatatacgtgatattataaatagttaatggttaattttttttttttttttttgagatatagtgttgttttgttgttagttggagtgtagtggcgtgatttttgtttattgtaatttttgcgttttgggttgaagtaatttttttgttttagtttttcgagtagttgggattataggtatgtgttattatgtttagttaatttttgtatttttagtagagatagggttttattatgttggttaggatgttttcgattttttgatttcgtgatttatttgttttaattttttaaagtgttgggattataggcgtgagttatcgtgttcgatttttttttttttttttttttttttgtagatatggggtgtcgttgtgttgtttaggttggttttggatatttgggtttaagtgatttttttgttttggttttttaaagagttgggattataggtatgagttattgtgtttagttgagtgtttttttttagtttgtatataagtatagtatgggatagtgttaggttttacggttgggattatttagagttttatttatagatgaggaaattgaggtttagagaattgaaggggtttgttttaggatatagataagaaattttgggagtggggatttggatttatgtttttatttatagatattaggttattttgtttttattgtgtgttttgttgagattttaggttgttttaggttggagttgtttgtgattgggtttgaggagggattatttatgggaattgttgtgttttagttatagtatttgttggattttttggggtttcggttgtgggtggttagttagggtttttgtttgttttgtgaaggatatttttagagatttgttttttttttggagttattatagggagtttgtgtttggtattttattatagtttgagttttggaggatatgggtttttaggtatatttagagaggttgggtagagagagggagggaatagtttttagttttaattgttaaattttaagtttttttttttttttaggttagaggattttatttggagttttagtagttaaggggaagagttaagaaggaggaaagtaaggtgcgatttgaagtttttgattttttgggtagggagttggataaattgttttatttgtttttatttttatttttttttagatatttttttttttttttttaggaagggatagagaagtgtataggtattttttaattttatttttatattttgagaatagggagggttttgtggtttatatttttatatttttggttataaaaaattattatttgaagaatttttttttttttttttttttgtttttgaggtagagttttattttgttgtttaggttagagtgtagtggtatggttttagttcgttgtaatttttattttttgggtttaagtaatttttttgttttagttttttgagtaattgggattataggtacgcgttattatatttgattaatttttgtatttttagtagagatggggttttataatgttggttacgttggtttcgaacgtttgattttgtgatttgtttattttagttttttaaattgttgggattataggcgtgagttatcgtgtttagtttattatttggagaatttttaagtaatattgatggttagattttagtttagataatttgataattggtttttggtgaagtttgagtatttatattatttttattattatttagagatagggttttattatgttgtataggttgtaatttggtatttgtttatatatttttttgagatagggttttattttgttatttaggttggagtgtagtggtatgattaaaatttattgtaggttcgattttttaggtttaagtgatttttttattttagttttttaagtagttagcgttataggcgtatgttattatatttagttaatttttgtattttttgtagagatggggttattttttattgtttaggttaattttgaatttttggtttaagcgatattttttttttggttttttaaagtgttgggattataggtatgagttattatatttgatattttttttttttttttgagatagagtttttttttgttatttaggttggagtgtatcggttggtggattggatggttatatttttattattttaaagtattttttttttttttttttagttaatttttatttttttttttagttttagatatttattaatttgtattgtttgtataggttggttttgtttgttttggagttttatatgaatggaattatgttggatattttttgatgtttggttttttttatttagtataatgttttggagatttagttatgggtgtattggtagttgttattattttgttgtatggatggatgtattaaaatttgttttttttttgagacgagttttattttgttgtttaggttggagtgtagtggtgcgatttttgtttattgtaatttttatttttttggtttaagtgatttttttgttttagttttttaagtagttgggattataggcgtgcgttattatatttggttattttttttttttttttttttgtatttttagtagagatggggttttattatattggttaggttggttttgaatttttgatttcgtgattcgtttgttttggttttttaaagtgttgggattataggcgtgagttattgcgttcggttttaatttttgtgtttttagtttagggttattatgtaattttttttttttaaaatatttttaagtattttgatgtgttattagagttgagtttagaattacggatttattaaggaagaaatttttatggttggggaaatgattgtgtttttttttttttgtagggaatggttttttgtagtagtgtttgtagcgatttaatatgtagaattttatttttttgttgtttttttttttgagacggagttttgtttttttgttatagtaatttttattttttaagtttaagagatttttttgttatagtttttcgagtagttgggattacgggtgtgcgttattacgttatttggttaatttttgtattttttagtagagatagggttttattatgttggttaggttggttttgaatttttgattttaggtgattcgtttgttttggttttttaaagtgttgggattataggcgtgagttatcgcgttcggtggagaattttttttttttttgagatggagtttagttttgttgtttaggttggagtgtagtagtacgatttcggtttattgtaagttcggtttttcgggtttacgttatttttttgttttagttttacgtgtagttgggattataggcgttcgttattacgtttagttaatttttttttgtatttttagtagagatggggttttatcgtgttagttaggatggtttcggttttttgatttcgtgatttattcgtttcggttttttaaagtgttgggattatagacgtgagttatcgcgttcggtttaggtgtgttatatttatgtgagaaattttattaatgtgttttgaggttttttttttttttttttttttttgagattgagttttattttcgtttaggttggagtgtagtggcgcgatttcggtttattgtaagtttcgttttttgggtttacgttatttttttgttttagtttttcgagtagttagaattataggtatatgttattacgttcggttaatttttttgtatttttagtagagacggggttttattatgttggttagattggtttcgaatttttgattttaggtaatttgttcgtttcggttttttaatgtgttgggattataggtatgagttatcgcgattgatatagatttttgatttttaaaattttttttattaggttaattttttaatttttaaaaatttaagttttaatttttttttttttttttttttagagatagggtttttattatttagtttggagtgtagtggtgtaattatagtttattgaagttttaatatgggtttaagtgatttttttattttagtttttggagtagtagggattataggtatacgttattatattatattaaaaaaaatataaaaattggatatatggggttttaatttgttgtttatgttagttttaaatatttggttttaggtgattttttcgttttagttttttaaagcgttgggattataggcgaaggtttattttttatttttttattatatttgtttattttgttattattcgttagtcgttattattaatagataaattcgtttttaaatgaatttaggaagtttggaaagaaaaatagggatttgggtcgggcgcggtaggttatgtttgtgattttagtattttggtaggacgaggtcggaggatggttttttagtttgagttagaggagtttgagattaggtcgggtaatagttcgattttattaaaaaaaaaaaaaaagtataaaaagaaagaaaaagaaggaaaaattagggttttacggttatttagatttggcgaggaggtttgggtttgtcgttttttattgagtttttttgagttttagcgttttttttaaaacggggatacggattttttggggatgttttagagggtttaggagataaagttttgttttttttataatttgttattcgttgatttcgtcgttttttcgtagtttggtttatcgcgttagtgtttcggattaacgaataaacggtttattaaatttaaatatgagttttagtttggtcgtcgagtcggcgggtagaaaaaatttttttttttttaatttttcgtagatgtcggtttcgtatttcgtttaggttagttttgttttttttaagatggcgatttggaagtgcgtcgttcgtgttagtttcggaaatttcgtgttaggcgaggttaacgggtaggttttcgcgagaggattcgttagttttagttaggcgtcgtgcgaatagtagttggtatcgaaggcggaggtggagttcgagaggtaagtgcgtgtgtagaggtggtagtttcgggcgtcggggaggtgtagagaatagattcggaaattggggaggtttagtatgtggcgtaggagggggtttttatttcgtttcgcgattgttaaaacgagtttgtcggaagcgttttaaggggttttttttttttagggaattagcggggaaattgaggttcggggtggagcgtaggattgtgggacgcgttaaggttgttgttttttttagtagt

SEQ ID NO: 262 - DNA, 5283 bp, Artificial Sequence
  chemically treated genomic DNA (Homo sapiens)
gttgttgggaaagatagtagttttggcgcgttttataattttgcgttttatttcgagttttagttttttcgttggttttttgggagaagaaaattttttagggcgttttcggtaggttcgttttggtaatcgcgaagcggagtgaggatttttttttacgttatatgttagatttttttagttttcgaatttgttttttatattttttcggcgttcggaattgttatttttgtatacgtatttatttttcgggttttattttcgttttcggtattagttgttgttcgtacgacgtttgattggggttgacgggttttttcgcgagaatttattcgttgatttcgtttaatacgagattttcggggttggtacgggcgacgtatttttaggtcgttattttgagagaggtagggttggtttgggcggagtgcggggtcgatatttgcggagggttaggaggggaaaggttttttttattcgtcggttcggcgattaggttgaaatttatgtttgaatttagtgagtcgtttgttcgttagttcggaatattagcgcggtaggttaagttgcgaggaggcggcgaaattagcgaatagtaaattataaaagaaataaggttttattttttaggttttttaaagtatttttaggagattcgtattttcgttttggagagaacgttgaagtttagaaaaatttagtggaaagcggtagatttaagttttttcgttaagtttgagtgatcgtgaagttttggtttttttttttttttttttttttttgtattttttttttttttttggtagagtcgggttgttgttcggtttggttttaaatttttttaatttaaattaaaaagttatttttcggtttcgttttgttaaagtgttgagattataggtataatttgtcgcgttcggtttaagtttttatttttttttttaggttttttaagtttatttaaaggcgaatttatttattagtaatgacggttgacgagtgatggtagagtggataggtgtaatggagagatgaaaaatgaattttcgtttgtaattttagcgttttgggaggttgaggcgggaggattatttgaggttaggtatttgagattagtatgggtaataaattgagattttatgtatttaatttttgtgttttttttaatgtggtgtggtggcgtgtgtttgtggtttttgttattttaaaggttaaggtgggaggattatttgaatttatgttgaggttttagtgagttatgattgtattattgtattttagattgggtaatagagattttgtttttaaaaaaaaaaaaaaaaaaaaattaaaatttaaatttttaaaaattgaaaaattaatttgataggggaaattttaaaaattagaagtttatgttagtcgcggtggtttatgtttgtaattttaatatattgggaggtcggggcgggtagattgtttgaggttaggagttcgaaattagtttggttaatatggtgaaatttcgtttttattaaaaatataaaaaaattagtcgggcgtggtggtatgtgtttgtgattttagttattcgggaggttgaggtaggagaatggcgtgaatttaggaggcggagtttgtagtgagtcgagatcgcgttattgtattttagtttgggcgagagtgagatttagttttaaaaaaaaaaaaaaaaaaaagaagttttaggatatattggtaaaattttttatataagtatgatatatttgggtcgggcgcggtggtttacgtttgtaattttagtattttgggaggtcgaggcgggtggattacgaggttaggagatcgagattattttggttaatacggtgaaattttatttttattaaaaatataaaaaaaaattagttgggcgtggtggcgggcgtttgtagttttagttatacgtaaggttgaggtaggagaatggcgtgaattcgggaggtcgagtttgtagtgagtcgagatcgtgttattgtattttagtttgggtaatagagttagattttattttaaaaaaagaaaggattttttatcgggcgcggtggtttacgtttgtaattttagtattttgggaggttaaggtaggcggattatttgaggttaggagtttaagattagtttggttaatatggtaaaattttgtttttattaaaaaatataaaaattagttaggtggcgtagtggcgtatattcgtaattttagttattcgggaggttgtggtaggagaattttttgaatttgagaggtggaggttgttgtgataaaagagtaagatttcgttttaaaaaaaaaaataataagaaaataggattttatatattaaatcgttatagatattgttgtagaaagttattttttgtagaaaaaagagggtatagttatttttttagttatggaagttttttttttggtggattcgtggttttgaatttaattttggtagtatattagaatatttgagaatattttagaaagaaagagttgtataatagttttaaattggaaatataaaaattagggtcgggcgtagtgatttacgtttgtaattttagtattttggaaggttaaggtaggcggattacgaagttaggagtttaagattagtttggttaatatggtgaaattttatttttattaaaaatataaaaaaaaaaaaaaaaaaaatagttaggtgtggtggcgtacgtttgtaattttagttatttgggaggttgaggtaggagaattatttgaattagggaggtgaaggttgtagtgagtagagatcgtattattgtattttagtttgggtaatagagtgagattcgttttaaaagaaaaataaattttggtatatttatttatgtaatagaatagtaataattattaatatatttatgattgaatttttaaaatattatgttgagtgaaagaagttagatattaggagatgtttagtatgattttatttatatgaaattttagagtaagtaaaattaatttatatagataatgtagattagtggatgtttggggttggagagggaggtggaaattgattgggaagagagagaaggaatgttttggggtgatggaaatgtggttatttagtttattagtcggtgtattttagtttgggtgataaagggagattttgttttaaaaaaaaaaaaaaaatgttaggtgtggtggtttatgtttataattttagtattttgggaggttaaggggggagtatcgtttgagttaggagtttaagattagtttgggtaataaagggtaattttatttttataaaaaatataaaaattagttgagtgtggtggtatgcgtttatagcgttagttatttgggggattgaggtgggagagttatttgagtttgaaagatcgagtttgtaatgagttttgattatgttattgtattttagtttgggtgatagagtgagattttgttttaaaaaaatatatgggtagatgttaagttatagtttgtgtagtatagtgaaattttgtttttaaataataataaaaataatatagatgtttaggttttattagagattaattattaaattatttgggttggggtttggttattagtattatttgaaagttttttaagtggtgggttgggtacggtggtttacgtttgtaattttagtagtttgggaggttgaggtgggtagattataaggttaggcgttcgagattagcgtgattaatattgtgaaattttatttttattaaaaatataaaaattagttaggtgtagtggcgcgtgtttgtaattttagttatttaggaggttgaggtaggagaattatttgaatttaggaggtggaggttgtagcgagttgagattatgttattgtattttagtttgggtaatagagtgagattttgttttaaaaatagaaaagaaaagaaaagaaagttttttaagtggtaattttttgtagttagggatgtagggatgtgaattataggattttttttgtttttaaggtatagggatgaggttagagaatatttgtgtatttttttgtttttttttggaagaagagagaagagtatttaaaggagggtgagaatgggggtaggtggggtaatttatttaattttttgtttaagaggttagagattttagatcgtattttattttttttttttttaatttttttttttggttattagggttttaggtggggttttttggtttagagggaagaaaaggtttagggtttggtagttggagttgaagattattttttttttttttttatttagtttttttgggtgtatttgggagtttatgttttttaaagtttaggttgtggtagggtgttaagtataagttttttgtagtaattttaagagggggataggtttttggggatgttttttataggataggtaagggttttggttggttatttatagtcgggattttaggagatttagtaggtattgtagttggaatatagtagtttttatagatggtttttttttaaatttaattatagatagttttaatttggagtagtttagagttttagtaggatatatagtagggataaagtgatttggtatttatgggtaagggtatgagtttaagtttttatttttaagattttttatttgtgttttggaataaatttttttagttttttgggttttagtttttttatttgtaaatagggttttggataattttaatcgtaaggtttgatattattttatgttgtatttatgtgtaagttagaaaaagatatttagttgggtatagtggtttatgtttgtaattttagttttttgagaggttaaggtaggaagattatttgagtttaggtgtttaaaattagtttgggtaatatagcgatattttatatttataaaaaaaaaaaaaaaaaaaaaaaggtcgggtacggtggtttacgtttgtaattttagtattttgggaggttgaggtaggtggattacgaggttaagagatcgagaatattttggttaatatggtgaaattttgtttttattaaaaatataaaaattagttgggtatggtggtatatgtttgtagttttagttattcgggaggttgaggtagaagaattgttttaatttaggacgtagaggttgtagtgagtagagattacgttattgtattttagttggtaatagagtaatattgtgttttaaaaaaaaaaaaaaaaaattagttattagttatttgtggtgttacgtgtatgtggttttagttattttggaggttgaggtgggagg

SEQ ID NO: 263 - DNA, 10595 bp, Artificial Sequence
  chemically treated genomic DNA (Homo sapiens)
tttttttttgatatagatttttattttgttgtttaggttggagtgtaatggtgtgattttaatttatcgtaatttttgttttttaggtttaggcgattttcgtgttttagttttttgagtagttgggattataggtatatattattacgtttggttaatttttgtatttttagtagagacgaggttttattatgttggttaggttggttttgaatttttgattttaagtgatttatttttttcggttttttaaattgttgagattataggggtgagtcgatgtgtttagttcgaaagtagtatttttaatttttaaaaggaagtttaaagttatattgttagtttgaggtaggagttagtttagtttcgtattttattatttagaaagttaggggggtgaaggtaggtagagttagggtgtttaggttaggagaagttttgggataggaaaggtagtgagaaaatttgatggtagtgtcgttagtttcgtggttggatgtcgttttattttgaggttgttagtttataagttttagtttttttttttttttttatagtttttgggaaattggatttttggttggttttttttttggttggtatgtgtagaatattagagagatatttttaattgggaaattttttttattgattgtaattatataaaattaatttattttttgacgttttttttttttttttttaattatgggtatttttatttttagttgtttacgggttttttttttttttttattgtgtttttacgatatttttagagttgttgggagagaggtttaaaggtttagtgttttgagttaggagtagtagttgtgttttggtgtttcgttaggatcgtagatagttgtatacggtattttttcggatggtgtattaatttttaatggtagtagtaatgtaggaatgtattagtagtgtaaaaaattaaaatgttattgataaggatagagttttttttaatttttatttttttaatttgagaggtaatttttgttattagtttgatattaatttttttagatttttttttttttatttattagtattttttttttttttttattattttttattttaggggtgaaattatatatatttttaagtaagtaaatttacgttgtgtgtgaattattgtaatttttttttttaatttaataatgtattttttagatttttttaggttatttatatggatgtgttatatttttttattgagtaaaatattttttgaatataattgtacgaaaataaaattataaaatatatttataaaatgagttttatttttgtaattatttttagatgaggaaattaaggaatagggagattaaatgatttgtttaaggttatatagttaataagtagagaagttaagggtttgggggaaggaggattagggaattagcgtttaatgagtatagaaatttagatggaaaagaaaaagtttaagagatggatggtggtgatggttgtataaaaatgtggatgtattttatgttatagaagtgtgtatttaaaaaatagttatagtgggaaatttatgttatgtgtattttattataataagaaaatggttaaaaaaattttttttttttttttttgagattgagttttttttgtcgtttaggttggagtgtagtggtgtaattttagtttattgtaatttttattttttgagttttagcgatttttttgttttagttatttaaatagttgagattgtaggtattcgttattatatttagttaatttttgtatttttggtagagatggggtttcgttatgttggttaggttggttttaaatttttgattttaagtgatttgtttgttttagttttttaaagttttgggatgataggagtgagttattgtttttggttttggataaaattttagtgtatttttggtgttatttttattattgttttgagttttttggttgatttgttgagttgattagagttttattataaatttaggaagttgtattttgttttatgttagtttcggaagtttggttgatgagagtttgttagaaagatagagtttttttttataagttggtgagtttgtttgtgaagttgaggttagggattgtagagaatttatcgttatgatgttaggttttggcgatagtgtattttttttttattattattattagtattggattttttttggttttttttaggttgaattttaattttatgttgtttcgaaagtgaaggatgatattaggatttgagtgtttgttaggtgttagatttacgttatgtattttatatatacgagtttatttagtttttattatgtttttttatttttattaatggggaaattatgttttagagaagttaaataatttgtttaaggttatttatatgggaaatagtagagataggtttgtaaaataggagtttataattttagagtttgtgttttcgaatattgtgttttttgattttaggaaggatattgggtttttttgtgtggttttatttgggtttgtttttaagtttttgtagaaggatatgtttttgttcggaggttttttgtgtgggtattggtagaggttgtaaattgtttttttttatttgtagaatagatagttttgttttagttttatgtaaaggtttagttttatttatttattgttagttttaggtcgaggttttatgatttattggagttttggggagtttaagagtttagtttagtgtttagtttttatttttaagttttattttttggttaagttagtttattaaaaaaattatgtaaaaaatatataatattgatttttttgtgttttagttttttaattaaaaatttttatttattatatataaagttaagtttgggtgattttttgtttttatatatagaaatatatatatatatatatatatatatatatatatatatatacgtttagagatggggttttgttatattgtttaggttggttttaaatttttggatttaagtgatttttttattttggttttttacggtgttaggattatagatatgagttattgtatttggtttgtttgttgtgtgtgtttttgtttttgtttttgtttttaatagagatggagtttttgttgtttaaattggagtgtagtggtgtgattatagttttttggaattttaattttttgggtttaagtgatttttttattttatattttttagtagttgggattataggtatgtgttattatgtttggttatagttttttttttttttttttttgagatagagtttcgttttgttattaggttggagtgtagtggtacgattttagtttattgtaagtttcgttttttgggtttacgttatttttttgttttagttttttaagtgttgggattataggtatttgttattacgtcgggttaatttttttgtatttttagtagagacggggttttattatgttagttaggatgatttttattttttgatttcgtgatttattcgttttggttttttaaagtgttaggattataggtatgagttatcgttttcggtttgtttgtttgttttttaagatatagggttttattatgttgtttaggttggttttgaatttttggttttaagtaatttttttatgtcgattttttaaagtgttaggattatagagatgagttattatatttggataattttgggtgtttttattttagaattataggaaagattttgtaataaatgtttttatatttatgaattatttattaaatgataaattatgatgttttttaatgttagttaaagtggttatgtgattaattgtttttgagatattaatattagaaaagaaatgtattttttgttaggtatagtggtttacgtttgtaattttagtattatgagaggttgaggtaggtgaattatttgaggttaggagtttaagattagtttggttaatatggtgaaattttatttttattaaaaatataaaaattagttagttgtggtggtatatatttgtaatttaagttattcgggagattgaggtaggggaattatttgaattcgggaggtagaggttgtagtgagttggagattatattagtgtattttagtttgagtaataggagtgtgtgaatttaatatgttgtagttttatatgagaatacggtatttaataaatgtaatggaacgaaattatggttggggtatagagtacgtatttttgttatgtggttataattatgtggttatagttgttaggatgatgtacgtaaattgtttatattaaagtaaaagtatttacgtaatataaggggtttaatagtgtaataatattttttagtaatatttttgaggggtatattaagttattatcgttaacgttattatattaggaaatgacggttaataatgtaagaaatttttgggaaatgttatttagtgtttgagttcgtaagatatattcgtattttgagtattcgtagttgttgttttattatttatttttttattgtttatttacgtgtttttggatatttgtttattaaagtattagtttgtattacgtgatacgattagtaggtttttttcgtttatgtatgatattttaaagatgtttgattatttttttttttttagggaaaggtggttttaattattaataaaatagagaaagagaacgagaattatttttagtggttttgtttgttaattttttttttttttgaaagaatatttttacggtacggcgttttttttaacggttaggcgttttttcgggtagtttatttgttcggtttgggtttttttggatagtaggcgttggaggtgcgcgttattgttcgtcgtcgtgttcgcggttgcgttagatagtgtagaatttgcggtttcgatgtttttttttcgtgttttattgtgggttcggttttcggcgggcgttaggttggttatcgggtagttatttgttttgtttttcgtttttattttgggttttttttcggggttttggggtaagtttttgtttttgttatcgtttttttttttgttttcggtggttttaaaatattaaatacgtttttgttcgtgtttttgattgtgaaattttagggttttagcgtcgacggcgacgtcggggtcgagttaattcggtttttggataagagtgagtgcgggaattattgagggcggtagagggtggtgtttgttgggtcgaggttggttgggaggaagttatattttttttttttggggattcgaggttttatcgagtgttgttatcgtgttttttagtgtttgtttttttcgttggtgtgtgagttttttaaacggtttaggattgtatttgattaatttttaacgtttcgttttagaagcggtttttttttttttattgttttgttttttgaatggtttagatatttatgtgttgggaagatttgatttttttgagttgttaggtggacgttcgtttttttttgtattttttgttttttttttattttcgaatgggatgtggtagtgaaaagttagcggagattttttttaggattttttattattgaggaggcgtcgatttatattacgttgttaggttgtgtggtggttgttaagaggaattagatttagatttagatttttttttaagaaacgtaacggtatcgtgggggaggatacgtgtatggaaagtgaattgtaatataaggtagaatatgataaggtttagaataaggtagggtgttttcggttttagagagaaaagaagaggtagtattagttagtggtagcgggttttgtttagtaaaatttaagtttggatggattcgttgatagagaggtatgtgaatgtttttaaggtgagtttcgggatgattagggaggtaagggagttttttttgattatatgaaattgggagattgaggaaatgttatttagaattgtttttaggaataggaggagaaatgttttattttaataagcgatattggtgttttttattgtaaatttaaaatatagattataatatgttttttagagtagaagtatagtatttttattaaatatgtgatggaatttatagtatatgttattttttgatatatttttttagtgttaagtaaggttttttattttatttggtgttgggagattgtttttattttttgttgttataatataatatttgagattgagtaatttataaataatagaggtgtatttgatttatggttttgagtcgggatttgatgagggtttttggttgtattattatatggtggaaggtggaaaggtaaatgagtttgtgagatagagaaagggggttgaatttattttttttttttgtgataattgatttttgtgataatggtattaatttatttataaaggtaaattttttatgttttaattattttttaaaggttttattttttaattgttaaaatagtaattaaattttaatatgagttttggagaagatatttaaattatagtagagaatgtgttattttaataatgtaattatattattatttatttttaaattataaaaatatataaaatttatttttttaagtttttttttagtttttttttttttatttttttttttttagagatagggttttgttttgttatttaagttggagtatagtggtatgattatagtttattgtaatttttaatttttagatttaagtaatttttttggtttagttttttaagtagttaggaatataggcgtgtattattatgtttggataattttttaattttttgtagagatggggttttgttatgttgtttaggttggttttaaatttttgggttttagggatttttttgttatggttttttaaagttttgagattatagatttgagttattgtatttagttagttttaattgtttttaagtatatagtttattagcgttaagtatattgatattgtcgcgaaatagatgagaatttttttattttgtagagttgaaatttaaataatagtttatttattaaagaataattttttattattttatattatttgaaggtataaggtaatttggatgagataatttgttttattgtatttaaatattgataaatttttattttttgtagttattttaatttatttgaaaatgtaaatgtttttgttgttttttgtaagaagatagaataaagatatgggtttgttagtattagatttttttttggtggagaatttttagatattttattgggtttgtgtgttaggtgattttttattttttttgattgggattggtttagatgttgaatttattagaatgattttttagtatggtaggaggggttatagaagatggtgtattattatattttgatatagttatgtggttaaggtgttagatttttatttagtttagtaattaggataagaagttgttattttttaattttttttgtttatttataatttaaaaagttgaggtatttaaaggttttgttttgcgttattttgttgttttattttgtgttgtttatggggtgttttattttttttttttttttattaatttagtattttttttagatttttgtttttattttggattttttttttttattttggatttatatatttcgttgtttattaggtgtttttatttgttttttttatatatattttattttagtatgttaagataatttattttttttttagtttgtttttgtaggtgtttaggttaaaatttggtagtttttgtttttttattttttatttttatatttaataattagagaaagtttagttaatgagttttgttgattttattttataaatgttggatttatttattttttttattttttattgtaattagtttagtttaaattgttagtttttattttttgattggattgtatatatagttttttatgtgtttttttatatgtttttgatttttttattttattttttatttgtagttagaatgtttttttaaaaagattaggttgggcgtagtgtttcgtgtttgtaattttagtattttgggaggtttaggagggtggatcgtttgagtttaggagtttaagacgagtttgggtaatatggtaaaattttatttttataaaaaatatagaaattagttaggtatgatggtgtgtgtttgtagttttagttatttgggaggttgaggtgggagggttgtttgagtttgggtagtagtagaggttgtagtgagtcgagattgtattattatattttagtttgggtgataagagtgagattttgttttaaataaaaaaagaaagatataattttaatttatatattagaaagtttattttttaaaagtgtataatttattgggttttagtgtatttgtaggattgtataattattattataattttattttagaatatttttattattttaaaaagaaatttgatatttgttagtaagttattttttagttttttagtttttagtgttttttttttttttttagttttagataattattaatttatattttgtttgttgatttgtttgttttgtgtattttatatttatagtgttatatagtattggttttttgtaattggttttttttatttagtataatgagaaattttatattttggaagtattttaatttgagtaaagtagtatgaattttatataatatcgtagtattagttatagaaaataggttaattttaaataaatgtgatttgtttttagtttgtatcgagtttataggttagtagaatttttttaagtaatgatggtatgtgtttttttttaattttttatttgttattggtttttttatttttgatattaagaaattgttggttaggtgtagtggtttacgtttgtaattttagtattttgggaggttgaggttggtagattatttgaggttaggagttcgagatcggtttgattaatatggagaaattttgtttttattaaaaatataaaattagtcgggtatggtgtatggtgatgtatgtttgtaattttagttatttgggaggttgaggtaggagaattttttgagttcgaaaggcggaggttgtagtgagttgagatcgcgttattgttttttagtttgggtaataagagtgaaatattgtttttaagaaaaaaagaaattgttgtttttattcggtataaagtaatagagatttagaaatttgtttgtgatttgaaatataaatatatatatatatatatatatatatatatatatatattgtgtgtgtatgtgtattttatatttaattgtgggtagatttagtgattttgaaatttttttattttgttaaatagttttattagtggaatgttttgtttaggtttgatttttttaatgagtgttgtgtgtgttggattgtgtgaaaatgtggttggtatatttgtgaaaggtaaaaatataggttatttggtttttttgaattttatgggtaaaggttgtgtttttattgtggtttttttttttagaaatatatagtgtgtgattgagttagtaaaatgtttattgaataatgttgtagtattttaatatatataattataatataattttagtttgattagtttaaaatatttttatttttaagattattgatttatagtggtatgttattttttaatagtatagatatttttttgtcgttatttttgatagttatttaatttttgtttgagtaattttattggtaaggagtttttattttttattgttttaattgttaggaagtttttgtataaattttattgaaatttgtttttattgattttagttatgttatttagtataaaataagtgtaattttttatttttgaaattattatttttaaatttaatattagcgtggtttttttaagtatgaggatttggtttttgttatattggttgtttttttggatgtgttttagttgtttattgtttggatgtgtagaatcgttataagtgaatgatagtgtggttttttatttataagtggtttggtgaaggtttgaggttgttttttattttagagtgtattgtttatttttttatggtataatagggtgttgtattatttgattcgattatttttttttttttttttttttttgagacggagattcgttttgttttttaggttggagtgtagtgggtttatttcggtttattgtaagtttcgtttttcgggtttatgttatttttttgttttagttttttgggtagttgggattataggcgtttaataataggtttagttaatttttgtatttttagtagagacggggttttattatgttagttaggatggtttttattttttgatttcgtgattcgtttattttagttttttaaagtgttgggattataggcgtgagttatcgtgttcggttaattcgattattttttttaatatttttatcgtatatgaatttataaagaaggatcgattaaaattttttagtttttgtaatatttattagattgttgtttttagtgttattgttttaagttttttttgtttttttttagtatttatttaagataaggaaacgttaaattttgatattttttttttaga

SEQ ID NO: 264 - DNA, 10595 bp, Artificial Sequence
  chemically treated genomic DNA (Homo sapiens)
tttagaagagagatgttaaaatttaacgtttttttattttagataaatgttgaaaaaaagtaaaagaaatttgaagtaataatattaaaggtagtagtttaatgagtgttgtaagaattagaaggttttagtcgatttttttttatgaatttatatgcgatgggagtgttaagaaaaatgatcgagttggtcgggtacggtggtttacgtttgtaattttagtattttgggaggttgaggtgggcggattacgaggttaggagatagagattattttggttaatatggtgaaatttcgtttttattaaaaatataaaaattagttgggtttgttattgggcgtttgtagttttagttatttaggaggttgaggtaggagaatggtatgaattcgggaggcggagtttgtagtgagtcgagatgggtttattgtattttagtttaggagatagagcgagttttcgttttaaaaaaaaaaaaaaagagaaaaatgatcgagttaaataatgtagtattttgttatattatagaggaatgagtaatgtattttgggatgagaggtagttttaagtttttattaggttatttataggtagagagttatattgttatttatttataacgattttgtatatttaaatagtgagtagttaaaatatatttagaaagataattaatatagtaaggattagatttttatgtttaaggaagttacgttgatgttaagtttgaggatgatgattttagggataaaagattatatttgttttgtgttagatggtataattaaagttagtgggagtagattttagtggaatttatataagaattttttaataattagaatagtgaaaagtgagagttttttgttaatggaattatttaagtaagggttagatgattgttaagggtgacggtagagaaatgtttatgttattgggagataatatgttattatgaattaataattttagaggtaaaagtattttaaattaattaagttgagattgtattatggttgtatatgttaaaatattatagtattatttaataaatattttattgatttagttatatattatgtatttttaggaggagaagttataatgaggatatagtttttatttatgaaatttagaaaggttaagtgatttgtatttttattttttataaatgtgttaattatatttttatatagtttaatatatataatatttattgaagaaattaagtttgaataaagtattttattaataaaattgtttgatagaatgaggaaattttagaattattagatttgtttataattaaatatgagatatatatatatatatagtgtgtgtgtgtgtgtgtgtgtgtgtgtgtgtgtgtatttatattttagattataggtagatttttgggtttttgttattttgtgtcgggtaggaataatagttttttttttttttggagatagtgttttatttttgttgtttaggttggagggtaatggcgcgattttagtttattgtaattttcgtttttcgggtttaagagatttttttgttttagttttttaagtagttgggattataggtatgtattattatgtattatgttcgattaattttgtatttttagtagagatagggtttttttatgttggttaggtcggtttcgaatttttgattttaggtgatttgttagttttagttttttaaagtgttgggattataggcgtgagttattgtatttggttaatagttttttggtattaagggtagaaaaattaatgataaataaaagattggaaaaaggtatatgttattattgtttgggaaaattttgttgatttataaattcgatataaattaaagatagattatatttatttagaattaatttattttttgtgattaatattacggtgttatataagatttatgttgttttatttaaattaaaatgtttttaaaatgtgaaattttttattatgttaagtaaaagaaattagttataaaagattaatattatatgatattataaatatgaaatatataaaataggtaaattaatagatagaatgtggattagtggttatttggagttaaaaaaaaaaaaaagatattggggattggggaattagagagtgatttgttaatagatattaggtttttttttagggtgataaaaatgttttaaaatgaaattatggtgatgattgtataattttgtaaatatattaaaatttagtgaattatatatttttaaagggtgagttttttagtatgtaaattaaaattgtatttttttttttttatttgagatagggttttatttttgttatttaggttggagtgtggtggtgtaatttcggtttattgtaatttttattattatttaagtttaagtaatttttttattttagttttttaagtagttggaattataggtatatattattatgtttggttaatttttgtattttttgtagagatggagttttgttatgttgtttaagttcgttttgagtttttgggtttaagcgatttatttttttgggttttttaaagtgttgggattgtaggtacgagatattgcgtttagtttagtttttttaaaagaatattttgattgtaggtagagaatagaatgaagggattaaaggtatatgaggagatatataaggggttatatgtgtagtttagttaaaagatggaagttggtaatttagattaagttggttgtagtggagaatgagggaaatgaatgaatttaatatttatgaggtagaattaataagatttattaattgggttttttttgattgttagatgtaggggtgagggatggaagaataaagattattaggttttgatttgagtatttgtaggagtaggttgaggggaaggtaagttgttttgatatgttaaggtgaggtgtgtgtaagaaagataagtggagatatttggtaggtagcgagatatataggtttagggtgaaggagagaggtttagggtagagataaagatttgagaggaatattgaattagtgaggggagagagagaatgagatattttatagatagtatagaataaggtagtaaggtgacgtaggataaagtttttaagtattttaattttttgggttatgagtaggtaaaagagattgagaagtgatagttttttgttttgattgttaagttaagtggaaatttgatattttaattatatggttatattagagtgtagtaatgtattattttttgtagttttttttgttatgttgaaaaattattttagtaaatttaatatttggattaattttagttaaaggagatgaaaaattatttggtatatagatttaatgaagtatttaaggattttttattagaagaaaatttagtgttgataaatttatgtttttattttatttttttataggaagtagtaaagatatttatatttttaggtgaattggaatagttgtagaaaataagaatttattaatatttgaatataataaggtaaattattttatttaaattattttatgtttttaaataatataaaataatggaaaattgttttttaatgggtaaattattgtttgagttttaattttgtaagatgaaaaagtttttatttatttcgcgataatgttaatatatttaacgttagtgaattatgtgtttaaaaataattaagattggttgggtgtagtggtttaggtttgtaattttagggttttgggaggttatggtaggaggatttttggagtttagaagtttgagattagtttgggtaatatagtaagattttatttttataaaaaattaaaaaattatttaggtatggtgatgtacgtttgtatttttagttatttagaaggttgagttaggaggattgtttgagtttgggagttggaggttatagtgagttatgattatattattatattttagtttgggtaatagagtaagattttgtttttaaaaaaaaaaaagtaaagaaaaaaaaattaaaaaaaagtttaaaagagtaaattttatgtatttttataatttaaaaataaataatagtataattatattattaaaataatatattttttgttatggtttgaatgttttttttaagatttatattgaaatttaattgttattttaatagttgagaggtggaatttttaagaggtgattaggatatgaggagtttgtttttgtgagtggattaatgttattattataggagttagttattataggaaaaaaggataagtttagttttttttttttgttttataggtttatttgtttttttattttttattatgtgatgatgtagttaaaggtttttattagatttcggtttagaattatgagttaaatatatttttattgtttataaattatttagttttaggtattatgttataatagtagaaaataaagatagttttttagtattaagtaaagtgaaaggttttgtttaatattggaagaatatgttaaagaataatatatattgtgagttttattatatgtttagtgaaagtattgtatttttgttttgaaaaatatattgtagtttatattttagatttataataggaggtattaatgtcgtttgttgaagtgagatatttttttttttatttttggagataattttggatagtatttttttaattttttagttttatatggttagaggaaatttttttatttttttaattatttcgaaatttattttgaaaatatttatatgtttttttgttaacgaatttatttaaatttaagttttgttgagtaaagttcgttgttattaattgatgttatttttttttttttttttggagtcggggatattttattttgttttagattttgttatgttttattttgtattatagtttattttttatatacgtgtttttttttacgatatcgttacgttttttaagaggggatttggatttgagtttggttttttttggtaattattatatagtttaatagcgtggtatgagtcggcgtttttttaatgataaagaattttaaaaggagttttcgttggttttttattgttatattttattcgggggtgggagagaaataaagaatgtaagaaagagcgggcgtttatttaataatttaaaaaagttaaatttttttaatatatgagtgtttaaattatttagagagtagggtagtaaaagggaaaaggtcgtttttgggacgaggcgttaagaattaattagatatagttttaagtcgtttgaggggtttatatattagcgaaggaggtagatattgagaggtacgatgataatattcgatgggatttcggatttttaggggaaggggatgtagtttttttttaattagtttcggtttagtagatattattttttgtcgtttttagtagttttcgtatttatttttgtttagaggtcgggttagttcggtttcgacgtcgtcgtcggcgttggggttttgaggttttatagttaggggtacgaataaggacgtgtttggtattttggagttatcggaggtagaggaggaggcggtggtaaggatagaaatttgttttagaatttcgggaaagggtttaaagtggggacgaagggtagagtagatggttgttcggtggttagtttggcgttcgtcgggagtcgagtttataatagggtacgggagaaggatatcgaggtcgtaggttttatattgtttggcgtagtcgcggatacggcggcggatagtgacgcgtatttttagcgtttgttgtttagaaagatttaggtcgagtaggtaagttgttcgggaaaacgtttgatcgttaaggaaaacgtcgtgtcgtgagggtgtttttttagggaaaaagaagattagtaggtaaaattattagagataattttcgttttttttttttgttttgttggtgattgggattatttttttttaaagaagggaaaataattaggtatttttgggatgttatatatgagcggagggggtttgttagtcgtgttacgtgatgtaaattagtattttggtaagtaagtgtttagaagtacgtgggtgagtagtgagagaatgggtggtggagtagtaattgcgaatgtttagggtacgagtatgttttgcggatttaaatattaaatagtattttttaaaagttttttgtattgttaatcgttattttttgatatgataacgttagcgataataatttgatatgttttttagaaatgttgttaagaaatattgttgtattattaaattttttgtattacgtaagtatttttgttttaatgtgagtagtttgcgtatattattttagtagttatgattatatagttgtgattatatggtaaaaatacgtgttttgtattttagttatagtttcgttttattgtatttgttgaatatcgtgtttttatgtgaggttgtaatatgttaaatttatatatttttgttatttaggttggagtatattgatgtgatttttagtttattgtaatttttgtttttcgggtttaagtgatttttttgttttagtttttcgagtagtttggattataggtgtgtgttattataattggttaatttttgtatttttagtagagatggggttttattatgttggttaggttggttttgaatttttgattttaggtaatttatttattttagttttttatagtgttgggattataggcgtgagttattgtgtttggtaagaaatgtattttttttttaatattagtattttagaagtaattgattatatggttattttagttgatattgaagaatattatagtttattatttaatagataatttataaatatggagatatttattataaaattttttttgtaattttagggtaaaaatatttagggttgtttaggtgtggtggtttatttttgtaattttagtattttgggaggtcgatatggaaggattgtttgaggttaggagtttaagattagtttgggtaatatagtgagattttgtgttttaaaaaataaataaataggtcgggagcggtggtttatgtttataattttagtattttgggaggttaagacgggtggattacgaggttaggagatggagattattttggttaatatggtgaaatttcgtttttattaaaaatataaaaaaattagttcggcgtggtggtaggtgtttgtagttttagtatttgggaggttgaggtaggagaatggcgtgaatttaggaggcggagtttgtagtgagttgagatcgtgttattgtattttagtttggtgatagagcgagattttgttttaaaaaaaaaaaaaaaaaaaattgtagttaggtatggtggtatatgtttgtggttttagttattggagagtatgaggtgggaggattatttgagtttaggagattgaggttttagggagttatgattatattattgtattttagtttgggtaatagagattttatttttattaaaaataaaaataaaaataaaaatatatataataagtaagttaagtatagtgatttatgtttgtaattttagtatcgtgggaggttaagatgggaggattatttgagtttaggagtttgagattagtttggataatatagtaagattttatttttaaacgtgtgtgtgtgtgtgtgtgtgtgtgtgtgtgtgtgtgtgtgtttttgtgtgtaaaaataaaaaattatttaggtttaattttatgtgtaatgaataaagatttttaattgggaagttaagatataggaaggttagtattgtgtgttttttgtatggtttttttggtaaattagtttgattaagaggtagagtttagaagtggggattagatattgggttaagtttttagattttttagagttttagtgggttatggggtttcggtttggagttgatagtgggtgagtgaggttgggtttttgtatgaggttggggtagagttgtttgttttgtagatggagggagatagtttgtagtttttgttagtgtttatatagaaagttttcgggtagggatatgtttttttgtaggggtttgggagtaggtttagatgaggttatatagagaggtttagtgttttttttaaggttagaaaatatagtgttcgagagtataggttttggggttatgggtttttgttttgtaaatttgtttttattgttttttatatgaataattttgagtagattatttaatttttttgaggtatggtttttttattggtgaaaatggaggaatatggtgaggattaaatgagttcgtgtgtgtaaaatgtatagcgtgggtttagtatttggtaggtatttaaattttagtattattttttattttcgaggtagtataggattgaaatttagtttggaaaaggttaagaggaatttagtgttggtaatggtggtgaggaaggggtgtattgtcgttagggtttgatattatagcggtgaattttttgtaatttttggttttagttttatagatagatttattagtttgtggagaggagttttgtttttttgatagatttttattagttaagttttcgagattggtataaagtagaatatagttttttaaatttatggtagaattttggttagtttagtaggttaattagagagtttaggataataataagggtagtattaaagatgtattaagattttgtttagggttaggagtagtggtttatttttgttattttagaattttgggaggttgaggtaggtagattatttgaggttaggagtttgagattagtttggttaatatggcgaaattttatttttattaaaaatataaaaattagttgggtatggtggcgggtgtttgtaattttagttatttgggtggttgaggtaggagaatcgttagaatttaggaggtggaggttgtagtgagttgagattatattattgtattttagtttgggcgatagagaagatttagttttaaaaagagaaaaaaaaaatttttttaattatttttttattgtggtaaaatatatataatataaattttttattgtgattattttttaaatgtatatttttatgatatgaaatatatttatatttttgtgtagttattattattatttattttttaaatttttttttttttatttgaatttttgtatttattgagcgttgattttttagtttttttttttttagatttttggtttttttatttattggttgtgtgattttgggtaagttatttaatttttttgttttttggtttttttatttgaaaatgattataaaaatagaatttattttataggtgtgttttgtggttttattttcgtgtaattatatttaaggaatattttgtttagtgaaggaatgtggtatatttatataaatggtttggaaggatttggaagatatattattgaattagaaaaaaaaattgtaatagtttatatatagcgtgaatttatttatttaaaaatatgtgtaattttatttttgaaataagaaatggtgggaaaaagaaaaaaatattaataaatggagaggaaaaggtttggaaggattaatattagattaatggtagaggttattttttagattgggaggatgggagttgaagggaattttatttttattagtaatattttaattttttatattattaatgtatttttgtattgttgttgttattaaaaattaatatattattcgggagggtgtcgtgtgtagttgtttgcggttttgacggggtattaggatatagttattgtttttgatttaggatattgggtttttgggttttttttttagtagttttgaaggtgtcgtgaagatatagtgaagaaggaggggagattcgtgggtagttaaaagtaaagatatttatggttggggagaaaaaagagagacgttaaaaaatagattagttttgtgtaattgtaattagtaagagaggttttttagttgggagtgtttttttaatgttttatatatattaattaggaaaggagttagttaggggtttagttttttaagaattatggagggaaggagggagattggggtttgtgggttaatagttttagggtgaggcggtatttagttacggggttgacggtattgttattagatttttttattgttttttttgttttagagttttttttggtttagatattttagttttgtttgtttttatttttttggttttttagatgatggagtgcgaggttagattaatttttgttttaggttaataatgtaattttgggtttttttttgagaattaaaaatattattttcgggttgggtatatcggtttatttttgtaattttagtaatttgggaggtcgaggagggtggattatttgaggttaggagtttaagattagtttggttaatatgatgaaatttcgtttttattaaaaatataaaaattagttaggcgtggtggtgtgtgtttgtagttttagttatttaggaggttgaggtacgagaatcgtttgaatttgggaggtagaggttgcggtgagttgagattatattattatattttagtttaggtaatagagtaagaatttgtgttaaaaaaaaa

SEQ ID NO: 265 - DNA, 8845 bp, Artificial Sequence
  chemically treated genomic DNA (Homo sapiens)
tttttttttatttttttttgtgtttgagttgttttatttgtgttttattgtttgttttttttggttgtttatagttagaagagaagtgatttttttgaaatgtatgaggttagaaagggagttggaatttaaagtggcggtgtttgttcgagatgacggtgtttttggtttgttattagatttaagtaattttgttattttagtttttagattaattgggattattataggtttatattattgtgtttgttttgttttttttgtagtatgtatttttggttatgtatatagaaaaaaaggttgaaaaatatatgttaaaatgtttaaaatagttatttttaggtggttaaattaagaatgattttttttgtatatttttgtgtaaaagttttatattgaagtgtattatttttaaataagaaattatgattttgtaaaagatatatataattttaaaggtttttttataaaagtatttaagatataagtttatttttttgagtatgatatataaatgttttttgtgatgtaatttttgtttatttttttaggtttttgttgtaattaaaattagatttttatatgttggttatattgaattaattttaattttttgaattgagtttatttttttttttttatatttttgtatcgtagttttttaggtttgtagttgtttgtgtatgtatgatagttgatgataaatgtgttagtaattagaatagggttttattattttggtttttaagtatagtattgtgatagtttgggaggatgattggttggggttttatgtttatgttagagttttattggagagttgagaagtaaataagtttagtagttttgtagattagtttattttttttatgtattgaaaggaaatgtagaaattgaaagatttttaaatttaagatatgtattattagaggtttaaagtttgtttaggttaggcgtagtggtttatatttgtaattttagtattttagtagattaaggtaggaggatttttggagattaggagtttaagattagtttaggtaatatagtgagatttttatttttatatatatatatatatatatatatatatataattagaaaaaaaaattagttgggtatggtggggtatatttgtagttttagatatataggtggttgaggttggagaattgttcgagtttaggagtttgagtttgtagcgagttatgattatgttattgtattttagtttgggtgatagagtaagattttgtatttaataaaataaaagtttgttaaaatttagaagaggaaggaagggtaggagggagagaaggaggaagggaaaaaatttattttagttttttaaataaaatttaaaatattttaaatggagttgggagtggggatttagggaaaaggtaggattgaatttttgtgaaatttgtttatttatttttttttattttaattttatttttattttgtattttttaatttttatgtttttttgtgggtagtaatttatattttttgtttattaagttaaatttagtaaatgtttgtttagtagttattatatggaaattattatgttaggaaatttatttatttggttgataaatatgtgttaggttaaaagttaggtgttaggtattggaaatatggaaatagaatatgttttttgtttgtaagtagtttatggattggtgggtgaattagcgtgatgtataaataattatagtatagtatgttaagtgtaataatagaagtgtaaggaataattgtgttaaagattgggagtatttaatttttagaatttaggaaaggtttttataaagagatgtttaaaataagattttgtttattagtatagtggtaagtaaaaaaaataataataggtcgggtatagtggttgacgtttgtaattttagtattttgggaggttaaggcgggtggattatttgaggttaggagtttaagattagtttggttaatatagtaaaatttcgtttttatataaatataaaaaatttatttaggtgtggtggcgggtatttgtaattttagttattttggaggttgaggtaggagaattattagaattttgggggtagaggttgtagtgagttgagatcgtgttattgtattttagtttgggtaatagagtgagattttgttttaaataaataaataaataataaaataaggtttgagtattgtgtggataattattaagggagtaaagtggagatgtggatggaagtgtaggtattttatataaggaagaaataattataggtgtttttatatggtgtgtatttttgtaaaatagtagaatatgtttagggaattttaaagagtgtggtatagaaaaatgtttatttatagttatttatttcggtattaagaatagtttagatatttaataaattgtaattgtgagtattaaagttatttaaaaattgttaaaggtgttttttttaaaaaatagttgttatagttataaaaattaaagtatttataagattgattgagtggtttattgttgaagttgtaaagggtatgcgagggtttattatattgtttatttttttatatttttgaaatttttaataatataaagttttaaagaaagtatttattaaaattgtgtgtttaaaatatgagatttgtaatattgggtttttgtttttaaaattatataatttagttggcgatgtaatagaagtaaatggaaaagtatatgagaaagtgtttaaattatgaaaggaagaaaggagaggtttttatggattttagtaatttataaaatttatatgagaagtgtatagtttaaaaaggtagggtaaggattaaatagtaggaaagaaattgttttgggaaaggtaaagaatgaggaaagagttagattagtggtttttaattgggggtaattttgttttttagtaatatttgggattatttggagatattttatgttggtataaatggattggggggatgttatcggtattttaggggtaagggatagggatgttttaaatattttatagtgtataggttagtattttatagtaaagaataatttagtttgaaaagttaagagtgtagttattgagaaattttgagttagatgtatagattatatttggtaggtgggttatttttgaagtttatagttttaagagttttttaaatttttttttaaatgtaggttaagttgagagtttggtttggggaaagggtttatagtttttatttgatttttaaaaagattcgtggtcgaaagaggttgaagaattaggaaaattaaggggttagggattttggttgaaatagattattttatttagaaaattattaggaggtgaggttgggtttgtttgttggagttagattatagtaaattttgaaaattaggtagagatagttggatattaatttgaggtttttgtggaggtatagaagatttattaggaagataatggtaggataaaaattgtgttataatatgaatgttttgaagtggtttttttattttaattgtttaagttttttttaattaggttgtaaaatttagtatttttatggagtggattaaattatatttaattagttattaatttatattaatttttttttttaaaaatatattttagttttttttttttcgtttattagggttaatattttattttaggtttagtttattttaattttggataattgtaaaattttttttagtgagtttttggtttatttatttttgtaaattgagtattggatatattttttggtatgtggtagttatttcgtaaggtatatttttaagtgagggtgggaggagaaggttgtagaatttttttaagttatagtgaaaataaattatagagtgattttttattagttttattatggggaatatgttttatttacgtttttaatgaggttttagtaagtttgtagattgtttggggttgagggtggggtattggtgtgaagtagaagtggtgttttatagtaagtgttgggataaatttaataagttgagttttttagggattgtgttttttatttttttcgtagttataggaaggtaattacggataattagtttgagaaagaggatatgagagttttttgaagtttataaatttgttatttgtcgattttaaatttattttttattagattatttttaggttaaatttttttaaatattaagtttcgattattattttttatatttaaatttttaataagttttaattttaaatttaaattgtgtagttaattttttttggtcgagtacggtggtttacgtttgtaattttagtattttgagaggtcgaggcgggcggagtacgaggtcgggagatcgagattattttggttaatatggtgaaatttcgtttttattaaaagtataaaaaaaaaaaaaaaatgtcgggcgtggtgcggacgtttgtagttttagttatttcggaggttgaggtaggagaatggcgtgaattcgggaggcggagttggtagtgagtcgagatcgtattattgtattttagtttgggcgatagaacgagatttcgttttaaataaataaataaataaataaataaataaataaaaataaatatatttattttttaatttggttaataaataaatacgagagggtacgagaaattatttaaaaaaaaaaaattttcgtagaatttaataatttttgaagtttttaatatttaataattttaaggggagtatttcggtttttggattgtattttaaagcgattggattttagattatttttttagttatttaaaagatttagtttttttttaggtgtagttcgttttagaaaggtcgtttcgggagtattatttatttttgacggggcggggagtttttttcgattttattcgttttaaggacgtagttttgtgattggttatgacgcgtgttagagttgtttagtcgcggaagagtagttgttttggcgtttgtttgttgcggtaggaatatggcggatcggtttacgtagttttaggacgttgtgaattcggtgaggaattttattcgattagtttttgttttttttttttttgaggtaaagtaagggaggaaaggggtttaagaggtaaaatttgaaagtggggagcggattgagagatagggtttcggtataaagcgttttttcgggaggcgttatcgcgaattcggaggtttgaggtcggttgtcgggcggtgtttgaaggtgcgggagggagtagattttttcgtttgaggagatcgggaagatcgtttttgttcgggtgaggtcgttaggatttgtgggttgcgcggttttgtcgtgttttttgaggatagttttatttttttgttagtggtgtttacgggtttttttttttttgggggttgggaggagaagtaggagtttttttttttttttattaattttaatttattaagggagattttatgttttggatgattgggtttttgtaatgaaatgttagtcgagagtatttttttattagcgtttttaggttggtgcgggagcgatgttgaggtgaggtgagagatttttttttattttagttcgtttttttgggtttagagtatttttttattttttgttttttggttattttttagaatatattagtttggggatatttttatgataggaaattttttaattttcgtatgttttttcgtttatttgagtttttttttttttttttttttttttttttttattttggagatagtgtttttcgtttaggttggagtgtagtggcgcgatttttgtttattgtatttttcgtttttcgggtttaagcgatttttttgtttgagttaaagtagttgggattataggcgttttttattacgttcggttaatgtttgtatttttagtagagacggggttttattatgttgtttaggttggttttaaattttcggttttaagcgattttttcgtttcggttttttatagtgttgggattataggtgtgagttatcgtgttcggtttataagttttttttaatgttttttttaaattttattttttattaaaggttaagtttagtaagtagttttttagttttgttttttttggttatttttttttttttttatgtttgagtggaaagtagaagtaaagttagaggatgcgtagttatgggtttttaatgaaggggttatgttttgagaaatgtatggttttggcgataatttttttttttgttttaataagtagaagtataatgtaaaataacgataaaatagtaatatataaattagtaataaagttatttagtattattattaagtgttatggattgtatataattgtatgtgttatgtttttatatattggtagtgtggtaggttgatttatagtagtattattataagtattaaggaacgtattgcgttatagcgttagtattgttacgatgttattaggtaataagaattttttagttttattataattataggggattgatataatatgtgtatttcgttgattaagacgttagtgggtatttttatgcggtaatgggtgtatttattattattacgagttagattgttttttgttaaatagttttttattgatagttatgttttttattgtttgattgtgatttaatgttttagataaggggttagagagaaaatatgttgataggaaaatttaagtatttggtttttttgttagttttttttttttttattgtaagttaataatttggtattttttttaatatattagaatttgtatatttgaagagtgtgaatttatttgtgataaaattgatttattttgggtgaataatattagtttttaagttgagaggattagtttttaagtgttgaatttattaagataaattttattttgtagggatttgtttgggttgttagttagttttttttagggaattatttttttgaggttttacgaaattaaattgtaatgatgttgttggatagaaattttattttagggaaaattttgtatatttatatatgttttgtaattagaaggataataaggatagagtgaatatggttttaattttaggttaggtataatgataattggattttggagaaaagtttttaggataattagtatgagtgtttattgtgtgtaagtattattatgtttataaagagatatttttaaaggaggttaaaaaatgttaaatatttaggagatatttaagtgatggaaaaatagtatgtggttagggagttataatgaattgagtatttttagttttaggttttgatgtaaattggaatatggagtgatgtgaattaaatagggggaatttttttagtatttattttaattagaattatttgtataatttttaatatttgttttattttttgaaaatcgtgagtgtagaagttatgtcgtatttattatgtttttgtagtgtttatatgtagtattttagttattttttataaatttttgttgattaaatggattttaaaagtttttgaaggatggaaaagatagatattgtgttgaatatttttttgtgtgtgttttttttattataataatgttataataggagaatgtatttaatttaaaaatgaaaaatgttgtttggattaatagagttaggattaggatttaggtttgtatagtatttgagtatttattgttttattataattagtaaaatttgggtaaagttatttagttataagtgattttatgattagttagataaatatgaaggagtagtggaaaacgagttagtagagttgatttagattattgaaagttttaaaatagtttgagttggagatttattttgaagatagtggtggagtaagtttaaatgttttgattaggttaaaataaataatttggtgaattggaaaataataagaagattattgtaataattttggtgtgagataattggttgaattaagtaatagtgatagaaggaaaagagaaagatttgtagtattagtagaatatgaagattaaaggaaagtaagaatttgaagttagattggttgattaggagatttttaatataaattaaatattaaaaagaggaaatagttgtttttgagttttgttattgaaataatggtagagaaatttagtggaaatatttattagaaataggaggtttgagaggttaagattaggtgagagaaattggtagggaagataggtgtatttaatttggagatggtaaggaattgttatttttaatttttaaaagtatttaaggaatatttttagagtataagagtttataaattgagttttgaataaatatatttttgtttatttaaggtgtttttttgagtagttttttttttattatttttttatatttgtaattattttagttttagaaaaggaattatatattttgtgtatgagaaataaatttttattaaatatggtgttatagatatttataagttaaatttgtttttttttattattatttttaaaaagtttttatttgtggtttataataagtattggttaatatttttttattattttattattataagaaaagaaagattattttgtattttaattgttttaattagatttatattaaatttaattttatttagattgatattaaatttagtttttttgtagaattaaaacgtttaattaatattaataataattggtttattttattaataattatttttttttgttttatttttttgtttagagattattattatagaaatttattgttgttgttattattaataaagtttttaaaattgataagttttttttaattttgatatgttttttttggtttaagt

SEQ ID NO: 266 - DNA, 8845 bp, Artificial Sequence
  chemically treated genomic DNA (Homo sapiens)
gtttaggttaaagaaaatatattaaggttagaaaggatttattagttttaaggattttattggtaatggtaataataataagtttttgtaatgataatttttgagtaagggaataaaatagaaaggagtgattgttgataaaataagttagttattattaatgttgattaaacgttttaattttgtaaagaaattaagtttggtattaatttaggtaaagttaaatttgatataaatttagttgaaatagttgaaatataaaataatttttttttttttgtgatagtaaaatgataagagaatattggttaatatttattgtaagttataagtaaagattttttggggatagtgatggaaaagagtaaatttgatttgtaaatatttatggtattatgtttaataaaaatttattttttatgtataaagtatatgattttttttttgagattggagtagttataagtgtaaagaaatagtgaggaagaggttgtttagaaaagtattttaagtaagtagaaatgtatttgtttaagatttaatttgtaaatttttgtattttaaaagtattttttaagtatttttaaagattgggaatagtaattttttattatttttaaattaaatatatttattttttttattaattttttttatttagttttgattttttaaattttttatttttaataagtatttttattgggtttttttgttattgttttaatgatagaatttaaaggtaattgttttttttttttaatatttaatttgtattgaaagttttttagttaattaatttaattttagatttttatttttttttgatttttatattttgttaatattataaattttttttttttttttttattattgttgtttagtttaattaattattttatattagaattattataatagtttttttgttgttttttagtttattaggttatttattttaatttgattaaaatatttaagtttattttattattgtttttaagataaatttttaatttaggttgttttgaagtttttaataatttaagttaattttattgattcgttttttattatttttttatatttatttaattagttataaagttatttatgattaaatggttttgtttaggttttgttaattgtaatggagtaataagtgtttagatgttatataaatttagattttgattttagttttattaatttaagtagtattttttatttttaaattggatatatttttttattatagtattgttgtaatagaggaaatatatataaaaaaatatttaatatagtgtttattttttttattttttaaaagtttttaagatttatttagttaataaaaatttatggaaaataattaaagtattgtatataaatattatagagatatagtgaatgcgatatagtttttgtatttacggtttttagagggtagaataaatgttaaaagttatataaataattttgattaggataaatgttaagaagattttttttatttggtttatattattttatattttaatttatattagaatttgaagttgaaaatatttaatttattataattttttaattatatattgtttttttattatttaaatgttttttgagtatttgatattttttaattttttttaggagtatttttttgtaaatatgatggtgtttatatatagtaggtatttatattagttattttaaaggtttttttttaaaatttaattattattatgtttaatttggagttaaggttatatttattttgtttttattatttttttagttataagatatgtatgaatatgtaaaattttttttaaaataagatttttatttagtagtattattataatttgatttcgtaaaattttaaaggagtagttttttgaggaaggttggttggtagtttaggtaagtttttgtagggtagaatttattttggtgaatttaatatttagaggttggtttttttagtttaaaaattagtgttatttatttagggtagattagttttattataagtagatttatattttttaagtgtataaattttgatgtattaagaaaaatgttaagttattagtttatagtgaggaaaaaaaaaattggtaaggaaattaggtatttaggtttttttattagtatgttttttttttagttttttatttaggatattaaattataattagataatgagaaatataattattaatggaaaattatttagtagaaaataatttaattcgtaatggtaataagtatatttattgtcgtatgggaatatttattgacgttttggttaacgggatgtatatattatgttagttttttatggttataataaagttgaaaaatttttattgtttagtgatatcgtagtagtattaacgttgtagcgtaatgcgttttttagtgtttgtggtgatgttgttgtaaattaatttattatattgttagtgtatgaaagtatagtatatataattatgtgtagtttatgatatttgataatgatattaaatgattttgttattggtttatgtattattgttttatcgttattttatattgtatttttatttattaaaataaaaaaaaaagttatcgttaaaattatgtattttttagaatatgatttttttattaggggtttatgattgcgtattttttggttttgtttttattttttatttaggtataggggggaggaaaaataattagaaggaataaagttggggagttatttattagatttggtttttaatagagagtagaatttgggggagatattaaaaaggatttgtaggtcgggtacggtggtttatatttgtaattttagtattatgggaggtcgaggcgggaggatcgtttgaggtcgggagtttgagattagtttggataatatggtgaaatttcgtttttattaaaaatataaatattagtcgggcgtggtggagggcgtttgtaattttagttattttggtttagataggagaatcgtttgaattcgggaggcggaggatgtagtgagtagagatcgcgttattgtattttagtttgggcgaaaggtattgtttttaaagtaaaaaaaaaaaaaaaaagaaaagaaaaaagatttaaataagcggaaagatatacgaggattagaagattttttattataaagatgtttttaaattgatgtattttgagggatggttaagaggtaagagatggaaggatattttgggtttaaaggaacgagttaagatgaaagaaaattttttattttattttagtatcgttttcgtattaatttgaaagcgttggtgaaggaatattttcggttgatattttattataaaaatttagttatttagagtatgagattttttttggtggattaaaattgatgaggaaagaaaaaagtttttgtttttttttttaatttttaaaagaaagagaattcgtaagtattattgataagaaaataaaattgtttttagggaatacgataggatcgcgtagtttataagttttggcggttttattcggataagaacgattttttcggtttttttaagcgaaagagtttgttttttttcgtatttttaagtatcgttcggtagtcggttttaaattttcgagttcgcggtggcgtttttcgagagagcgttttatgtcgaagttttgttttttagttcgttttttatttttaagttttgttttttgggtttttttttttttttgttttattttaagaaagagaaagatagaggttaatcgaatgaaattttttatcgaatttatagcgttttgaagttgcgtgagtcgattcgttatgtttttatcgtagtaaatagacgttaaaatagttgttttttcgcgattgggtagttttggtacgcgttatggttaattatagggttgcgtttttggaacgggtggggtcggagagaatttttcgtttcgttaggagtgggtggtattttcgaggcggtttttttagagcgggttatatttgaggagaggttggattttttgagtaattgggggaatggtttggggtttaatcgttttgaaatatagtttaagagtcgaaatattttttttggggttgttaggtgttaaaggttttagagattgttggattttgcggggattttttttttttaagtaatttttcgtattttttcgtgtttatttattgattaaattgaagagtaaatatatttatttttatttatttatttatttatttatttatttatttgagacggagtttcgttttgtcgtttaggttggagtgtagtggtgcgatttcggtttattgttagtttcgtttttcgggtttacgttatttttttgttttagttttcggagtagttgggattataggcgttcgtattacgttcggtattttttttttttttttgtatttttagtagagacggggttttattatgttagttaggatggtttcgatttttcgatttcgtgtttcgttcgtttcggttttttaaagtgttgggattataggcgtgagttatcgtgttcggttaagaaaaattagttgtataatttagatttagagttgggatttattgagagtttaagtgtgaaaagtgataatcgaaatttggtatttaaggaaatttagtttgaggatagtttggtaagaaatgagtttggaatcggtaaataataggtttgtagattttaaaaaatttttatatttttttttttaggttgattattcgtgattatttttttgtggttgcggggaaggtggaagatatagtttttggggaatttagtttgttggatttattttaatatttattgtgaagtattatttttgttttatattaatgttttatttttagttttaaatagtttatagatttattggagttttattaagaacgtggatgaggtatgttttttataatgggattaatgagaaattattttgtaatttgtttttattgtaatttggggggattttataattttttttttttatttttatttgagagtgtattttacggaatggttgttatatgttaggaagtatatttagtgtttaatttgtaaagatgaataagttaaggatttattaaggaaggttttgtagttgtttaagattaagatgagttgggtttagaatagggtgttgattttgataagcggggaaagaaagattaaaatatatttttgagaaaaaaaattaatatggattggtgattgattggatatagtttagtttattttataagaatattaagttttgtagtttgattgaagggaatttgggtagttgaagtagagaagttattttaagatatttatattgtgatatagtttttgttttgttattatttttttaataggttttttgtgtttttatagagattttaggttgatgtttaattatttttgtttggtttttaagatttattataatttggttttagtaaatagatttagttttattttttgataattttttgagtgaaataatttgttttagttaaggtttttgattttttggtttttttggttttttagtttttttcggttacggatttttttaagaattagataaaagttgtggattttttttttagattagatttttaatttagtttatatttgaaaaggggtttaggaagtttttgaagttgtagattttaagaataatttatttgttaaatatagtttgtgtatttagtttaggattttttaatggttgtatttttgattttttaggttagattattttttgttgtgggatgttgatttgtgtattgtaggatgtttagagtatttttgttttttatttttgagatgtcggtagtatttttttaatttatttatgttaatataaagtatttttagatagttttaaatgttgttggggggtaaaattgtttttaattgagaattattggtttagttttttttttattttttattttttttaaagtaattttttttttgttatttaatttttattttatttttttaagttgtatattttttatataaattttatgaattgttagagtttatagggatttttttttttttttttttatgatttggatatttttttatatgtttttttatttgtttttgttgtatcgttaattggattatatggttttaggagtaggaatttagtattatagattttatattttaaatatataattttggtgagtattttttttgaaattttatattattaaaagttttaaagatatagaaaagtagatagtatagtgaattttcgtatattttttatagttttagtagtgagttatttagttaattttgtaaatgttttggtttttatgattgtagtaattattttttaagaaaaatatttttagtaatttttaaataattttaatatttatagttgtaatttattaaatatttaaattgtttttagtgtcgggatgaataattataaataagtatttttttatattatattttttgaaattttttaaatatgttttgttgttttataaaaatgtatattatataaaaatatttataattattttttttttgtatgaaatgtttatatttttatttatatttttattttgtttttttggtgattgtttatatagtatttaaattttattttattatttatttatttatttgagatagaattttattttgttatttaggttggaatgtagtggtacgattttagtttattgtaatttttgtttttagggttttagtgatttttttattttagtttttagagtagttgggattataggtgttcgttattatatttgggtaagttttttgtatttgtgtagagacggggttttgttatgttggttaggttggttttgaatttttgattttaggtgatttattcgttttggttttttaaagtgttagaattataggcgttagttattgtgttcggtttattattattttttttatttgttattatattagtgaataaaattttattttaaatatttttttataaaagttttttttgaattttgaaagttaaatgtttttaatttttaatataattgttttttatatttttgttattgtatttagtatattgtgttgtaattatttgtatattacgttaatttatttattagtttatgggttatttgtaggtagaaaatatattttgtttttatatttttagtatttagtatttaatttttagtttggtatatatttattaattaaatgaatgagttttttagtataataatttttatataatagttattaaataagtatttattgaatttaatttaatgaataaagaatgtaaattattatttataaaagagtataagaattaaaaaatataggatgaaggtgagattagagtgggaaagaatgaatgggtaaattttatagaggtttaattttgttttttttttggatttttatttttagttttatttaaggtattttaggttttatttaaaaagttagggtaagtttttttttttttttttttttttttttttgtttttttttttttttttaaattttaatagatttttgttttattagatatagggttttgttttgttatttaggttggagtatagtggtataattatggttcgttgtaaatttaaatttttaggttcgaataattttttagttttagttatttgtgtatttaggattatagatgtgttttattatgtttagttaatttttttttttggttgtgtgtgtgtgtgtgtgtatgtgtgtgtgtaagaatggggattttattatgttgtttgggttgattttgaatttttggtttttagagatttttttgttttggtttgttaaagtattgggattataggtatgagttattgcgtttggtttaaatagattttaagtttttaatgatgtatattttggatttgggaattttttagtttttgtatttttttttaatatataggaaaaatgaattaatttgtaaagttgttaagtttgtttgttttttagttttttaatggaattttgatatgagtatggaattttagttaattatttttttaagttgttataatattgtatttagaagttaaggtaatgaggttttgttttgattgttgatatatttgttattaattgttatgtatgtataggtaattgtaggtttggggaattgcgatgtaaaggtatggaggagagagaataggtttagtttaggaaattgaaattaatttaatgtggttagtatgtagaggtttgattttagttgtagtaagaatttagggaggtgagtaggagttgtattataaaaagtatttatgtgttatatttaggaaggtggatttatattttgaatgtttttataagaaaatttttaaaattatatgtattttttataaaattataattttttatttaaaaatgatatattttaatgtagaatttttatatagaaatgtgtaaaggaaattatttttaatttaattatttaaagataattattttaaatattttggtatatattttttaatttttttttttatgtatataattaggaatgtatattataaagaaaataaggtaggtatagtggtgtgagtttgtagtagttttagttagtttggaggttgaggtggtaggattgtttgagtttggtgatagattaggagtatcgttatttcggataaatatcgttattttaagttttagttttttttttagttttatgtattttaaggaaattattttttttttaattataagtagttagaaagagtagatagtaaaatatagataagatagtttaggtataaagggaggtggggggaaa

SEQ ID NO: 267 - DNA, 7163 bp, Artificial Sequence
  chemically treated genomic DNA (Homo sapiens)
ataaaagatagttgtagattatgataaatgttgtggagtggtaaggtagagatatagatgaaataatatttagatggagtagttagggatggttatttggagtaggtgatggtggtgttggatttaaagagagagaaatgtcggtttagttaatatttggggaaaaggggttttaggttgagggagtagttagtgtaaaggttttgaggtgagaaaaggtttggtatgaggttagatgttatgtatttaattattttttaaaaaaataatttaatcggttgggtgtagtggtttatgtttgtaattttagtattttgggaggtcgaggtgggcggattatttgaggttaggagttcgagattagtttgggtaatatggtgaaattttgtttttattaaaaaatataaaaattagttgggtatggtggtgtatatttgtaattttagtttttaatgggggttgaggtaggagaattgtttgaattcgggaggtagaggttgtagtgagttgagatcgtgttattgtattttagtttgggtaatagagcgagatttcgttttaaaaaaaaaaaattatttaattaatataatattagattaagagtagtatatttaatgagtagatttttttattttttatgtttataataatttatatattaggattttgatgggtaggattttttttttatttttaaaatttggttttgtttagtttttagtttaaattaagtattggttaattgtaatggaaaaggtaaagatttaattattagatagatttgttttagaattcgggaaagatgttttatttttgagttttggttttcgtatttatataatggaggtaattgatttttaacggggattttattgagttatttttttgtttttttaggatttgtttttttagaaataaaggagtaatttaaaagcgtttttggcgtttatagttatttttaagggtataattagaaattgttgtatagtaaagtttagaattgagttttttgtttttttcgatttttgaaatttggtgaattcgagattttagatattttatttttagaggaggagaaaaagagaaaggtagtggggaggaagataaaggtgagggagattttagagagggtaggtttttttagtttgtaagagtaacggaagaatttttaggtggaaaggggaatttttttaagttagagaaggagggagttttaggttttttttaatttattattttttatatcgtaatattattttttattttattttgattaggtttttagatgggtattgagtttaggaaggatttattagtattatttatttttatttttagttttttatagaaattttagaaatttagtgttttggttggtcgggcgcggtggtttacgtttgtaattttagtatttcgggaggtcgagatgggcggattatgaagttaagaaatagagattattttggttaatatggtgaaattttatttttattaaaaatataaaaaattagtcgggcgtggtggtatatgtttgtagttttagttatttaggaggttgagataggggaattgtttgaattcgagaggtagagttgtggtgagttgagattacgttattatattttagtttgggtaatagagcgagatttcgttttaaaaaaaaaatgtggtatatataatggaatattattcggttataaaaaataatgaaattatgttttttgtagtaatatgaatgaaattgaaggttattaatttgagtgaaataatttagaaatagaaagataaatattgaatttttttatttgtaagtgggagttaaataatgtgtatatatggatatagtatgtggaattataaataatagaaatttggaagggtggggaggtgggaaggaagtagatgatgaggaaattatttaacgagtataatgtgtattatttaggttatggatatagtaaaatgtttgattttattattatataatgtattcgtgtaataaaattatatttgtggtttggtattgtggtttatgtttgtaattttagtattttgggaggttaatgtatattatttagttgatggatatagtaaaatgtttgattttattattatataacgtatttatgtaaaaaaattatatttgtggtttggcgttgtggtttatgtttgtaattttagtattttgggaggttaatgtatattatttagatgatggatatagtaaaatgtttgattttattattatataatgtatttgtgtaataaaattatatttgtggtttggtatggtggtttatgtttgtaattcgagtattttgggagattaaggtaggtggattattggaggttaggagtttgagatttgtttggttaacgtggtgaaattttattatttttattaaaaatataaaaattagttaggtgtggtggtatacgtttgtaattttatttatttaggaggtagaggtaggaaaatcgtttgaattcgggaggtagaggttgtagtgaatcgaaattacgttattgtattttagtttgggtgatagagtgagattttgttttaaaaaaaaaatattatatttgtatttaataaatttatatgaaataattaaatgtttttgagatttggtttaatggttgtttagtttgtattttggttttatatgtaggtttgtttgtgaaaatttattatagtgtttatttttggtttgtgtatttttttgtatttgtgttatattttaatttgaggtttatattataataggttaaatttgtgaataaaattttatattggtttcggtattgggtaacgtagtaattattaaattaatgttgaatgaatagataattggttgggagtgggatacggtagtaataagatggttttttaatttttgaggttttttgaaaaagtgttagtttagaatgatttattttttagatgagtaggagatatttattttaaggttatttattgtaggttttatagattagtttaagaaattgtttaagattaagtaatttagtaaatggtagagtttggatatgagtttaggtagttaggttttagaatttagatttttgtttattattttatagtgtttgggggtattattggcgatagatttttttgttttttttttagatttagataggtagaggttttgttttaaattatttttgtgggttggataggttttttggatattcgggagtgggagagttttgttgttcgaggagattgggggtatatgaggatgagtatttgattttgttcgagaaggagtaagggagggaaggggatgtatggtgggattttcgtttttgtttgtttttttagggtaagttggggttgacggaattttagattagttagttattttttaatgagtttatagttggattggtaggtagatagaatattcgtttggttaattgtataattgtttggttgattatagaatttatggagtgatagggagaaggcgtaatttgaggacgtgatagcgtagttttttgaatatttaattgaatgatagtttgtttaggattggttggggttggtagtttgatagtggaaaagataggtagttttttgaggattttgtaggttggttgattgatggttcgtggtgttattgtttgtttgggtggtcggatgttgtgaatgattattgttaggaattatagttggcgggggaatgtttagatgttatattgtttggtatcgtgtaaaggagggttatttggggaaattttaggttaattgattaatagattcgtggttgtttgttaggtagttgtatttggtgattaattatttacgttgttcgaattatagtatgttggagggtttggttgggtgttttgattgattgattatttgatagacggtgcggttagtcggatgttgagaatgattgacgatgtgatgaggggcggattgaacgagttataggttagttggttaggagtaaaatcggtatagttgtttgattcgatggttgtacgtggttacggattgtttgttttgatagaattttagttttaacgtattagaggagattgatttgattaatggtggggatgagtcgtttgagaaatgatagattggttgatttattgataggtggtgtggaggtttaattttatttttagttgttgtgattatttgttttgagggtttagttggatgttgtgattgatcgtggtgtgaatgagaagtaatttgagggaaagatagtgattaattgatagtgttcgatagggttgtattagatgttgatagtgatagtttgtttcgatttaattatagttcgtttgggggtatggttggatgttgtagtttatgagaggatttagttagggagaatcgtagttggttttagggttatggtgggtggagaggaggattgattgatttgttgataacgtgaggataggatggttttagggaatgataaggtaggttggttaatagtgttgtttgtttgtttttagggagtcgtcgttggttagggtataaatggaagttagtattgattgtttagtagtgtggatgggggtcgggagtttgattaggtatttgtttggggcgatcgtttgagtagttggatacggtattagtttatttgggagtttcggtttgtttggggttaaaatgagatgacgggttgattgacggtgataatagggagtatgataggattgaggaattattgcgattggttgataacgtgattggttagtagtgtgatagatagattagcgtacgggtagggtttttggtaattttagttatcgtcgttgtcgttttcgttgtcgtcgtcgtttagacgtattttgggaaagcgcggcgagtattcgttttcgggatcgagtcgggcggtagggaggggttcggttacggtttttcggttggttcgcgcgggtgttgcgagtcgggagtcgcggttaataggttgcgcgttttcggttacgttcgcgcgagcgtttttttcgcgaggtcggttaggttcgaatgtcgttagtcgtggggaaagatggcggaaaatttaaaaggtgaagtagtggaggtagaggcgcgggttcgttggtcgggtcgggtgggttggaggggtggcgttgtcggttcggggtttcggcgttcgaggtttcggcgtcgggagtcggaagttcggcgcggaaaggatgaggttcggggagcgcgggtttggtgcgcggggttgggcggggtttaggggagggggcgcgcgtttcggaacgtagcgggtttggggttaagtggggacgtaggaggggggcgcgcgttgtagatcgcggtcggatcggcgcgcgtacgcgcgggggtttgtcgaggaggtcgcgttcgcgcgcgggaaaatcggtttttggtgatcgttatttattcggtgtttacgcgagacgtcggaaggggagggaagataagggggatagattttttttttagagtgcggggattgagaatttttttgggggaaagtatcgtttttcggcgtgatgggggaagggtttggaatagaggattttttagaagagagaaatggggtttttttaataggatagttggatttttttatgtgtagggaaagaggggtgatttagttatgttggggggtttttttatgtgacgaaagtcgtagggaggatgggttttataagtgggaggatttttgaggggtttaggagagtttatttgtggttagtttcggagttagtagttggagggtgttaattgggattatttaagtggggttttaaatgtaagtgaaggaaggggtttgcgaggataggttgtagggagaggaaagcgtgggtataggcgggtttagtttttatttggttttgtttaagtagggggggtagggtttgtatacgaaataattttgaaaagtttttgtacgtttttaggttgatatttaaagtttaggtgtgatttttgtaatgggaggtagaaaatattaaatattttaaaaagatgatataggatgaggattgattgtttttggaatgttttgagatatgatttgataaaatggtttttaaagtattttgattaagaatgtgttttgaattagaaagaaatttgttttttaaaattcgtgtgttttataaaattttggtagttttagaaatatattaggtatatttaaaagaattagtgttattaatttgtatcgttttgcgtataaatttagagtataattttttggatgagttttattttttatagaaagatggatgagatagaaagttaaaatgtagtgtgaaaaaatatattttgtggatttaaggtatttagattgattatttaaggagtttttttgtaatgtagtattattttataattttttgtttataatttcgaaatttaaaaagttttgaaaattgaaattttttttttaaatttggtattatttatggtaaaagtagattataaagtggaatttttttgtgaggttattttatatttttattttttttatttaatgtgggaaatttatatttttgttgtaggacggttaatgtatttgattatagtttgatgttttttggttacgttgggggtgttaggtgatgtatgggatattttagaattagttttgtaaaatttaaaaaattttgaattttaaaatatatttggtttaggagtttgagataagggattaaagattagtttttttagttacgtttttgtttggtgttttggaggttttaattttgtttttttattcgttttatttcggggtattgtattttattgagatggggggttgtttttttttttttgtaaagtggagagaggggtgattaggttttgaatttaaagtaggtttgtaggtagttttaggaatgatatggagtttgaagttttggaaatagatttttttaggataatttatgttgtaaatttcgtttagaggtttgttgttttaggggtagttttgggtagtgagtattggggtttaaagtatatttttgttgtagaatagttttagtattggggaaggtttgtggattaaatttttttgatttttagttagtttttgggatgttttagggaggatttggggttttttttgatttttggtttagttaggttgtttagtaatagttttttttgtttcgtttgatttagg

SEQ ID NO: 268 - DNA, 7163 bp, Artificial Sequence
  chemically treated genomic DNA (Homo sapiens)
tttggattaagcggggtagaaagaattattattgggtagtttgattaggttaggagttaaaggggattttaaattttttttgggatattttaaagattgattaagagttagggaaatttaatttataggttttttttagtgttgagattgttttataatagaaatgtgttttgaattttaatatttattgtttaaagttgtttttggagtagtagatttttaagcggggtttgtaatatgaattgttttaaaggaatttatttttagagttttaaattttatgttatttttaaaattgtttgtaaatttgttttgggtttaggatttgattatttttttttttattttgtaaaagaaagagaataattttttattttagtaggatgtagtgtttcgaggtggggcggatgggaggataagattaaaatttttagggtattaaataaaggcgtaattggaaagattggtttttaattttttattttaaatttttgggttagatgtgttttggaatttaaaattttttggattttataagattagttttaggatattttatatattatttaatatttttagcgtggttaggggatattaagttataattaaatgtattaatcgttttgtagtaaaagtatgaattttttatattaaataggagaaatagagatataaaatagttttatagaagagttttattttataatttatttttgttataaatggtgttaaatttaagaaaaggattttagtttttagggttttttagatttcggaattatgagtaagagattgtggaatgatattatattataggaaggttttttaaatgattaatttgggtgttttaaatttataaggtatatttttttatattgtattttgattttttgttttatttatttttttgtgaagagtaaagtttatttaaagggttatgttttgaatttatacgtaaagcggtatagattagtgatattgatttttttaaatatatttggtatatttttgggattgttaaaattttgtaagatatacggattttaaaaaatagatttttttttgatttaaggtatatttttaattaaagtattttagaagttattttattaaattatgttttaaaatattttaagggtagttagtttttattttatattatttttttaaaatgtttaatattttttgttttttattgtaaaaattatatttaaattttagatgttaatttaaaaacgtataagagttttttaaaattatttcgtgtgtaagttttattttttttatttaggtaagattaagtggagattgagttcgtttgtgtttacgtttttttttttttatagtttgttttcgtaaatttttttttttatttgtatttgaaattttatttaagtggttttaattaatattttttagttgttggtttcggaattggttataggtggatttttttgaattttttagaggtttttttatttgtggaatttattttttttgcggttttcgttatatagaggggttttttaatataattgagttatttttttttttttgtatatgggggagtttagttgttttattaggaaggttttattttttttttttgggagattttttattttaaattttttttttattacgtcgagaggcgatatttttttttagaagagtttttagttttcgtattttgaagggggggtttgttttttttatttttttttttttttcggcgtttcgcgtggatatcgaatgggtaacggttattaggggtcgattttttcgcgcgcgggcgcggttttttcgataagttttcgcgcgtgcgcgcgtcggttcggtcgcgatttgtagcgcgcgttttttttttgcgtttttatttagttttaggttcgttgcgtttcgaggcgcgcgtttttttttttgagtttcgtttagtttcgcgtattaggttcgcgtttttcgagttttatttttttcgcgtcgagttttcggttttcggcgtcggggtttcggacgtcggggtttcgagtcggtaacgttatttttttagtttattcggttcggttagcgggttcgcgtttttgtttttattgttttattttttaaatttttcgttatttttttttacggttaacgatattcgggtttagtcggtttcgcgagaagagcgttcgcgcgggcgtggtcgggaacgcgtagtttattggtcgcggttttcgattcgtagtattcgcgcggattaatcggagagtcgtgatcgaatttttttttgtcgttcggttcggtttcggaggcgggtgttcgtcgcgtttttttagagtgcgtttgggcggcggcggtagcgggagcgatagcggcggtagttaaagttgttagaggttttgttcgtgcgttggtttgtttgttatattgttagttaattacgttattagttagtcgtagtggttttttagttttgttatattttttgttattatcgttagttagttcgttattttattttaattttaagtaggtcggggtttttaggtggattagtgtcgtatttaattgtttaggcggtcgttttagataggtgtttagttagattttcggtttttatttatattgttgggtagttaatattggtttttatttgtgttttggttagcggcgattttttggaggtaggtagatagtattgttagttagtttgttttattattttttaagattattttgtttttacgttgttagtagattaattagtttttttttttatttattatagttttgggattagttgcgattttttttggttaaatttttttatagattgtagtatttagttatgtttttaggcgggttgtgattaggtcgggataagttgttattgttagtatttaatatagttttgtcgggtattattagttggttattgttttttttttagattattttttatttatattacgattagttataatatttagttaggtttttaaagtaaatagttatagtaattagaggtaggattaagtttttatattatttgttagtgggttagttagtttgttattttttaggcgatttatttttattattggttaagttagttttttttgatgcgttgaagttgagattttattagggtagatagttcgtaattacgtatagttatcgagttagatagttatgtcgattttgtttttggttagttggtttgtgattcgtttaattcgttttttattatatcgttagttatttttagtattcgattgatcgtatcgtttgttaggtgattagttagttagagtatttagttaggttttttagtatgttgtgattcgagtagcgtggatagttgattattagatatagttgtttagtaagtagttacgggtttgttgattagttagtttgaagtttttttaggtggtttttttttatacggtgttagatagtataatatttagatattttttcgttagttgtgatttttgataatagttatttataatattcggttatttaggtaggtagtagtattacgggttattagttagttagtttgtaaggtttttaggaggttgtttgttttttttattgttaggttattagttttagttagttttaggtaggttgttatttagttagatgtttaggaaattgcgttgttacgtttttaagttgcgttttttttttgttattttatgagttttgtagttaattaaatagttatatagttaattaaacggatattttgtttgtttgttagtttagttgtgagtttattaagaagtgattggttggtttgaggtttcgttagttttagtttgttttgaggggatagataggagcgaaggttttattatgtattttttttttttttttattttttttcgagtagagttaggtgtttatttttatgtatttttagttttttcgggtagtagggtttttttattttcgggtgtttaggagatttgtttaatttataagagtgatttaagataggatttttgtttgtttggatttgagagggagataaaagggtttgtcgttagtagtgtttttaaatattataaagtagtgggtaaaagtttggattttggagtttgattatttggatttatatttaggttttgttatttattaaattatttgattttaggtagttttttaaattggtttgtaaaatttgtagtaagtgattttggggtgggtgttttttgtttatttggaaagtgaattattttggattagtatttttttaggagattttaaaagttaagaggttattttattgttatcgtgttttatttttagttagttgtttgtttatttagtattaatttaatgattattgcgttgtttagtgtcggagttaatataaggttttatttataggtttgatttattgtaatgtaaattttagattggagtgtaatataaatatagaagggtatatagattaggggtgaatattgtaatgagtttttataagtagatttatatgtggaattagaatgtaggttgagtaattattaagttagattttagaagtatttaattgttttatataaatttattgggtataaatataatattttttttttgagatagagttttattttgttatttaggttggagtgtagtggcgtgatttcggtttattgtaatttttgtttttcgggtttaagcgatttttttgtttttgttttttgagtaggtgggattataggcgtgtgttattatatttggttaatttttgtatttttagtagagatgatggggttttattacgttggttaggtaggttttaaatttttggtttttagtgatttatttgttttggttttttaaagtgttcggattatagatatgagttattatgttaggttataagtgtaattttgttatatagatatattgtgtagtggtgaagttaggtattttattgtatttattatttgaataatgtatattggttttttaaagtgttaggattataggtatgagttatagcgttaggttataagtgtaatttttttatatggatacgttgtgtagtggtgaagttaggtattttattgtatttattaattgaataatgtgtattggttttttaaagtgttgggattgtaggtatgagttatagtgttaggttataagtgtaattttgttatacggatatattgtgtagtggtgaagttaggtattttattgtatttatagtttgaataatgtatattgtattcgttaagtaatttttttattatttattttttttttatttttttatttttttaagtttttgttgtttataattttatatgttatgtttatgtgtatatattatttagtttttatttataagtgaaaagatttagtatttgtttttttgtttttgagttgttttatttaaattaatggtttttagttttatttatgttgttgtaaaagatatgattttattgttttttatggtcgaatagtattttattgtgtatattatattttttttttgagacggagtttcgttttgttgtttaggttggagtgtagtagcgtgattttagtttattataattttgtttttcgggtttaagtaatttttttgttttagttttttgagtagttgggattataggtatgtgttattacgttcggttaattttttgtatttttagtagagatgaggttttattatgttagttaggatggtttttattttttgattttatgattcgtttatttcggtttttcgaagtgttgggattataggcgtgagttatcgcgttcggttaattagaatattggatttttaagatttttgtgggggattgggagtagggataaatgatgttgatggattttttttagatttagtgtttatttggggatttggttagggtggggtggggagtggtgttgcggtgtaaagaataatgaattaaaggaaatttgagattttttttttttttagtttgggggagtttttttttttatttagaaattttttcgttgtttttgtagattgaagaagtttgttttttttggagttttttttatttttatttttttttttattatttttttttttttttttttttttaaaggtaggatgtttgagatttcgaatttattagattttagaaatcggaaggggtagggagtttaattttaggttttgttgtgtaatagtttttaattatgtttttggaaatagttgtaaacgttaaggacgtttttgagttatttttttgtttttgggagagtaagttttgaggaggtagagaggtgatttagtgggattttcgttggaaattagttatttttattgtatagatgcggaaattaaagtttagaggtgaggtatttttttcgggttttagagtagatttgtttgataattaagtttttgttttttttattgtaattggttagtgtttgatttgaattgggaattgggtagagttaaattttaaaaatgagagggggattttgtttattaagattttggtgtgtgagttgttatgggtatggagaatggggaggtttgtttattgagtatgttgtttttaatttagtattgtgttgattgaatgattttttttttttgagacggagtttcgttttgttgtttaggttagagtgtagtggtacgattttagtttattgtaatttttgtttttcgggtttaagtagtttttttgttttagtttttattaggagttgggattataggtgtgtattattatatttagttaatttttgtattttttagtagagatagggttttattatgttgtttaggttggtttcgaatttttgattttaggtgattcgtttatttcggttttttaaagtgttggaattataggtatgagttattgtatttagtcgattgaattatttttttaaaaaataattaaatgtatgatatttggttttatgttaagtttttttttattttagggtttttgtattggttgtttttttagtttggaattttttttttttaaatattaattgggtcgatatttttttttttttaggtttagtattattattatttattttaagtgattatttttgattgttttatttgaatgttgttttatttgtatttttgttttattattttatagtatttattatgatttgtagttattttttat

SEQ ID NO: 269 - DNA, 6145 bp, Artificial Sequence
  chemically treated genomic DNA (Homo sapiens)
ttttttttatttgggaagttgaggtaggagaattatttgaatttggtaggtagaggttgtagtgagttaagatcgtgttattgtattttagtttggttaatagagtaagattgtttttaaaaataaataaataaataaataaataaaggaattaattattattgatgaattattttttgtgtgtttttggtatttttttaatagatagttacggcgtggataagaagcggaaacgggggatgttcgacgtttttggggagttgaatagttttggtgtgtgttttttgtttttttttatttttatttttaggttttggggaggggatagttgattttattgttttgttttattttaggttggggaggaagggttgtcggggaataggggtttttatttttgtttttttttagatttttatggtatcgagagtaaacggcggaagaaaaagtcggttattttggattattttttgtttaattacggtttaggtgggttttagttatatataagtttttgttttttgggtgggtagagggtaagtggtagttttgtttttttggtttttttacgttttttaagagtagttataaggcgagttatttagtatttagttagtaatatagagtagaaagaatgagggttttggagatagaatggaagttttgattttttttgggttatttttttgttatgtgaattttattaagttgttttattttttagagttttagggatttttttgaaaaggtttagtatatatttagtttagtggtgttttaaaatttgatttattttttttttttttttttttttttttggagatggagtttcgttttgtcgtttagattgtagtgtagtggtatgattttagtttattgtaatttttgttttttgagtttaagcgatttttttgttttaggtttttaagtagttgggattaaaggtatatattattatatttggttaatttttgtattttttagtagagacggtgttttattatattggttaggttggttttgaatttttgattttaggtgatttgtttgttttagttttttaaagtgttgggattataggtatgagttattgtattttatttatgattatatttaattgtatttatagtaaaatttaaaataataggggttttaataggatagaacgttattttttgttttatatatatagtttgtagggattgaaagtggtttatgtttgtaattttagtattttgggaggttgaggtaggtggattgttttagtttaggagtttgagattagtttggttaacgtggtaaaattttgtttttattaaaaatataaaaattagtcgagtgtggtggtgtatatttgtagttttagttatttggaggttgaggtagataaattatttgaatttaggaggtgaaggttgtagtgagttaagattgtattattgtattttagtttgagtaatagaatgagattttttttaaaataataataataataataataaaataggtttggtattgtggtttacgtttgtaattttagtattttgggaggttaaggtaggtagattacgaggtgaagagagagagattattttggttaatatggtgaaattttatttttattaaaaatataaaaattagttggatgtggtggtatatgtttgtagttttagttatttgggaggttgaggtaggagaattatttgaatttaaaaggtggaggttgtagtgagttaagatggtgttattgtgttttagtttgttaatagagtaagatttcgttttaaaaataagaaataaaaaatagtttataggtaggtgttttagggatggtttggtgattgtatgattatcgagagatcgaggtttttgttatttttagttcgttaatttatggtgtaaggtggttgttgtagttttagttattacgtttacgttttagttagtagattttagttatatgattatattaggttgtaaggaaggttagaaaatagttttttgtgtttttaaggtttgttttgttttaaaaagagagtttttttttttttttgagatagttttgttttgttgtttaggttggagtgtagtggtataattttagtttattgtaatgtttattttttaggtttaagtgatttttttgttttagttttttgagtagttgggattataggtgtttattattatgttttgttaatttttgtatttttgggagagaaggggtttcgttatgttggtcgggttggttttgaatttttgattttaggtaatttgttcgtttcggtttgttaaagtgttgggattataggcgtgagttattatgtttggtttgagaattttttttataatgaaattttttgatttgattgttatttttttttaagtttttattatgtttgagaatgatatttattttttttgataattttgggattggtgattttttaatttgtgttttttatggtttggagattttattttttgggttgtttttgtatgttggggggttttggaattttttttttttttttatttttagggaaaattttttatagttgtgtaggagtatggttttaattttagttttataatagttgtgtgagttttttatttatttttttttagtgttttagtttatttattattaattatttttagagataaggttttgttttgttgtttaggttggagtgtagtggtgtgattatatttcgttgtagttttaaattgggtttaagtaatttttttgttttagattgttaggtagttgggattataggcgggtattattatatttagttaatttttaaataatttttttgtagagatagggtttcgttacgttgtgttgggattataggtgtgaattattacgtttggtttttaatttatttattatttgagaatggtgatagttttatacggattttttttgggattaagagggtatttaaggttaggtttggtggtttatatttgtaattttagtattttgggaggtcgaagtaggtggattatttgaggttaggagttcgagattagtttggtaaatatggtgaaatttcgtttttattaaaaagataagaattagttgggtatggtatatgtttggtttgtagttttagttatttaggagattgaggtaggggaattaatttgaattggggaggtagaggttgtagtgagttaagagtacgttattgtattttagttagggtgatagaatgagattttattttagaaaaaaaaaaaaaaaggttattttgatattatattttgtagggagtagggtatttgatttagggtttgattagaagttagttttaaattatattatattttttttgtttttattttcgtaggttcgtttttttcgtcgttagttttgttgttagattttgattttttttttggtatcgtgtttttgttcggtttggagttttttggcgggtttgattttttggacgatggttttgtttacgattttacggtttttatattttttattatgttggatttgttgttttcggtatcgttatacgttagcgttgttgtgtgtagcggaggtgtcggggtcgtggttggggagattttcggttttgaattattgatattggattcgtattaggtttcgggtttcggggatggaggtatcgttagttttgtgggtagtaatatgttttttaattattatcgcgaggcggtttttgggggcggttttttattttcggggtttgaagttacgtagtttcgcgatgttagaggaggggtattgggtggggagggaggtggaggagtcgtgtaattttaattaggatgtttagtatttttatttttttggtttttttttatgtttttgaagtggatatatttagttttggcgagaagtttcgttgtacgggtttttttttgagtttattttatagatgaggaaattgagttcggagaggaaaagggatatggttttcgtgtattagtttgttatagttgtttttgtttttatatgtgggggtattttttttagtaggattcggaaaagattgtatatatgggaggagggggtagatttttggttttttttttttagatttgaaggtggggggtaggttggttgtttagagtttttttaataaagatgagtttttgagttttcggggtttcgtttgttttgggtttgggaaacgttttagttttttagtagtaaagaaagtttttaggttgggggtttaggtttgttattttagtattttgggaggttaaagtaggaggatcgtttgagtttacgagtttgagattagtttgggtaatatgacgaaatttagtttttataaaaaatataaaaattagtcgggcgtggtgttgcgcgtttgtaattttagttattttagaggttgaggtgggaggatcgtttgagtttaggaggtggacgttgtagtgagttaagatcgtattattgtattttagtttgggcgatagcgcgaggttgtgttttaaaaaaataaaaaatgaaaatgaaaataaaaaatgagatcgggtatggtggtttatggttgtaattttagtattttgggaggtcgaggtaggtggattatttgaggttaggagtttgagattagtttaattaaaatggtgaaattttatttttattaaaaatataaaaattagtcgggtttggtggcgcgcgtttgtagttttagttattcgggaggttgaggtgggagaatagttgaaatttaggaggtaaaggttgtagtgagtttagatcgcgttattgttttttagtttgggagataaagagagatttcgttttaaaaaaataaaattaaataaataaataaaataaaaaagataaaaagataaagtatttaagtttttttttttttcgtttttttatttttttttcgggatttcgtttttttcgattttaggattcgtttttttcgtcggcggaagtgcgttgcgcggttttttattatgtttcgttttttttttttagcgcggttttttattttcgttttcggtgcgggtcgcgcgcgagcgtagcggtgggaggcggcgattagtcggtgagtgtaggttgcggttcgatttttcggttttcgggtaggttttagtttagtttttttttttttttaggttttttttatgttgttgtgggtttttgttgcgtttcggtttcgaggatcgttcgttttttattttattaggtttgacgggttttaggtcgagttcgtgtttcggttgtgggttagaagttgtcgcgtcgaattcggttttcggtttagtagtttattataggtttcgtttttttgttaaaaaaaaaaataataaaaaaaaaatttagtttaaatttttaggtcgcgacgcgatttataagtttcgtttaaattttcggttttcgttttttttcgtaagttttgtttttaagtttagtttacgtttttttgttagttagtttcgttttttttaggttttacgttttttttttttggatgttttttttatttcgttatttagattttatttttagattttagttttattttggtttttttgtaatatttttttttcgtgtttttattttttttagtatttttatttttcgttacgttttttatttgttttcgatttttatttttatataattgtattgtttttttaaaagtttttttcgattttttttatttgtttttatttttattttttttatttttttattatttagatttatatttaattttacgtatggtttttagtgggagtttttttagttttttttttttttttgagttttagttttaagtgtttagggtttgttttttgattttattttaaatattgttgatgttttaaaattttttattttcgattttagcgcgtggaatttaggatattttttttttagtgatgtttattttagaattatttgagggttttttagaatgtttaagtttttagatcgaagttgttagggatggatttgaatatttggtatattgttttgtagttttatttttgttttttgaagttaagagatgtgttgtttgggatcgattttgttattaatttgttagatgattttgattttgtttatacgggttttatagattatttgatttttttggtttttttattttttagg

SEQ ID NO: 270 - DNA, 6145 bp, Artificial Sequence
  chemically treated genomic DNA (Homo sapiens)
tttgagggatgaagggattaggaaagttagatggtttgtgaaattcgtatgggtagaattaaagttatttaataagttggtggtagagtcgattttaaataatatattttttagttttagggagtagaagtgaagttgtagaatagtatgttagatgtttaagtttatttttaataatttcgatttagaagtttgggtattttgaaaaatttttaggtgattttgaggtgagtattattgggaaaggggtgttttagattttacgcgttggagtcgggaatgaaaggttttgaaatattagtagtgtttgaagtagggttagaaggtaaattttgagtatttaaggttggagtttaagagaaagagaagaattgaaaaggtttttattaggggttatgcgtggggttgggtatgagtttgggtggtagagggataaggagaataaggatgaaggtaggtggaggaaatcggagaaagtttttaagggaatagtgtagttgtatgaaggtggaggtcgaggataggtgaagggcgtggcggaagatgaagatgttagagggagtgggaatacggggagggagtgttgtaaggagattagagtgaagttgaggtttaaagatgggatttagatggcggggtggggagagtatttaaagaaaaagagcgtagagtttgagagaggcggagttggttgataggagggcgtgggttgagtttgggggtagggtttgcgggaaagggcggagatcgaaggtttggacggggtttgtggatcgcgtcgcggtttgaggatttgggttgggttttttttttgttgtttttttttttgataagggggcggggtttgtgataagttgttgggtcgaaggtcgagttcgacgcggtaatttttggtttatagtcggggtacgggttcggtttgaggttcgttaggtttaatggggtgagggacgagcgattttcggggtcgggacgtagtagaagtttatagtagtatggggagagtttgaggaaagggagaagttgggttgaggtttgttcgaaaatcgggaggtcgagtcgtagtttgtatttatcggttggtcgtcgttttttatcgttgcgttcgcgcgcggttcgtatcggaagcggaaatgaaaggtcgcgttagggggagggggcggagtatggtggagggtcgcgtagcgtattttcgtcgacgagagaggcgggttttagagtcgagaggggcgggatttcgaggaagaagtgggagagcggagaagggaagagtttggatgttttatttttttattttttttattttatttatttatttaattttatttttttgagacggagtttttttttgttttttaggttagaaggtagtggcgcgatttaggtttattgtaatttttgttttttgggttttagttatttttttattttagtttttcgagtagttgggattataagcgcgcgttattaagttcggttaatttttgtatttttagtagagatggggttttattattttggttaggttggttttaaatttttgattttaggtgatttatttgtttcggttttttaaagtgttgggattatagttatgagttattatgttcggttttattttttatttttatttttattttttatttttttgagatatagtttcgcgttgtcgtttaagttggagtgtagtggtgcggttttggtttattgtaacgtttattttttgggtttaagcgatttttttattttagtttttagagtagttgggattataggcgcgtagtattacgttcggttaatttttgtattttttgtagagattaggtttcgttatgttgtttaggttggttttaaattcgtgagtttaagcgatttttttgttttggttttttaaagtgttgggatgataggtttgagtttttagtttggaggttttttttgttattaagggattagggcgttttttaagtttagaatagacgaaatttcggaggtttaaaaatttatttttattgggaagattttgaataattaatttattttttatttttaagtttggggagggagggttaggaatttgttttttttttttatatgtataatttttttcgaattttattggagaaggtgtttttatatgtggggatagaggtagttgtaataagttagtgtacgggagttatgttttttttttttttcggatttagtttttttatttgtaaaatgggtttaaggggaaattcgtgtaacggagtttttcgttaaggttgaatatgtttattttagaagtatgaggaagggttaaggggatgggggtgttagatattttggttgggattgtacggtttttttatttttttttttatttagtgttttttttttggtatcgcggggttacgtggttttaggtttcggggataggaggtcgtttttaaaggtcgtttcgcggtaatgattggggaatatgttgttgtttataaggttggcggtgtttttattttcggggttcggggtttggtacgagtttagtgttagtggtttagggtcgggggtttttttaattacggtttcggtattttcgttgtatataatagcgttagcgtgtggcggtgtcgggggtagtaggtttagtatggtgaagagtgtgggggtcgtagggtcgtaggtaaagttatcgtttaggaggttaggttcgttagggggttttaggtcgggtagggatacggtgttagagaagaagttagggtttggtagtagggttgacggcgggaggaacgggtttacggggatgaagataagagaagtgtagtgtgatttagggttaatttttgattaggttttaaattaaatgttttattttttgtaaaatgtgatattaaggtggtttttttttttttttttttgagatggagttttattttgttattttggttggagtgtaatgacgtgtttttggtttattgtaatttttgtttttttagtttaagttgatttttttgttttagttttttgagtagttggaattataggttaggtatgtgttatgtttagttaatttttatttttttagtagagacggggttttattatgtttgttaggttggtttcgaatttttgattttaggtgatttatttgtttcggttttttaaagtgttgggattataggtgtgagttattaagtttggttttaggtgtttttttaattttaaggagaattcgtgtgggattattattatttttagataataagtaaattgaaggttaagcgtggtggtttatatttgtaattttagtataacgtgacgagattttgtttttataaaaaaattatttaaaagttagttgggtgtggtggtgttcgtttgtagttttagttatttggtagtttgaggtaggaggattgtttgagtttagtttgaggttgtagcgaagtatgattatattattgtattttagtttgggtaatagagtaagattttatttttaaaaataattaataataagtaaattaaggtattgagggaaagtaaatggaaggtttatatagttgttgtggaattggggttgaaattatgtttttatatagttgtggagagttttttttgagagtgagaaaggagaagaggttttaaagttttttaatatatagagataatttaaaaagtgaaatttttagattatgggagatataagttgggaagttattagttttaaaattgttagaaaaaataaatgttatttttaggtataatggggatttaagaaaaaataataattaaattaaaaagttttattataagagggatttttaggttaggtatggtggtttacgtttgtaattttagtattttggtaggtcgaggcgggtagattatttgaggttagaagtttaagattagttcggttaatatggcgaaatttttttttttttaaaaatataaaaattagtagggtatggtggtgggtatttgtaattttagttatttaggaggttgaggtaggagaattatttgaatttgggaggtggatattgtagtgagttgagattgtgttattgtattttagtttaggtaatagggtaagattattttaaaaaaaaagagggattttttttttggaataagataaattttagagatataagggattattttttagttttttttgtagtttgatgtgattatgtgattaaggtttgttaattggaacgtgggcgtaatggttggagttataatagttattttgtattatgagttggcgaattgaaaatggtagaagtttcggtttttcgatgattatgtagttattagattatttttggaatatttatttatggattgttttttgttttttgtttttgagacggagttttgttttgttgataggttggaatatagtggtattattttggtttattgtagtttttattttttgggtttaaatgatttttttgttttagttttttaagtagttgggattataggtatgtgttattatatttagttaatttttgtgtttttagtagagatggagttttattatgttggttaggatggtttttttttttttatttcgtgatttatttgttttggttttttaaagtgttgggattataggcgtaagttatagtgttaggtttgttttgttgttgttgttgttgttgttttgagaagggttttattttgttgtttaggttaaagtgtagtggtgtaattttggtttattgtaatttttattttttgggtttaagtgatttgtttgttttagtttttaagtagttgggattataggtgtgtattattatattcggttaatttttgtatttttagtagaaatagggttttattacgttggttaggttggttttaaatttttggattgaagtagtttatttgttttagttttttaaagtgttgagattataggtatgagttatttttagtttttatagattatgtatgtgagataagaaataacgttttattttgttgaagtttttgttattttgggttttgttgtaaatgtagttaaatgtgattataggtgggatgtagtggtttatgtttgtaattttagtattttgggaggttgaggtaagtagattatttgaggttaggagtttaggattagtttggttaatgtggtaaaatatcgtttttattaaaaaatataaaaattagttaggtgtggtggtgtatgtttttagttttagttatttgggagtttgaagtaggagaatcgtttgaatttaggaggtagaagttgtagtgagttgagattatgttattgtattgtagtttgggcgatagagcgagattttatttttaaaaaaaaaaaaaaagaaagaagaaatagattaaattttaaaatattattgagttaagtatgtattgggtttttttaaaggagtttttgaggttttgagaggtagaataatttaatgaagtttatatagtaaggaaatggtttagaagagattagaatttttattttgtttttaaagtttttattttttttattttatgttgttggttaagtgttgagtgattcgttttgtggttgtttttggagggcgtgaagaggttagaaaagtagggttgttatttattttttgtttatttaggggataggggtttatgtgtagttgggatttatttgagtcgtggttgggtaggaagtggtttaggatggtcggttttttttttcgtcgtttgttttcgatgttatgggggtttgagggaaggtagagatgaggatttttgtttttcgatagttttttttttttagtttggggtgggatagggtagtggggttagttgttttttttttagaatttggggatgggggtggaaaggggtagagggtatatattagagttgtttagttttttaaggacgtcgggtatttttcgttttcgttttttgtttacgtcgtagttgtttgttaaggagatattagggatatataagaagtaatttattaataataattaatttttttatttatttatttatttatttatttttagagatagttttgttttgttgattaggttggagtgtagtggtacggttttggtttattgtaatttttgtttgttaggtttaagtgatttttttgttttagttttttaagtaggaggga

SEQ ID NO: 271 - DNA, 6558 bp, Artificial Sequence
  chemically treated genomic DNA (Homo sapiens)
taagattataaattgttttttattagtggggaaggttttaaatattatgtatttagtataagtaggtgtaattaatcgtaacggtttgttttgttattttcgattaatatataattattaggttagaattgtattttataagttttttgcgtttagttattttgtatatattaatttttttaagttttgtgttttaaaagaattgtatagtgttgggaagttttttatttattttaatttttagggtatcgagttcgaattcgaattaggtattaggtatgttttattattataaaagatgtaaaaagatgcgtatagtggcgtatatttatagttttagttattgaggaggttaatgtgggaggattatatgaggttgtagtgagttgtgatggtgttattgtattttagttttggcgatagtgagtttatgttttaaataagtaagtaaataaaaattaaaaagaatttagtttatagggtatttgaaggtaagaggaaaagatgttagaattagagatggggagaagatgggtttttggcgtttgttgaggttgagaaatgagatagataggttgagtgtggggtggagagaggatgggtagagagattgaggttggtttgaatggaaatgaaatgttagggtttttagggttatcggggaataattggagtttttaggaaaggtttaacgttgtgattatttgtgttcgttatgtttttttattttttattaattgtgtgaatttggtagattttgagttttagtgtttttttttgtgaagtggggttattttattttaatttttgggattgttgtgtgaattaaatggggtaatgtacggagagtatttgacgtatagcgagtgttttaaaattttagtttgtattttttagtaaaggatatgtatacgtttattgtgagtgataaatttaggatgatttgaatttaatgtgataacgtgggttttcgtatgttggttatgttgtcgggagatatttatggatttaattagtataataggggaaataaattatttaatgtattttgttaagatagaatattttagaatttattttgtggggcggggtataataaagggggtttttttgttgaaaacgtttaagtttaggttcgtggtattatttaattaaggtcgatagttatatagtaagttagaggtaatgttaggatttaaattaaatttgtggtttttataatgaggttattttttttttttttgaacggtttggggaaagggggtgggtgggtagaatttggtagtggttaattttttatttttgttttttggtttttttttgtttttatttttaggtttgtattgattgattgattgagatagggttttgttttgtcgtttaggttggagtgtagtggtacgattatggtttattgtagttttaaatttttaggtttaagtggttttttcgttttttatttttcgagtatttatatttttaggtttttaaaatggtttttaggtatttggttgtcgttttagatatttatttgggtttttgggtagggattgttcgggaaattttatttatgtgaagtaggtgtgggtgtaggaaggtcgtttggaaatgaattagtattgttttttgtttgagtcgtaagtagggcgttagagggtttggcggataagaaagggaggatgataggaggtcggtattgtaatgatacgttttagttattagagggtacgaagtagttgggtaaaatttcgcggggtcgttggtggaaaatttttggtatttggagttcggagatggggtggacggaatgtgaggatttagttttttgaggttgggtcggggtagagttattgttttggatgttcgtagggtttgtttgtgttttgattattttgtttttgtagatagttggagaatgtgagagtgggattgggatcggattttaggggttatttcgtataatttttttgttttgtcgtgggggagggagttgtttaaggttacgtagtaagttagtggtaaatgaatacgattattattagttttaggtatatggttatttgatgggcgtagtcgtagttttagtttttgagatagagatatttgattaaggataggtttttaggagttgattttagtgattcgcggttttgttgttgtttttgtttttttttttggtttttttatttgattgattttttgtttttttcgtttgtttgtttgttttcgtttttgttcgttggggggtttgtttaatttttttattgggttttgggagtcgtagttttttgttgttattttttagggatttgtagttttttgaagttttttttcgattcgttgtttcggttttatttttgggatttagaggagaggtgattatttcgtagtatagttagtggtgtgattttacggggtgagaaggatttttttgtttttaagtatttttttagtgatttttgttgttatgtggtagtcgtaagtattggttggtatttggtgtgggcgagatttttattttatgtagaaatgagtaagatcggtgagtttattatgtgggggtgaggttgagagaaaataagtatataggtgatttagttaaaattagaattttttaagtatatacgaaaagggtaaaaggggcgttttgtataggatagaataggtagatattgaattcggttgggttttgggaaggttttttgtagtggtttttgaagggggggttggattttagtaggatagagggtatgggtatgtgtgggtacgttttgaatagaggggttagcgtaagtcgagggttttggttatattagttgtatgtgtcggtgtgtttaagggatacgtagtagtaggtcgagtttggagcgttttattgttaggttttttaaaaatttttaattttaatttaattttattttatttttattttaagttttggtatatatgtgtagaatgtggtttgttatataggtatatatgtgttatggtggtttgttgtatttattaatttattatttaggttttaagtttcgtatgtattaggtattagttttaatgttttttttttttttgtttttattttttttttcgtaattgtttataggttttggtatgtggtgtttttttttttgtgtttatatgtttttattgtttaatttttatttatgagtgagaatatatcgtttggttttaagggatagttatggggatgtattgtagtttttgagtagggaaggttttgtggaggtttttagttaaaaggaaagaatggttgtgaaaatcgatgtattgcgtttttttgttttttatttttagtgtgaagggtttttatttcgagttttatttgaagtaggtttcgatgggaagataagtagtatgaggggtttaagtattgaggggagtaagggatattcggtggttgtgttaaggtgtagaagaggatattgggggttttaaggtttgattttatgtatattgtttaggttggtttttaagttatacggtgatcgttaggaagggattagtttgtttttagtttgatttttttgttatgttattatttaaagttttttttggtagggtttgtttggggtttttgtgttagtgttttttttgttaggttgggttggggtttttatttattgttttgggattgttgttgttttggttttgggggaggagggtgtgtcgttgagttattgtttgggtatttgggtttggaatttcgggtgagttatttagggttgaggtagaggggttgggggaggggaagaagttattcgatagttggagtagggaggggagttggggttataggaagggcggtgttttgatgtttagacgggtcgggatagataaagggttaaggaggaaggggttttgggagggggtagtttttttttgggttgggttttgaatggttatagtgtttgttttttttcgggtttggggaggatatgtgtgtggggggtagtgagagagggttgtggttgagggttgtgttttaggtttggattttggtttgggaagttgtttagttggtgtttttagttttgggtagggatgtatttttatttatttatttagtttttaagttggagaagaggaggttaaagtttttttgtttagtttttaattattcgggatttttttatgttttttatagattgtggtttagtttaattgcggttgtgtgtagagtaattttattttttattgtttttttatttttttagatatttttttatatagagggatttttttaggtatttttaagtatatttagttattttattattttattaagaggtattttggtgttggttattaaaagttattttattttatttatgttttgaagttagttttgtttttttttttttgatgttttttagttgttttttttggtttttagttttttaagggtggttttaggttgttttttttttatatatataggcgtatgtatgtatacgagtattggattatgaagttttagcgtgtgtttatagttttttatataggagtgggttgtgatttataggtatgttatgagaatgaggtttggtattagtttttaggttttagagtaggggttgtttttttttatttcggtttaggatgtttagtttttacgatattttttattttttattgtggtttgggtgggtttaggggttgtttttgatttggtttagagtttttttttagttggtggtggagttggtattttttgggagggagggggttgggagggaatgagtgggaatggtaagaggttagggtttggtgggattaggttgaggtaggtttggtttttttaaaatgttaagttgggggttagtggggtttatatataaatttttattttgggagtttggttgttttgtttttttttttgggtttgtttttgttatttggtttggtgagtatttttgttttgttgagggtagggtggggaggattttcgtgggtttttgtttttgtttttatagtttttttattttagtttttttggtgggattaatttgggtttttttgggtttttttttttggaagaattttttgtgaagtgttgaagtgttgattgaagggttttttttttttttttttttttttgagatggagtttcgttttgtcgtttaggttggagtatagtggtgtgattttagtttattgtaaatttttttttttaggtttacgttatttttttgttttagtttttcgagtagttgggattgtaggcgtttattattatgttcggttaatttttttgtatttttagtagagatggggttttattatgttagttaggatggtttcgattttttgatttcgtgatttatttatttcggttttttaaagtgttgggattataggagtaagttatcgcgttcggtcgattgaagggtttttttttaggtttttttgtgaggttttagtgtaggggttgttttgaggtttttttttggatattttagtttaggggtttttttttgggggtttaggtttaggagtaggaggtgtgtatgtgggcgttgttgtaaaaagaattttgagatttttttttttttttttttttttttttgtaaagttttggattttagtaggattaaggtgtaagaggtaggggttttaagattttgtttgggttatggttttaagtagtaaagttttgttttttgtttcggtgaaggtagggttggtatgatgggtttagggtatgttttgtttttggtatagtttttttggttttattttgaaatttgtttaatttttttaggttggtttgagtatttttagaggttttgtcgttgaggtttgttttattttgattttaaggtaatgaatattttatatttttaattttaattttaataggattttttttggtggagagaatgttaagttgtttttattttatttatgtttttgtttgtttagaggtttaggggtttttagggtgaggggagatatattttttattttttgggagtttttagtttgagagaggaaatatttttgtttaagggagtttttagttagatggtagagagagatgtttttggttttaggagtttcgagtttaaggagggaaacgatttttttagggagttttttgtttttaggttgtagttatggtttttgttagattgtataggagtttttatttgttagtcggtgtatgtggttttgttttttagagtttgcgtagatgttattaaaatgggattttggttattttgttattttttttttggtagatattaaaatggggagttttgtttttaggggggtgttttaagtgttattagaggaggtttggtgatttttagatataagggaagttttagcgtttgtttttagggtgagatggaggtatcgttttcggttttagggaattatagtttgagggggagatgtagtttttgtttttttatttagagaggggttttgtgaggtggtttgggggtatagggtagaagtggattttataggttgagttaaggttttaagagttttagtagtgtatttattatttggtatttttgtagt

SEQ ID NO: 272 - DNA, 6558 bp, Artificial Sequence
  chemically treated genomic DNA (Homo sapiens)
gttgtagaggtgttaggtgatgggtatattgttgaggtttttggggttttagtttagtttgtaggatttatttttgttttatgtttttaagttattttataaaatttttttttgaatgggaaggtaggggttgtattttttttttagattgtggttttttgaggtcggaggcgatatttttattttattttgagggtagacgttaaagttttttttgtgtttgggagttattaagttttttttgatggtatttgggatatttttttgagggtagggttttttattttagtgtttgttagaagggaaatgatagggtgattagagttttattttgatggtatttgcgtaggttttggggagtagggttatatgtatcggttggtagatgggggtttttgtgtagtttggtaggagttatggttatagtttaggagtaggaagttttttgaaggagtcgtttttttttttagattcgggatttttgaagttagaggtatttttttttgttatttaattggaagtttttttgggtaggagtgtttttttttttagattaggagtttttagagggtggggaatgtgtttttttttattttgaaggtttttgagtttttaggtagataggggtatggatagggtgggggtaatttaatattttttttattaggaaggattttgttggaattagaattaaagatatgaaatgtttattgttttgggattaggatgggatagattttagcggtaaggtttttgagaatatttagattagtttggaaaggttaggtaggttttagggtgaggttagaggagttatgttagaggtagggtatgttttgggtttattatgttagttttgtttttatcgaggtagggggtagagttttgttgtttggggttatgatttaggtagagttttgagatttttgttttttgtattttagttttgttagaatttaggattttgtaaaaaaaaaaaaaaaaaaaaaaaaaaattttaggattttttttgtagtaacgtttatatgtatattttttgtttttaggtttagatttttaaagaagggtttttagattgagatatttaggggagggttttagagtaatttttgtattgagattttatagaggaatttggagaaaaattttttagtcggtcgggcgcggtggtttatttttgtaattttagtattttgggaggtcgagatgggtggattacgagattaggagatcgagattattttggttaatatggtgaaattttatttttattaaaaatataaaaaaattagtcgggtatggtggtgggcgtttgtagttttagttattcgggaggttgaggtaggagaatggcgtgaatttgggagggggagtttgtagtgagttgagattatattattgtattttagtttgggcgatagagcgagattttattttaaaaaaaaaaaaaaaaaaaaaaaattttttagttaatattttagtattttatagagagtttttttaagggggaaggtttagagaggtttaggttgattttattagggaagttggaatgagagaattgtggagataaagatagagatttacggggattttttttattttgtttttagtaggatagaggtatttattagattaggtggtagagatagatttaggaaggagagtaaggtagttaggtttttagggtgaggatttatatgtgggttttattggtttttaatttggtattttaaggaaattaaatttgttttaatttgattttattaaattttggttttttgttatttttatttatttttttttagtttttttttttttagagagtgttagttttattattagttgggggagggttttaggttaggttaagggtagtttttgagtttatttaggttatagtgggaagtgggaggtgtcgtggggattgggtattttggatcggggtgaggggaggtaatttttgttttggggtttggagattggtgttaggttttatttttatgatatgtttgtgagttatagtttatttttgtgtgagaggttgtgagtatacgttgagattttatggtttagtgttcgtgtatatatatgcgtttgtgtgtgtgagagagaagtaatttggggttatttttaggaagttgggggttagaggaggtagttgggggatattaggaggagaaggataggattgattttagggtatggatgaagtggagtgatttttaatggttagtattagaatattttttaatgaggtaatgaggtaattaagtgtgtttagaaatatttgggaaggtttttttgtgtaggaaggtgtttggaaggatggggaagtagtgagaaatggggttgttttatatatagtcgtagttgggttgggttatagtttgtggggagtataaggaagtttcgagtagttaaaggttgaataggaaaattttggtttttttttttttagtttgagggttgggtgggtgggtaggggtatatttttatttaaggttgaaaatattagttggatagttttttaagttagaatttaggtttgaagtatagtttttagttatagtttttttttattgttttttatatatatgttttttttagattcggagaaaggtaaatattgtggttatttagagtttagtttaagggagggttgtttttttttagggtttttttttttttggttttttgtttatttcggttcgtttgggtattagggtatcgttttttttgtggttttagtttttttttttgttttagttgtcgagtagttttttttttttttttagtttttttattttagttttaagtgatttattcgaggttttaggtttagatgtttaggtagtgatttagcggtatattttttttttttagggttagggtagtagtagttttagagtagtaggtggaagttttagtttagtttggtagggaaagtattggtatagagattttaaataggttttgttaggaggagttttggataatgatatggtaggaggattagattgagaataggttggtttttttttagcggttatcgtgtgatttgggggttagtttgagtagtgtatatgaagttaggttttggggtttttagtgtttttttttatattttggtatagttatcgagtgttttttgttttttttagtatttgaattttttatgttatttgtttttttatcgaggtttattttaagtagaattcggaataaaaattttttatattgagggtgagggataagggagcgtaatgtatcgatttttatagttattttttttttttaattaagggtttttatagggttttttttgtttagaaattgtagtgtatttttatggttgttttttaaagttaggcggtatgtttttatttataagtgggagttgaataatgagaatatatggatatagggaagggaatattatatattagggtttgtgggtagttgcggggagaaggatgggggtaaggggagggagagtattaggattaatatttgatgtatgcggggtttaaaatttagatgatgggttgataggtgtagtaaattattatggtatatgtatatttatgtaataaattatattttgtatatgtatgttagaatttaaagtaaaaataaaataaaattaaattaaaattaaaaatttttaaaaagtttggtagtgaggcgttttagattcggtttgttgttgcgtgttttttaaatatatcggtatatgtaattagtgtggttaagattttcggtttgcgttgatttttttgtttagaacgtgtttatatatgtttatgttttttattttgttgaaatttaattttttttttaaaggttattgtagggagtttttttagggtttaatcggatttagtgtttatttgttttgttttgtataaagcgttttttttgtttttttcgtgtgtatttagagaattttgattttgattgaattatttgtgtatttgtttttttttagttttatttttatatggtgagtttatcggttttatttatttttgtatgaggtaagggtttcgtttatattaggtgttaattagtgtttacggttattatatggtaataggggttattggaggagtgtttaggagtaagggagttttttttatttcgtgaaattatattattgattatgttacgaaataattattttttttttggattttaagagtggaatcgagataacgggtcggaaaagagttttagagagttataaatttttgaggagtgatagtaggaaattgcggtttttaggatttagtgagggagttgagtaaattttttagcgggtagagacggagataggtaggtagacgaagaagataaagagttagttagatggaaaagttagggagaaaaatagagatagtagtagagtcgcgggttattagggttagtttttgaaggtttgtttttaattaggtgtttttgttttaggaattgaggttgcgattgcgtttattaaatggttatatatttgagattggtgataatcgtatttatttgttattaatttgttgcgtaattttgggtaatttttttttttacggtagggtaggagagttgtacggaatggtttttagagttcgattttaattttatttttatattttttagttgtttataaaggtagagtagttaagatataagtaggttttgcggatatttaaagtagtgattttgtttcggtttagttttaggaagttgggtttttatatttcgtttattttattttcgggttttaggtgttagaaattttttattagcggtttcgcgggattttgtttagttgtttcgtgttttttggtggttaaggcgtgttattgtagtgtcggttttttgttatttttttttttttgttcgttagattttttggcgttttgtttacgatttaaataggagatagtgttgatttatttttaagcggtttttttatatttatatttgttttatatagatgaggtttttcggatagtttttgtttagaagtttaggtggatgtttgagacggtagttagatatttggaagttattttaaaagtttagggatatgggtattcgggagataggaggcggaaagattatttgagtttaggagtttgaggttgtagtgagttatgatcgtgttattgtattttagtttggacgatagagtaagattttgttttaattaattaattaatgtaagtttagagataagggtaggagaaaattaggggatagaagtgagggattggttattgttaagttttgtttatttattttttttttttaggtcgtttaggggaaagagaaatggttttattgtgggggttataggtttagtttaagttttgatattgtttttggtttattgtgtgattgtcgattttggttgagtggtgttacgaatttgagtttaaacgtttttagtagaaggattttttttattatgtttcgttttataaaataagttttgaggtattttgttttagtaaaatgtattaaataatttattttttttgttgtattaattggatttataagtgtttttcggtagtatgattagtatgcgaggatttacgttattatattgggtttaggttattttggatttgttatttataatgggcgtgtgtatattttttgttggggggtgtagattgaaattttgaagtattcgttgtgcgttaggtgtttttcgtatattattttatttaatttatataataattttaggagttggaataagatgattttattttatagaggagaatattgagatttaaagtttgttaaatttatataattagtaaggggtggggaggtatgacgaatataggtggttataacgttaaattttttttagaagttttaattatttttcgataattttgagagttttaatattttatttttatttagattagttttagtttttttgtttattttttttttattttatatttagtttatttgttttattttttaattttagtaggcgttagaagtttattttttttttatttttgattttggtattttttttttttgtttttaaatgttttgtggattggattttttttaatttttgtttatttatttatttgagatatagatttattgtcgttaaggttggagtatagtggtattattatagtttattgtagttttatgtgatttttttatattaatttttttagtaattggggttataggtgtgcgttattgtgcgtatttttttgtattttttgtggtgatggagtatgtttgatatttgattcgaattcgagttcggtattttaaggattggaatgggtaaagaattttttagtattgtatagtttttttaaagtataaagtttgggagaattaatatatgtaggataattgaacgtaagagatttgtggaatgtagttttaatttgataattgtgtgttaatcgggagtaataggataggtcgttacggttggttatatttatttatgttagatgtataatgtttggagttttttttattgatgagaagtaatttatgattttg

SEQ ID NO: 273 - DNA, 8802 bp, Artificial Sequence
  chemically treated genomic DNA (Homo sapiens)
aatgtttaataatgatagattggattaagaaaatgtggtatatatatattatggaatattatgtagttataaaaaatgatgagtttatgttttttgtagggatatggatgaaattggaaattattatttttagtaaattatcgtaagaataaaaaattaaatatcgtatatttttatttataggtgggaattgaataatgagaatatatggatataggaaggggaatattatattttggggattgttgtggggtggggggaggggggagggatagtattgggagatatatttaatgttagatgacgagttagtgggtgtagtatattagtatggtatatgtatacgtatgtaattaatttgtataatgtgtatatgtattttaaaatttaaagtataataataaaaaaataaaaaaataaaaaaaataaataaataaatagaaaaaaaagaaaataaattatttaattattttttttgaaataagaaatttttaaaaatatttgtataattaagggaaggaatgaaaagtaatagaaaatttgagaaatatgagatgagtttttaagtttttttaattttttgttaattttatttttgttaatttttatatatatttgtagttaggagatttggtttttaggtttggttttattttttataagtatgtgattatgggtaaattgttttttttttttaaggtttttgtttttatatttataaaatagggataataatattttttttgtttaatttttagaggtgttgtagggattttagtagataatgggggtaaatatattaaagtattatttgtatttagatattttttatattgttgtattttggaggttaggggatggttggggttttcgggttgtttttttgtttagtatttagttttttggatttgatttttagtagtttttataattattggttttgtgaagaattttttaatgattttaaagtatttttatatttttgagatggttgataataatagttaagatattttatttagtatatattaaatattatgttgagtattttatagtttttatttggaattattaaaataattttcgatggtaagtgttgtttatttttaattaattaaatagttttatttttatgttttgtttttatatattatattttttaatataaaatttatatgttggtattggttttatattaaggagaattagattattattaagaatttattaaagagtataagaatagttgaagtgtgaagtttaatggggaaaaatgtgttattaattataaggtgggaaattattgtttttataggtattgatgtagtgtaggttttgttatttttattttatagttaaggaagttgaggcgtagagtgttgaaataatttgttgagaaatatatagtagtgagtggtgtgaagttaaaatttgagtttaagttttattggatttaaggtttatttttttttaattatattatatatttgtttatagaatttttggttgtttttggtgtttttagattatattttttatttttgtaggtataaggttgataaaagttaaggattggataaaaatgataataagggtatcgttatttagttttttttgaaattgggtgtttggagggtgggttagggtagggatagagatttatggttggggtaggtggtgaggtttagataaggaaagaagtattgaaatggtttatatgaatatttttaggagaatatattgatattgaaatattttgggtataatttagtgttaatttaataaatattatttagtgtttaatattttggtgttggggttatatatagtgtttatatgtgtttttcgttttttataaatatatgataagtttgaaatgtttgtgttaaatattttttaaattaaaataaaaaaatataggttgggtgtggtgggattacgtttgtaattttagtagtttgggaggttaaggcgggaggattatttgaggttaggagtttgagattattttggttaatatggtgaaatttcgtttatattaaaaatataaaaattagttgagtatggtgttgagtatttgtaattttagttatttgggaggttgaggtaggagaattatttgaatttaggaggcggaggttttagtgagtcgaggttatgttattgtattttagtttgggtgataagagtaaaattttgttttaaaaataaataaataaataaataaaaagagataaagttaatatatgttattttgtagaatttggtagaaaaaggacgaagggaaaagggagaattatagttgagattgtgtttatataataaatttattgtggtttttgtgtgtgttggggaaagtttggtagaattagagaatttaagtaagtggagtttgtggggggaggggattaggaggttatttttgttttattttaatttttttagaagatattgaggttgggttttttttatttttgtttttttagtatttaatataattggaagaagtaaaggtttggatgttttagagtattagttttagtattatttatgtggggttgttttagtttggtagttaatgatattattatataaattttttagttttgagaatttttttttattagttttttttttgttagtttgggatttgatggaatggaaaatagagaattttgttagttatagaatattgtggttatttagttaatatttggaaaagtaagaagagggtatatatattttagaaataaaagtgaaatttaatatttttatagagttttagagtttataaagttttggtatttattattttatttttttgtatttgagttttagtataatttacgaaataggttgtattttgtttatttgatagatgggaggataaaagtttagaaaagttaatgttgttattttagtatgtttgagattaggaacgaatagagaggtatatttttgagtgtaatagggagggttttattagggaaggtattttggaggtgatttaagagttgagtagaaaaatagaattatgtattaaataaagaaagggagattttaggtaatgttttttcgaaagattttgaaaatatgtattgtaggagaggttgttaggagttcgatgatgatgatgatgatgatgtcgacgtcgatatcgatgatgataaatgatagtagttaatatttattcgttgtttattatgtgtagatattgttagaatagatattttttaaagtagtttatttgtattaattataaaatttattttgtaaggtaggtatttttattatttttattttatagatgataaaattaaggtatagagatatagtttgtttataatattatataggaatgattttaagggttaatataagaagtatgaattttatttggagagtcgagagtattttttttattttatttaatagagaggaggtgggtatagatttttgatttagaaagtttttttggatgtagggtggatcgaggtcggagaggggaaaagaaattagaatttgatttagatatttgtttaaggaagatttgaatagagatagtggggatagatagtagaggattattttataattttttatgtttgtggataagaaattgttttttacgcggattacgaggttaggagatcgagattattttggttaatacggtgaaatttcgtttttattaaaaatattaaaaaaattagtcgggcgtggtggtaggcgtttgtagttttagttatttaggaggttgaagtaggagaatggtatgaatttaggaggtggagtttgtagtgagttgagattatgttattgtattttagtttgggtgatagagcgagatttcgttttaaaaaaaaaaaaaaaaaaaaaaaaaagaaattcgtcgggcgtggtggtttatgtttgtaattttagtattttgggaggttgaggtgggcggattatttgaggttaggagtttgagattagtttgattaatatggagaaattttgtttttattaaaaatataaaaaaaaattagttaggcgtgatggtttatgtttgtaattttagttattcgggaggttgacgcgggagatttgtttgaatttgggcggcggaggttgtggtgagtcgagattacgttattgtattttagtttgggtaataagggtaaaatttcgttttaaaaaaaaaaaagaaaaaagaaattgttttttatatgtttttgttttttttgtttgttaaggtagaatatattttaatttttttgttttaggaattgcgtgaaaattaatgggatagaggtttagttggtttttatttgttaaataatatttttgtacgattggtggtgtatattaaatgttgaatatataaaatgtgttttgatggaggatttgggaataattatagtttgttaattattgttaattttattatagttttgaaattttagatttttttaatgatttaaaaagagattgtaatttttgtatgttatgaaattagttatatagtggtagataagtaattttttataggttttatttttttattatttatatggtttagttatttacgtgggatataggaaaagaaaagtaacgatttgttgtgttagaattaaattgtataaaaaattttttatagttttgttggttttttaagaatttgtttttgtttgtttttttatagttagtgtataaataaatattatgtgcgtgtgtgtttgtgtgtgtgcgtttgtgtgaggtatagaaaattagtgtttaatagaatttttaattttttggatattaggatatttgtgttttatttttgatatggtgagtaatagaattgtttttttaatttttttttagattttgtgttatttcgtgtttataaatattttatttaaggttttattatttttaggtagggtgttaaagattttttttagaaatatgaggaagttgatagtagtgtgattttaggtttttaagttttattagtattatttataaaacgggtttgatagtttttatttgttaggattggtgttaggatgagataatgtttgtgaattgtaaattatataaacgtgtgttattgtgagaattggataaagaagagagggagtgagagaaattaagggagggttggggttgggaaagaacgaaaagggagtcgcgtatagaggagagcgcgatagtcgcgagttatattttgtaatgaaattttttagattttttgtcgggagagcggtttagacgcgttaggtttgtagtaggaggtcgcgtcgagggcgggtttttagaagtttataggtgagtatcggttttttttttttcggttttcggttcggaggaggcgggagtagtttttttgttttgattttatcgcgggcggcgtagggtcggtttggtttttcgtgggacggggaggggggcgggatgtgttatttaaatattagtggggacggtcggtggtggaattagtcgggtaggtcgggtagagtataagagtcggagggagcggtcgggcggtagacgtttgtagattattttagacgtcggagttcgagtttcgtcgagttttcgcgttttattcgttcgcgttcggttcgcgttttttcgttttataatggttcggggtttcggtttcgcgtcgttatcgttgcggttgtcgttgttgttgttggtgttggcggcggtgatcggttatacggtcgcgtaggataattgtacgtgttttattaataagatgatcgtgtgtagtttcgacggtttcggcggtcgttgttagtgtcgcgcgttgggttcgggtatggcggtcgattgttttacgttgatttttaagtgtttgttgtttaaggcgcgtatgagcgtttttaagaacgttcgtacgttggtgcggtcgagtgagtacgcgttcgtggataacgatggtttttacgatttcgattgcgatttcgagggtcgttttaaggcgcgttagtgtaattagacgtcggtgtgttggtgcgtgaattcggtgggcgtgcgtcgtacggataagggcgatttgagtttacgttgcgatgagttggtgcgtatttattatatttttattgatttgcgttatcgttttatcgtcggcgtttttaattatttagatttggacgtcgagttgaggcggttttttcgcgagcgttatcggttgtattttaagttcgtggcggtcgtgtattacgagtagtttattatttagatcgagttgcggtagaatacgttttagaaggtcgtcggtgaagtggatatcggcgatgtcgtttattatttcgagagggatattaagggcgagtttttattttagggtcgcggcggtttggatttgcgcgtgcgcggagaatttttgtaggtggagcgtacgtttatttattatttggacgagattttttcgaagttttttatgaagcgttttatcgtcggttttatcgtcgttatcgtggtggtcgtggtggttttcgtcgtcggtatggtcgttttggtgattattaatcggagaaagtcggggaagtataagaaggtggagattaaggaattgggggagttgagaaaggaatcgagtttgtaggtattcggcggggtaggggatggggtggggtatcggatttcggtatcgttttagatttaagtgagttacgttttttgatttttcggcgtaaaggagacgtttatttttttaaatttttgtttttttttttttttttgcgtatatattaggtttaatagattttggttttagggtttttttttttttttatttttgttttgaaggaagtatttttaaaatgtattttttttcggtttaataataggaaatttgattggggtagtgaaggaagggatggtatagcgttatgtgtaaaaaataagtatttgtatgataattcgggatcgtttgtaagtaattgaatttattgcgatattgtgaaggtttaaatgagtttagatgggaaatagcgttgttatcgttttgggtttaaattatttgatgagttttatttgtattatggtttattcgaggagaagaggagtttgttaattgggtttatgtagtagttttatttattatcgtttgtattattgattatatatgtttgttattgggaaagaagtttgttttagttgtttgaacgtagtttggatgtttttgaggatagatattgttcggaaatttagtttatttattttttagtttgtttttattattattgatattggtaatgtttttttttgtaaaatgtttgtatatatgttgtttttgataatgttgttgtaattttttaaaataaaatacgaatttaataaaatatgggaaaggtataaattagaagtcggtatttgtgaaaagtttttttagatttttattatattggtttttaattttttaagatttgtattttttttttattttaaattataatattttttttttttttagaagtgggtgttttatgttgttattttggtgtgttttaagatattttaattggttagtgtaaatgttattttttttaaataagattatttggaaattttttttaaattgtaggagggtgagtttgagggaggaagttaaattagttgtttttatgaaaaagagtgttagtttttggttatttttaaataaggtttattattaatggagatagaaaattttagtttaagagttgtattttttttgaattttagttttattttgaaataggtggtattatttttatttagtttttgagtaaattatttaattttaaagcgttgtggttttaagattaaacgatttttttatataattagagttagtttgtagtgggttttatatttttgttgggtgtgtataggttgtttttttaagatttttatttattatatatattttttgagatggagttttgttttgttgtttaggttgtagggtagtggagtgagtttagtttattgtaatttttattttttgggtttaagcgatttttttattttagttttttgagtaattgggattataggtgtttattattatgtttaattaatttttgtatttttagtagagatggagttttattatgttggttaggttggttttgaatttttgtttttaggtgatttatttgcgtcggttttttaaagtgttggtattataggtgtgagttattgtatttagggatttttattattaatgtgttttaaagatatgttttatttattagttgtaaaaattagttatttgttttttttatatttatttttttttttttatttatttacgtttatttatgtgtgtgattgtggggtattttataagtaaataagttattatagtaattgagaaattgatataatattaggtgtgtataaaggaagggagtggttggtatattatatatttagtaatagttaagttagatttaggattgtagtttttttttttggaatttattttatgtttttttttttattttgtttttatagtttatgaggattttttaagattgaaatattagtaagaattggggagagatagtttttagttattggttttttaatttagggttgtggttgttatgcgttggtggagtggatattgtgggattgttagagattttaaagtttgttgttatttattaagggagaaatttttttaggttttaaatttttttttagggttaaataagatttattaaggggagagggtggatgtgagtaggtttttttatagtaggaagggtggtttaagtatttgaagttagaattggttttttaataatgagagtgagattttttatt

SEQ ID NO: 274 - DNA, 8802 bp, Artificial Sequence
  chemically treated genomic DNA (Homo sapiens)
agtggggagttttatttttattgttagagagttagttttaattttaggtatttgggttattttttttattgtaggagagtttgtttatatttattttttttttttggtaagttttatttgattttggaaggaagtttggagtttggaggagttttttttttgatgagtggtagtagattttgagatttttggtaattttatagtatttattttattagcgtatagtagttatagttttaagttgagaagttagtagttgagagttatttttttttaatttttattggtgttttagttttgggaggtttttatagattgtagaaataggatgggaggaggggtatgaaatggattttaggggaagaaattgtagttttggatttagtttagttgttgttgaatatgtgatatattaattattttttttttttgtatatatttagtattgtattagttttttagttattgtagtaatttgtttatttgtggggtattttatagttatatatataaatgaacgtgaatgagtgaaaaggaagagataagtgtaagagggataagtggttagtttttatagttaataggtaaaatatatttttaaagtatattaatagtaaaaatttttgggtgtagtggtttatatttatgatattagtattttgggaggtcgacgtaggtggattatttgagggtaggagtttaagattagtttggttaatatggtgaaattttatttttattaaaaatgtaaaaattagttgggtatagtggtgggtatttgtaattttagttatttaggaggttgaggtaggagaatcgtttgaatttaggaggtggaggttgtagtgagttgagtttattttattgttttgtagtttggataatagagtaagattttattttaaaaaatatatgtaataagtaaaagttttaggaaaatagtttgtgtatatttagtaaaagtgtagggtttattgtagattggttttaattatgtgggaaagtcgtttaattttagagttataacgttttgagattaagtgatttgtttaaaggttaaatggaaatagtattatttattttaaagtagggttgggatttaaaggaggtatagtttttgaattagagttttttgtttttattggtgataagttttgtttagagatgattaaagattggtatttttttttataaaagtagttagtttagtttttttttttaagtttatttttttgtagtttgaaggaagtttttaaataattttatttagaaagaatagtatttatattggttagttaggatattttaggatatattagagtagtaatatgaaatatttatttttgggggaaaaaaaagtgttataatttgaaataaaaaaaaaatataagttttgggaaattagagattaatgtgatagaaatttggagggattttttataaatgtcgatttttggtttgtgttttttttatattttattaaattcgtgttttattttaaaaaattatagtaatattattaaagataatatatgtataaatattttataaaaaagaatattattaatattagtggtagtaagggtaagttgaagaataaatagattgagttttcgggtaatgtttgtttttaaagatatttaaattgcgtttaggtagttgaaataggttttttttttagtgataagtatatgtggttagtaatataaacgatggtaaatgaggttattatataggtttagttaataaatttttttttttttcgggtaggttatgatataagtggaatttattaaataatttaaatttaaggcgataataacgttattttttatttaaatttatttaagtttttataatgtcgtaatggatttagttatttgtaaacgatttcgggttgttatatagatatttgttttttatatataacgttgtgttatttttttttttattgttttagttaggttttttgttgttggatcgaaaggggatatattttagaaatgttttttttaagatagaagtgagaaagaaaggagattttgaggttaggatttattaaatttggtgtgtgcgtaaaagggagggggaaggtaggaatttgaaaggataaacgttttttttgcgtcgaggaattaggaagcgtgatttatttgggtttgggacgatatcgaaattcggtattttattttattttttgtttcgtcgggtatttataagttcggttttttttttaatttttttagttttttgatttttatttttttgtattttttcgatttttttcggttggtgattattaggacggttatgtcggcgacgagggttattacgattattacgatgacggcgatgaggtcggcggtgaggcgttttatggagaatttcgggggaatttcgtttaggtaatagatgagcgtgcgttttatttgtaggggtttttcgcgtacgcgtaagtttaggtcgtcgcggttttggaatagagattcgtttttgatgtttttttcgaagtagtaggcggtatcgtcgatatttattttatcggcggttttttgagacgtgttttgtcgtagttcgatttggatggtgggttgttcgtagtgtacggtcgttacgaatttggggtgtagtcgatagcgttcgcggaagagtcgttttagttcggcgtttaggtttgagtggttgaaggcgtcggcggtggggcggtggcgtaggttaatgaggatgtggtgggtgcgtattagtttatcgtagcgtaggtttaggtcgtttttgttcgtgcggcgtacgtttatcgagtttacgtattagtatatcgacgtttggttgtattggcgcgttttgaagcggttttcggggtcgtagtcggggtcgtagaggttatcgttgtttacgagcgcgtgtttattcggtcgtattagcgtgcgggcgtttttgggggcgtttatgcgcgttttgagtagtagatatttggaggttagcgtggagtagtcgatcgttatgttcgagtttagcgcgcggtattggtagcggtcgtcggggtcgtcggggttgtatacggttattttgttggtgggatacgtgtagttgttttgcgcggtcgtgtggtcggttatcgtcgttagtattagtagtagtagcggtagtcgtagcggtggcggcgcgaggtcggggtttcgagttattgtggggcggaggaacgcggatcggacgcgggcggatgaggcgcggggattcggcggggttcgggtttcggcgtttgggatggtttgtaggcgtttgtcgttcggtcgtttttttcggtttttatattttattcgatttgttcggttggttttattatcgatcgtttttattggtatttgggtgatatatttcgttttttttttcgttttacggaaggttaagtcggttttgcgtcgttcgcgataggattagaatagggaagttgttttcgtttttttcggatcgaaagtcgggaaggggagaatcgatatttatttgtaggtttttggggattcgttttcggcgcggttttttgttatagatttggcgcgtttgggtcgttttttcggtagaaagtttaaagagttttattgtaaagtgtggttcgcgattgtcgcgtttttttttatacgcgatttttttttcgtttttttttagttttagtttttttttaattttttttatttttttttttttttgtttagtttttatagtagtatacgtttatatagtttatagtttataaatattattttattttaatattagttttgataggtagggattattagattcgttttataggtggtattgatgaggtttaaagatttgaagttatattgttattaatttttttatatttttgagaggggtttttggtattttgtttaggagtgatgagattttaaataaagtgtttgtggatacgaagtgatatagaatttgaagggaagttagggaagtagttttgttatttattatattaagggtaaaatataggtattttggtgtttagagggttaaaagttttgttaaatattaattttttgtattttatataagcgtatatatataggtatatacgtatataatatttatttgtgtattggttataaagagataaataggaataaatttttaaagagttagtaagattgtaaagagttttttgtataatttgattttaatatagtaaatcgttgtttttttttttttgtattttacgtaagtagttgaattatgtaaataatgaaagaatggagtttgtgagaaattgtttgtttgttattgtgtggttagttttatggtatataggggttgtaatttttttttgagttattgagaaagtttagagttttaaagttgtggtaaaattaataataattagtaagttataattatttttaggttttttattaaagtatattttatatgtttagtatttaatgtgtattattagtcgtgtaagggtgttgtttagtagatgaaagttagttgggtttttgttttattaatttttacgtaatttttgaggtaggaagattgaaatatattttgttttgatagatagaggaagtagagatatgtgagggataatttttttttttttttttttttttgagacggagttttgtttttgttgtttaggttggagtgtaatggcgtgatttcggtttattataattttcgtcgtttaggtttaagtaagtttttcgcgttagtttttcgagtagttgggattataggtatgagttattacgtttggttaatttttttttgtatttttagtagagatagggtttttttatgttggttaggttggttttaaatttttgattttaggtgattcgtttattttagttttttaaagtgttgggattataggtatgagttattacgttcggcgaattttttttttttttttttttttttttttttgagacggagtttcgttttgttatttaggttggagtgtagtggtatgattttaatttattgtaagttttattttttgggtttatgttatttttttgttttagttttttgagtagttgggattataagcgtttgttattacgttcggttaatttttttggtatttttagtagagacggggttttatcgtgttagttagggtggtttcgattttttgatttcgtgattcgcgtgagggataattttttatttataaatatgaggaattgtgggatagttttttgttgtttatttttattgtttttgtttaggttttttttggatagatatttgagttaggttttagttttttttttttttttcgatttcggtttattttgtatttaagaagattttttaaattagaagtttgtgtttattttttttttgttaagtagagtgaggggggtgttttcggttttttagataaaatttatgttttttatattagtttttaagattatttttatatgatgttataggtaagttatgtttttgtgttttagttttgttatttgtaaaatggggataataaaagtatttattttataaggtaggttttatagttaatgtagataaattgttttgaagagtatttgttttaatagtatttatatatagtaagtaacggatagatgttagttgttgttatttgttattatcggtgtcggcgtcgatattattattattattattatcgagtttttggtaattttttttgtagtatatgtttttaaggtttttcgaaaggatattatttggagtttttttttttttatttagtgtataattttgtttttttatttagtttttgagttatttttaagatgttttttttaataaggttttttttgttatatttagggatatgtttttttattcgtttttaattttagatatattaggatggtaatattaatttttttgggtttttgtttttttatttgttaaatgggtaaaatatagtttgtttcgtagattatgttgagatttaaatataaagagatgagatggtagatgttaaagttttgtaaattttaagattttgtaaaaatattagattttatttttatttttaaaatatatatattttttttttgtttttttaggtattaattaggtagttataatgttttataattagtagagttttttattttttattttattaggttttaggttggtaagaggaaagttgatgagagagggtttttagggttgaggaatttgtgtgatggtattattgattattaagttagaatagttttatatgggtggtattggggttagtgttttgaggtatttaagtttttgttttttttaattatgttaggtattgagaggataggaatagaaggggtttagttttaatattttttggggaagttagagtaaggtaaagatgattttttaattttttttttttatagattttatttgtttaaattttttggttttgttaggttttttttaatatatataaagattataatgagtttattatgtaaatatagttttagttgtgattttttttttttttttcgttttttttttgttaagttttgtaaaatagtatgtattagttttatttttttttatttatttatttatttatttttgagatagagttttgtttttgttatttaggttggagtgtagtagtatgatttcggtttattgaaattttcgttttttgggtttaagtgatttttttgttttagttttttaagtagttgggattataggtgtttaatattatgtttagttaatttttgtatttttagtatagacggggttttattatgttggttagggtggttttaaatttttgattttaggtgattttttcgttttggttttttaaattgttgggattataggcgtaattttattatatttagtttgtatttttttattttaatttaaaaaatatttaatataagtattttaggtttgttatgtgtttatgaggggcgggaagtatatataagtattgtatgtagttttagtattagaatattaggtattaagtaatgtttattggattaatattgagttgtgtttagagtgttttaatattaatatatttttttaggagtgtttatgtggattattttagtatttttttttttgtttaagttttattatttgttttaattatgaatttttgtttttattttaatttattttttaaatatttaattttaaggaagattgggtaacgatgtttttattgttatttttgtttaatttttaatttttgttagttttgtgtttgtaaggatgaaggatatgatttgaggatattaagagtagttaaagattttataagtaagtgtataatgtagttgaaagaaaatggattttggatttagtgagatttaggtttaagttttggttttatattatttattgttgtgtgttttttagtaagttgttttagtattttgcgttttagtttttttaattgtaaaatgggggtaatagggtttatattgtattaatgtttgtgaaaataatgattttttattttgtaattaataatatatttttttttattgaattttatattttagttgtttttgtgttttttgataaatttttggtgataatttgattttttttggtataagattaatattagtatgtgaattttatattaaagggtatgatatataaaaataaaatataaaaataaaattgtttgattaattaaaaataaatagtatttattatcgagaattattttaatgattttagataaagattataaaatatttaatataatgtttggtatgtgttaagtaaaatattttagttattattattagttattttaggaatgtgaagatgttttaagattattaaagggttttttataaggttagtgattatggggattgttgaagattaagtttagggagttgagtgttaggtaggagagtagttcgagagttttaattattttttgatttttaggatgtagtaatatggagagtatttagatgtagatagtgttttagtatatttgtttttattatttgttgggatttttgtagtatttttgggggttaggtagggaagatattattatttttattttatagatgtggaaatagaggttttgggggaagggaataatttgtttatggttatatgtttataaaaggtgaggttaggtttagaaattaggttttttgattgtaaatgtatatagaaattaataaagatggaattaataaggggttgaaagagtttagagatttattttatgttttttaggttttttgttattttttatttttttttttaattgtataaatatttttaggaattttttgttttaagaagaatgattaaataatttatttttttttttttttatttatttatttattttttttatttttttatttttttattattatattttaagttttagggtatatgtgtatattgtgtaggttagttatatacgtatatatgtgttatgttggtgtgttgtatttattaattcgttatttagtattaggtatattttttaatgttattttttttttttttttttattttataatagtttttagagtatgatgtttttttttttgtgtttatgtgtttttattgtttaatttttatttatgagtgagaatatgcggtgtttggttttttgtttttgcgatagtttattgagaatgatggtttttaattttatttatgtttttataaaggatatgaatttattattttttatggttgtatagtattttatggtgtatatgtgttatatttttttaatttagtttattattgttggatatt

SEQ ID NO: 275 - DNA, 12986 bp, Artificial Sequence
  chemically treated genomic DNA (Homo sapiens)
ttattaataaggttggaagtgaattgttttttgaatatttgtttagttttattttttattatttttttttttagttgttattattggagggtgtttaggtttttggtattttgaataaagaattggatataatatataaagtaagaaggaatgaaggaatttattgaaaatgaaagtatgggttgggcgcggtggtttacgtttgtaattttagtattttgggaggtcgaggcgcgcggattacgaggttaggagttcgagattagtttggttaatatggtgaaatttcgtttttattaaaaatataaaaagtggttgggtatggtggtgtatatttgtaattttagttatttaggaggttgaggtaggagaattgtttgaatttgggaggtggaggttgtagtgagtcgagtttgagttagtgtattttagttcgggttatagagtaagattttattttattaatttatttcgtagtgtgggagggggtttaagtataggagtttaagggtttttgttatagaatttttgggagtttaaatattttttatttgggatacgttttatgtaaatgaaaaggatgaagtaaagttataaagttatttatttggtttatattttatggagaggatattttttgttatagttgaagtgtgaattagttttttgtttttcgattttagattttgtttttttgttttaaagtatgtttttattttagggtatttttttttgttttttttttaggtatttttatggtttgttttttcggtttttttatgtttgtgttttagtgttaagttttttaaaagatttgtttagattatttttgaaaatagtagggtcgggcgtagtggttcgtttttgtaattttagtattttgggaggtttaggtgcgcggattatttgaggttaggtgtttaagattagtttggttaatatggcgaaattttgtttttattaaaaatataaaaattggttaggtatggtggtatgtgtttgtaattttagttattggggaggttgaagtatgagtattgttttaatttaagaggttgaggttgtagcgaggtgagattatgttattgtattttagtttgggtgatagagtgagattttgttttaaaaaaaaaaaaataaataaataaaagaaaagaaaataatggatttttattaattttgtatttttttttttttttttttatagtttttgttagtgtttgagtgttatattatatacgtgtgtgtttgttgtttgttttttttttttatagtataaggttttttaagggtgggtattttgttttgttttttattatttttttattattggtaatagtgtttgatatatagtaatagtatggtaaatatttatcgaatgaattaataagttaagtgaaaaaaaagcggcgggtggattatttgaggttaggagtttaagacgagtttggttaatatggtgaaattttgtttttattataaatataaaaaaaaattagttaggtatggtggtgggtatttgtaattttagttatttaggaggttgaggtaggagaatcgtttgaatttaggaggcggacgttgtagtgagttaagattgtgttattgtattttagtttgggcgatagagcgagattttgttttaaaaaaaaaaaaaaaaaaaaaagtgttataatgttggtatatgtatatttttgtaggaattttgaaaggagatttgggagatgggggtgggggaagggtgggaaggatattttatttttatcgtgtgtttttttatgtagtatgttataattaagtatatgtgttatttttttaataatatatggggggaaataatttaggtttttttattcgcgttcgtgtgaagagattattaaataggttttgtgtgagtaatagggttgtttattttatttgggtgtaggcgggttgagttcgaaaagagagttagcgaagggagataggggtggggtcgttttataggatttgggtaggtaaaggaaagttatagttaaagagggttgttttttgatggttaggggcgggggttataaggtgtttagtgggggagtttttgagttaggatgagttaggagaaggaattttataaggtaatgttattagttaaggtaggaatagggtatttttatttttttcgtggtggaatgttattagttaaggtaggaataggttatttggatgtgtatgtgaaggttacggggttatgatggtttagtttgggtttagaggtttgataggtttgataatggatgtgtaaagatgggaggagttgttttgggtggtagtgagttttttattttagaagagatgttgttaaggggtttttgtttgaggcgggaaattggagtagatgattataaagatttgttgttttcgttttggttaagtagaagtgatatatttaattagttagggttagaaatattaagagatggggggattttatatgtgggaggataaatgtttataggtaagaaaatgaaaaattgtttagttgatagttagatttaatgtttttaattgaataaaaatagtgattatagaatataaataaagattagataagattattatgtagttggattaagatatagataaagttattttggtatcgtagataggatttaatattttttaattttgattaataaatgagtggattttgtttttttttttgtaatcgagcgaattatagagaaacgttatattttgagacgaatttaggagttttttattagtcggtaattgagagatggttagtgtttaaaattttttcggtttcgaagaaggggttagatttttttttatattttggtttagaaaggggagggggagtttagttgaggtaattttatagaagtaaaataggtaaaaaagttaaaaagataaatggttataggaaaataaatagttttaggtgtaggggttttaaatttattataaggtgatagatgtgggggttttgggtattattaatcggataaaaatgtaggggtttagggtattattaatcgggtgaatttttggaaattgtagttatcgtttgttatagtattttattagttaattgtattttttgatgtgttgggagttagtttgtataagttaaatttttgaggaagtgggatgggtaaggagcggtaagtgaaggagttaaaatggagtttgtttgttttttttagttaagagagagttaatttaggttaagataaggtagggtattatatttttttaaggattaatttagttttgttttaattttttttttttttggataaaaatttgtaagatatttaattattgaattgtttttattttttgattgtgtttaatttaaaattgttttttttttttttaaattttttttagatttagttatttagtataaatttaaattttaaaataagttttttttagttattttttattaagatattttatattttttttgatatgtgttttttttttttgaataagttaaataaatttaattttttttgattataggtatgtttttggtagaattcgatttgtaaaatttattatagttagtttttttaagtttagattagtaatatttagataggaagaagtaagaatgttaaggattatttggaaagtttagtggttttgaagtaatttgatttgagttggtatttgtgtatgtgtggtgaggagagggatttgggaaaagagaggtaggaattattaaatgtgagtagttttttttttttttttattagttttttttatggttttgggtaaattttgagttttattttatttttgtaaaagatgaatttggaatatatttttaaggaatttaggaaataatatttttaaatatgttatattggtatgatgattgtttggggaatagtatatggagagaggggttttttatgaattttttttattagattaaaggttgataatttagaaggaatttaattatgaatttttttttagagagttttatttattagggaagattaatatattataggagaagatattgaagtgtgatattttgttgttcggatattattattgtttgttatattttatttaaattattatatgtgtaagtaaaaaatgtttttatttttttttttaagtgaatttttaaatttgatatgtattttgaaaggaatatttatattattgtttaaatgggaaattagtattgttcggaagaaatgaaaaggttattgttaatatatattttaaaataaaataatattttaaaattgtaggtatggttgtttgtttgagagatttggaaaatgaaggttttattttgttagaaagggagataaatattagaaaaatgttaaatattatattggttttaaataattagtttgttggtttgaaatgggacgtttttattttgttgtttaatatcgtttaatgttttttatgtatttttagagttatttattttttttaaatggggtgtattttatattttaggatacgatttttatcgtttttaggttaatttggatttattttttagttcgtagattaaaaaataaattttttagagaagttttttaagattattgtttagttaaattattttttttttataataggaggtattaaatatatttttattgaaagtttatttttttatattattttatcgtatttattatattggggtacggtgtatttatgttgttagattttttattaattagagaataaattttgagcgtattgtgtttttttgtatatttttgtaatttttagatttttgtataatgaatataaatgatgtaaggaatgatatttttatagtttttgtaattttaggatggtttagttttatttttttttttagttaatgataggcgtttttttttgtcgtttcggtcgcggacggtgggcggggttacgtcgtgacgtattcgtgcgtttgtggaaggttgcgttttcggtttgagaaatcgttatgtttttggggagttattttagttggtagttattatcgtgttagaaagtagttttaggatcggttatttttattattggcgttattatgggggttgtgttgggtgttttttttttcgttagttgggtgagttcggggtttcgagttttcgtcggatttgcggtttgcggggaaaggtttcgagattagagttgtacgggttttggttttagaggttttcgggatgttagtaggttttgggttatagagggttttcggggttttagacgtaaattcgcgatatttttaggtttagtttaggcggttcgtttttcgggtttttcggggaacggaagaggttaggtcgttattgtttataattcggatggtttcgttttgcgaggttttttgattaggtttttttggagttggagagggattaaggaatgatagtttttagcgaggggtttcggtttttttcgaagtattttttaaggtgttattatttagttttaggtggtttaagtaatatttttattttttagtacgggatttgttaaaattatagagtgtgtggtaaagttggggttttagcggaggtttgtttgtagtttaggtgtaagggaaagaagtttttgtggattgttatttaaaattggaaattagggtttgaatattttgggattgttgtaagttatttattcgaggataattattttagtattttttttttcgagaacgattgtgatagtgaagtgaaggtttaattattttgtaaattgtaaatattttaaagagaaaattatagggtttataaaagaatatgttgagtttttttatttatttattttagaggagcgtgattttttgattttttattttttagttgatttaattgattaagtgtgtagaaaaagtatatttagttttttttgttgtatttataatatatttttgatatttgatgtgtggtgtgtggggatttttttttaaatattaggtaaatagttagttttgtaggggatgttaatttggtgttttataagttaatttcgaagttttttatttggagatagtattaaattatataagtggagggtttagttttataagattgtgtttattttttgtgttaatggtaagttttaggttgttttatttgtgtttttgatcggttatttataaattaaagttttcgtgatttttttttttggttttgattaatttggttataaaatttaaggaaatatgtttattggtttattataaaagtattttattttgtgtatttatgtatttttaattttagatttagagggtatatatgtagttttgttatatgggtatattgttttatcgtgaggtttgggtttttaatgatttcgttgtttaaatagtgaatatagtatttaataggtagttttttaatttttatttttttatcgtttttttttatttttggattttttagtgtttattgttgttattttcgtgtttgtgtttttagtgtttagtttttatttgtaagcgagaatatgttgtatttggttttttgtttttgtattaatttatttgggatagtggtttttagttgtatttttgttgttgtaaaggatatgatttttttttttttttatggttattattaatatatttttaaagatatagatgaagtgatatgtaagataaggtgtagagggaacgggtttggagtttttatgttttgtttggggtagtggcgttatttcggttttttttaatttttaagggatttttatgttttagtttttcggagtagttgggattatagtgtatgttattacgtttagttaatttttgtatttttaataaagacgggatttcgttatgttggttaggttggtttcgaatttttggggtgtgagttattatgtttagttaaaagtttttttgaattttgtttttttgagtttttatgtaggttttattatgtagttagtatttattaaattattggtttttggttattgatttaatttttagtttttttttggagggttaggggtgagattgaaaagttttaattttttattatgatttttatttattatgaagttatttaggggttgttagttattagttattttattagtatataaaaagacgttggttattttaaggattttagaaattgtatgttaggaaatgggaattaaatatatatatatttgatagtattatattaaggattttgttttagttttttttattattttttttttttttttttggagggggatagagttttgttttgttatttaggttggagtgtagtggtttagttatagtttattgtagttttgaatttttggatttaagtgatttttttattttagtttttttagtataggtgtgtgatattatgtttggttttattttattattttttaggaatagaatgtattttaaggttgttggttttaaattaaaagagtgttttatttttaagggtttttttgagagtagtggttttttaattattttgattttgatttaaagaaagattgtatatagttgatttgtgatttgatgtatttatatagagataaagttttatgaaataatcgtttattgtataattttttttttattttttattatattagaaaattttggtgagttgaaggttaggtatggtggtttacgttaggatggttttaattttttgatttcgtgattcgtcggttttttagagtgtttggattataggtgtgagttatcgcgttttgttcggtttttatttttaagttatatgggaatttattatagagtttgaaaaaaggagtgatgtgatttgggtttgtgttttaacgaggtggtttttggttgttgtgtggagaatagatggtagaaaagtaaaggtaaagtagtgtaggttgggaagaatttttttttagttttttgggttttgtttttgggggtttgtgaattaaattgataaaatagattatttagagtttatgtatgtaagatatgtatatataggagtgtttagtaatagtaatttaaagggggcggttagaatttgaggttttttttttttttttcgtttttgagaaaataagttttatttttgttgtttaggttggagtgtaatggtgggattttggtttattgtaatttttattttttaggtttaagcgatttttttgttttagttttttaagtagttgggattataggtatgtgttattacgtttggttaattttgtatttttagtagagatggggtttttttatgttggttaggtcggttttgaattttcgattttaggtgatttgtttattttagttttttaaagtgttgggattataggtgtgagttattgtatttagttaaggttttttaatttagtaggaaaaaggaagttgggagaaaggtttttatgagaagaataaataggtttttttaggaaagataagtttttttaggagaataaataggaaatacgtttgtggtagtatttgtttatgtaggtatggtgggtttttttagtttttttatgattttaaaattgttttggagagggattttatggtagtttcgttttttagaagttgttgtttttagttagataagagaagtttttagaaggttttttttttttttttgtatttgttgaagtttagatgttttagtttaaaagtttaaaataatttttataataatttagggttttttttttttttttttttttttttgaggttaattttgtatttttagtagagataggattttattgtgttggtttggcgggttttgaatttttgattttaggtgatttgtttgttttggttttttaaagtgttgggattataggcgtgagttattgtgtcggttaatttagagtttttgaatgggtcgttatagttgtgagatgggaatttttgcgtttaatttagatgagagatgatagttgtggtttggataaaggtgatagttaaggatattgtgaaaatggttagattttggatatattttaagggtagagttgatgtattgatagattggatgaggattttgggaaaagggaaggtattcgggatgattttaggttttgggtttaagtaataggaagaatggagttgttatttattgaaatagaaaaatgatataatatatagtaggatagatttgttttatagatatttattgagtatttgttttgtaaagatataaaagatataacgttgtaaagatagtttttttttcgagatatttatatttttaagataattataggtaagtaagtttattagtttgttagggttttataataaagtattatagatcgagtggtttaaatttagtgattttttatttttgaattttagaggttggaagtttgggatgaaggtgttagtagggttggttttttttaagggtggtgagagagaatttgtattatgttttttttttggttttttttttttttggtttgttggtagtttttgatgttttttggtttgtagatttttgtttttatatggtatgtggaattttttttgtgttgtaagtttttgtttaagttttttttttttataaggatatagttatattgaattagttgtttattttattttatataattttattttaatttattatatttgtagtgattaagtaaggatatattttgaggaattgggtattaggattttaatataagaatttgtggaggatatgtttttgtagtgtttggtttatattgtagttaagaattggagattgagattggttggttaattttttattgttattgtaattataaataataatggttattacgatatattgagtttgataaatatgttaggtattatattaggttttttatatttttgatattattttattttttgtttaattattttgttcgagtaggtggtattatgtttatttttatagatgagaaaattgaatttttttagaatgttagtattttgttgtaaattatataaaattattataaagtgtatataagatattatttataaaaaaatgaagattatttttgggattatattttaagattagagttatttattgtttatttttgttaattttgaattagtttgtttttgtaatatgatttgataatgttatttttttagagtaattttaagtagttttttaattaagtataatgatttaaattatatttttttttagttgggtatggtggtgtttgtttgtatttaggaggttgaggttagaggatcgtttgagtttaggagtttgatgttgtagtgagttgtgattatataattgtattttagtttgggtaatagagtgacgttttgtttttttaaaataaaataaaataaaggtcgggtgtattggtttatgtatgtaattttagttttttgggaggcggaggcgggtagattatttgaggttaggaattcgagattagtttggttaatatggtgaaattttgtttttatataaaaattagttgagtatggtggtacgtgtttgtaatttttgtaattttagttatttgggaggttgaggtagaattgtttgattttaggagggtgaggttgtagtgagtcgagatggcgttattgtattttagtttgggagatagagtgagaatttgttttaaaaaaaaagaaagaaaagaaaaaaagaaataaaattatatttttttttatgtagtgtggttattaatagattttagtagattaaagatttaggttattttttttttttgagacggagttttagtttgtcgtttaggttggagtgtagtggtataattttggtttattgtaattttggttattcgggtttaagtagtttttttgttttagttttttgagtagttgggattataggtgtttgttattgtattcggttaatttttgtatttttagtagagatggggttttattattttggttaggttggttttgaatttttgattttgtggtttatttgttttggttttttaaagtgttgggattataggcgtgagttattacgtttggttttaggttattttttaaaaaaaaggaggtaaagttgatataaaattaattattttaaaatgtttagtgggtcgggtgtagtattttacgtttgtaatttagtattttcggtggttagtgtgggtggattgtttgagtttaggaatttaagattagtttgggtaatatgataaaattttgtttttattaaaaaatataaaaaaaaattagttgggggtggtattgtatatttgtagttttagttatttgggaggttaaagtataagaattgtttgaatttaggaggtggaggttgtcgtgagtcgagattgtgttattgtattttagtttgggtaatagagtgagattgttttaaaaaaaaaaaaataaaaaagcgtatagtggtatttagtatatttataatgttttgttgttattatatttgtttagttcgtcgttttaaagggaaattttttatttattaaattattatttttattttttttttttttaatttttaattttttgtttttagatttatttattttggatattttattatataaatgtattaatatagtatgtgattttttatgtttggttttttaaataattttgtatgatgtttttagggtttatttgtgttttattatgtatttatttattatgtttgaataagttattgtatagatagattaagttttattttgttgtttaggttggagtgtagtggtatgattttagtttaatgtaatttttattttttgggtttaagtaatttttttgttttagttttttgagtagttggggttataggtatgagttattacgttcggataatttttgtatttttagtagagatgggattttattatgttggttaggttggttttgaatttttgattttaggtgatttgtttattttagttttttaaagtgttgggattataggtgtgagttgtcgtatttagttagatatattatatttttatttaggttatatttatttattaattaatggatagtgggttgtttttatattttggtgattgtaaatagtggtgttgtgaatattcgtgtataagtttttgttttaatagtagttttaaataaaatagttattggggtcgggtatatattttttgggttatatggttattttgtatttaattttttgaggaatttggttttttttgaattgagttaaatggtttttgttgttattatttgttagagggtttttatgtagtgttgttttatttttttattttattttatttttttgagatggagtttcgttttgtagtttaggttggagtgtagtggcgtaattttagtttagtgtgagtttcgttttttgggtttatgttatttttttgttttagttttttgagtagttgggattataggcgttcgttattatattcggttaattttttttgtatttttagtagagatagggttttatcgtgttagttaggatggtttcgattttttgattttgtgatttattcgtttcggttttttaaagtgttgggattataggcgtgagttattacgttcggtatgttgttttatgttgtaatattagttttggtaatttggattcgtagtaagtagtaagtggagttaggtttatattttttttatattttaaaataaatgatgtttttagaatataattaatatttattgaattgttaatgtattttaggtagtgttgagtgtttatttaatatagtagagtttgagggaggaaaattttattattgagtttattttataaatggttaaatggggttagagtacgtaatttgttggggtaaaaagcggtagaaataatatttattttagagttcgtatttttaattatttttttttagttatgattttttgagttaaaattataaagtttgatttgtttcgtttttttttttgcgatatttgtgttataaaggagtatattgaaggcggttttaggtgattatggtgtgtttattttagg

SEQ ID NO: 276 - DNA, 12986 bp, Artificial Sequence
  chemically treated genomic DNA (Homo sapiens)
tttggaatgagtatattatggttatttgagatcgtttttagtatatttttttatgatatagatgtcgtagaagagaaagcgaggtaaattaggttttatagttttaatttagagaattatggttgggaggaagtggttaaaagtacgggttttggagtaaatattatttttgtcgttttttattttagtaagttacgtattttaattttatttgattatttgtaaaatgagtttaataatggaattttttttttttagattttgttgtattaaatgagtatttaatattatttaaaatgtattaatagtttaataaatgttaattatattttgagagtattatttgttttaaaatatgagaaaaatataaatttaattttatttgttgtttattgcgaatttaagttattaaagttgatattataatataaagtaatatgtcgggcgtggtggtttacgtttgtaattttagtattttgggaggtcgaggcgggtggattataaggttaggagatcgagattattttggttaatacggtgaaattttgtttttattaaaaatatagaaaaaattagtcgggtgtggtggcggacgtttgtagttttagttatttaggaggttgaggtaggagaatggtatgaatttaggaggcggagtttatattgagttgagattgcgttattgtattttagtttgggttatagagcgagattttattttaaaaaaataaaataaaataaaaaaataaagtaatattatatggaaattttttgataaataataatagtaagggttatttagtttaatttaagaggaattaggttttttagaaagttaaatatagaatgattatatgatttagaaagtatatattcgattttaatagttgttttgtttgaaattgttattaaaataaaagtttgtatacgaatatttatagtattattatttataattattaaaatgtggaaataatttattgtttattaattgataagtaaatatggtttaagtaaaaatatggtatatttggttgggtgcggtagtttatatttgtaattttagtattttgggaggttgaggtgggtaggttatttgaggttaggagtttaagattagtttggttaatatgatgaaattttatttttattaaaaatataaaaattattcgggcgtggtggtttatgtttgtggttttaattatttaggaggttgaggtaggagaattgtttgaatttaggaggtggaggttgtattgagttgaaattatgttattgtattttagtttgggtaatagagtgagatttggtttatttatataatggtttatttagatataatagatagatatatgatagaatataggtgaattttgaaaatattatgtaaagttatttaaaaagttagatatgaaaggttatatattgtattagtgtatttatataataaaatatttagaataagtgaatttagagatagaagattaggggttgaagggaagggaaatgggagtgatggtttaatgggtaaaggatttttttttagggcgacgaattagatagatgtgatggtagtaaaatattgtgaatgtattaaatgttattatacgtttttttatttttttttttttgagatagttttattttgttgtttaggttggagtgtagtggtataatttcggtttacggtaatttttattttttgagtttaagtaatttttgtgttttagttttttaagtagttgggattataggtgtgtaatgttatttttagttgatttttttttgtattttttagtagagatagggttttgttatgttgtttaggttggttttgaatttttgagtttaggtaatttatttatattggttatcgaaagtgttggattataggcgtgagatattgtattcggtttattaaatattttgaaatggttaattttatgttaattttatttttttttttttaaagagtaatttagggttaggcgtggtggtttacgtttgtaattttagtattttgggaggttaaggtaggtggattataaggttaggagtttaagattagtttggttaagatggtgaaattttatttttattaaaaatataaaaattagtcgggtgtagtggtaggtatttgtaattttagttatttaggaggttgaggtaggagaattgtttgaattcgggtggttaaggttgtagtgagttaagattgtgttattgtattttagtttgggcgatagattgagatttcgttttaaaaaaaaagagtaatttagatttttagtttgttaaaatttgttagtgattatattatatgaaagaagatataattttattttttttttttttttttttttttttttttgagataggtttttattttgttttttaggttggagtgtagtaacgttatttcggtttattgtaattttatttttttgggattaagtaattttattttagttttttaagtagttgggattatagggattatagatacgtgttattatgtttagttaatttttgtgtaaagatagggttttattatgttggttaggttggtttcgaatttttgattttaagtgatttgttcgttttcgttttttaaagggttgggattatatgtatgagttaatgtattcggtttttgttttgttttgttttaaaaagataaggcgttattttgttgtttaagttggagtatagttgtgtgattatagtttattgtagtattaaatttttgggtttaagcgattttttggttttagttttttgagtataagtaagtattattatgtttagttaagagaggatataatttgagttattatgtttgattaggaaattgtttgaaattgttttgagggggtgatattattaagttatattataaggataagttaatttagaattagtagaagtaaataatggataattttggttttaaaatatggttttaggaataatttttatttttttatagatggtattttgtgtgtattttatgataattttgtgtggtttgtagtagggtgttaatattttaaaaaagtttagtttttttatttgtaaaaatgagtataatattatttattcgaatagggtgattgagtaaagaatgagatgatgttaggaatataaagaatttagtataatgtttgatatatttattaggtttaatatatcgtggtagttattattatttgtaattgtaatagtaatgggaaattgattagttagttttagtttttaatttttaattatagtataggttaaatattgtagaggtatgttttttataaatttttatgttgaagttttaatgtttaattttttaaaatgtatttttatttggttattgtagatgtagtaagttaagatgaggttatatggagtagagtgagtagttaatttaatataattgtgtttttataaaaaggggaaatttggataaaggtttataatatagggagaattttatatgttatgtgaaggtagagatttataagttaaggaatattaaagattgttagtaaattaaaaaaaaaaaaagttaggggagaggtatgatatagatttttttttattatttttagaaggaattaattttgttgatatttttattttagatttttagtttttagaatttagagataagaaattattgggtttaagttattcggtttgtggtattttgttataaagttttggtaaattaataaatttatttatttatagttgttttaagaatgtaaatatttcgaaggggagattatttttataacgttatattttttgtatttttatagagtaggtatttagtaaatatttgtgggataaatttgttttattatatgttatgttatttttttattttagtaaatgataattttattttttttgttgtttgggtttaaaatttggagttatttcgaatgttttttttttttttaaaatttttatttaatttgttagtatattagttttatttttaaaatatatttagaatttgattatttttatagtatttttagttattatttttgtttaagttataattattattttttatttggattaagcgtaaaagtttttattttatagttgtagcgatttatttagaagttttgagttggtcggtatagtggtttacgtttgtaattttagtattttgggaagttaaggtaggtagattatttgaggttaggagtttaagattcgttaggttaatatagtgaaattttgtttttattaaaaatgtaaaattagttttaaaaaaaaaaaaaaaaaaaaaagaagttttgaattgttataaagattattttaagtttttaagttgaagtatttgagttttaatagatgtagaggaaaaaaaaaagttttttgggagttttttttatttgattaaaagtagtaatttttgggaaacgaggttgttataaagtttttttttagggtagttttaagattatgaagaagttggaaagatttattatatttgtataaataagtattattataaacgtattttttatttatttttttaaaaaaatttgttttttttaaagaaatttatttgttttttttatagaagttttttttttagtttttttttttttattaaattagaaagttttggttgggtgtagtggtttatatttgtaattttagtattttgggaagttgaggtgggtagattatttgaggtcgggagtttaagatcggtttgattaatatggagaaattttatttttattaaaaatataaaattagttaggcgtggtggtatatgtttgtaattttagttatttgggaggttgaggtaggagaatcgtttgaatttgggaggtggagattgtagtgagttaagattttattattgtattttagtttgggtaataagagtggaatttgtttttttaaaaacgaaaaaaaaaaaaaaagttttaagttttaatcgttttttttgagttattattattgagtatttttgtgtgtatatgttttgtatgtataaattttaaataatttgttttgttagtttaatttataagtttttagaaatagaatttaaaaggttggaggaagattttttttagtttatattgttttatttttatttttttattatttattttttatatagtaattagaaattatttcgttaaaatataggtttagattatattatttttttttttaaattttgtaatagatttttatataatttaagagtaaaagtcgggtaagacgcggtggtttatatttgtaatttaagtattttgggaggtcggcggattacgaggttaggagattgagattattttggcgtgagttattatgtttggtttttaatttattaggattttttaatgtgatagaagataaaagaaaaattgtatagtaaacgattattttataaaattttgtttttatatgggtgtattagattatagattaattatgtataatttttttttaggttaaggttagaataattagaaaattattgtttttaagaaagtttttaaaaatggaatatttttttgatttaggattaataattttaaaatatattttgtttttaagaaatagtggaatgaagttaggtatggtgttatatatttgtattgggaaggttgaggtgggaggattatttgaatttaggagtttaaggttgtagtgagttatgattgagttattgtattttagtttgggtgatagagtaaaattttgtttttttttaaaaaaaaaaaagaaaaatagtagaaagagttgaaatagaatttttggtgtaatattgttaaatatatgtatgtttggtttttattttttggtatataatttttaaaatttttggaataattagcgtttttttgtatgttaatgagatgattggtgattggtagtttttaggtggttttatgatgggtgagggttatagtaggaggttgggattttttagttttatttttgattttttaaggaggggttgaaggttaggttagtaattaaaagttaatgatttaatgaatgttgattatataatgaagtttgtataaaagtttagaaggataaagtttagaagaatttttggttgggtatggtggtttatattttaggagttcgagattagtttggttaatatggcgaaatttcgtttttattgaaaatataaaaattagttgggcgtggtggtatatattataattttagttatttcgggaggttgaaatatgagaattttttggaggttgaagagagtcgagatggcgttattgttttagatagagtatggaagttttagattcgttttttttatattttgttttatatattattttatttgtatttttaaaaatatattaatagtagttataaaaaaagaagaaaattatgttttttgtagtaataaagatgtagttggaggttattattttaagtgaattaatatagaaatagaaaattaaatatagtatattttcgtttataagtgggagttaaatattgggaatatagatacgaagatggtaataataaatattggagagtttaagagtggggaaggacggtggggggataggggttgaaaaattatttgttggatattgtgtttattgtttgggtaacggaattattagaaatttaaattttacgataaggtaatatatttatgtaataaaattgtatatgtattttttgaatttaaaattaaaaatatataaatatataaaataaaatatttttataataaattagtaaatatgtttttttgagttttgtgattaaattaattaaagttaaggagggaggttacgggaattttgatttataggtggtcggttagaagtataggtaaaataatttgaggtttgttattggtatagaaagtgggtatagttttgtgagattgagttttttatttgtgtgatttgatgttatttttaagtagagagtttcggaattgatttgtagggtattaagttggtattttttgtagagttgattgtttgtttgatgtttgggggaaaatttttatatattatatattaggtgttaaaagtgtgttgtgagtatagtaggagaaattgagtgtgttttttttatatatttggttaattaaattagttggagaatgaggaattaaggaattacgtttttttgaagtgggtaaatgagggaatttagtatatttttttataggttttataattttttttttaaaatgtttatagtttataaggtgattaaatttttattttattgttataatcgttttcgaagagaggaatgttggggtgattattttcggataaatgatttatagtagttttaaaatatttaggttttggtttttaattttgaataataatttataagggttttttttttttgtatttgaattgtagataagttttcgttaaaattttagttttgttatatattttgtagttttggtaaatttcgtgttaggggataaaaatattatttgagttatttagaattaaatgatggtattttaagaggtgtttcgggaggaatcggagtttttcgttgggagttgttattttttggtttttttttagttttagaggaatttagttaggaagtttcgtagggcggagttattcgaattgtaaataatggcggtttagtttttttcgtttttcgaggaattcggagggcgagtcgtttaagttggatttgagggtatcgcggatttgcgtttggggtttcggagattttttgtagtttagggtttgttgatatttcgagagtttttggagttaaggttcgtgtagttttggtttcgaggttttttttcgtaaatcgtaggttcggcgaggattcgggatttcgaatttatttagttggcgagggagaagatatttagtatagtttttatggtgacgttagtgatggaggtggtcggttttgaggttgttttttaatacggtggtaattgttagttgaggtgattttttagaaatatgacggttttttaggtcggaaacgtagttttttatagacgtacggatgcgttacggcgtggtttcgtttatcgttcgcgatcggagcggtagaggggggcgtttgttattggttgagggggaaggtggggttaaattattttggggttgtaggaattgtgaaggtgttattttttatattatttgtatttattgtgtaaagatttggaagttatagaagtgtatagagaggtatagtacgtttagaatttattttttagttaataggagatttgataatataaatgtatcgtgttttaatgtaatgaatacgatgaagtagtatgggggaataggtttttaataaaggtgtatttagtgttttttattgtaaggggaaagtaatttagttgggtagtagttttggaaggtttttttgaaggatttattttttaatttgcgaattaaaggatgagtttaaattaatttagaaacgatggaaatcgtattttaaaatgtgggatgtattttatttgggaaaaatgaatggttttaagggtgtatgaaggatattaagcgatattaaatagtagagtgagaacgttttattttaaattaataggttagttgtttgaggttagtatggtatttaatatttttttagtatttatttttttttttaatagagtaaagtttttattttttagattttttaaataggtaattatgtttgtagttttaaaatattgttttgttttgaggtgtgtgttagtaataatttttttatttttttcgagtaatgttgattttttatttaagtagtgatgtaaatattttttttaaaatatatgttaaatttgagagtttatttaaagaagaaaatgaaaatattttttatttatatatataatagtttaggtggaatgtggtaaataatgatgatgttcggataataaggtgttatattttaatatttttttttgtggtgtgttaattttttttgatagataaaattttttggaaggggatttataattgaattttttttggattgttagtttttagtttgataagggaaatttatgaaaagtttttttttttatgtgttgttttttaagtaattattatattagtgtggtatatttggggatgttattttttggattttttgaaaatgtattttaaatttattttttatagaaatggaatgaggtttaaagtttgtttaaggttatgaaaagggttgatgaaagaagaaagagaattatttatatttaataatttttatttttttttttttagatttttttttttattatatatatataaatattagtttaagttaagttgttttaggattattgaattttttaggtagtttttaatatttttgtttttttttgtttgagtattgttggtttggatttaagagagttgattgtgataaattttatagatcgaattttattagaaatatatttgtagttaaaaagaattaggtttatttagtttgtttagaaagggagaatatatattagagaaaatataaggtgttttggtaagaggtgattggggagaatttattttaggatttgggtttatgttgggtaattaaatttaaggagagtttaaggaggaggagaatagttttggattggatatagttaaggagtagaggtaatttagtgattaggtattttataaatttttatttagaaggaagaaggattaaaataaggttagattagtttttggaaaagtgtgatattttattttgttttaatttgaattgatttttttttagttgagggagatagataaattttattttggtttttttatttgtcgttttttatttattttatttttttaaggatttaatttgtgtaagttgatttttagtatattaaagaatgtaattaattgataagatattgtggtaagcgatagttgtagtttttaggaatttattcggttgatagtattttaagtttttgtatttttgttcggttgatggtatttaaagtttttatatttattattttgtgatggatttaaagtttttgtatttggaattatttgtttttttgtaattatttgtttttttaatttttttgtttgttttatttttgtaagattgttttagttaggtttttttttttttttttaaattaaagtataaaagaaaatttagtttttttttcggggtcgagagaattttaagtattagttattttttagttgtcggttaataaaggatttttgaattcgttttagagtgtggcgtttttttataattcgttcggttataaaaaaagaagtaaaatttatttatttattagttagaattggaagatgttgagttttatttgcggtattagagtggttttgtttgtattttgatttaattatatggtggttttgtttgatttttgtttatattttgtgattattgtttttgtttagttagaaatattaggtttagttgttagttgaatagttttttatttttttatttgtaagtatttgtttttttatatgtaggatttttttattttttagtgtttttggttttaattggttgagtgtgttatttttatttggttaaagcgaggatagtagatttttgtgattatttattttaatttttcgttttaggtagaaattttttagtaatattttttttagggtagggggtttattgttatttaaggtagttttttttatttttatatatttattgttaaatttgttaggtttttgagtttaagttaagttattataatttcgtgatttttatatatatatttagatggtttgtttttgttttaattgatgatattttattacgaaagaagtgaaaatgttttgtttttgttttaattgatgatattattttgtgaaatttttttttttggtttattttggtttaaaagtttttttattgagtattttgtgattttcgtttttgattattagagaataattttttttgattgtaatttttttttatttatttaaattttataaaacggttttatttttattttttttcgttgatttttttttcggatttagttcgtttgtatttaggtgaaataaatagttttgttgtttatataaagtttgtttggtggtttttttatacggacgcgagtaaaaaaatttaggttatttttttttatatgttgttgaaaagataatatatgtatttggttataatatattgtataaaggagtatacggtgaaaatgaagtgttttttttattttttttttatttttattttttagatttttttttagagtttttataggaatatgtatatgttagtattatggtatttttttttttttttttttttttgagatagagtttcgttttgtcgtttaggttggagtgtagtggtataattttggtttattgtaacgttcgttttttgagtttaagcgatttttttgttttagttttttgagtagttaggattataggtgtttattattatgtttggttaatttttttttgtatttatagtagagatagggttttattatgttggttaggttcgttttgaatttttgattttaggtgatttattcgtcgttttttttttatttaatttattagtttattcgataaatatttattatgttattattatgtgttaggtattgttgttagtgataagaaaatagtagagaataaaataaagtgtttatttttaaaagattttatgttgtagggaaaaaagataagtagtaaatatatacgtatataatataatatttagatattgataagagttgtgaaaaaagagaaaggagaatatagagttggtgggggtttattattttttttttttttatttatttatttttttttttttgagatagggttttattttgttatttaggttggagtgtagtggtatgattttatttcgttgtaattttagttttttgggttgaagtaatatttatgttttagtttttttagtagttggaattataggtatatattattatgtttggttaatttttgtatttttagtagagatagggtttcgttatgttagttaggttggttttgaatatttgattttaagtgattcgcgtatttaggttttttaaagtgttgggattataggaacgagttattgcgttcggttttattatttttaagagtagtttgggtaggttttttagagggtttgatattggagtatagatatgagggaatcgaggaagtaagttataaagatatttggaggaagagtaggagaaaatgttttgagatgaaagtatgttttaaggtaggaaaatagagtttggagtcggggaataaaaggttgatttatattttagttatgataggaaatattttttttatagggtgtaggttaagtaaatgattttgtaattttattttattttttttatttatatagggcgtgttttaagtagagggtatttaaatttttaaaaattttgtaataggggtttttgagtttttatgtttgggtttttttttatattgcggagtgaattggtgagatggagttttgttttgtggttcgggttggagtatattggtttaaattcggtttattgtaatttttattttttaggtttaagtaatttttttgttttagttttttgagtagttaggattataggtgtgtattattatgtttagttattttttgtatttttagtggagacggggttttattatgttggttaggttggtttcgaatttttgatttcgtgattcgcgcgtttcggttttttaaagtgttgggattataggcgtgaattatcgcgtttagtttatatttttatttttaataaatttttttatttttttttgttttgtgtgttgtgtttaattttttgtttaagatgttaagaatttggatattttttaatggtgatagttgagagggaaaatggtgagagatgaggttggataagtatttagggggtagtttatttttagttttgttgatgg

SEQ ID NO: 277 - DNA, 16688 bp, Artificial Sequence
  chemically treated genomic DNA (Homo sapiens)
ttgggcgcggtggtttacgtttataatttagtattttgggaggttgaggtaagaggattatttgaggttaggagttggagattagtatggttaatacggtgaaattttgtttttattaaaaatataaaaattagtttggtggtggtgtacgtttgtagttttagttattcgggtggttgaggtagaagaattgtttgaattcgggaggtggaggttgtagtgagtcgagattgtgttattgtattttagtttgggtgatagagcgagatatcgttttaaataaaataaagtaaaatataaaaattagtcggacgtggtggcgggcgtttgtaattttagttattcgggaggttgagataggagaattttttgaatttgggaggcggaggttgtagtgagttgagatcgggttattgtattttagtttgggcgatagagagagatttcgatttaaaaaaaaataaaaataaaaataaaaaattttggaattgttttttatttttttaaatttttttttatttttaggttttttagttttttagttatttttgttttattttttttgggtaaaggagattttagtaaggtgaagaaggtgggtttaaggggaggagggtagaggtaaaaattggaaggggaaatggaggaggataggacgttttagatagggatagttttttgtattgtagggattttattttttttcgtttttttattttttttgagatgttgattttgattatagtttttggattttaagttattttatagtattttttttatttttagtgtttttttaatttgaattttattttttttaaatatattagatttttaaaggggttgtttgtttgtttttgtgtaatgatttttgttgttgttgttattgttggagtttcgttttatcgtttaggttggagagtagtagtggcgcgatttcggtttattgtaattttcgtttttcgggtttaagcgattgttttgttttagtttttcgagtagttgggattataagcgcgtattattacgttttgttaatttttttgtatttttagtagagatggggttttattatgttggttaggatggtttcgattttttgatttcgtgattcgttcgtttcggttttttaaagtgttgggattataggcgcgagttatcgcgttcggttaggattttaaaaaaaatattgtattaggatttttataaggttgtagtaaatgttattgaaaaatgtttattttttattttagtttttttttttgtttgttttttaaattggtttttggtttgagagaaggggaggagcgattttggggttggaaaagtttaggagataagatggagatttagtttgtttatttgtatatttttggatttggggcggttttggggatagttttttttttaagttagttagtggatatttgggggagagtttaggtacggatatagaggatttaatatttttttttttttgagatagagtttcgttttgttgtttaggttggagtgtagtggcgcgatttcggtttattgtaagtttcgtttttagggtttacgttatttttttgttttagtttttcgagtagttgggattataggcgttcgttattatattcggttaatttttgtatttttagtagagacggggttttattgtgttagttaggaggtttcgatgttttgattttgtgatttattcgtttcggttttttaaagtgttgggattataggcgtgagttatcgttttcggtttaagattttttaatttagttggtttttcgaaagcgtggttatgaaggaagaatttaggagttttagttatttttattgtattttgtgttttttttagtaggtatttcgacgtaatttttagattaaaattttaagggaaaatgaagattatatttttattttatagaaattaattttaatgataacgtagtggcgtggcgggggtatagtttagtggtagagtatttgattgtagattaagaggttttcggtttaaattcgggtgttttttttgtgtttcggagttatttcgttttgttggttttcggaggttttttaaagagttttcgtatagatggaatgggagggagtttcgagttttgttattttttttgttttcgtaggcgagtgaggatggagttttggtttttgttagtggtttagtttgtgtgtgtatttagggtagaatgtaatgcgagtgagggcgaggagtttcgggttgatttttggaatacggtacgggtggtttaatttcgtaatggtagggcggaggcgagcgtatttttaggttagtttggtttttttttggcgggaaggaggttgagtttttaagggttgggttggggaagataggtcgggagaagtcgcgtgagtatgtgggagggagaaagaagtttcgagacgtggtaaggggttttttgtagggtaggagagtgggacgttttcgaagtgaaatatttcgagagatttttttttttatattttaggaatatatttttttatattgttagtggggatttttagtttagagttttagggaataatttttgtttttaagtgagtaatttttttgggagttgtattttttttattttttgtaaacgttttattttatttttattttttttcgggaacgttatatagcgtttgcgtagtaatattattaaacgattacgtgcggtcggtttgtcggtagagggggtatagtttagtggtagagtatttgattgtagattaagaggttttcggtttaaattcgggtgttttttttttggttttttcgagatattgtttttgttttgggtgtcgattttttttaagttgtttgtttttatttttattggtagacgaggagtagtgagggattgaaaggaattggggatttaatagtagtggtttttaaaatgtggttttgggattagtagtattatttgggtacgttcgggttttattttagatttaatgaattagaaatttgagggtggagtttagaaatttgtgtttttatatacgttttttatcgtttgagtttaggagttggaagttgtagtgagttatgatcgtagtattgtattttagtttaggtaacgtgcgagaatttgttttaaaaaataaataaaatatatatatatatatatatatatatatatatatatatatatatatattttgtaggtgattacgattttaagttttagaggtttacgttaaaatttatatatttgtttttattatttataagtttatgttttagtttgagttttttttgtaagatagattacgaggtattttagatggaggaatgtgtaaagacgtcggggttggagttggaattcgtttcgagattttttattttgatttcgaggaaggtaggaggtcggagatagggggtgggtaggttggggaaagaggaaattcgtaggataagagggttgtggttcgttacgtggttatttgagggtagtaagtagttgtagttggaggtagttgtttatttgattttgtttgagagttcgttaagttgggatttaaattagatattaagaagaatttatagatcggttttgttttgttttacggtaaggggatattgggtttagggttggaggaggtagtttttgggattttgggttcggcggaaggaggaatcggcgttttaagagattagagagtttttagttgtttttttttttaggtgttttttttttttttttttttttttttttttttttaattttagtgttacggaattcgttttttttagtttatagtgtatttttttttgttttcgtttatatttttttttttggaaaatttttttaatggcgtttagcgttcgtatttttttttttcgcggttttttagtttttaggttttagtttattagaagttaggatgtttttttatttcgttttttattttttagcgttttagttttttgtcgttataagaacgaagtaggttaggggagggaagaggtattttcgtgttttgatttgattttttgtcgtttattaaatattttatattgcgggtatttttattttgttttggaagaaaaaataaaaagattatttatttttagagtttgttagaaggtggtgataggtggggtgagttattttttcgtttggggttggttttgaagattgattgggtttggttttgagtaggtttggaggttttagagaggtaggaggtttgggttatttattcgtggggaggggtttagattgttgtagagtaaggggtagttaggttttttttatttttacgtttgttaggtttggggggtaaatcggtgttggaaatggggggtggagggataaggtggagttatggaaggggggtgggatttaggttttttttggggagaaaagttgggggtttttgttgtagggggagatttttgggggtgggggttggaggataaagtattagagacgtatagaatttcgaagaatagtttaggaagtcgtagagtttggaggagttgggggcggggaatagttaggggttcgtgatttagggatggggcgtttgttttttttaggggtttagttttcgggttttttttttgtagttttttcggcggaacggaggagggaaagggagttaggagtttagtgaggagcgcggggcggttgatgtttttaggggtttttttagttcgaggggttttcgttttgttttttattttgtattttttgttttgggagcggttgtagagttttaggggagcgtttcgttagggttgagggtaggcgtcgggagagtttttaacgacgtcgcgtttttcgtttcgttttttgttttagtttttttttatttttatcgatttagcggtttttttagtttttcgtttgttttcggaggtcgtagtttttagtttcgttcgcgttttcgtcgtttttgtcggttcgttcggtttcgcgtttcgtcgttttttcgtcgttcgttttttcgttagtttcggggatcgcgcggtcgtagtttgagttagggttttttttttcgttaggatcggggtagtaagtaggtcgggggtaggttcgggtatttattatgcgaggcgagttttggtttttggtgttggtgtttagggaggttgttcgggcgttgagtttttagttcggagtaggtaggattggcgggagtcggttcgggtgggtcgggggcggggagggacgggtagttaggtgtgggtatgggtaggtgtggacggtttggcgatgttcgcgaggggggtattgttcgtaggaggttaggagagttgtgggttgtgggtaggtggatagggattttatttttttaaatatatagggtgtgtgagtgacggtggagatatcgatgttcggattttttttttttttttggaaggatattggagggattttaggagagggggttttatgtggttatgggttttgaaaggggatagcgggagagttattaggatttttgattattttaggtaaggttgaattttgatgagatgggagtttggggaggtttttgttttagttatgtttttttttttttttttttgttatattttcgattttaaagttgatttaggttagggataggtgggagtagttagggggatggtggggatatagcgtttttgtttgggaaggtagtagttattcggttatttttttttgtttatttggtgttagtagagaggtagtgggtttaggaagaagtaatttgttgtttttgtatttttagttttaagagtttttttttttatatttgtttttatttgttttggtagtttttggtttttagttattttggttttagatggggtattggggtagggggtggagggaggcgttttattttgtatatttttttttttttttattagttttttaaatttattttttttatttggaagttttttttgagatttatttggaattttttatggtataatttttatagtttttgtttttttttaagtatttagattttttttggggttggggagatgggtaatttgtagtttggttttttagtagagatgattaagaagatagatatttgtgtattattggtatgggtgttttttaggtggggtgagggaggcgttgttgaggtgagtgttgtggttgatttgttgtgttttaggagtgtgttggtattaggtatagtgttagtggtaatgtttttgattttaatggttttagtatgtagttgagatagatttgggtttttattgagaagaagagtatgttgggggtgggaggggaaggaggttgatagtgggaagtatgggtagagggtagtggagttgacgaatcgagaagttgttggtgagaattattaatttttagggagattatatagagggtggttagagacgtggtttttagtttcgttattttatttgttgtgtgattttagataagttattttttttttttggatttatttttgtatttataaagtgaggttgttggtaaaatttttgatttttgtgcgtggaataatgaaggattttttataattgttttttttttttatatttgttagggtttttatgggtaattgatattttaaaaaaattaaggtaaataggagagagttggatatgttatgaataatttttgggtttttttgaatttttaatttggtgtgattttttgaattttgggtgtaatagagtttatgaggggaggatttgaatttttggttggattgtgtgaattacggagagggttggggaagggggaattgggaggtaataaggatgggttgggagatagtggttagattcgggtttggttgagggcggtttttttagagtagggttggggtagtagacggttgaggagattaggaagagtggggtaggtagagatttgaattatttttttaagtagaggttattttgtttttttggttttgatagagattgagttaggagaaatgtattttttttgtagtaggagggatagaggttagatttaaggaatttgtaagaagttagaggcggtagttgttgatttttagttcggtgttttttttataggttaggtgggattttataggtaggaggatttatgaggaggaagcgggtgtttggggaggttagatgtaggagaaggacgttttgggggagagttgttaaggaggggtagtttgatttgattgatggcggagttgttgtgattagtggaagggtagttgggagtaggatttgaagagatgttagtatttttttttaaggttttgggtttgtggggttggtggggggttttgggaagtagttgagattttttttcgtttttgatggataggtttgtttggtagagttttgaaattttatttattattagaatagtagtagtagagagatgagtggtttaaagatagagttagatagtaggggagattaggatgatagataggaaaatggttttggggtgtagagtaggggtttagggaattgatagtttggttagatggaattagaggtgtatatgatagataaagaagaggtagcgagagttggtattttggtttgggagttttgtaggaggttaggtttaatattaattattggtgattttgatagtttttttttttttttgaggaaggttttttcgtttataaaatgggggtttgtattagttacggtggtttatgtttgtgattttaatattttgggaggttgaggtgggaggatagttttagattaggagtttgagattagtttgggtaaaatagtgagattttatgtttataaatgatttaggttaggtagggtggtttatgtttgtaattttagtattttgggaggtcgaggtcggcggattatttgaggttaggagtttgagattagtttggttaatatggtgaaatttcgtttttattaaatatataaaaattagtatatttagtattgttattaatattattaatattagtatattagtaaaaattagttaggcgtggtggtgtatgtttgtaattttagttatttaggaagttgaggtaggagaatagtttgaattcgagaggtagaggttatagtgagttgagatcgtattattgtattttagtttgggtaatagagtaagattttgttaaaaaaaaaaattaaaattaaaataaaaaattagttgggtatggcggtgtgcgtttgtagttttaggtattcggaaggttgaggtaggaggatcgtttgagtttaggaattggaggttgtagtgagttatgattatgttatatagtgagggtagtataacgaggttttatttttttttaaaaaaaggagggaaggaggttggattagattgtttttagggttttaataatttgagattaaaatgcgaatttatggaggttaggtagttttttttttattttattattttttttagttttttttagatttattttttaatttattttagttgtcgtttttttcgatcgatagataattaattggtttttttttatttaggttttaattagtttaaggggattttttttagagagttttattttatggttttgtgtagagtagtaataattttaatttttttttttgtttgattttttttatagtttttattaaatgatttattttgtatgtttttatgaagaaaattagattttttttgggtatagggtttgtgtttttttagtatttagtatagtgtttgcgatttaataaaagtgtattgaatgaatgagtgagtgattgagtgagtatattagaggtggtatagattttagattttttttttaagggatatatatagagagttgaattttttttgttgttttttttttttttttttttttttttttttttttttttttttttttttgttatttggtggtttttttttgtattttttttgattttttttttttttttaggtgagggtttttagtgggtttttatttgttagaggaaagggagagggtatggttaggggttttgtaatttggaggtaggattttagtttagggtttggagttttttttggtttttttgaaagttggttttgtgattttaattggtgtgttgtttaaggtgtagtaagttgatatattaatatcgagggggtagtagagaaagagttttattatcgtggggtagtatttggggttagaggttttatggggtttggggtggggtggttaacgtgtgggaattgttaattggttgaagagtgtatgaagaaataaagaaattgtatttttatgttaaattagtttttcggttgggcgcggtggttcgcgtttgtaattttagtattttgggaggtcgaggtgggtggattataaggttaggagttcgagattagtttgtttaatatggtgaaattttgtttttattaaaaatataagaaaattagttgggcgtggtggtatatgtttgtaattttagttatttgggaggttgaggtaggagaattgtttgaattcgggaggtagaggttgtagtgagtcgagatcgtgttattatattttagtttgggtgatagagcgagatttcgttttaaaaaaaaaaaaaaaaaaaaaaaaattattttttgtttgagggttttcgaattggtttttttgttggaatttaggattcgaaaattattttaatttttttttttttttttttttttttgagatagggttttattttgttgtttaggttggagtgtagtggtgtgattatagtttattgttgttttaattttttgggtttaagtgatttttttgtttttgttttttgagtagttgggattgtaggtatgtattattatatttggttaattttttaaaatttattattaataataaattaaattttataatatttttttttattataaaaaagataaggttttgttatgttgtttaggttgatttttaatttttgggtttaggtaatttttttgttttggttttttaaagtgttgggattataggtatgagttattatgtttagattttaaaaaaaattttagtagagatggggttttgttatgttgtttagtttggtttcgaatttttggatttaagtgattttattattttatttttttaaagtgttgggattataggtatgagttattgtatttggttttaaataatttttaaataaaagttggttaggcgtggtggtttatgtttataattttagtattttgggaggttaaggcgggagtattatttgaggttaggagtttaagattagtttggttaatatggtgaaattttatttttgttaaaaatataaaaattagttgggtgtggtggcgtatttttgtagttttagttatttgggatggtgaggtaggagaattgtttgaattcgagaggtggaggttgtagggagttgagattatattaatgtattttagtttgggtgatatatcgagatttttttttaaaaaaaaaaaaaaaaaaggaatgggtcgaagtgtagtttgattaatgtttaattatttttatatttttgtttagaattcggtatgtaatttttgttaattttgagaagacggttttagtttttatgtgaaatttagggaaggtagggcgatttgttgggtgttttgtgtatatgattttgttaaagtgttaaatttattaagtttatgttttattagttttattttatagatgaggaaattgagttttagagagtgtgtgtaatttgtttaatgttgtagttagtaggtggtagatttagggtttagtgtttagtttgtttgattttaaatttgtgttgttttattgttttgatattataatgaagttttaagggaagggtgtttttagttcggtgtattttaggtatttagggtatttaaagatgtttttttttttttttttttttttcgtttttttttttttttttttttttttttagtttgtgggataggatgagttagggataggtgagttggaagtcggagagagatggaattaagtttattttttaggtggtttgttttggttatggtgggggagattagttttagggtattaagggtggaggttgatttaggatagaggttgtggtaatttgagttatggggtggtttagggttgggatgttaagtttgggtgttgggtgagatgaggatggtttggtttaggttttggggtcgtataatttggttttttgaggttagttttatttttttttgttttgaaatgggattagtgttagttgaggggattgggacgttattgttgggttgtattttgtatgttgggggatatagttttttagggaagtttttaggtttaggtttaatggtagtttgagtagggttttttaagaatttagtttatatgttagttttatttcggggttgtttttgtattttgggaaatagtggggattgtcggttattttttattgtattttttgtggttttgagtaggttttggagttagtttgtttgagtttagattttgttatggattggttttgtgattttgggaggttttttaacgtttttgtgttttagtttttttatttgtaaaatggattttaaattagtaattattttatgggattattgtggggattaagggggtggatgtgtttaaagtttttggaatagtgttagtatagagtagtattttttgaaagttagttattatttttattattagggtgattattatggtattttattggattgtatattatttggggttatgagtgagtgaattaatgaatgaatagtttgtgtttcggaagttttttggtaatatatgtaggcggggaacgggtttagggaaaatggagttttttttagtggaaggtaggtggggtgaggagtggttgagggttgggtaggtgtttaatttgtgtgtgagtatatacgggaaggtcgaggtttttaggaaagtttttgtgggtatgtgtataggtacgtgggtttttgtatatatacgtgagtaattagttgtgttggttttttttatgagtcgtggggatgacgttttgttttaggtaatagggaaggaagggtggttaggaaatagatgtagtatgggttggaagagtaagatttagggttaggttagggtaggttagggttttggttaagttttttttttatttttcgttttgtttttttttatggattttttattttttattttggtttgagttttttataaaattttatttgtgttttttatttgacgtttatggtagtttgtattgtgggtattatcgttaaatttatttgagttattagggagttgaggattagagaggaaaattgatggggttaaggttttataatttgtgagtggtaagattgggtgtggaggttaatttagtgttttttttttggttatttttagttgggttttttttttgttttttttcgggttgtaggtttttattatttcgttttttgtttcggttttaggtttgtgaattttgaagatttttaatatttttttttgggtcgttgagtttttttatttgtttattattcgttttattttgttttggtttttgtttaggttttagggttgtttgtaggaagatttggggagttgggtagattagtttagtataaatagttttgtttttagaagtagttgtgggttttatttaagagagattagatagttttggtttgggtttgggtagtgggtaggttgtttttttagttttggatttatgtttatttgtgggtagttagtgggtattttggggaaggggtttggggattgtttttttttttacgtgttttagtagtatttggttgttattaggggtagagaagtgagagggggtcggtaagggtttagtaggcgttagtagttaagaatgatttaattggatataatgtttaatgataaagtagggttttatagcggagttttggttttagttttaggtttgggtttggttaagtttggttttaatttttgtttttgttggtttttaggagttattttatgtattgcgtttttaattttgtagtgatggagtatttgttgtttgttggatatgttaaatttgaagaaggtggagagaattttgggggaatttaaatttattagggagataggtatatagtcgtatacgtaggtgttttaggagagggagagttatatttaggagttttggggagtgggttgggggaaggtagaggttgagataggtatttgatatagggtgggtttgaaatggaagagggttataggtggggaatgttagatttatttatttgatggtttgtttttatatatatatttatagtaggtgtgattattagaatgataataaaagttatagttttggggggtataaatttttttgaagtggaaaaggatggtttttgtgttgtttatttatttatttggagaaggagtttcgtttttttgtttaggttggagtatagtggcgtaatttcggtttattgtaatttttgttttttaggtttaagtaatttttttgttttagtttttcgagtagttgggattatgggtgttcgttattatgttcggttaatttttgtatttttagtagagacggggtttcgttatgttggttaggttggtttcgaatttttgattttaggtgatttatttattttagttttttaaagtgttaggattataggtgtgagttattacgttcggttttttgttagaattaatttaatagatttggtgtagtggtttacgtttataattttattattttgggaggttaaggtggaaggatcgttagagtttaggagtttaaggttagtgtaggtaatatggtgaaatttagtttttacgaaaaatataaaataaaataataataattagtcgggtgtggtggtatgtaattgtagtattagttatttagaaggttgaggtgggaggattgtttgagtttgagaggttaagcgtatagtgagttgtgattgtgttattgtattttagtttgtatgttagagtgagattttgttttaaaaaaagtatgtatttaataatttagagggaattggagaggagattatggaatttaaagttatttcgtaatttttagaaatggaggttcgtatggtcgcgaaatggtttgtgtgtagttattttttaattttgtgtttatggtagatattgtttattgatttttatagttttttttgttaaatataagaggagtttttgtatttttagttggagtgtttttggttgttacgaatggattgtagatggtatgtgatatgaaatttatttgttattttagatagtatttaggtagtgataggagtaaaatagtaaaaaattattttttttttaatggggtaagggggggttaattttattttttaggggatatttggtaatgtttggagacgttttttattgttatagtttgggatggggaggagcgtggtgttattggtatttagtgagtaggggttaaggttgcggttgttaaatattttatagagtattggatagttttcgtataataatgaattatttagtttaattaataatttaatttaaaaataggaaaaagatttaaatagatatttttttaaagaagatatataaatggtttataagtatatgaaaagatgttcggtattattaattattagggaaatgttaatttataaaaacgatgagatataattttatatttgttaggatggttattataaaaaaaatagaaaataataagtattggtaagaatgtggagagattggaatttatgtgtacggttggtgggaatgtaaaatggtttagttattttatatggaaaatattttatatggaaaatagtatgataattttttaaaaaattagaaatagaattattatataatttagtaatttcgtttttgggtatatatttaaaagaattgaaggttaggttttaaagagatatttgtatatttatgtttgtagtagtattgtttataatagttaaaacgtggaagtaaaatagatatttattgatagttgagtgggttagtaaaatgtggtatatttatataatggaatattatttagtttttaaaaggaagttaattttgttatatgttacgatatgaatgaattttgaatttattatgttaagtgaaataagttaattataaaaagataaatatagtatgatgttatttatatgagatatttagagtagttaaaattatagatataggttgcgcgttgtggtttatatttgtaattttagtattttgggagttaaggtaggaaaattgtttgagattaggaatttaagattaattattttgaataaaatagtgagattttgtttttataaaaagtaaaaagattagttgggtatggtggcgtatgtttatagttttagttatttaggaagttgaggtgggaggatcgtatgagtttagtagttggaggttgtagtgagttatgatcgtattattattttttagtttgggtgatagagtaaggttttattttttaaataaaataaaataataggggtgaatagggagttattatttaacgggtatagaattttagttttataaggtgaaaagagttatgtagatagatggtggtgatggttatataatattaggaatgtatttaatgttattgaattgtatatttggaaatggttagatggtaaattttgttatgtgtattttgttataataaaaaaattggaaaaggaattatttagtttaaatgttaatagtatcgaggttgagaagttttgaacgaaaagaattttggtttttagttttttgattttattgggaaataggattatgtgttatttttgttagagaaataagaaattggtttggaaggtttaacggtaatggtttttatttttgtttgtagagttaagtttaagattttttaaaattttttttgaggtttttttaagaaatcgaggttaggcgcggtggtttacgtttgtaattttagtattttgggaggtcgagacgggtggattacgaggttaggagattgagattattttggttaatacggtgaaatttcgtttttattaaaaatataaaaaattagttgggcgcggtagcgggcgtttgtagttttagttattcgggaggttgaggtaggagaatggcgtgaattttggaggcggagtttgtagggagcggagttcgggttattgtattttagtttgggtgatagagcgagattttattttaaaaaaagaaaaagaaaaagaaattgaatgtttaggttatattatagattagttataagagatttttagggtgggatttagatattaggaatttttgaagttgtttaggtgattttagtgtatagttgaggttgagaataattattttttggaggtagattagtttgggtttgaaatttatttgtatgtttaatttattgcgtgatttttaatttttgagtttttgatttttgtttgtaaaatggagaatattttaattattgcggagagttggtatgaggattaaaaggatatgtgcgaagtgtttggtttggagttgggtacgtgatttttagtatatattgggtgttttttgttttggtagttagttaagtgtttgtaaattttatagtggtatggtgttggggtttttgtagaataattgggttggattttttttttgatttttatttcggattgttggtatttaggtttttgttttttttttttagg

SEQ ID NO: 278 - DNA, 16688 bp, Artificial Sequence
  chemically treated genomic DNA (Homo sapiens)
tttgggagaaggggatagaaatttgagtgttagtagttcggaatgaagattaggaggggaatttagtttagttattttgtaagggttttaatattatgttattgtagaatttgtagatatttgattgattattaggataggagatatttaatgtgtattgagagttacgtgtttagttttaggttaagtatttcgtatatatttttttaatttttatgttagtttttcgtagtagttaggatgttttttattttgtaaataagaattagaggtttagaggttaaaagttacgtagtgggttaggtatgtaggtaagttttaaatttaagttgatttgtttttaaagggtgattatttttaattttagttatatattggagttatttggatagttttaaaagtttttgatgtttgggttttattttagagattttttgtaattggtttatggtgtagtttgggtatttaatttttttttttttttttttttttgaaatggagtttcgttttgttatttaggttggagtgtagtggttcgagtttcgttttttgtaagtttcgtttttagggtttacgttatttttttgttttagtttttcgagtagttgggattataggcgttcgttatcgcgtttagttaattttttgtatttttaatagagacgaggttttatcgtgttagttaggatggttttaattttttgatttcgtgatttattcgtttcggttttttaaagtgttgggattataggcgtgagttatcgcgtttagtttcgattttttaaaagagttttaggggagattttgaggagttttggatttaattttgtaggtaagggtgagaattattgtcgttgagttttttaaattagttttttatttttttggtagaaatggtatataattttattttttagtggggttaggggattagaagttagagtttttttcgtttagggttttttaatttcggtattattgatatttggattggataattttttttttaatttttttattgtggtaaaatatatataataaaatttgttatttaattatttttaagtgtataatttagtaatattaaatatatttttaatgttgtatgattattattattatttatttgtataattttttttattttgtaaaattaaaattttgtattcgttaaataataattttttatttatttttgttattttattttatttaagagatggggttttgttttgttatttaggttggggagtagtggtgcgattatagtttattgtagtttttaattgttgggtttatgcgatttttttattttagttttttaagtagttgggattataggtatgcgttattatgtttagttaatttttttattttttatagagatagggttttattattttgtttagggtggttggttttgaatttttggttttaagtaatttttttgttttggtttttaaggtgttgggattatagatatgagttatagcgcgtagtttgtatttatgattttgattattttaagtattttatataaatggtattatattatatttgtttttttgtgattggtttattttatttagtataataaatttaaggtttatttatgtcgtagtatatggtagaattgatttttttttgaaggttgaataatattttattgtgtggatatattatattttgttaatttatttaattattaatggatgtttgttttgtttttacgttttagttattgtgaataatgttgttataaatatgggtgtataaatatttttttgagatttggtttttaatttttttgggtatatatttagaagcggaattgttggattgtatggtaattttatttttaattttttgaggaattgttatattgttttttatataaaatgttttttatgtaaaatgattggattattttatatttttattaatcgtgtatatgggttttaatttttttatatttttgttaatatttgttattttttgttttttttatagtagttattttaataggtatgaggttatattttatcgtttttataaattggtatttttttgatgattagtgatgtcgaatatttttttatatgtttgtgggttatttgtatattttttttggagaaatgtttatttaagttttttttttgtttttaaattggattgttggttggattggataatttattgttatgcgggaattgtttagtgttttgtaagatgtttagtagtcgtagttttggtttttgtttattaaatgttagtagtattacgtttttttttattttaagttgtgataatgaaaaacgtttttaaatattgttaaatattttttggggaataaaattaatttttttttgttttattgagggaggggtaattttttattgttttatttttattattatttagatattgtttaggatggtaaataggttttatattatatgttatttgtaatttattcgtgatagttagaggtattttaattgagaatgtaaaggttttttttgtatttagtaggaaggattgtgaagattaataagtaatgtttgttatgggtataggattggaaagtgattatatataggttatttcgcggttatgcgaatttttatttttggaggttgcgaaatggttttaggttttatgattttttttttagttttttttaggttgttaaatgtatgttttttttgagatagggttttattttagtatgtaggttggagtgtagtggtataattatagtttattgtacgtttgattttttaggtttaagtaatttttttattttagttttttgagtagttggtattatagttgtatgttattatattcggttagttattattattttattttgtatttttcgtagaggttgggttttattatgttgtttatattggttttgaatttttgggttttagcggtttttttattttggttttttaaagtggtgggattataagcgtgagttattgtattaggtttgttaaattagttttaataaaaggtcgggcgtggtggtttatatttataattttagtattttgggaggttgaggtgggtggattatttgaggttaggaattcgagattagtttggttaatatgacgaaatttcgtttttattaaaaatataaaaattagtcgggtatggtggcgggtatttataattttagttattcgggaggttgaggtaggagaattgtttgaatttgggaggtagaggttgtagtgagtcgagattgcgttattgtattttagtttggataaaaaagcgaaattttttttttaaataaataaataaataatataaaaattatttttttttattttaaaaagatttatgttttttaaagttgtggtttttattgttattttaatggttatatttattatggatgtatatatgagaatagattattagataggtggatttgatattttttatttatgatttttttttattttaggtttattttgtgttagatatttgttttaatttttgtttttttttagtttattttttagagtttttggatgtggtttttttttttttagagtatttacgtgtgcgattatgtgtttatttttttggtagatttgagtttttttaggattttttttattttttttaaatttggtatgtttagtaaatagtaggtgttttattattgtagaattgaggacgtagtgtatagggtagtttttgggagttagtaaggatagaggttgagattaggtttggttaggtttaggtttggggttgaggttagaatttcgttgtggggttttgttttgttattagatattgtatttaattaagttatttttggttgttggcgtttattggatttttgtcggtttttttttatttttttgtttttaatagtaattagatgttgttggagtacgtggggaggagggtagtttttagattttttttttaagatgtttattggttgtttatagatggatatgagtttagggttgggaaggtagtttgtttattgtttaggtttaagttagggttgtttggttttttttgggtggggtttatagttgtttttggagatagagttgtttgtgttgggttggtttgtttagttttttaggtttttttgtaagtagttttggggtttgggtaggagttagaataggatagagcgggtagtgaataagtggaggggtttagcggtttagagaggagtgttggggatttttaggatttataaatttggagtcgagataggaggcgggatggtggaggtttgtagttcggggaaggatagggagggggtttagttgggggtggttagggaagagatattgggttgatttttatatttagttttgttatttataagttatgggattttagttttattagtttttttttttaatttttagttttttagtgatttaaatggatttgacgatggtgtttatagtataggttgttataagcgttaagtgagaaatataaatgaggttttatagagagtttaggttagggtaagaggtaaagagtttatgaaagagggtagggcgagggatggagagggagtttgattaggattttggtttattttggtttagttttgaattttatttttttaatttatattatatttgttttttggttatttttttttttttgttgtttgggataggacgttatttttacgatttatgaaagaagttaatatagttggttgtttacgtgtatgtgtaggggtttacgtgtttgtgtatatgtttataaagatttttttgaaagtttcggttttttcgtatgtgtttatatataagttggatatttgtttaatttttagttattttttattttatttgttttttattggagagagttttattttttttggattcgtttttcgtttgtatgtgttgttaaggagttttcggaatataagttgtttatttattgatttatttatttatggttttaagtagtgtgtagtttagtgggatgttataataattattttagtaataaaaatgatagttgatttttagagaatgttgttttgtgttagtattattttaggggttttaaatatatttatttttttaatttttataataattttatgaaatagttattagtttaaaatttattttataaatggagaaattgaggtataaagacgttaaggaattttttaaggttatagaattagtttatggtaggatttgaatttaggtaggttggttttagagtttatttagaattatagaaagtgtagtaaaaagtgatcgataatttttattgttttttagggtgtaggggtagtttcggggtggggttggtatgtgggttaggtttttggagggttttatttaggttgttattgggtttgaatttgagagtttttttgggagattgtgttttttagtatgtagggtatagtttagtagtagcgttttagtttttttagttggtattggttttattttagggtaagggggaatggggttgattttaggaggttaggttgtgcggttttagagtttgggttaagttatttttattttatttaatatttaaatttggtattttagttttgggttattttatagtttaggttattatagtttttattttgggttagtttttatttttaatgttttagagttaattttttttattatagttaggataagttatttagagggtgaatttgattttattttttttcggtttttagtttatttgtttttggtttattttgttttataggttgagaaaaagaggagaagagaaaggaggcgaggggaggggagggaagggagagtatttttaaatgttttgagtatttgagatatatcgaattggaaatattttttttttggaattttattgtagtattagagtagtaaaataatataggtttggaattagataagttagatattgaattttgaatttattatttattaattataatattggataaattatatatattttttaagatttagtttttttatttgtgagatggggttgataaaatataaatttggtaggtttgatattttaataaaattatatatatagagtatttagtaagtcgttttgttttttttgggttttatatgaggattgaaatcgtttttttagggttaataagaattatatgtcgggttttgggtagaagtataggagtaattaagtattaattaggttgtatttcggtttattttttttttttttttttttttgagagggaatttcgatatgttatttaggttggagtatattggtgtgattttagttttttgtaatttttatttttcgggtttaagtaatttttttgttttattattttaagtagttgggattataggagtgcgttattatatttagttaatttttatatttttagtagagatggggttttattatgttggttaggttagttttgagtttttgattttaaatgatgttttcgttttggttttttaaagtgttgggattataggtatgagttattacgtttggttagtttttatttaagaattgtttaaggttaggtgtagtggtttatgtttataattttaatattttgggagggtgaggtggtgggattatttgagtttaggagttcgagattagattggataatatagtaagattttatttttattaaaattttttttaaagtttggatatggtggtttatgtttgtagttttagtattttggaaggttaagataggaggattatttgagtttaggagttggagattagtttgggtaatatggtaagattttgttttttttataataaaaaaaggtattataaaatttaatttattattaataataaattttaaaaaattagttagatgtggtggtgtatgtttgtagttttagttatttaggaagtagaggtaggaggattatttgagtttaggaagttgaggtagtagtgagttatgattatattattgtattttagtttgaataatagagtgagattttgttttaaaaaagaaaaaaaaaaaagaaggattaagatggttttcggattttgaattttagtagaagggttaattcgaagatttttagataggaaatgatttttttttttttttttttttttttgagacggagtttcgttttgttatttaggttggagtgtagtggtacgatttcggtttattgtaatttttgtttttcggatttaagtaatttttttgttttagttttttaagtagttgggattataggtatgtattattacgtttagttaatttttttgtgtttttagtagagatagggttttattatattgggtaggttggtttcgaatttttgattttgtgatttatttatttcgattttttaaagtgttgggattataggcgcgggttatcgcgtttagtcgaggaattgatttaatatgagaatgtagtttttttatttttttatgtattttttaattaattaataatttttatacgttggttattttattttaaattttataaaatttttagttttaaatgttgttttacgatgatgaaattttttttttgttgttttttcggtgttggtgtgttaatttgttgtattttgggtaatatattagttagggttataggattagtttttagaggggttagggaaggttttaaattttaaattgaaattttgtttttaagttataaagtttttaattatatttttttttttttttttggtaggtagggatttattgaggatttttatttggggagagggaaggagttaaaggaagtgtagggagggattattaggtagtagaagggaagagggagggagggaaggggaggggaggggaagggagggatagtaagaagagtttagttttttatgtgtgttttttgaggggagagtttgggatttgtgttatttttgatatatttatttagttatttatttatttatttaatatatttttattgagtcgtaggtattgtgttgggtgttggggggatataagttttgtatttaggaagagtttagttttttttatggagatatataaaatgaattatttggtaagggttatgaagaaaattagatagaggaaagggttggggttgttgttattttatatagagttatgaggtggggttttttgaggagggtttttttgagttgattaagatttgaatgagaagaagttagttagttatttgtcgatcggaggggacggtagttggagtgggttaaggggtgaatttggggagagttagagaagatggtgggatgagggaggggttgtttgatttttataagttcgtattttagttttaggttgttggagttttagagataatttggtttaattttttttttttttttttttaaaaaaagatgggatttcgttatgttgtttttattatgtggtatgattatagtttattgtagtttttagtttttgggtttaaacgatttttttgttttagtttttcgagtatttgggattataggcgtatatcgttatgtttagttaattttttattttaattttaatttttttttttgatagagttttattttgttgtttaggttggagtgtagtggtgcgattttagtttattataatttttgtttttcgggtttaagttatttttttgttttagttttttgagtaattgagattataggtatgtattattacgtttggttaatttttattaatatattaatattaataatattaataataatattaaatatattaatttttgtatatttagtagagacggggttttattatgttagttaggttggttttaaatttttgattttaggtgattcgtcggtttcggttttttagagtgttgggattataggtatgagttattttgtttggtttaaattatttatagatatggggttttattattttgtttaggttggttttaaatttttggtttaaagttatttttttattttagttttttaaagtgttaggattataagtatgagttatcgtgattggtgtaagtttttattttatagacggggaaattttttttagagaaaggaggaagttgttagggttattagtagttggtattgagtttggttttttgtaggatttttaggttaggatgttaattttcgttgttttttttttatttgttatatgtatttttggttttatttgattagattgttagttttttgggtttttgttttgtattttaaggttatttttttgtttgttattttggttttttttgttgtttgattttgtttttgggttatttatttttttgttgttgttgttttaatgatagatgaggttttaaggttttattaaataagtttgtttattaggagcgaggggagattttagttattttttaaggttttttattagttttataaatttagagttttggggaaggatgttagtatttttttaggttttgtttttagttgtttttttattggttataataatttcgttattaattaggttaggttgtttttttttagtaatttttttttagaacgttttttttttatatttggtttttttagatattcgttttttttttataggtttttttgtttgtgaaattttatttggtttgtgaaaagggtatcggattgggagttaatagttgtcgtttttggttttttatagattttttaagtttaatttttattttttttgttgtagaaaaagtgtattttttttggtttaatttttgttaaagttaagaagataggatagtttttatttagagaagtgatttaagtttttgtttgttttattttttttggtttttttaatcgtttattattttaattttattttgaaggggtcgtttttagttaggttcgggtttggttattattttttagtttatttttgttattttttaatttttttttttttagtttttttcgtggtttatataatttagttaaaggtttagattttttttttataaattttgttatatttagagtttagaagattatattaggttgaggatttaaaggagtttagaaattatttataatatatttaatttttttttgtttattttgatttttttaaagtattagttatttataaagattttaataaatatgaaaaggaaaggtaattataaaagattttttattattttacgtataagagttaaagattttgttaatagttttattttataaatgtaaaaataggtttagagagagaaagtaatttgtttaaagttatatagtaagtgagatggcgggattagaagttacgtttttggttattttttgtgtggtttttttgaaaattggtggtttttattagtagtttttcggttcgttagttttattgttttttgtttatattttttattgttagtttttttttttttttatttttaatatatttttttttttaatagggatttaggtttgttttagttatatgttgggattattaaagttaagaatattgttattgatattgtgtttggtgttagtatatttttgagatatagtaggttaattatagtatttattttaatagcgttttttttattttatttgaggggtatttatgttaatgatgtataggtatttatttttttaattatttttgttgaggggttaggttgtaaattatttatttttttaattttagagaaagtttaggtgtttaggggagaatagagattatgaaaattatattatgagggattttaggtagattttagaaaggatttttaggtgggagagatgagtttggagaattggtaggggggaagaggagtgtgtagaatgggacgtttttttttattttttattttagtgttttatttagagttagagtagttgaaagttaaaggttgttagggtaaatgggagtaggtgtgaggagggggatttttgaggttgggggtgtagaagtagtaagttgtttttttttgggtttattgtttttttattgatattaaataggtaagggaaggtgatcgaatggttgttgtttttttaggtagagacgttgtgtttttattatttttttggttgtttttatttatttttagtttggattagttttggggtcgggggtgtggtagagaagaggaaaagaaggtatggttggggtaggggtttttttaggtttttattttattagaatttagttttgtttggggtgattaggggttttgatgattttttcgttgtttttttttagagtttatggttatatagagtttttttttttaaggtttttttagtatttttttaggagagaaggagaggttcgggtatcggtgtttttatcgttatttatatattttatgtgtttgggaaagtggggtttttatttatttgtttatagtttatagtttttttggttttttgcggataatgtttttttcgcggatatcgttaggtcgtttatatttgtttatgtttatatttgattgttcgttttttttcgttttcggtttattcgggtcggttttcgttagttttatttgtttcgggttgggggtttagcgttcgggtagtttttttgagtattagtattaggagttagagttcgtttcgtatggtgggtgttcggatttgttttcggtttgtttgttgtttcggttttgacgagggagggggttttggtttaggttgcggtcgcgcggttttcggggttggcggaggggcgggcggcgaggagacggcggagcgcggggtcgggcgagtcggtaggagcggcgagagcgcgagcggagttggaggttgcggttttcgggagtaggcggggagttgggggggtcgttgggtcggtgggggtgggggggagttggggtagggggcggggcggggggcgcggcgtcgttgggggttttttcggcgtttgtttttagttttaacggagcgtttttttagagttttgtagtcgtttttaaggtaaggggtgtagagtaggggatagggcgggagtttttcgggttgagagaatttttagaagtattagtcgtttcgcgttttttattgagtttttggttttttttttttttttcgtttcgtcgggaaagttgtagagagaaggttcgaggattggatttttggaagggataggcgttttatttttgggttacgggtttttgattgtttttcgtttttagtttttttaagttttgcgattttttgagttgtttttcggaattttgtgcgtttttgatgttttgttttttagtttttatttttagaaatttttttttgtagtaaagatttttagtttttttttttaagaggggtttgaattttattttttttttatgattttattttatttttttattttttatttttagtatcgatttgttttttaagtttagtagacgtgagggtggagggggtttggttattttttattttgtaatagtttggatttttttttacgagtaggtaatttaggttttttgtttttttggggtttttaggtttatttagggttagatttaattaatttttagagttagttttagacgaggaaatggtttattttatttgttattattttttgataggttttggggatagataatttttttatttttttttttaggatagaataaaaatattcgtaatgtaggatatttaatagacggtaaggaattaggttaggatacgaagatgtttttttttttttttgatttatttcgtttttgtgacggtaaggagttggggcgttggagagtgggagacggggtgagggggtattttggtttttagtgggttggggtttagggattagaaaatcgcggagaggaagggtgcgaacgttgagcgttattggagaaattttttaggaggagggatatgggcggggataggagaaggtatattgtgggttggaagagacggatttcgtggtattgaggttaaaaaaaaaaaaaagaaaagaaaagaaaaaaaaatatttaagaaaggaaataattaaaggttttttaattttttagaacgtcggttttttttttcgtcgggtttagagttttagagattattttttttagttttaaatttaatgtttttttatcgtggaataaggtaaggtcggtttgtaaattttttttgatgtttaatttaaattttaatttggcggatttttaaatagaattagataggtagttatttttagttgtagttatttgttgtttttaagtggttacgtgacgagttataatttttttgttttgcgggttttttttttttttagtttgtttattttttgttttcgattttttgtttttttcgaggttaaggtgagaagtttcgggacggattttagttttagtttcggcgtttttgtatatttttttatttggggtatttcgtggtttgttttataagaagagtttaggttgaaatataaatttgtaaatagtagaagtaaatgtgtaaattttaacgtaagtttttagaatttgagatcgtaattatttgtagggtgtgtgtgtgtgtgtgtgtgtgtgtgtgtgtgtgtgtgtgtgtgtattttgtttgttttttgagataggttttcgtacgttgtttaggttggagtgtagtgttgcgattatagtttattgtagtttttaatttttggatttaagcgatggggagcgtatatgaaaatatagatttttggattttatttttaagtttttaatttattaggtttgggatgaggttcgagcgtatttaggtaatgttgttggttttaggattatattttgagagttattgttgttgaatttttagttttttttagttttttattgtttttcgtttgttagtaggagtaaaagtaaatagtttaggaaaaatcgatatttaggataaaaatagtatttcgaaaaggttaaagagggggtattcggatttgaatcggggattttttgatttgtagttaaatgttttattattgagttatattttttttgtcggtaaatcgatcgtacgtagtcgtttagtggtattgttgcgtaggcgttgtgtggcgttttcgaagggaagtggaagtggggtaagacgtttataagagatggaaaaaatataatttttagaagaattatttatttggaagtaggggttgttttttgaagttttgagttgaagatttttattggtagtataagaaaatatatttttggggtgtggaaggagaagtttttcgaaatattttatttcgggggcgttttatttttttgttttgtagaagattttttgttacgtttcggagttttttttttttttttatatgtttacgcggtttttttcgatttgttttttttagtttagtttttagaaatttagtttttttttcgttaagaaagagttaggttgatttgggggtgcgttcgttttcgttttgttattgcgaggttgagttattcgtatcgtgttttaagggttagttcggagtttttcgtttttattcgtattgtattttattttgggtatatatataggttgagttattggtaggggttaggattttatttttattcgtttgcgaaagtaaaaagggtggtagggttcgagatttttttttattttatttgtgcgggaattttttagaggattttcggagattaataaaacgaggtaatttcggagtatagagggggtattcggatttgaatcggggattttttgatttgtagttaaatgttttattattgagttatattttcgttacgttattacgttgttattagagttaatttttatggaataggggtgtggtttttatttttttttaaagttttaatttgagggttgcgtcgggatatttattgaaaaaaatataaaatataatgggaatggttagaatttttgagttttttttttatagttacgttttcggaaaattaattagattaaggaattttgggtcgagagcggtggtttacgtttgtaattttagtattttgggaggtcgaggcgggtggattataaggttaggatatcgagattttttggttaatatagtgaaatttcgtttttattaaaaatataaaaattagtcgggtgtggtggcgggcgtttgtagttttagttattcgggaggttgaggtaggagaatggcgtgaattttggaggcggagtttgtagtgagtcgagatcgcgttattgtattttagtttgggtaatagagcgagattttgttttaaaaaaaaaggaatattgggttttttatattcgtgtttagatttttttttaaatgtttattgattggtttgagaaaaggattgtttttaggatcgttttaggtttagggatgtatagatgaatagattggatttttattttgttttttgggtttttttaattttagggtcgttttttttttttttttaaattaaaagttagtttgaggaatagatagaggagaaggttgaaataagaggtaagtattttttaatagtatttattatagttttataaaaattttaatatagtattttttttaaaattttggtcgggcgcggtggttcgcgtttgtaattttagtattttgggaggtcgaggcgggcggattacgaggttaggagatcgagattattttggttaatatggtgaaattttatttttattaaaaatataaaaaaattagtagggcgtggtggtgcgcgtttatagttttagttattcgagaggttggggtaggataatcgtttgaattcgggaagcggaggttgtagtgagtcgagatcgcgttattattgttttttagtttgggcggtagagcgagattttaataataataataataataaaaattattatataaagataaataagtagtttttttaggaatttggtatatttgggaggagtgggatttaaattggaaggatattagaagtaaaggggatgttgtggggtggtttaaagtttaagagttgtggttagagttagtattttagagggaatgggaagacgaggagaagtggaatttttgtagtgtaaagggttgtttttatttgggacgttttgtttttttttatttttttttttagtttttgtttttgtttttttttttttgagtttattttttttattttgttagaattttttttgtttaaagggaatgggataaaaatggttgaggggttaaaaagtttgagggtggaaggaggtttgaggaaatgaagagtaattttagggttttttgtttttgtttttgtttttttttgagtcggagtttttttttgtcgtttaggttggagtatagtgattcgattttaatttattgtaattttcgttttttaggtttaaaggatttttttgttttagtttttcgagtagttaggattatagacgttcgttattacgttcggttaatttttgtattttgttttgttttgtttgagacggtgtttcgttttgttatttaagttggagtgtaatggtataatttcggtttattgtaatttttatttttcgggtttaagtaatttttttgttttagttattcgagtagttgggattataggcgtgtattattattaagttaatttttatatttttagtagagatagggttttatcgtgttagttatgttggtttttaatttttgattttaagtgatttttttgttttagttttttaaagtgttggattataggcgtaaattatcgcgtttag

SEQ ID NO: 279 - DNA, 6432 bp, Artificial Sequence
  chemically treated genomic DNA (Homo sapiens)
tattacgtttagttaattttcgtatttttagtagagatagggttttataatgttggttaggttggtttcgaaattttgattttatgatttgtttgtttcggttttttaaagtgttggaattataggtataagttagtatgttcggtttatattttttaattgtatgtataatttaatttgtagatgattttaaaagtttaaattggagttttattgttttttttatttttagtttttataataaattttatgatagtttttgtttataagaatttttttgtagttttattatttgtaaattatttaattttgttttttcgtgattttttattttttatattttttatattttttagttattgttttaaaaattttggataataaattaatttaaatttttttttaaacggtatttatttatttttatttagatttatatggattggttagaggtaggtttgagattggttgatggaggtttggtttagatttaattaggaggttggtttatatttgttttatatgtttttttttttttttgtatttgttggtttttaagtgtttttaattgaaaataattagtatattaaagtagtatattttggagtggtattttttgaaattttttattggttaggtggcgaagattaattatttgattaatttgttttagagtgtagaataagtttggaattagataggattaagtttaaatttgggttttgttttttattagttatgtgatttttgttaaatatttaatttttttaatttttaaattttttatttgtaaagggaagattagaatagtattgtaaggatatgttttaaaatttaataaggattatttttggataatagggttaagaatttttttaaagtttgtttttaaaaaaaaaatttaaattttttatttataattaatacgtattatttttgtaatttttaaaaagttattttttttaaaatatattattgatgttttttgtaaatatgtggtataattgtaggttttattaatatttgtgaagaattgtaaataagagaatggattaggaaaattgatatttttatttttttttttattgaagataagaaatatatattgaatattgattatttgtagagtacggagtgtggttttatattgaaaaaggaatattttgtgtttttaagggttttataattattagggtagaattttaaaaagtaaataaataataataatgtattttatgttagaatggggtaaatatttttttttaaaaaaaggttaaataaacgaaatgttttttgggttatttttgggaaaggagtgattatagtaggtgaagtattataaaatattttttggaggaggtagtattatggatgatttataaagggtggatgatttttataaattaattatagttttagtgtttattggtttgttttataataaaaggaaaattggttaagagataagagttgagaatgaggttggttaatttataaggagaggaatttttttgttaattgttttagttgatagtaattttaatagttgtatgttataaagtttaggggagtaggaagttttttttttattataattgagaaatttaacgtttaaataaattataatttgatttagtttaattgtgtgtgtttgtgtgtgcgtgtagagtttaaaaagttggtaaaatagattgttagtttttaaaatttttgtttaagttgatatttattgttttttaatttattaagggtttaaacgttattttttttgttttttaaattttgagtcgggttattatttttttgtttttatttgtaaatggtttagttttttatatgtatatattaattgtttatgtgaatatataaaatattatattaagttaaatatataattatgtgtgaaaatgatgttttgattaagggtattagatattttttttaataagaattttaaaaggaagggtattatgataattttttttttttttttttttatttattttttgtttttgagatagggttttattttgttttttaggttgaagtgtagtggtataattatggtttattgtagcgttcgttttttgggtttaagtgatttttttattttagttttttgagtagttggtattatagatatatgttaatatgtttggtttttttttttttttttttttttttagtaaagatgaaattttattatgttgtttaggttggtttcgaatttttgggtttaagtaatttttttatttagattttttaaagtgttgggattataggtgtggattattgtatttagtttgatgaatttttaaaattattaaattgtaatatgtatgagtttatatatttattatttttattatgatgatttttaaaaggttagtttgtatttggtaatgttgaattttgattttttttaattttataggagattggagattaaattagaaatgttaagggtaaataaaattaaaattaatattaatgatgtattatggtaaagattattagttaaatattttattatagatttaaatatttagtttttaataatgtaaaatatttttgtgataattaaggaaaataaagtttttggaatttattggatatttatttgttatattgtgtttttaggagaaagaaagtatatgtttgttatttggaggaatttgggtaaatgtaggaaaaaaaaaagaagaagaaagaaatttatatatttttttatttttaagaaaaggaagtagtggtgatattattttcggttaaaatgtagtttgtttatattttaaatattcggtaataatgttttttttagagttatgaagtaattagaataattaaatataatttttttttaaatttttattgtttgatttatttatttatttaataaatatttattaaatatcgattatgtgtttgatgtttagggatataatagtaagtggagggaaagatatataatatttgtttttaagaaatttggagttgagtggaggatagaaatataaattaaagaatgatataaataattataaagttatagttgttaaaagaaaagtatatggtgttaagagaacgtgtaatataagatttatttatggaggtgagggaaagtttgtttattaaagaagttatgatttaatttacgaagattaggagttggttgggtgaagaaaaaaaggttagaggaaggaagtttatattggggaaggttttaagtataaagggtaggaggattatagaggtatatttacgaaatttggagaaggtttttagtaagtaaggagaagttaaatgaaagtttacgggagagttggaggtttgaagatacgtttaaggatttggtttttattttttttttattttaagagtagtgggaagttattaaatgattttaattagagggttggtataattagttttgtattttgaaaagttgaatttagttttcgtttgagaaattgagtgaaagagtttagaacggtcgtggttgagggtgattcgtgggagatttttatataagttatggtagtggtatgggttggtggtagaagagggaatagggagaagatttggaatttaatttttttttattgataaagttattttagttttggtaaggtaattaattggtgggaaagaagatgtttagtttttttgattttattgtattttttgtatttttaatatgagtattgggaagtggtaaaatatttagaggtagtttgggtgttaggtggagtatgagttaaaattttaggatgaagtaaatgaatatttagaatgataggaaagatttgggagttgggtttgggggagggttatttatttttattttttggagattttggtataaatttttgtttttgtaattttttttttaggtaaaggaatttattaaatgaattgttagaagatttattgattagagggttgtatagaattatatttttgagagtgggaagtaggttgattatatagtttattatttaattaggatatatttgaaagagaaagggggttttattaatatttaaattataaaatatgtatattaggaatgttttgggtaaatttggttgttttagtaagaaaggaaatttgaaagtttatattgttttgtttttatgttatttcgtttgtatatgagagggtaagtattttttttttttatttgtattaagggaataaaagtataagtatttaggtgatttttaatttatttttaattttatagtttttgttatattttatatattttgaaaattatattttttattattattatttcgtgataggtgattatttataattatttattgatttagtttcgggaagaggcggtgtaaaatgggacgttttatttaggtgtttattagaaatgtagaatttttgtttgttttttagatttattgaattagaatttgtatttttaaataagatttttaggtgattaatatgtatattaaaatttgagaaaaatttttagatttcgatttaaagaaaaatattttataatttgatagtgtatgtatatatatatatgtatatagatataattgaagtataaatttaatgaagtagaatttatcgttattattttatttgggaaagaaatgtgttcgcgatttaatagattggagtatttatttttggattttaatttgtaatttgaaaacgtatttttaaagtatttaggagtaatttgaagaaagttgaggggaggcggtagatgttttgatttattagggaaaacgtggacgttttttgttgttattttgtgaattgtgtgtatttagttatttttgagtaaatatttggagcgaggaatttttgagtggtgtgggagggcggtgaggggtagttgaaagtcggttaaagttttcggaggggttggtttaggaaatatgattggtagttacgagagagttaggggttggacgtcgaggagagggagaaggttttcgggcggagagaggttttgtttagttgttggcgaggagttttttgtttttttcgtagcgttgagttgaagttgagtgagttattcgcgcgtacggagcgacgatattttcgcgcgtgtattcgttcgggataggagtcggatttttgtgtagtttttttcggtcgtcgggggttttttcgcgtttcgtcggtttttaggtttttttttggttggcgagcgggcgttatatttggttcgtatatttgcgttgtcggttcggcgcggggttcggagagggcgcggcgcggaggcgtagttaggggttcgggaaggcgtcgttcgttgcgttgggggttcggtttatgacgagtagcggggtttgttatgggtcgggggttgtttaggggtttgtggtcgttgtatatcgttttgtggacgcgtatcgttagtacgattttatcgtacgtttagaagtcgggtgagtggtttttagttcgggttcggcggggcgtcgggggtttttttggggttttcgttttttcgttgcgtttgatagtcgggttcggtaattcggttttcgggcggaaacgaggaaagtttttttcgcgatatttacgtagttcgattttcgtagttgtagggattgtgagttttttttgaaaaagagaaggaaagtttagttgtaaggggcgcggggtacgtttggttttttttgtgcgagtaggaaaggcgttgtgttggtcgcgttcgaggcgagtttttattttcggaaagggaagtttgagaagttggttatttgaaggcggtcggggagtagcggttcggagcggtagtttgagttgttaaagtagttagcgtatttgggttatttcgtttatggcgatgtcgcgtgtttatttagttttttttgagttattcgtttaaaaggttagttttttagtttttagtttttggagacggttacgtttttttttaggtcggttttttggttcggagtttttggaaataagttttaagaaaataatcgatttttaaaagaaagttagttggttttattgacgttttggtatggatggatagggagtggagatgtttaggtgaaatcgagaattttttattgaatgtttattgggtgttagaggttgtagattttgtttggaataagatagttttgtttttagggagttgatggttttatgtaattatcgtttgttggaaatcgaagggttaaaattttaattaggttatttatttgatcgttgtttttgaaggtttttaaggaaaaaataaaaataaaaaaatatatatatatattatatatatataaatatatatataattatatatataaatatatataatattaatatatatatgtatgtaggaatgggggtttttaattatttgttatggaaagtgtaaaatttttgagattttaaaagttagattttttttttttggagacggagtttcgtttt

SEQ ID NO: 280 - DNA, 6432 bp, Artificial Sequence
  chemically treated genomic DNA (Homo sapiens)
agagcgagatttcgtttttaaaaaaaaaaaatttaatttttgaagttttagaggttttatattttttataataaatagttaagaatttttatttttgtatgtatatatatattaatattatatatatttatatatataattatatatatatttatatatatataatatatatatatatttttttatttttattttttttttaaaaatttttagagatagcgattaggtgggtagtttagttaggattttaatttttcggtttttaataaacgataattgtatagaattattaattttttgaagataggattattttgttttaggtaaaatttatagtttttagtatttagtaggtatttagtgagggattttcggttttatttgagtatttttattttttatttatttatgttaaggcgttagtggagttagttaatttttttttggaaatcgattatttttttgaaatttgtttttaaaaatttcgggttaagaagtcggtttgagggaaagcgtggtcgtttttaggagttaaggattgaggagttggttttttgaacgggtggtttaaaaagagttgggtgggtacgcggtatcgttatgggcggagtggtttaggtgcgttggttgttttggtagtttaggttgtcgtttcgggtcgttgtttttcggtcgtttttagataattaattttttaaattttttttttcgggggtgggggttcgtttcgaacgcggttaatataacgttttttttgttcgtataaaggggattaaacgtgtttcgcgttttttgtaattgaatttttttttttttttttaagaaaaatttataatttttgtagttacgggagtcgggttgcgtgagtgtcgcgggggaaatttttttcgttttcgttcgggggtcgggttgtcgggttcgattgttaagcgtagcggagaggcggggattttaggaagattttcggcgtttcgtcgagttcgggttggggattatttattcgatttttgaacgtgcggtgggatcgtgttggcgatacgcgtttataggacgatgtgtagcggttataggtttttgagtagttttcgatttatggtagatttcgttgttcgttatagatcgagtttttagcgtagcggacggcgttttttcggatttttggttgcgttttcgcgtcgcgtttttttcggatttcgcgtcgggtcggtagcgtagatgtgcgggttagatgtggcgttcgttcgttagttaggagggggtttggaggtcggcgaggcgcggggaggttttcggcggtcgagggaagttgtataggagttcggtttttgtttcgagcgggtgtacgcgcgggggtgtcgtcgtttcgtgcgcgcgagtgatttatttaattttaatttagcgttgcgggggaaataggaaatttttcgttaatagttgggtaggattttttttcgttcgagagtttttttttttttttcgacgtttagtttttagttttttcgtagttgttaattatgttttttagattagttttttcgagagttttggtcgatttttagttgttttttatcgtttttttatattatttaggagtttttcgttttaagtatttatttaagaatgattaagtgtatatagtttataaagtaataatagaaaacgtttacgttttttttagtagattagaatatttgtcgtttttttttagttttttttagattgtttttaggtgttttagagatgcgtttttaaattgtaagttgagatttaggagtgaatattttaatttattgagtcgcgagtatattttttttttaaataaaatagtaacggtaaattttattttattaaatttgtgttttagttgtgtttatatgtatgtatgtatgtgtatatattgttaagttgtaaaatgtttttttttaggtcgaagtttagaggttttttttaagttttaatgtatatattgattatttggaaattttatttaaaaatgtagattttaatttagtaggtttaggaggtaggtagagattttgtatttttaatgagtatttggatagagcgttttattttgtatcgttttttttcgggattgagttagtgagtaattgtaaatgattatttattacgaagtgatagtggtgggaaatgtaatttttagaatgtatagagtatagtagaaattgtaaaattaaaagtgggttgggagttatttgaatgtttgtgtttttatttttttaatgtaggtgaagaaagagaatatttatttttttatgtgtaaacggggtaatatgggagtagaatagtataaatttttaaatttttttttttgttagggtaattagatttgtttaagatatttttggtgtatatgttttgtagtttaaatattaatagaatttttttttttttttagatatgttttgattggataataaattatgtgattaatttattttttatttttaaagatatgattttgtatagttttttggttagtagattttttagtaatttatttaatgaatttttttatttgagaggaagattgtagaggtaagggtttgtgttagggtttttagggaataaaggtaaatagtttttttttaaatttaatttttaaattttttttgttattttaagtgtttatttgttttattttggaattttaatttatgttttatttagtatttaagttgtttttggatgttttgttattttttagtatttatgttgaagatgtagaaagtgtagtgaaattaggagggttaggtatttttttttttattaattaattgttttgttaaagttggagtgattttgttaatggaggaagattgagttttaaattttttttttatttttttttttgttattagtttatgttattgttatggtttgtgtaggagttttttacgagttatttttagttacggtcgttttgggtttttttatttagttttttaaacgagagttgaatttagttttttaaaatataaaattagttatattaattttttgattaaaattatttaatggttttttattgtttttgagataaagagaagataaaaattagatttttgaacgtgtttttaagtttttaattttttcgtaaatttttatttggtttttttttgtttattgaaagttttttttaaatttcgtgaatatgtttttgtaatttttttattttttatgtttagagttttttttagtgtggattttttttttttgatttttttttttttatttagttaatttttggttttcgtggattgaattataatttttttgatgggtaagtttttttttatttttatgagtagattttgtattatacgtttttttggtattatatgttttttttttaatagttgtaattttataattatttgtgttattttttaatttatatttttattttttatttaattttaaattttttgagggtaggtattatgtatttttttttttatttattattgtgtttttaagtattaaatatataatcgatgtttaataaatatttgttggatgaatgaatgaattaggtaataaagatttagaagaaaattgtatttgattgttttagttgttttataattttggagaaaatattgttatcgaatatttgagatataaatagattatattttagtcgagaatgatgttattattattttttttttttaagaatggagaagtatgtgggtttttttttttttttttttttttttttatatttgtttaagtttttttagatagtaaatatgtatttttttttttttgaaaatataatgtggtaaataaatgtttaatagattttaaaagttttgttttttttaattattataaagatgttttatattgttggaggttagatatttaaatttatggtggaatgtttaattggtggtttttgttatgatatattattaatgttgattttaattttgtttgtttttaatatttttgatttaatttttagttttttgtgaaattgagaagaattagaatttagtattgttaagtgtaagttagttttttgaaaattattataataaaaataatagatgtgtaaatttatgtatattgtaatttgataattttaaaaatttattaggttgagtgtagtggtttatatttgtaattttagtattttgggaggtttagatgggaggattatttgagtttaggagttcgagattagtttaagtaatatagtgagattttatttttattaaaaaaaaaaaaaaaaaaaaaaaagttaggtatgttggtatgtatttatagtgttaattatttaggaggttgaggtgggagaattatttgagtttaggagacgaacgttgtagtgagttatgattgtgttattgtattttagtttagaagatagaatgagattttgttttaaaaataaaaaataaataaaagaaaaagaaaaaaaaattgttatgatgtttttttttttgaaatttttgttgaaagggatgtttgatatttttaattaagatattatttttatatatagttgtatatttggtttagtataatattttgtgtatttatataagtagttaatatatatatgtaaaaaattgggttatttgtaaatgggaataaaaaaataatagttcgatttagggtttaaaaaataaggaaggtaacgtttaagtttttaatgagttgaaaaataataaatattaatttgaatagaaattttaaaagttgataatttattttattagttttttaaattttgtacgtatatataaatatatataattgaattgaattaaattgtggtttatttaaacgttgggttttttagttgtgatgagagaagaattttttatttttttgagttttgtgatatgtagttgttgaggttattgttagttagagtagttaatagggagatttttttttttataaattaattagttttatttttagtttttattttttgattaattttttttttattgtgaagtaaattaataagtattgagattgtagttaatttgtgagggttatttattttttgtgggttatttatgatgttattttttttaggaaatattttgtgatgttttatttattgtgattattttttttttagggataatttagggaatatttcgtttatttagtttttttttaaaaaaaaatgtttgttttattttaatatggagtatattattgttatttatttgttttttagaattttattttaatgattgtaaagtttttaaaagtataaaatattttttttttaatgtagaattatatttcgtgttttatagataattagtatttagtgtgtgttttttgtttttaatagagagaaaaataagaatattagtttttttaatttatttttttgtttgtagttttttatagatattaatagaatttgtaattatgttatatgtttatagaaagtattaatagtatgttttgaaaaaaataattttttgaaaattataagggtaatacgtgttaattataggtaggaaatttagattttttttttaaaggtagattttaaaaggatttttaattttattatttaaagataatttttgttaaattttggagtatgtttttgtagtattattttaattttttttttataaatgaagaatttgaggattaaagagattaagtatttgataaaggttatatagttagtaaaagatagagtttagatttgaatttagttttgtttagttttagatttgttttatattttagaataaattgattaggtggttgattttcgttatttgattagtgaaggattttaggaaatgttattttaaaatatgttgttttggtatattgattatttttagttgaaggtatttaaagattagtaaatgtagggaggaggagagatatgtggaatagatgtggattaattttttgattgaatttaagttagatttttattagttaattttaagtttatttttagttaatttatatgagtttgagtaagaataagtaaatgtcgtttaaggaaaaatttgggttggtttgttatttagaatttttgaggtaatagttaagagatataagggatgtgaagggtgaggaattacggaaaagtaaggttaaataatttgtaggtggtaaaattataaaggggtttttatagataaaaattattatgaggtttgttatgggggttgaagatgaggaagatagtaggattttaatttagatttttaggattatttataaattaaattgtatatatagttaaagaatatgggtcgggtatgttggtttatgtttgtaattttagtattttgggaggtcgaggtaggtagattatgaggttaggatttcgagattagtttgattaatattgtgaaattttgtttttattaaaaatacgaaaattagttgagcgtggtg

SEQ ID NO: 281 - DNA, 6485 bp, Artificial Sequence
  chemically treated genomic DNA (Homo sapiens)
  unsure 83: n is a or g or c or t
tgaggttattatgttttttttatgtttttaaagtttttttcggtttggtgttgtggtttaacgtttgtaattttattattttngggaggtcgaggagggcggattattttaggtcggagtttaagattagtttgattaatatggagaaatttcgtttttattaaaaatataaaattagtcgggcgtggtggggtatgtttgtaattttagttattcgggaggttgaagtaggagaattgtttgaattcgggaggtagagattgtggtgagtcgatattgtgttattgtattttagtttcggtaataagagtaaaatttcgttttaaaaaaaaaaaaaaaaatttttagattacgtttattttattttgattatgtaagtattaagtatttggtatagtaaaaattataagaaaaataatagtagtttttagtaagaattttggtattcggagattatgatgattgatattttgattttttattttattatttttttatttttcgtattttatttatatagtggttagtggagttaagcgatattattttgtagatatttttgtgttaattaagttgttataaaatgtttggagatattaagagatgtgttttgtgttcgacggaaaatagtttgaattttaattatattgaggtttatttaggtataggtagcgataatgttttagtgggtgtgggtgggggtgggggatagaggtttagtggaggtttgtaatatgtgcggtgattgtattttaagaaagaaattattacgtatgaggaagtgggttagatttagtatttcggagtgatagttagggatagtagaataattagggtgttttgggaggttgtttttgaattttttaaatttattttttttttgggaggtaaagatttgagtttaaggggtaggaggtggggggagtatttattttatgaggaatttatttagtttattttttggggatattatttaatttttggggattttggtttttttatcggtaatataggggtgggatgggaatgttaataattttttagattaatttttttacgttttattggggattacgggttggtattttttttatttagggcgtgtagttcgggaattttatttaggttattaggggtaaataaaggggagggggttttttttttcgaaagggcgtaaggaaattcgggggggggcgaggggataaatataagcgaagagacgtgtcgggatgggagataaggagtaagaagaaggggagaggggcgggaggcggagtagaggcggagagagagaggggggtagggagagaagagatgtttaggggggagcgtgacgggacgagcgttggaggagagaaaagagggcgaaagacgaagataatataaaataagaattggcgacgagaaagagagggggggagggagggggtacgaggagggaggaagggaacgagggtaggaggtaatagcgagcgatagaaagaagtaggaaagaaaaacggaaagagaaagaaagaaggggaaggcgggggggggagggggacgcgaaaaggaaaaaaagggggggagagcgaggaggacgaaagggagaaggagggagaaggggggatgaggaggggggggagtaagggcgacggagggaggacggaggcggcggagagaggaagataaggaagaggaacgaaagaataacggttacggatgggtcgggaggagagagagaaggggtgcgagggagagaagaagggcgcgcgcgggtaggtaagtttttgtatttttagtagagttagggttttattatgttggtttggttggttttgattttttgattttaggtgatttatttatttcggttttttaaagtgttgggattataggtatgagttatcgtgtgtggtttgaagtaggtatttttatttttattttataaatgaggaaattgagtttggatttagaattttttatttttattgtattgtattgttttttgtttaagaattatgtaattttggggtgtaaaatgttaataaaagtaaatgtaatattttttagtttgttttatttattatttattttttttagtcgtaagaatattttgtattagatttattgtagtaagttgtttgagaattgaggtgagtgttaataaatggattatgggttaggtatggtgatttacgttataattttagtatattttgatgtttaggtgggagaattgtttaaggtttggagtttaagattattttgggtaagatggtgagatttcgttttttatataatatttattaattatttaggtatagcgttacgtttttgtttttttagttattatttaggttttcgcggtttgatcgtttttttttatagttttaagtttttattcgttttgattatgttttttcgttttttttttttttttttttttttttttttttttttttgtttttcgtttttttttttttattttttttgtttttttatttttgtttttttttttttttttttttttgtttattttcgttttatttttttttgttttttttttttttttttattttttttttgtttttattttttttttttttttttttttttttttttttttttttttttttttttttttttttttttttttttttgtttttatttttttttatttttatttttttttttttatttttttgttttttaggtttatttttttttttttttttttttttttttttttttttttttttatttattcgtgtgttcgcgtttttttttttttatcgtttcgcgtttttttttttatttattttttttttttcgtttttgatattagtatttcgtattttattgatagttataaatagttggtgggtgattattaggttcgggggtttttttttagtaaattggggcggcggcggtagtttcggcgtaggtgtgttgggtttgagtcggcgcgggttcgatttagtagtagcggttcggatcgcgggtgggggaggggagggaggggttgggatcgggtaggggaggagggaggggcgggaggggaagggggagcgggggagggggaggggagggattagggggcgcgaagagggggaggagaggcgggttcggagtttttcgttgttggcggttatagggcggttggattaggaggtcggtgtttagtttaggaagggagttttaggttagggaggggtagaggttaggtttgaggtttggatcgttttgtgagcgaggattcggtttcgttcgaaggatgaagatttgtttttaaagatgataacgtataggaaaggtttattagtcgatttttttttgtttgggtttatagcgttttttaaatttttattatttttttttattgtttagtttgtttttttattttttttttgaggtcgttttttatttttgtgttatttaggatagggatttagttagaaatcggtagtatttttttttttgtggagtgatagtattttttttttattgtaatttatttttaggcgtattcgatagtttttttttgtttttttattttttttttttatttaagggattttttgtttttttagtttatttttagtttttttttttttggttttttggttatgtttgtttttttgttttttgttttttttttttatatatatttattatttttttagttattttagtatttttttttttaattttgggagatatttcgtttggttggacgggaaaattttaggatttaggttatattttttagtagatatgtttatttttggggaggaggaataggagagagtttgaggaagttttgggggatagggggatgatgggattaaggttaggttaggaagtttttgaggatagagattgtggggagattgggattgggaagaaagtaaaggagttagagttagggttaaaggaaaaggggggttagtagggaggtatttgcgggggaggtttagtagttgttttttttaagatagggatatatgggtttggttattttttttgttatatgtggaacggtaggagatggaagacggagatagaataagtaaaggagggttttgggtatagaggtttgtgtgtgtagttatttaagttattggattttagtagacgagtatttaagtttaggtttaatttagtgtacgtgtgcgtatatatatgtgtttcgtatttgatagtttatttaattcgtttaaattttttttttataatattaatttataataggagattttttttatgtgggtaatattcgtgtttttatttcgaaagggggaatgataagataggattttttaggggattatagaaagaaaagtaggaaagtaagtattttgttggattttagtagtaggtatgatgtttagggaaaagaaatttggatagttagggagtgaaaattttattaattttaaataagatttttgtgttttttttttagtaatataaatgttttgttagattttttttggaaaaaaatttttgtttttgtttttttttaggttttaggttgtttatgtttaggaaaagatggatttttttatttaaatttttttcgtggtgtgtgtgggtggaggagtggattttggtttaggtaggggttttagggaagagaaggcgttattttcgggggtttttattagtgtttggtggtttttttttttgattgggtagaagtggtttaggtaggcgtatgatttgttgttgtggaggggttgtgttttatcgttatatgtttttttatttatttgttttttagagggttgtttgttgtgtatttgggttttggagtttttttttattcggtgagtggttagtagggtgtggggttatgtgagggtagaaaggatagtaaagagaaatgggtttttagttgggggaggggtaggtaaattggaatttataggtattgatttttgtcgagaagagtgtagtttttttagaatgggaggagtagggtagagtaggggtagggggtggggtgttggtttttgagggattgattatttatttggtggaatatagtatagttttggttggttttaaggaaaggggatatgagtttagggagaaaataagagagggagttgtatttagggtttagtaaatatagtagtaagatggatatagttttaatttttatttttagttggttatttttcgttagtttaaggttttgaatttggtgttggggaagttgggttaggtaagttagggcgtaaggagagggtaatgggaggagggtttatttatgttgatagatttataggaaattttaatattgaattaggtgtaagtttttttgtataatttgtgaaaggaggaggaagttatgtggggggttttgtgaaggaatcggaaggggttttgttaagggggtagggaggtaggtgtgagttatgagatagatatgttagtgggcgtttaagataaggtaagtttttaaggtgggtattatttagtaggtgttcgtttttgggtagttggttttaggaaggaagttttagaattgttagtttattttttggttttagataatggagtattttaggatttggagtttagagaaaagttttagtggttttatgtgtgggggtagatagggaaagaatagaggttaattttttttatatcgttttttaattttgatttttagtggttttagttatagttttgtgtagtttttttttttagttttattttttatcgtagaagttattttttaatatattgcgttcgtttgttagttttttatttaggttttgtattttattttttatttttttttttaggttgaagttataatattttttttttttatttttattttagattttttttgatttaataattaaggttgtttagaatttaaggttaattaagatatgtgtgtatatatattatgttttgttgtttttagtaggggtaggtggtattaaatttatgttcgatttattgaggagttttgataaaaaggagatattatatgtttttttgtttttttttttttttttttttttttttttttttttttgagacggagttttatttttattgtttaggttggagtgtaatggtgcgatttcggtttattataattttcgttttttaggtataagcgatttttttgttttagttttttaagtagtttggattataggtatgaattattatattttgttagtttttttgtatttcgtagagtcggggttttattatgttagtgaggttggtggcgaatttttgattttaggtgatttattcgttttggatttttaaagtgttgggattataggtatgagttattgtattcggtatattatatgtttttattataagaaaatgtgagagaatttagggttttggtagttttaggttggttagtattttaagttttttttagtatttgtttattttgttaggtagtttttttttagaaatttggttaaatgtttattttttttgttatttttagg

SEQ ID NO: 282 - DNA, 6485 bp, Artificial Sequence
  chemically treated genomic DNA (Homo sapiens)
  unsure 6403: n is a or g or c or t
tttgaaagtagtaagaagagtgaatatttaattaagtttttaggaagagattgtttggtagggtgaatagatgttggggagggtttgagatgttgattagtttggaattgttaaagttttgaatttttttatatttttttgtgatgaaagtatatggtgtgtcgggtgtagtggtttatgtttgtaattttagtattttgggagtttaaggcgggtggattatttgaggttaggagttcgttattagttttattaatatggtgaaatttcggttttacgaaatataaaaaaattagtagggtgtggtggtttatgtttgtaatttaagttatttgggaggttgagataggagaatcgtttgtatttgggaggcggaggttgtggtgagtcgagatcgtattattgtattttagtttgggtaataagagtgaaatttcgttttaaaaaaaaaaaagaaagaaagaaagaaagaaagaaagtaagaaagtatatggtgttttttttttgttaggattttttagtgaatcggatatggatttggtgttatttatttttgttgagagtagtaggatatgatatgtatatatatatattttaattagttttaaattttgagtaattttggttgttaggttagagaaaatttgggatggggatagagaaggaaagtattgtggttttagtttggagaagagagtggaaaatgggatgtagggtttgggtgaggaattggtaaacgggcgtaatatgttgaggggtaatttttgcggtggggagtggggttggggaggggaattgtataaagttgtaattgggattattagaggttaggattaaaaggcggtatgggagaaattaatttttattttttttttatttatttttatatataaagttattggagtttttttttggattttaagttttgaaatattttattatttgaggttaagagatgggttaatagttttgggattttttttttgagattagttgtttaggaacgggtatttgttgggtgatgtttattttaggggtttattttgttttaggcgtttattaatatatttgttttatagtttatatttgtttttttgtttttttggtagaatttttttcggtttttttataggattttttatatggtttttttttttttttataagttgtgtaaagaggtttgtatttgatttaatattgggattttttgtaggtttgttaatatgagtgggttttttttttattattttttttttgcgttttggtttgtttggtttagtttttttagtattagatttagaattttaagttaacgaggaatgattagttaagaatggggattggggttgtgtttattttattattgtgtttgttaagttttaagtgtagtttttttttttattttttttttgggtttatgttttttttttttagggttagttagggttgtgttgtattttattaagtaagtgattagttttttagaaattagtattttattttttatttttgttttgttttgttttttttattttgggaaggttatatttttttcgataaaggttagtgtttgtaggttttagtttgtttgttttttttttagttgggagtttatttttttttgttgttttttttatttttatataattttatattttgttggttatttatcgggtggagaagggttttaggatttaagtgtatagtaggtagttttttggggagtagatgggtaggaagatatgtggcggtggggtatagtttttttatagtagtaggttatacgtttgtttgggttatttttgtttaattagagaagggagttattagatattggtgaaggttttcggaagtgacgtttttttttttttggagtttttgtttggattagggtttatttttttatttatatatattacggagaagatttggatagggggatttatttttttttggatatgggtaatttgggatttggagggggataggagtagaagtttttttttaggaggaatttggtaggatatttgtgttgttggggaagaagtatagaggttttgtttaagattggtggggtttttattttttggttatttaaattttttttttttggatattatatttgttgttgaaatttaataggatgtttgtttttttgtttttttttttgtaattttttagggagttttattttgttattttttttttcgaagtgggaatacggatattgtttatatgagagaaattttttgttatgggttggtgttatggggaaagggtttggacgggttgagtggattgttaggtgcggggtatatgtatgtgcgtatacgtgtattgggttaagtttgagtttaggtgttcgtttgttggggtttagtggtttagatggttatatatatagatttttgtgtttagggtttttttttgtttgttttgttttcgttttttattttttatcgttttatatgtgataagaggaataattaggtttatgtgtttttgttttaggaaagatagttgttggatttttttcgtaaatatttttttgttggtttttttttttttttggttttggttttagtttttttgttttttttttagttttagtttttttatagtttttgtttttaggggttttttggtttgattttgattttattatttttttgttttttagaatttttttaggtttttttttgttttttttttttaaggatgggtatgtttgttgagaagtgtggtttagattttggaattttttcgtttagttagacgagatgttttttaagattaggaaggagggtgttgggatagttgggaggatagtgggtgtgtgtgggagggagagataggagatagggaggtaggtatgattagggaattaagagaaaggaggttgggagtgggttggagaggtagagggttttttgggtgaaggaagggggtgagaaagtaagaggggattgtcgaatgcgtttgaggataagttataatgagagggagatattgttattttatagaagggggaatgttgtcggtttttggttaggtttttgttttgggtaatataagaatgaggagcgattttagagagaaggtagggaggtaggttaggtagtgagagagggtggtgagggtttggggggcgttgtgggtttaggtagggggagatcggttgatggattttttttgtacgttgttatttttaaagataagtttttatttttcgggcggaatcgggttttcgtttatagagcggtttaggttttaggtttagtttttgtttttttttagtttgaggttttttttttgggttggatatcgattttttggtttagtcgttttgtggtcgttagtagcggggggtttcgggttcgtttttttttttttttttcgcgttttttggttttttttttttttttttttcgttttttttttttttttcgtttttttttttttttttgttcggttttagtttttttttttttttttttattcgcgattcgggtcgttgttgttgggtcggattcgcgtcggtttaagtttagtatatttgcgtcgaagttgtcgtcgtcgttttagtttgttgaggaggagttttcgagtttggtgattatttattaattgtttataattattagtggaatacgagatattaatattagagacggaaaaaggaagatagatgggagggaaggcgcgaagcggtgggagggaggaggcgcgaatatacgagtagatgggaagggagaaagagaagaaaaagagagaaaaaagaagaataaatttaaaagataaagaaatgagagagggaggatagaaatggaggaaaataagaatagaaaagaaggaaaaagaaaaaaaaaaaagaaaaaaaaagaaaagaagagaaaagaaaaaaaagaaaatggggatagaaaaaaagtaaaaaaaaaaaaaagaaatagaaaaaaatggaacgaaagtaggtagggaaggagagagaaagaaaaataaaaataaaggggtagaaaagataaaaagaaaaaagcgaaaaataaaagaaaaagaggggagaaagaaaaaaaaaaagagaacgaagaggtatggttagagcgagtaaaaatttagaattgtagagaaaggcgattaagtcgcgggaatttgaatagtagttgggaagataggagcgtgacgttgtgtttgggtagttggtaaatattatataagaaacggggttttattattttgtttagggtggttttgaattttaggttttaagtaatttttttatttaagtattaaagtgtgttgggattatggcgtaagttattatgtttggtttataatttatttattgatatttattttagtttttagataatttgttgtagtggatttaatgtagaatgtttttgcggttgagaaagatagatgatgaatgaagtaggttgagaagtgttgtatttgtttttgttggtattttgtattttaaaattgtatggtttttaaataggagatagtatagtatagtaaggataaaagattttggatttagatttagtttttttatttgtaaaatggaaatgagagtatttattttaggttatatacggtggtttatgtttgtaattttagtattttgggaggtcgaggtgggtggattatttgaggttaggaggttaagattagttaggttaatatgataaaattttggttttattaaaaatataaaaatttatttgttcgcgcgcgttttttttttttttttcgtatttttttttttttttttttcggtttattcgtggtcgttgttttttcgttttttttttttgttttttttttttcgtcgttttcgtttttttttcgtcgtttttgtttttttttttttttatttttttttttttttttttttttttttcgtttttttcgttttttttttttttttttttttttcgcgtttttttttttttttcgtttttttttttttttttttttttttcgttttttttttttgtttttttttatcgttcgttgttgttttttgttttcgtttttttttttttttttcgtgttttttttttttttttttttttttttcgtcgttagtttttgttttgtgttattttcgtttttcgttttttttttttttttttaacgttcgtttcgttacgtttttttttgagtattttttttttttttattttttttttttttttcgtttttgtttcgtttttcgtttttttttttttttttttattttttattttttatttcgatacgttttttcgtttatgtttgttttttcgttttttttcgggtttttttgcgttttttcgaggagggaggtttttttttttttatttatttttaatggtttgggtggggttttcgaattgtacgttttggatggaaagggtattaattcgtggtttttagtagagcgtaggaggattgatttaggaggttgttagtatttttattttatttttatgttgtcgatgaggaaattaaggtttttagaagttaagtagtatttttagggaatgggttgaatggattttttatgagataaatgttttttttattttttgttttttaagtttagatttttgttttttaggagggaggtgagtttggaggatttaggagtagttttttagagtattttgattgttttgttgtttttgattgttatttcgaggtgttgagtttggtttatttttttatgcgtggtgattttttttttggggtatagttatcgtatatgttataggtttttattgggtttttattttttatttttatttatatttattggagtattatcgttgtttgtgtttgagtgaattttaatgtgattagggtttaagttgtttttcgtcgggtataaaatatattttttaatgtttttaagtattttgtgataatttagttggtataagggtgtttatagggtggtgtcgtttaattttattggttattgtgtgagtggggtgcggggggtgggggggtggtaaggtaagaagttaaaatgttagttattatggttttcgagtgttaggatttttgttgaaaattgttgttgttttttttatagtttttgttatattaaatatttagtatttgtataattaaagtaaaataaacgtaatttgggaatttttttttttttttttgagacggagttttgtttttgttgtcgaggttggagtgtaatggtataatatcggtttattataatttttgtttttcgggtttaagtaatttttttgttttagtttttcgagtagttgggattataggtatgttttattacgttcggttaattttgtatttttagtagagacggggtttttttatgttggttaggttggttttgaatttcgatttgaggtgattcgtttttttcggttttttnagagtggtgggattataggcgttaagttatagtattaggtcgggaaaaattttaaaagtatagaagaggtatgatgatttta

SEQ ID NO: 283 - DNA, 13606 bp, Artificial Sequence
  chemically treated genomic DNA (Homo sapiens)
  unsure 4649, 7634, 7657: n is a or g or c or t
gagttcgagattagtttggttaatatggtgaaattttatttttataaaaaataaaaaaaaattagttaggtatggtagtgggcgtttgtaattttagttatttgggaggttgaggtatgagaatcgtttgaattcgggaggcggaggttgtagtgagtcgagattatgtaattgtattttagtttgggtaatagagcgaggttttgttttaaaaaaaaaaaaaaaatggaattaattaagtttttatggtaaatagtggggggaggggttggggttttttaagatagtggtttttaagataagtatagggatttggggttatttgggaatatgttagaaatgtaaatttttaggttttattttaggtggattgaattagaagttttgggagtaaaatttagtaatttgagttttaataaggtttttgggattttgggaagtttgagatttattgttttaggttttcggtttttaataattagttttttaggagaatttagtttaagatttggggatatgttagttgggcgtggtggtttatttttgtaattttagtattttgggaggttgaggtaggcggattatttgaggttacgtattggatattagtttggttaatatggtgaaatttcgtttttataaaaaaatataaaaattagtcgggtgtggtgtgtgtttgtaattttagttgtttaggaggttgaggtaggagaattttttgaattgggaggtggaggttattatgagttaagattatatattgtattttagtttgggcgatagagtgagattttgttttaaaaaaaaaaaaaaaaaaaaagatttgggggtatgtttattttttttttttgtgttgttttattttaaagtttagttatagggcgtaattagatttagtttgatttagagtaaaaagtatttattgagtgttttttgtgtgtagattttggaaatgcgggtaaatggtataatagtagtaggttaatgagtagttgagattttaaagaggagtggaaggtattgggtgaggggagagtgaaagaaagaaaaggttagaattttatttgtttattttttttttattttatttatttttttttttgtttcgaggtttttattagaataaatgattgtggtttaaattgttttgaggttggaggtagaaattaagtttttatttatttttgttggttatggggattttaagttagttaatagttataggtttttgattttttatgagtaattaaaagaagatgaggattatgtatataggtatatataaatattttttgcgattttagatgttagggtagggagattaagagaaggaatgaagttttagaaggttggaagttttttgggtaaaatgagtttagtagataataagtaggaaaagttttttaataggggagggcggggttatttttggtttattttatttttttgagatttagaaattgtggttagaggaaataaagggtttttaaggtaaattataaaagtttttgagaatgaaatttgagtttggaaagagagtagagaatgagggatggatattagatttaaagggtttttttatataggtaaatgggggttagggggttgggagggatgtgagttatgtttagtttttttttttgggttttttttttattataggtagtttttaggagtagaatttttgttattgttttagtttgagtagttgatttttggtttttttttgttttattttttgaggaataagtttttttttgatttttatagagtttttttttttgtttttttgtaaggttttttttttgtgtttgaaaggttttgggtttaaggagtagatagttttgtaggtttaattgtagtgatttatattggtttttttttaggttttgggtgcgggggttgagattttaagataggaatttgggaatttggtataggtttatagatgatgatattaggtagataggttgtaaaagtggtattgagggattggattttgaggtaggggatgttataggattatgtttttattttgttatttgagggttttttatggataagagattagaagagattaaatgtaaaaatatttgagtagtgattttttggagaggagttagtggtttttgataggtttagtttttattaatgagatttgggagtggtttttgtttgttttttgtttttgttgaatttatattggtttgttgtaggggattggaaagatgatgtggaagaatgagttcggattttagttgatttattttagggaaacgaaggttgggtaaaagttagatatgtagaaatttacgtatttttaggtttaattataatatagagattttgtatttttttagatttaatggttttgagaaggatttagaaggagtttttaagattaattattatttataaagtttttattttaggattttggtaattgaatttttttttttagttattagttttttggaatagagaaggtagtttttgaaataggtgtttttttttttttttattataagttatagtgtttaggatgattattgtttttagattgtgtgatttgttttggtaaggaaattttattgtggggggaggaaatgaggtagtcgtgatataaagtgatggatgagttttttgtttagtagagagagagagaaagtcggtaggttgtgtagaattgagtggtttttgggtttaaagggtttttttttggttaagttttattttaaagtttaggaagtttatagtttggcgttatggaagagagataaaatcgtagtatttttttttttttttttttggatattattatttttgttttgatttagattatcgttggttttttttattgttttttagttttgtttttgtgatgtagagtataaatgtattttatgtattgggatttttttttagttttttgagtagtttaattttaagggattagttttatatagggtagagtatagattttgagtattatatattgtagttttgttttttagggtttcggttaaatttgattatcgaggaggtggtatcgattggtagatagttatttttagtgtattttattttatttattgtattgattttgtatattgtagttttttgttttatattgtagttgttgtttgttttttgtgagtttagattgaatataggttcgtttattgtatggaggtttcgtacgttgtagttttaattttttattatagttgttattgtatattataggttttttttatttatggtatgtttttaatattattattgtattttgtacgttataggttttattttagttgttttttttatttttatggttttagggattttaagagaggtattttttttttcgttaagtattacgaattttagtattttttgtgaaagaagtggttttaatagtattgaggatgtaggtggttgagattaagatatgagtaagggtagtttaatttgggtaagttgtggtttagaattttatattcgttaagtgattttgtttagtataaattgggcgattagtcgagtagttttttttaatatatatatatttatatatatatatatttatatatatatttttttttaagagtagattatgtagttagggttttattttgagagtcgtgggaaggttgtggttttcgttggtaaaattgggttaatgatagtaggggaatcggcggggttaggggggtgttggggtaattagggttcggtttggcgttaggagattttgagatgaaaggtgttttggcgttattgggttggttttatgtttatgaatgtaggtgtgtggtgtgtgtatgtgtgtgttgggggtggggttggtatggtggagattttttttttgggttgggttagggggtttatttgtatgtagtttatcgttttttttagattgattttggtattatttggatttttgtgggagtaaatatggggggaaatattattattcgggagttaggaattgagggggtatggtagattttgtttttttttcgagtttaggagagggagtagattgttgggggaaatggttggtgatagagaatagaaagagtttatatggagaagggtgacgttggaaaagggaggtagtggatcggtattgatgttagaaatgagaggggagggaggtaatagggaatgaatttttataaggatgaaaaacgtaagatgattgaagttaaaaggatattaggggttatttgtttagttttcgtagttgaagtttgaggaagttttgttttcgatagtagtggcgatttgttaaggttatatagtgagttatcggcggagaagggattcgaatttttaaataaattatatttgtaagcgtttggtgtttagatttttttttcgatgtataaggtataggttgttcgtcgatatttttttttttatttttacggtgtatattcgaaaattttttaattttttcggtaagtaaaggttattttttaatgatattttttttaaaatatgttattaagtatttatttttgcgggagtcgttcgggttggggagggcgagttcgagcggggcggggtagaggcggtcgaggggcggtcgggtttttggcgggggtttcggggcgcggtagggggcggggggcgggggcggncggcggcgaggcggtttgtagggagtagtcgcgagtcggtcgggcgcgtcgagttcgagttttagtcggagcggggcgggggagggaggagttagagcggtcgtcgtttttgtcggaggagtcgcggggtcgttatattcgtttttcgtttttttcgggtttattggtatttatattcgggcgtaggaggcgggcggttcgggttttatcggttttttatggacgtttttagtacggggcgttgagattttcgcgtcgttgtttatttcggttcggcgcgttacgtcgaggtaaggaggagggagcgagggggtattaatatgtaaatgttttgcgattgattatgtaaagtcgcggggtttcgtggttagtttttaggcgggttaggggcgtttagggggtgtttgttgttagttttagttttttttggcgttttagtgattttgttacgagttcgggagtttgtaattgacgttttggggaagggaggtgttgttaggaggtcgttgggtttcggggttcgtaggcggagatggcgttcgagtttttttttggagggttcgttcggtttttgttcggttagtttgttgcgtattttcgggtcgggtttcgttgtcggtcgtcggagttttttcgttcgtcgcgtcgcggtttgtttacggtgcgtcggaggtttgtttttttagtttttatttttagtttatgaggttcgagtggtttttgtaaagttgtttttagttgcggagggtagtatgagtgcggtggcgcgggtgggtttgtacgggttcggggagagggaagttttttcgttttattcgtttttcggttgagtatggttgtttggttgtaatattgttaattgtaaaaacgcggttgttgggggggaatgtgtgtgtggaaggggtgtatttggtggtgtttagatgattaggagagttgttggttggggaggagagggagaaatggatttgtgtgtgtgtattttattttgtttttttttttttgtaacgtgtttttggtgttttttttttatttggggtttttttttgtttagcgtgaaagaaaggtttggggggatgataggggtaattgaaagaattatcgttttaggggtgggggtgggggatatagaaggaaagttagtgaggtgggagtttgttttttagtgttggttttggttttaggagggggaggggatgaagggggttgttgtttaaaatgaggggggaagtaaaagtgatacgtagatatagagatatgtttatatagatagttatatgtatatttagggatatttaggtagatttaaggataggagttattggatatatttatatggggataagggaagagataggttgttgttgtatcgtggagttttgaggggtgggatatatttatgggagattaagagtatggggatcgatttatgtatatatttacgtatagggttatacgtagatgttgttatatattggggtaaggaggagttgttgttatttatatataaaaagttattgttatatgtatgtatgtatatagagtaattgtatatagtagtataattataaaagattttgttatttataggtatatacgtgttcgtatgagtttagttatatagatattattgtttgtcgtgatagtcgttgttatttagttagatgtaaatatagttatatattaatatatgtatatataatttagtaataagtatttttttggattttttattgtggagttttgaggttttgtaggtaataaaatttttgtttttaagaatattaaatttggttgtatgaaaaagtgtttttgcgtaatggtgtaaagtatgtatttttaatgatacgtttttggtttttatcgtttgagatattattttattagatagtgagtttttggagatttgggagaattatttaaagagttttggattttacgtagagtttagtataagggttgttttgtaaatatttgttagttgattgattgtggaatttgtagatataggtgtatttatttgtatatggttttttgaatttaggtgtagaacgagtttataaggtttaggtttttatagttgtaggtttatattaatagtcgtgtttatataattttagatgtatataattgtagtttgtgtagtcgagtatatatttagatgtatataattataaattttttttttttagtttttttttttttttttttttttaggtttagttattgtgcgggaatgggttgtttttttttttttttttttttttttagagggatagagaaataagagtaaagatagtgggtttaggggggttttagagggtcgagttatgggtttaaagtagtgtttagtgatttttagaagttaggatttttttgattgttggggaaggggagagttgtttttttttttattttaaaagtttaggggtgtttaattgtttttgttttgagttatttgtttgggttttttttgggaatagttagttatttttagttgagtttttgcgttttattttgagtttggtttttttttttatttgtatttttttgtttaaatttggaagttttttttaagaggttatcggttggcgagtgtttgtgtgagtgatatgtatttttgatttggaatttttttttaattttgtttttttgttgttttgttttgtagtgtttgattttttttttttttttttttgtttttttgttagtttgtaatttttttttattttgttgttattttcgatttatttttgtttttgttttagagttggggattggtagtaatgttttttatatttttttagttgttaatatttaagtttcgtttttttgttttttttgcgtagtttttggggttagtttgaggttggggtggggggcggggggtttagttggttgtttaggattttttgtatttttttagtgtcgtagttgtggttagtaagttttaggggttgggaatgggggaggggggggggttanttattgtttatgttgattttttnggtttgtatgtttggagatattagttttgtgggtatttttagggtgtaggttgtagttagttagtagtttttaaataagttatgaagaggttttttttatattggtttaagttggaaaagaatcgtttttatgggtagtggcgggagttggtaggattttgttgagttgggtttattgtagggtttataatggtttttttttatatttttggtagttgaggtttattttagagatgtttaatagttgtgttttttttgtttagttttagggtttggttttgagggtatagttgtttagattaagtatgtattaagcgaggtttttttattcgtgagtgtaggttttagtttagaaggggtattttttttggagagggaatttgaggagggggaatttaggtaggagatatcgagttcgggggtattaagtatttttcgttatgtttttttttagttttggattatttggaggtggaggtatttggtagagaatttatagggtagttatagaggggaaagattgaggtttggttttagggaatatatagttggatgaaagaataaggtattgggtcgggtatagtggtttatattcgtaattttagtatattgggaggcggaggtaggtagattatttgaggttaggagtttaagattagtttgattaagatggtgaaattttatttttattaaaaatataaaatttagttgggtgtggtggcggggttttgtaattttagttatttaggaggttgaggtaggagaatcgtttgaatttaggaggtggagattgtagtgagttgagattgtattattgtattatagtttgggtgatagagcgagatttcgttttaaaaaaaaaaaaaaaaagaataaggtattatttattaagtaggtgatatattattatagttgagaatagagatgatggtgatgattatgacggttatgattgatttggattgtttaggtttgaattttagttttgttatttgttggatgtgtgattttgagtaagcgatttaattttttcgttgttttatttgtaaattggggatgattatatttattttatttagtttttttgaggaaaaatgtttttaaaagtgtttagtttataataaattgtatatgtgagcggttgtgatgggtgaaggaagttgtgggtttggggttttttagattttttagagaagtttcgtggagaattgggttttttagatattagtgagattggggtttggggtagtgggtttttaatttttagtttttttatcgttatgtaattttttttttttagacgaatttttgtagcgtggaattagtgtatggtatttaaagatttaaggtaggtttttttgttttatttttttttgattttcgttttttagtttataaggagtttttggttttttagtttgggatatattttattagttaggggtatttgtataaatttttgggtattattgtatttttgtttagggtttgagttttgggggtgggagagagagaataaggaaagtcgtttttttttttatgtgtgggtttaaagaggaggtagtgtttttttttttttttgggagtttagtattggttaattaggatttagttttggttgataggtattagatttttttgttttttatggagtggtatttagtgtgaaaggtggtggtagagagaaattgaagtattgagtaatgattagtgtggtgggtatagtattttgagatttagtatttgttttgggttgtttttttgtttttgtgagtttggtgattaggattttttttttaaattttttttatttagttttgttttttaaggtgaaggaaggataatgggaggatattttgtaggggtgacgggaagtttttggagtgggaattaattttaattttagttttcggttgggtatagtggtttatgtttgtaattttaatattttgggaggttaaggcgggaggattatttgaggttagtagtttatgattagtttggttaatatagtgagattttatttttaaaaataattttaaaaagttagttaggtgtggtggcgtatgtttgtgttattagttatttgggaggttgaggtcggaggatcgtttaagtttggaaggtcgaggttgcggtgagttgtgattgtgttattgtattttagtttgaataatagagtgagattttttatatatatatttttttaaaatagatagaaaataaaataaaaattttaattttagtttttatggttgtaaaggtgtttaggggattttggagaattgttgtgttttttggggagggaggtaagtatgatcgtggtgggaagattattggttgggagttgggacgtttggttgttgatatttattagtcgtatgattttgggtttgggtttttattatttagagataatggtttttgttttatttaggttgagggtaaataatataaggtgggatgatttttgtgtttaatttatgttgtattttggtatggtgagtaatgtttgtggatttttttttttttttagggtttggtatatgttagggtggggtatatatatgttgtttggaattagagatagtttttagttttttattgaagtatttggggttggtgtgtggtgggggtatatgtggttttattttggtgttatttggtaggttaaagttggggttatagggatttttttttcggtatgttattgcgtgaggtggtttagagggagggttagaagtttgttgggtagataagggaagtaagatgggtgttattggtgtttaggaaatattatttttgtttcgttgttttgggggtgggtattaaaggttgatattaaagttttagttatgttttttagtagtggttaagagtagaatgattggattaagtttttggtttattttttttttttttttttttttttttttaaagaagatatcggtttttggtttttagagttttagttgtttgttttttttttttttttattaggtatgggggtggggaaataggggaatcgaggttttggtgtttttcggtatttttgtatatattagtgagtgggtgtgttgtgtacgtatttatgtgagagtgtttttgtgtatgtgtgggttggggagggttttgaatattttttggaacggtatttagagttttgtggttttgcgtatgcggggtgagtgtgtgtgtttgtacgtgttcgtgtgtgtgtcggagatttagttgtatttacgcgcgcgttttttttttttttttttttttttttttttttttttttttttttttttttttttttttttttttttttttttttttttttttttttttttttttttttttttttttttttttttttttatttttatatatataattttaatttttttttttttttttttttttttttttttttttttatttttttttttttttttttttgtttttgtttttttgtttttgtttttgtttttttttttttgtttttgttagttttgtttggttaggggttagttttagtttttggggtgtttgggagaatatttttttttttttttttttttttattattttttttttttttaggttatgttttttagggtttgtaggtaattttttttattgttttagatgagggagtgaggagggaggattttaagttttgtgtttatggtgttatttgtagtaagtgttttggtttcgtgatatttatgtttttagtatttagttgttttagtttttagttttaattattcgttggttgttgggggagggtggggagaatgtgtcgtgtttagtttgggggtgtttttgtttttgtttttttggttatttggattttttgtttttatttttgaggggaattgggtagggggggcgtgaagttttgtgggttgataaggaggggttgagttttttagtatgggtgtgggtatgattatttattagtggttatgggggatggatgtgatttgggaggagatttttagatttgggtatttattttgatgtttggttggagttggttcgggtaggaggagggagaggagagtagtaggtgggtgaggttatgggggagtcgagtgggaagtagtttttgatgttaatattgggtatttggtttaagttaaggttgttgtttatgtttttttgtttttgatttgtagggggggttttttgttatatttttttggggcggggtggggaggattttttgtttaagtaattaattttttttttatgaggatttttattttattttttattttttagtttttaaggttttatagtggttaggtgatgagttattgttttttagttttagaatttgttttttgggggtttagtgagagtttattaaggggtgtcgtttttttttttttcgttttttttatgtttgttaggttggggttttgagtttgtgtgtatttttttgttatattatatttgttaaatagtattttttttttcgtttttatttttttttttttttttggtattaggataatagagagttgggtggggtagttttgtttaatttatatttgagaatagaatagggggtatgggaaaggatagggagtttcggttttagagaggtttttgttttttagtatgggggtatatgtcgttgttgtagtattgttattattatagatttttaggggtttttggtgtgggtggttgtttgtggtgttcgtgttggtatgggggggtagtgttgtttatagacgtttgtgtttatgtatgtttatttatgtgtttgggttacggtgtttcgttttgttgttggttttgtttaattttttgatttatttttttttttttttttattttggttgtttattagtttttgggggtggggttagggggtttaggggtgaggttttttatgtagtagttacgtgatagaggttgaggtcgtatgttggggagttgtattttttgttttttttttattcgttatatttgtttgtgtgtatatagatagtaagttataggtttgtagtttagggttagaggtgtaatgtcgtaggaatggtgggttcggtttggtattgttttggattttaggtagtagaataaggttagtattagggttaggttgtgaggtttattttatagttatttgtttattagttgtgtgaatttgagtgaatgattaagttttttgagatttagtttttttatttgtgaagttttcgtgttttttttggagggtatagattttttttttagttaatatgtgttagttttttttttttttttttttgttattttggtcgatagtagtttagttaaattaattgagaagtttggttttttgtttgggaagtgggattcgagattttgcgtgggaagttttggagtttttgaggggttagagttggggattataatttggttggtagtatgggaggttagttttttatagtttttaatatttttttttattaaggtataaagatgggtatttatgtttattgcgtgtcgttttatgttttattttttttttatagatattttttttgtttatgttgaaaattgtttgtttttggtttttttttgtttttataatatagatgagttttaggaaagtttttttagaggggtggtaataatagttagtgtttaatagttgtttattaagggttaggtatttgtttgaatatgaagattgagatatattatttagtatatgaatgattttattttttttttttatttttttttatgtttggggtttaggaggtggatttttaatttcgtttgttgtatttgttatttaagggattattttggttttttttttatgtttgttttttttgttttttgttgttttgttatgggattttaaagttttaaatgttgttattaaagggattttatttatttttttatcgtgatatttttttatttttgttttttttttttttttatagg

SEQ ID NO: 284 - DNA, 13606 bp, Artificial Sequence
  chemically treated genomic DNA (Homo sapiens)
  unsure 5950, 5973, 8958: n is a or g or c or t
tttgtggagagaagagagaggtaggggtaagaaggtgttacggtaggaaggtgggtaggatttttttggtggtaatatttggggttttgggattttataataagatagtagggggtaggaagggtaggtatagagaggggattaggatgattttttagataataggtatagtaggcgagattggagatttattttttaagttttagatatgggaaggaatggagggagagaatgagattatttatgtattaagtaatatgttttagtttttatatttagataaatgtttggtttttaatgagtaattattaaatattagttattgttattatttttttagaaaagtttttttgaaatttatttgtattataggggtaagaggggattagagataagtagtttttagtataggtagggagggtatttgtgaaggaaggatgggatatagagcggtacgtagtgagtatgaatgtttatttttgtgttttaatagagagagatgttgaaagttgtagggaattgattttttatgttgttagttaagttatgatttttaattttggttttttagggattttagagttttttacgtaaggtttcgaattttattttttaggtagaggattagattttttagttggtttagttgagttgttatcgattaggatggtaagggggaaaggaaaggaaattaatatatattaattggagagagaatttgtattttttaaagagggtacgagaattttatagatgaggaaattgagttttagaaagtttggttatttatttaagtttatataattagtaagtaggtggttgtgggataagttttatagtttggttttaatgttagttttgttttgttatttggagtttagggtagtgttaagtcgggtttattatttttacggtattgtatttttgattttgggttgtagatttgtggtttattgtttgtgtgtatataggtaggtgtggcgggtaggagggggataaagggtatagttttttaatatacgattttaatttttgttacgtggttgttgtataggagattttatttttaggttttttggttttatttttaggagttgataagtagttagggtgggaagagagagggagataagttaggggattgggtagggttagtagtagaacggggtatcgtggtttagatatataaatgggtatgtatgggtataggcgtttatgggtagtattgtttttttatgttaatacgggtattataggtagttatttatattaagggtttttgggagtttgtggtggtggtagtgttgtagtagcgatatgtgtttttatgttgaggggtagaggtttttttaggatcgggattttttgtttttttttatattttttgttttatttttaggtatggattgagtagggttgttttatttaattttttgttattttagtgttaggaaggagaggaggagtgaaggcgggaaggaaggtattatttggtaggtgtgatgtggtagaggagtatatatagatttagggttttagtttggtaggtatgggggagacgggaggaggggaggcggtattttttggtgagtttttattgggtttttaggagataggttttggagttggggggtagtgatttattatttagttattgtgggattttagaggttagagaatgggagatggggtggggatttttataagggggagattggttatttaaataaaggattttttttatttcgttttaaaagaatataataggaaattttttttgtaggttagagatagaaagatataaatagtagttttgatttgggttagatgtttagtattaatattaaagattgttttttattcggtttttttatagttttatttatttgttgtttttttttttttttttttgttcgggttagttttagttaggtattaaggtgggtgtttaggtttggaggtttttttttaggttatatttattttttatgattattggtgggtggttatgtttatatttatgttggagaatttagtttttttttattagtttatagaattttacgttttttttgtttaattttttttaggaatggaggtaggagatttaagtagttaagaaagtagaagtaggagtatttttaagttgggtacggtatattttttttatttttttttagtagttagcgggtaattggagttgggagttggggtagttgaatgttggaggtatgaatgttacggggttaaggtatttgttgtagatggtattatgggtataaggtttggggttttttttttttatttttttatttaaggtagtagaagaagttgtttgtaagttttgaagagtatggtttaggaggggagggaatggtggagggggaaagaaagggagggatgtttttttaggtattttagaggttggagttagtttttaattaagtagaattggtagaggtagagagagagagatagagatagagatagagagatagggatagaaagggaggagggagggaataggaaggagggaggaagggggagggaagagagaaagattgagattgtgtgtgtgagagtgagagagggagggagagaaggagggagagagagagagggggagggggagagagagagggagagggaagaggaagggagggagggagagagagagggagggagagagggagggagagagcgcgcgcgtgaatgtagttgagttttcggtatatatacggatacgtgtagatatatatatttatttcgtatgcgtagagttatagggttttgggtatcgttttaggagatatttagagttttttttagtttatatatgtataaaaatatttttatatggatgcgtgtataatatatttatttattgatgtgtataaaaatgtcgaaagatattaaagtttcggtttttttgtttttttatttttatgtttggtaaaagagaaaaagaaataggtagttggggttttgggagttaagagtcgatgttttttttagaagaggaaaagaggaggaggaggaggtgggttaggggtttggtttaattattttgtttttggttattgttgaggggtatggttgaggttttggtattaatttttaatgtttatttttaaaatagcgaagtaaggatagtattttttgggtattagtaatatttattttgttttttttgtttatttagtaaatttttgattttttttttggattattttacgtaatggtatatcggaggggaggtttttatgattttagttttggtttgttaagtgatattaaggtggaattatatgtgtttttattatatattagttttagatattttagtgagagattgagaattgtttttggttttaggtagtatgtgtatgttttattttggtatgtgttaggttttgggaaaaaaggagaatttataggtattgtttattatgttaggatgtaatatggattgaatataggggttattttattttgtgttatttgtttttaatttgagtgagataggaattattgtttttagataatgaaaatttaggtttaaagttatacgattagtgaatgttaatagttaggcgttttaatttttagttagtgatttttttattacggttatgtttgtttttttttttaagagatataatagttttttaaagttttttagatatttttgtagttatgagaattagagttggggtttttgttttgttttttgtttgttttgagaggatgtgtgtgtggggggttttattttgttgtttaggttagagtgtagtggtataattatagtttatcgtagtttcgattttttaggtttaagcgatttttcggttttagttttttaagtagttggtaatataggtatgcgttattatatttggttaattttttaaagttgtttttagagatggggttttattatgttgattaggttgattatgaattattggttttaagtgattttttcgttttggttttttaaaatattgagattataggtatgagttattgtgtttagtcgagaattagagttgagattggtttttattttaaaggtttttcgttatttttatagggtatttttttattgttttttttttattttgaggggtagggttaaataaaaggggtttggagaggggattttgattattagatttataaaggtaaagaggtaatttaggatagatgttggattttaaagtgttgtgtttattatattggttattatttagtgttttagtttttttttgttattattttttatattaagtattattttatggagggtaggggaatttggtgtttattagttagagttgggttttggttgattaatgttgggtttttaggagggaggaagggtattgttttttttttgagtttatatataagagaggggacggttttttttgtttttttttttttatttttagagtttagattttgaatagagatgtagtgatgtttaaagatttatgtaggtgtttttagttggtggggtgtgttttaggttgaggggttaagggttttttgtaagttgaagggcgagggttaaaggagggtggggtagaggggtttgttttgggtttttgggtgttatatattaattttacgttgtaaaaattcgtttgggaggaaaagattatatgacggtgagaaggttggaaattggagatttattgttttaggttttagttttattgatgtttaggagatttaattttttacgaagtttttttaagaaatttgggagattttaggtttatagttttttttatttattataatcgtttatatatatagtttgttatgaattaagtatttttaaaaatatttttttttaaaaaagttaaatgaggtagatatgattatttttaatttatagatgaggtaacggggaagttaaatcgtttgtttaaagttatatatttagtaagtgatagagttgggatttagatttaggtagtttaggttaattatggtcgttatgattattattattatttttgtttttagttgtgatggtatattatttgtttgatagataatgttttgttttttttttttttttttttgagacggagtttcgttttgttatttaggttgtagtgtagtggtataattttagtttattgtaatttttattttttgggtttaagcgatttttttgttttagttttttgagtagttgggattataggatttcgttattatatttagttaagttttgtatttttagtagagatggggttttattattttggttagattggttttgaatttttgattttaggtgatttgtttgttttcgttttttagtgtgttaggattacgggtgtgagttattgtgttcggtttaatgttttgtttttttatttagttatgtgttttttgagattaagttttagttttttttttttgtagttgttttgtgggttttttgttaagtgtttttatttttaaatagtttaaggttagaggggagtatagcgagaagtgtttggtgttttcgggttcgatgttttttgtttgagttttttttttttaaattttttttttagaagaggtattttttttaggttggaatttgtatttacgggtgggagggtttcgtttagtatatatttagtttaggtagttgtgtttttagaattaggttttgaggttgggtaaaaaggatatagttgttgggtatttttgaggtgggttttagttgttaggggtgtggagaaaggttattgtgagttttgtagtggatttaatttagtagggttttgttagttttcgttattgtttatgggggcggtttttttttagtttgggttagtgtggggggagtttttttatggtttgtttaagagttgttagttggttgtagtttgtattttgagggtgtttatagaattggtgtttttagatatgtaggttngaggggttagtatgggtagtggntgattttttttttttttttatttttagtttttaaaatttgttggttatagttgcggtattaaggaagtgtaggaagttttgagtagttagttgagtttttcgttttttattttaattttaagttgattttagaggttgcgtagggggggtagaggggcggagtttgggtattaataattggaaaagtatgaagaatattgttgttagtttttagttttgagataaggataggggtagatcgggggtagtaatagggtgagagagagttatagattggtagagaaataaggagagagagagggagaattagatattgtaagatagagtaatagagagatagagttagagagaaattttaagttaaaagtatatattatttatatagatattcgttagtcgatggttttttaaggaaagtttttaagtttggataggagggtataggtgggaaaaagggttagatttaaggtggggcgtaggaatttagttggaggtgattgattgtttttaggaaagatttaggtaaatgatttagagtaggggtagttagatatttttgagtttttagggtagggaggagagtagttttttttttttttaatagttaagagaattttagtttttagaagttattggatattgttttgagtttatgattcggttttttggaatttttttgaatttattgtttttgtttttgtttttttgtttttttaaaagaaagaaagaaaaaaaaaaaatagtttattttcgtatagtggttgagtttagaggaaaaaggggaggaggaagttgaaggggaaaaatttgtgattgtgtgtatttaagtgtgtgttcggttgtataggttgtagttgtgtgtatttggggttgtgtggatacgattgttggtgtggatttgtaattgtggggatttgggttttgtgaattcgttttgtatttgagtttaggggattatgtgtaaatgagtgtatttgtgtttgtaggttttatagttaattaattaataagtatttatagagtagtttttgtgttaggttttgcgtgggatttagagttttttaagtgatttttttaggtttttaagagtttattgtttagtagggtggtattttaagcgatagagattaagaacgtgttattgggaatgtatgttttatattattacgtaggaatatttttttatatagttaaatttaatatttttgggagtaagggttttgttgtttatagaattttagagttttatagtaaagagtttaggaaaatatttgttgttaagttgtgtatatatgtgttggtgtgtaattgtgtttgtatttgattgagtgatagcgattgttacggtaagtaatgatgtttgtgtgattgggtttatgcgagtacgtgtgtgtttgtgagtgatagggttttttgtaattgtgttgttgtgtgtaattgttttgtgtgtatgtatgtatgtgatagtgattttttatgtgtgggtgatagtaatttttttttgttttagtgtgtgatagtatttacgtgtgattttgtgcgtgggtatgtgtatggatcggtttttatgtttttggttttttatgggtatattttattttttagagttttacggtgtagtagtagtttgtttttttttttgtttttatgtgggtgtgtttagtagtttttgtttttgagtttgtttgggtgtttttggatgtgtatgtggttgtttgtgtggatatatttttgtgtttgcgtgttatttttgtttttttttttattttggataatagttttttttatttttttttttttttggagttaaagttagtattgaggggtaggtttttattttattggttttttttttgtgttttttatttttatttttggaacggtggtttttttaattgtttttgttatttttttaggttttttttttacgttggataagggagggttttagatggagaaggggtattagagatacgttgtaaggggagggaaataaggtggggtatatatatataggtttattttttttttttttttttagttagtaatttttttaattatttaggtattattaagtatattttttttatatatatatttttttttaataatcgcgtttttgtaattagtagtgttgtaattagatagttatgtttaatcgggaggcgggtgaggcgggggaattttttttttttcggattcgtgtaagtttattcgcgttatcgtatttatattgtttttcgtagttggaggtagttttgtaaaggttattcgggttttataggttaggggtgggggttgggggggtaggttttcggcgtatcgtaaataaatcgcggcgcggcgggcgggggagtttcggcggtcggtaacggggttcggttcgggaatgcgtagtagattggtcggatagaggtcgggcgggttttttagggggaggttcggacgttattttcgtttgcgaatttcggggtttagcgattttttagtaatattttttttttttagggcgttagttgtaagttttcgggttcgtgatagggttattggggcgttaggaaaggttgaggttggtagtaggtattttttgggcgtttttagttcgtttgggagttggttacggagtttcgcggttttgtataattaatcgtaaggtatttgtatattaatgttttttcgtttttttttttttatttcggcgtggcgcgtcggatcgggatgggtagcgacgcgggggttttagcgtttcgtgttgggggcgtttatggggggtcggtggggttcgggtcgttcgttttttgcgttcgggtgtgagtgttagtgagttcggggggggcggggggcgagtgtggcggtttcgcggttttttcggtagaggcggcggtcgttttggtttttttttttttcgtttcgtttcggttggggttcgggttcggcgcgttcggtcggttcgcggttgttttttgtaggtcgtttcgtcgtcgntcgttttcgtttttcgttttttgtcgcgtttcgggattttcgttagaggttcggtcgtttttcggtcgtttttgtttcgtttcgttcggattcgttttttttagttcgggcggttttcgtaggagtgggtatttggtgatatattttggaaaagatgttattaaaaaatagtttttgtttgtcgggagaattggggggttttcgggtgtgtatcgtgagggtggaggaggaagtatcgacgagtagtttgtattttatatatcggggagaaagtttaaatattaaacgtttgtaggtgtagtttgtttgggagttcgggtttttttttcgtcggtaatttattgtgtgattttgataaatcgttattgttgtcgggggtagagtttttttaagttttagttgcgagggttgggtaggtgatttttgatgtttttttaattttaattattttacgttttttatttttgtgggggtttattttttgttatttttttttttttttatttttaatattaatatcgatttattgttttttttttttaacgttatttttttttatataggttttttttattttttgttattagttattttttttaataatttgtttttttttttgagttcggggaggggataagatttgttatatttttttaatttttagttttcgggtggtggtatttttttttatgtttgtttttataaaaatttaaatggtattagagttaatttaaggaagacggtgggttgtatataaatggattttttaatttaatttaaaggagaggtttttattatgttagttttatttttagtatatatatatatatattatatatttgtatttatggatataaaattaatttagtgacgttagagtattttttattttaggattttttagcgttaggtcgagttttaattattttagtatttttttggtttcgtcggtttttttgttgttattagtttagttttattagcgggggttatagtttttttacggtttttagggtggggttttggttatatagtttgtttttggggaggggtgtgtgtgtgagtgtgtgtgtgtgtaagtgtgtgtgtgttagggggagttgttcggttaatcgtttagtttatattgggtagagttatttggcgagtgtgggattttgagttatagtttatttaagttgggttgtttttgtttatgttttagttttagttatttgtatttttagtgttgttggaattattttttttatagggggtattggagttcgtaatgtttggcggaggggagggtattttttttggggtttttggaattatggagatgagaagagtagttgggatgaaatttatggcgtgtagagtgtagtggtggtgttgagggtatgttatgggtgaagggagtttgtggtgtgtagtggtagttgtaatggggaattgaggttgtagcgtacggagtttttatgtagtaagcgaatttgtgtttagtttgggtttataggagataagtaatagttgtagtgtggggtaggaggttgtagtgtgtagagttagtgtagtgagtggaatgaggtgtattgagggtggttgtttgttagtcgatgttattttttcggtgattaggtttggtcggaattttggggagtaaggttgtagtatgtagtgtttagggtttgtattttattttgtatggaattagttttttggaattgggttgtttaaggagttgggagggaattttaatgtatgagatatatttatattttgtattataaaggtagaattaggaggtagtggggagggttagcggtaatttggattagggtaggagtgatggtgtttagagggggaggaaggaaggtgttacggttttgttttttttttatggcgttaagttgtggattttttgggttttggggtgggatttggttaaggggaagttttttggatttaagagttatttagttttgtatagtttgtcggttttttttttttttttgttaagtaaaaggtttatttattattttgtgttacgattgttttattttttttttttataataggatttttttgttagggtaaattatataatttggaagtagtggttattttaaatattgtggtttatagtgggagagagggaaagtatttattttagaagttgttttttttgttttagaaggttggtagttggaaggagggatttagttgttagggttttgaggtaaggattttgtaaatggtaattaattttgagggttttttttggattttttttagaattattgagtttaaagaaatatagggtttttatattatagttaagtttgggagtacgtggatttttgtatatttgatttttatttagttttcgtttttttgaaataaattagttgaaattcgaatttatttttttatattatttttttagttttttgtagtagattagtgtaggtttagtaagaatagggagtaggtagaaattatttttaaattttattaatagagattgggtttgttagggattattggtttttttttaaggggttattgtttaggtgtttttgtatttgattttttttgattttttgtttataaaaagtttttaaatgataaagtgagaatatagttttatggtattttttgttttagggtttagttttttaatgttatttttgtagtttgtttgtttgatgttattatttgtagatttgtgttagatttttaggtttttattttgaaattttagttttcgtatttagggtttaggggagagttaatgtaggttattgtagttgagtttgtagggttgtttgttttttgagtttagagttttttaggtatagagagaaagttttgtagagaagtaaaagaaagggttttgtgagaattagagaaaagtttattttttaaaaaatgaagtagggagaggttaggagttagttgtttagattgagatagtaataggagttttgtttttgagaattgtttgtgatggagagaaggtttaaggagaggggttgggtatggtttatattttttttaattttttaatttttatttgtttgtgtaagggaattttttggatttggtgtttattttttattttttattttttttttaggtttaggttttatttttaggagtttttgtgatttgttttagggattttttgttttttttggttatagtttttgggttttaggaaggtggagtaggttagggatgatttcgtttttttttattgaaagattttttttgtttgttatttgttaaatttattttatttagggaatttttaattttttgggattttatttttttttttggtttttttattttagtatttgagatcgtagggagtgtttgtgtgtgtttgtgtgtatggtttttatttttttttagttatttatgggaagttaagagtttatggttgttaattaatttggggtttttatggttagtaaaaatagataagggtttaatttttatttttagttttaaaataatttaagttataattatttgttttaataggagtttcgggataggaagaaaagtaggtaagatggagaaaggataaataaataaaattttaatttttttttttttttattttttttttatttagtattttttatttttttttgagattttagttatttattagtttattattgttgtgttatttgttcgtatttttagaatttgtatataggaggtatttaataaatgttttttattttgagttaaattaaatttgattacgttttgtggttggattttgagatgaagtagtataaagggggaaggtagatatgtttttagatttttttttttttttttttttttgagatagggttttattttgtcgtttaggttggagtgtagtgtgtgattttggtttatggtaatttttattttttagtttaaggaatttttttgttttagttttttgagtagttgggattataggtatatattatattcggttaatttttgtatttttttgtagagacggggttttattatgttgattaggttggtgtttaatgcgtggttttaagtgattcgtttgttttagttttttaaagtgttgggattatagggatgagttattacgtttagttgatatgtttttagattttgggttagatttttttagaggattgattgttagggatcgaagatttaaagtagtgggttttaggttttttagaattttaagggttttgttaaaatttagattgttgggttttgtttttagagtttttgatttaatttatttgggatggggtttgggaatttgtatttttaatatgtttttaggtgattttagatttttatgtttattttgagaattattgttttagagaattttagtttttttttttattgtttattatgaggatttgattggttttattttttttttttttttgagatagggtttcgttttgttgtttaggttggagtgtagttgtatgatttcggtttattataattttcgtttttcgggtttaagcgatttttatgttttagttttttaggtagttgggattataggcgtttattattatgtttggttaatttttttttattttttgtagagatggggttttattatgttggttaggttggtttcgaattt

SEQ ID NO: 285 - DNA, 6134 bp, Artificial Sequence
  chemically treated genomic DNA (Homo sapiens)
tagatttgaggggatagttaatttatataagaggatatatttgtgagtattttagaagtattagtttgtttaaaaattgtgtttaataattataatgtaatttttaattaatgaagtaaatttttaataatttttatttgtaatattttatttgtttatgaggggaagagtaagtatttaaaagtatatgttgtagtatttttagagtaacgtttgaaaatttaggtatatttagttttattttttttttttagtttaagtaatgttttttattagttttattttttttttttagtttaagtaatgttttttattattgtgagataaaaggaaatattaaaaattaagttattttatatggtatttggagaataaatcgggtatttttttataaatggtaaagttttttaggtatgtttagttttttgtttttattgatggttaacggagtgagtgagtgtgggattttttgtggttttttatattgagattttttaaataatgtggtgttgtgtttaaggatgagggttttggggttagagggtttgagtttatatttttgttgttttatagtgtagcggtgggatttttgtaaggaattcgattttttagtttttttatttttagtgtgaaaggaaaataaaatttggggattttaatttttgatgttagaaggaaaaaaaaaataagtcgaaagttgagttatgtaagaagttgtttttttttttttttttaagtaggagttatagataaaaggttaaatatttttataggtagttagttattttgtgtttattttattttatgtaaagtgttggatgattacgtgattgatagtttttttgtttgtttttttttttttgtagtaggtggattattatgttttttttcgtttttttttagtttatttttaatttttaaatattgaagtttttaatatcgtttttggagaaaagtatagattatagattatttttgtgattttgtgtttttttttttcgggtatgtttataattttggtaaaataaattttttaatggatcgagattagttttagatattttttgggttatagtagaatgggttaaataattttgtttattttagggtttttatggggattaaataagttagtgtatgtggagtatttagaagagttaagtaataatttattatttggtattgttattattgatattatatttataaagatattttatttttatttaagtttattttgatataattaggtgtattttagatgttatttttttttgtttattatgtttttgttatatgattgttttatttaggtgtttttaaaaaagtgtgttatttatttttttagtttttttttgtatttttaggtttgatcgggatgttattttgtttttttgttttataggatgtacgttgttgttttatgagatttatgggaagaattttatggattagagtagtgtttttcggtgtgttttgtttgtagaagatagtatagtgtagtttgttttagagtattttaagaaagaaaatgtgttttgttttagtaatttttttggagatgtttattttttttaggtattgttggtattttgtaagtggaggtaatagtttatgtattgttagaataagaaggaatagaaaaggtaaaatttggaaatgaaattgaataaatatttagttaggttttggatttggttttaagtaatagatgttggttttcgttgattgttaagggtattgggttattagtaatttagttatttatttagagggtattttttaggtgtttttgaagttttaggttgtggtttatgagatgtttattgggatataaagagaaaaaaattatgatttttgttttggagtagttggcgatttagtgagcgtaatggttaagatttttagatttggggtttttaaaatgaagtttggagaatattgatgggagaggtttgggtttttgttacggattttagtggatgttaaaagtttttaggaaaatttttatagataaatgttatgaggttttatttttttgtggaagtggttttaggattttaagatttaggttatttattgttagaatttttagtgattttttagttagtgagatgttgtagaatatggcggtattgagttatcggtattggggtcgggtttaggtttgaattttggtatttttgttagcgttgagtttgtaagtgattttggagcgcgtattagatttttttgagttttgggttttttaattagtaggataatagtggtttatatgattgtcgtaagagtaaatgatatcgtgtgtgtgttaaatgtttaataaattttaatttggtgattaatattaatttagaataggtgagagtgagagttgggaagtgaagtgtgttttttaaatgttttttatttaaatttagtatttgatatatatatagtgttggtcgtaggttatatttgattggaagttttatggaaagtttcgtaaagtttgggtttagattttttataaggatggttttgggtgtttttagaagttttgtagagtaatagtgttttttaggttgattttgggagtttagaatgtttagaagtgtttttttatttatttagtgttgggttaagttttttgggtttttaattgtattgttatttttaatttgatttaatttattagagttagggtttgagatttgatttttttttttttaatagaaaggttgtttaaaattttttatgatattttaaagtaaagtaatgaatttatgttagtttgaattgtaaggaaggtaaaaaaataaataataataataaaaagttatattaaatttgtatggattttttagggttaagtgtgaaatgaatgttttattttgtgatttaggtaaaatatttttagttttgagagttttttcgtttgtgattttagtattttggaggttgaggtaggaggatggtttgtggcgaggagtttgaaattagtttggttagtatagcgaggttttatttttacgaaagaataataaaaaaattagttaggtatggtggtgcgtatttgtggttttagttatttgggaggttgaggtttgaggattatttgagtttaggaggttaaggttataatgagttatgattgtgttattgtattttagtttaggcgatagagtgagattttgttttagtaataataataatagaatttttttaggtgttttgttttgtgattttagaggttatttgaggtttgattttgtgattcgaatgtgtgtggttatttttagatattaagagaaatgaaagtatttgttagtttgtttagaattatatttatttgtttattttatttaaattttgtttattgtttttaaaatattttttttttaaaaaatgtattattattattattattatttgagatggagttttgttttgttgtttaggttggagtatagtggtgtgattttagtttattgtaatttttgttttttcggtttaagtaatttttgaattttttttttagttttttaagtagttgggattataggtgttcgtcgttatgtttggttaattttttttttttttttttttttgtatttttagtagaaattgtgttttattatgttggttaggttggtttcgaatttttgattttaagtgatttgttcgttttggttttttaaagagtgttaggattataggcgtgagttattacgtttgttttattattattttttaattgatatggggatttattgtgttttttaggttggttttgaatttttggatttaaaagttttgggattataggtatgagttattgtgtttagttaaaaataaattattttttttttatataaatagtatgtggtttttgtgttagaagttattgaaaaatagagaaaggaaaaattttgatatatttaaagataatagtattattttgtttttttttaatatatttttatttatattgttttttttttttttttgtattgaggttatattgtagatgtaattttatatttaggttttaaaattttatattttagttttaatgtttatttattttgttaaaatttcgaagataagtatttttttatttatttatttatttatttatttttgagattgagttttgttttgttatttaggttggcgtgtagtggtacgattttagtttattgtaattttcgttttttgggtttaagtgatttttttgttttagtttttcgagtaggtgggattttaggtatgtattattatattcggttaatttttgtgttttatttatttatttatttttgagatagagttttattttgttatttaggttggagtgtagtagcgtgattttggttgattgtaattttcgttttttaggttaaagtgatttttatgttttagttttttaagtagttgggtttataggtatgcgttattacgttcggttaatttttgtattttagtagagatgtggttttattatattggttaggttggtttcgaatttttgattttaggtgatttatttgttttagttttttaaagtgttgggattataggcgtgagttatcgtgtttggttaagtatttttttagagagtggcgtaatgtattatgagtgtgttttttttgttgtttttattatttttgtgttgttggttagtattcgtttttggttttagtttttgttttagttagagttttatgatgttttttgttttgtttttaatgttttttgagtttttttgaatttgagttgaatggttgaatgtgtttttgaaattaagtagtttgtatgtagtgtaagtattttttgggttttgtatatttaagtttagtttgttattttggagagtattttagtggtaaaatgattcgaaataggttttttttttttttgtgtgtaggttattagttagatagatttagaaaattgggttattgttgtatattttgtttgtgtatttttttttgtaaagaagtatgggaaagaggatacgttgcggttgttgaagaattagattaaaaatttgttttagaagatagatatggatagtaagatgaagaagatggtagagttgtagttgttcgtggtgagcgatttaaagaataggaaagttatagagaattaggtattgtttgtttatatttgagtttttttttattgtttatgttatttgtgtagtgattgaacgtatgttgttattttggtggtattttttggtttatattttggtggtattttttatattttgggggaaataatttttgtggttttttattttaggtatttaatgtttgttattttgtgatatgggtgatatgatatgttttatgatttttggcggttttatgtatatattgaaatattttgtgatttaaatttaatttttaatttgaatagtgttttttggttttgatgatttatttatatattgttattttttgaataaaatttatataataaaattattagaagattagataggtaagattttaatataatagttttggaaaacgtggtttggtgtaatagttgtttttgtgtttatggattgtaaaaaaatagtaatttttttggttataatagagaagtacgtaacgaaatgtttttttttttttgttgcggttttatatttatataataaatggttgttttttatggtatttgtattttagagaagggaaaatagtttgaaaatttttatttttttttgtttagataatttaaatatttagataagtgttagtggaatttcgagtatttttattttagttaggttttttaggagatagattttgatagtgatttagatgtaaaaagttttattgggaatgtttttagggataacgttagtttggagtgagggagtaggatttgggagggataagttgtattgtgatgtagtttgttttatagcgagttgtggagttgggagggttatttagagttttgtatggaggtagggtggtcggttttcgtttttttaggttagtagggtaaggtagttttttttaatagaggtgagttattacgaggggatttgtgtgtgagttgggaaaaggaaagtaatgtttttgttttgaagggggaattcgggtgatttattatagaatttattatagtttttt

SEQ ID NO: 286 - DNA, 6134 bp, Artificial Sequence
  chemically treated genomic DNA (Homo sapiens)
agggggttgtagtggattttatagtgaattattcggattttttttttaagatagaggtattgtttttttttttttagtttatatatagattttttcgtggtaatttatttttattgaggggagttgttttgttttgttggtttgaggggacgaaggtcggttattttgtttttatgtagagttttgaatggtttttttagttttatagttcgttgtgggataagttgtattataatgtaatttgttttttttagattttgtttttttattttaggttggcgttgtttttgagagtatttttagtaaaattttttatatttaaattattattaaagtttgttttttaggaaatttgattaagatagggatgttcgaaattttattaatatttgtttaagtgtttaggttgtttgagtaaagggaaataaaaatttttaaattgtttttttttttttaaaatgtaaatgttataggaagtagttatttattatatgaatatggaatcgtagtagagaaaagaaagtatttcgttacgtgtttttttgttataattagaaaaattattgtttttttgtaatttatagatatagaaatagttgttatattaaattacgttttttaaagttattgtattagaattttatttgtttaattttttagtggttttattgtatggattttgtttagaaaatgataatatatgagtgaattattaaggttagaaggtattatttaaattaggaattaagtttgggttataaaatattttagtatatatatagagtcgttaaaggttataaagtatattatattatttatgttataaaatggtaaatattaggtatttaaaatgaaaaattatagaaattattttttttagggtgtaagaaatattattaagatgtgagttaagaaatattattaagatgatagtatgcgtttagttattgtataagtgatatgagtaatggaagaaaatttaggtgtagataaatagtatttggttttttatggtttttttgttttttgggtcgtttattacggatagttgtagttttgttattttttttattttgttgtttatgtttattttttgaagtaggtttttggtttggttttttagtagtcgtagcgtgtttttttttttatgtttttttgtaaaaagggatgtataagtagagtgtatagtagtgatttagttttttagatttgtttggttggtggtttatatatagggagggagaaagtttgtttcgaattattttattattaaagtgttttttaaaatggtaggttgggtttagatgtataaaatttaagaagtatttgtattgtatataagttgtttaattttaaaaatatatttaattatttaatttaggtttagagggatttagagaatattaggagtagagtagaaagtattatggagttttgattaggataggaattaaaattagaaacgagtgttagttaataatataggagtgataagaataataggggagatatatttatgatatattacgttattttttaaaaggatgtttggttaggtacggtggtttacgtttgtaattttagtattttgggaggttgaagtaggtggattatttgaggttaggagttcgagattagtttggttaatatggtgaaattatatttttattaaaatataaaaattagtcgggcgtggtggcgtatgtttgtaagtttagttatttgggaggttgagatatgagaattattttgatttgggaggcggaggttgtagttagttaagattacgttattgtattttagtttgggtaatagagtgagattttgttttaaaaataaataaataaataaaatataaaaattagtcgggtgtggtggtgtatgtttgaaattttatttattcgggaagttgagataggagaattatttgagtttagggggcggaggttgtagtgagttgagatcgtgttattgtacgttagtttgggtgatagggtaagatttaattttaaaaataaataaataaataaataaataaaaggatatttgttttcggaattttaatagaatgagtaaatattaggattagaatatgaaattttgaaatttggatataaaattatatttatagtatggttttaatataaaaaaaaaaaaagaataatgtaaataaaagtatattggggggaaataaaataatgttattgtttttgaatatattaaggttttttttttttttattttttagtgatttttaatataaagattatatattatttgtataaaagaaaaatagtttatttttggttgggtatagtggtttatgtttgtaattttaggatttttgagtttaggagtttaagattagtttggggaatatagtaagtttttatgttaattaaaaaataataataggataggcgtggtggtttacgtttataattttagtattttttggaaggttaaggcgagtaggttatttgaggttaggagttcgaaattagtttggttaatatagtgaaatatagtttttattaaaaatataaaaaaaaaaaaaaaaaaaaaattagttaggtatagcggcgggtatttgtaattttagttatttaggaagttgagggaggaatttaagaattgtttgaatcggggaggtagaggttgtagtgagttgagattatattattgtattttagtttgggtaatagagtaagattttattttaaataataataataataatgatatattttttaaaagaaaaatattttaaaaataataagtaaagtttgaataaagtgggtaaatgggtatgattttaagtaggttgataagtatttttattttttttgatgtttagaaataattatatatattcgagttatagggttaaattttaagtggtttttgggattataaaatagaatatttgggaaaattttgttgttgttgttgttaagatagggttttattttgtcgtttgggttggagtgtagtggtataattatagtttattgtaattttgattttttgagtttaaatgatttttaagttttagttttttaagtagttgggattataggtgcgtattattatgtttggttaatttttttattgttttttcgtagagatggggtttcgttatgttgattaagttgattttaaatttttcgttataagttatttttttgttttagtttttaaagtgttgggattataggcgggaaaatttttaaaattaaggatgttttatttgaattataaaataaaatatttattttatatttgattttaagaaatttatgtagatttaatgtaattttttgttgttgttgtttgtttttttattttttttataatttagattaatataaatttattattttgttttaaagtattatagaaggttttaagtaatttttttgttaagaaaaggaaaattaaattttaggttttggttttagtaagttaagttaggttgggaatggtagtataattaaaggtttagggagtttaatttagtattgggtaagtgagggagtatttttgagtattttagatttttaaagttagtttagagaatattgttgttttgtagggtttttgagggtatttaggattatttttatgagagatttaaatttaagttttacgaggttttttatgaaatttttagttagatgtaatttacggttaatattgtgtgtatgttaagtgttgggtttagatgggggatatttaagaagtatattttattttttagtttttatttttatttgttttgaattaatattaattattaagttaaaatttattaagtatttaatatatatacgatgttatttatttttacggtaattatgtaagttattattattttattggttgaagggtttaaagtttagagaagtttggtacgcgttttaagattatttataaatttaacgttaataaaggtgttaggatttaaatttaagttcgattttaatatcgatggtttagtatcgttatgttttataatattttattggttaaaaagttattgaaaattttaatagtagataatttgaattttaagattttaagattatttttatagggaaatgagattttatagtatttgtttatgagggtttttttgaaaatttttgatatttattgagattcgtggtaagaatttaagttttttttattaatattttttaagttttattttaaaagttttaaatttgggaattttgattattgcgtttattagatcgttagttattttaggatagggattatgatttttttttttttgtgttttaatgagtattttatgggttatagtttgggattttagaggtatttgaaaagtgttttttggatgaatgattggattgttgatggtttagtgtttttggtagttagcggaagttaatatttgttgtttaaggttaaatttaaagtttaattaagtatttatttaattttatttttaagttttgttttttttgtttttttttattttagtagtatataagttattatttttatttataaagtattagtagtatttggaaaaggtagatatttttaaaggagttgttgaggtagaatatatttttttttttgggatgttttggaatagattgtattatgttgttttttgtaaatagagtatatcgaggggtattgttttgatttatggaattttttttataggttttataaaatagtagcgtgtattttgtgaaatagagaagtaaaataatatttcggttagatttggagatgtaggaaaggattgggagggtaagtgatatatttttttaaaaatatttgagtgagataattatgtgatagaaatatggtaaataaggaaaagtggtatttgaagtatatttagttgtattagaatgaatttgaatgaaaatgagatgtttttgtaaatgtaatattagtaataataatattaaataataagttgttgtttaatttttttaagtattttatatgtattggtttatttaatttttatagaggttttaaggtgggtagggttatttagtttattttattgtgatttaaaaagtatttaggattggtttcgatttattgagaagtttattttgttaaagttgtggatatgttcggaggaagagaatatagaattatagaaatagtttgtggtttgtgtttttttttaaagacgatgttgagggttttagtgtttaaaaattaaaagtgggttggagaggaacgagggagagtatggtaatttatttgttgtaagggaaaaggagtaggtaggggaattgttaattacgtaattatttagtattttatataagataaggtgaatatagagtagttagttatttgtggggatatttaattttttatttgtagtttttgtttagaaagaaaaggaaaggtagttttttgtatgatttagttttcggtttgttttttttttttttttggtattaggaattggggtttttaggttttattttttttttatattaaaaatgagaaaattgagagatcgaattttttgtaggggttttatcgttgtattgtggagtagtagggatgtgaatttaggttttttggttttaaagtttttatttttaagtataatattatattatttagggaattttaatgtaagaggttatagaaaattttatatttatttatttcgttgattattaatgggaataagaaattgaatatatttaggggattttgttatttatgagaaagtattcggtttgttttttaaatgttatgtaaaataatttaatttttagtatttttttttattttatagtaatagaaaatattatttaggttaagggagaaaagtgaaattaatagaaaatattatttagattaagggagaaaagtgaaattaaatgtgtttgaatttttaaacgttattttaaaaatattgtaatatatgtttttaagtatttatttttttttttataagtaaataaagtattgtaggtagaagttattaagagtttgttttattaattagaaattgtattataattattagatataatttttaagtaaattaatgtttttaaaatgtttataaatgtgtttttttgtataggttaattatttttttaaatttg

SEQ ID NO: 287 - DNA, 5499 bp, Artificial Sequence
  chemically treated genomic DNA (Homo sapiens)
ttgataagaattatttaaaatgaagatttataaggttttttttggaattaataatatgtcgattgtagggaatattggtagaatgtcgttattaaagtttagttggaggtaggtgggatgtgagagtatgaagatagtagataagagtaattttttttagttatttgaaagatgagaagaatgtgggaatgtttttatattttaggggttgtttagtagggatgttgaaggtatgagtgtatagtgtttttggggaagtaggtaagaaatgatagagtatggaaaggagggatacgtttttttttgattgagggcggaagatagaaagagtggaaatataggttgttttggatcgtaagaaattgaggtgagagaaatttagttttattagtttttattttttttgtaaaataggagatgaggtgttttgttggaagtgagaagaaaggtaggaaggtcgaaattaaaagataggaaggttaaaagaattaatgagaagagtttatatggatattgaggttaaggggagagtaaggtgatgtagaaagtatttttttgtggtttttttttaaggtggtaatgtgtttagtttaatattaatttaataaggttgttattattttattttataatagttgtttttagaattggaaataaaattgttagttataatgttgtagtagatattatggaaaatagaaagatgagtaaattttaaattttttgtaaagaagatgaaattatagtattttatatattggttattatagtttggtttattttaattgatgtttatagtttaagaggaagatttttttttgatattgtttttttggtttaatagatttgaggtgtgttttttgttgtgtttgggggttatatgaggatgagttatttttagtgttcgaagagtagatagggagagatagaagatgatataatggagtttagagagaattgataattgggagtttttgggtattttttgataatggttttttgttataatttaattgtttattatgatttgttttttttataagattatagtttttatgacgataagatttttattttatttattattgaatgttttatatttaatagggtcgttaggaaaatatttatgaaataaatatattaatgataagttttttagaggttattgtttattttgttgagaatttgttgttttaaagaatgattttaaatggaattaaataaatgtattattttttttttttatggtttttttttttgataggtaaaagtagagttgttagaaatatttgtttttgatttttttttaggatttagttttgatggaggttgaggaggtttagcgtggagtttttttttttatttttgttatagaggaatttagtattatttttgaggtttttatgaggagtagttaggtttttgttttggggtttgaagtttaagaagatgaggatttattttataagtggagagaggaatatagatttttagtaatttagtagagtgagttaagggatgtgtgtgattatgcgattgagacgatgttttttttttttaaggaaggttttgtagatgtggagtttaattaggaaagttttgtggttgaggtttgtgatatttcggaatattgggaggtagtattttagagtttagtaggtcgataagtaaggattttagtttttttagagttttgggtttgttttatttagagtgagtatttagatatggttttattttttagtgatttgggaagcgaagaagaggaggtggaattttggttaggatttatttttttgatattgggatttggataggtagaagaagaagaggaaatttttttagataattttggttagattagatattattttttttgcgaagagtattttgtagagattaattagaatgaaggttttgaaagtgggattattaggtagggggaagagttgttatttgaggagttgtaggaaagttaagggtttttgtatttttaggaggtttaagttttggaggagtagggatagtaggaagtaggatttcggggggaaggaattttgagggaggatgtttgtgtcgatgggttattaggggaggaatagatgatagagtaggttaatgatgaaaagggagaatagaagtaaaaataggaataggtataagatgtgatgtttgggagataaggagaaagaatggggtttattggggagttagagggtttgaatgacggtgagtgggagtaggaggatatggagaggaaggtttagggttagggaggtttagaatagggagaagagaggaagagggagttgtaggtgttagaagagaatagggcggatttttaggacgaaaagagttaaatttttttgggaaaattagaggaagtaattggaaagtaagaagattatggtataaaggagaaaggggtgttagttagcgggtaggaggcgaaagagttagagagttgggatgggggtaggttgggggtagtgggaagagcgaggagtagggaagaggagaatgagtattatgggtttttaatgttcgttttgatagtttttgaggattttttttattgtgatttgtttttaggtgttttatattttatgatttagattttcgggatttagatagagtttagggttgaggaattgtttttcgtagttttgtttttttcgttagagtttattaggtgtttttattagtttatttttttattgggtttttttttgattgaggagttatttgataaggaaatagattaaaatagttagtaagaggaatttaggttgaggaagggaatagtgtttagttaagggattgaggtggtttttgttagtgtatttgtgatttttttaaggatattagatttagttttttttagttttgttgaagtttattttattatatttgtttcggtatttgttaggtttttagttgttttttttaggagggaaattttttgtgttgtacgtgttttagaaattgttagtgttttttttttaatggatgatttatttttttgtgggatttttgagatgtgttcggttgttttttatggttttttttttatcgggattagtttttcgaggtttttagttaattttataggtatcgtttagtatttacggagtgattttttttttggtttttataggatagagtagattttagatttggtgggaatgttgtttttttatttttatttagagttgttttagaggttttttaaatttgttatttatagttttgtgattttaagaagggatagaaggagtggtagggattatagtatcgttttagtattttttattgttttatttacgttgaagtaggatttttaagaatttattttaaatttagagagatttagtagtttttttagtatttagttttgggtttttttatataatttagtttttgttatagagtttttcgtttacggtttttttttattttttgtttttatggaggatgtgaggatttacgaatttttgttttttttttttttatagaggagggatatttattttttcgtggtggagatagatggttatgttcgtgtagtggtttttacgttgaagtagtatagttatttttttttattggttttaggtttagggttgtatgttttttataaaggtttatttttttaagtttttgatttcgttgtggttaggtagtatcgatttttgttatttattttagatagtttttattatgtttaggttatttttaggtggagatataataagtcgttattttttatttttgatttgtcgtagttttattttttttttatttttgtttttggtagtttaaggatttataggtttttatttttattatttattatagatttttttatcgaattatttttattgtttttaaagtttagggggaggagtaggagtattcggggaggatatatgaatttagggggttatgttaaaataagatttgtttgttaagattggatagtttttttttttgtttttgttggacgtattttttggttttcggttatagttagattaatagagttttttatttttattagtaggagtaagagcgaagtgttttttggtatggtttttagtaatatgataaattttttatgtttttttttttttattattttttggatttcggagttttagggatttatttttaaggatgaagtaggggttttagaatattttgaggtttttgcgagagaatttttgagaaggataattttttagtaaggagttagtggtttagggaggttatttgtgggttaagtaaggtagttagaaaaatttagttatttgtatttggagaaggcgtttagttggttttataggcgggatttagggaggttattaggggatagtagtggataggttgtggtttttagtgagggggttaataagtataagggttggagtcggtagggtttgcgtagattttttattttgtttgagggttttttaggtgagtaagaatcgggattatagtgatatattagattaagttttttttagttttttttattttattttattttttgtttttagggtttttaatattttttttgttggtttcgtttatatgtgtgtttaattttaatatagagagagtttcgaagtgttttttaagttttttgggatgttttttttttttttttttttttatttttttgttttttttttaattagtattttttttggatgttttaaggttattttggatttttttttattttttagttatagtttttgtttgttttttttttggggagtagaaaaggttttttgtatttgttttagttttattttgattcgtggttcgggacgttattggtattgattttttttacgttttttgttttgttattttttttttttttagttttttaataaagtttatttttttttttggatttttgtattttttgttttagattttttttggttttttttatttttttgaaattttagttattttttttatttttatttttagatttaagaggtttagtcgtggagaaatattcgggatttttagatattgttgtttttcggtaagttatttttttttttaatagttatattgtattttttttatttgggatattgagagttttttagtgaggattttagttgataagggttttgagatttcgaatggtttatttttgtttttttttggtgtaaggaggagaagagagagatgtcgggatgttagtttagggagattgtttttatttattttattcggttagtcgagtttacgagttatttatttttttaagttttatggttgtgaattaaattttataaaagttttatgttagtttaagtgggttaagttgtaattttgtgttttttcgggggatttggttttgatattttagtatatattttagaggttagagattttgttttttatagttatttggggtgttttgtgtttaatggttagtaggtattttagagtttttttttattttatagg

SEQ ID NO: 288 - DNA, 5499 bp, Artificial Sequence
  chemically treated genomic DNA (Homo sapiens)
tttgtggagtaaagaagggttttggggtatttattggttattagatatagagtattttaggtgattgtgggggataaagtttttagtttttgggatgtgtgttgggatgttaagattaaatttttcggagaggtatagagttgtaatttgatttatttgggttaatatggagtttttgtggggtttagtttatagttatagggtttgggaagatggatgattcgtaggttcggttgatcgaatgaggtagataaagataatttttttaagttggtatttcggtatttttttttttttttttttatattaagaagaaataggaatgagttattcggggttttagaatttttattaattgaaatttttattaggggatttttagtattttaagtgaagagagtatagtgtggttgttaggggagagggtgatttatcgaaaaataatagtgtttgagggtttcggatgtttttttacggttggattttttgaatttaaaagtggaaatggggaagataattgagattttagagggatagagagagttaaagaagatttagagtaggagatgtaggggtttagaagggaaaatgggttttattgggaaattgggagggaagaaagtggtaaagtagagagcgtgaaagagattagtattagtgacgtttcgagttacgggttaggatgggattgggataagtatagaaggttttttttattttttaggaggagagtaagtagggattgtaattgaagagtagaagggagtttaaaataattttgggatatttaaagaaggtgttggttgagggagagatagggagatagaggggaagaagaaggaagagtattttaaggagtttggagggtatttcggggttttttttgtgttgaggttaggtatatatgtgagcgaagttagtagagagaatgttaggaattttagggatagaagatgggatgaggtgggaagagttgggaaaagtttggtttgatgtgttattgtggtttcggtttttgtttatttgaagagtttttaggtaagatggaaggtttgcgtaggttttgtcggttttagtttttgtgtttgttggtttttttattaggagttatagtttgtttattgttgttttttggtggtttttttgagtttcgtttgtggggttagttggacgttttttttaggtgtagatggttgggtttttttggttgttttgtttggtttataggtgatttttttgggttattggttttttgttgaggggttgttttttttaaaggttttttcgtaggggttttagggtgttttgagatttttgttttatttttagaggtgggtttttggagtttcggagtttagggagtggtaggggaagaggggtataggaagtttgttatgttgttgaaagttatgttaggggatatttcgtttttatttttgttggtggaagtgaaagattttgttgatttagttgtggtcgggggttaggaggtgcgtttagtagaggtagggagggggattgtttagttttgataagtaggttttgttttggtatgattttttgagtttatatgtttttttcgagtgtttttgtttttttttttggattttgggggtaatgggggtggttcggtgggagggtttatgatgggtagtgggggtagaggtttgtagatttttgagttattaggagtagaaatgggaggaaggtggggttgcggtaaattaggggtagggggtagcggtttgttgtatttttatttgggggtggtttgagtatggtgggagttgtttggggtagatggtagaggtcggtgttgtttggttatagcggggttagaggtttggggaagtgggtttttatggggggtatgtagttttgaatttagggttaatggaggagggtggttatgttgttttagcgtgggaattattatacgagtatggttatttgtttttattacggagggatgggtgttttttttttgtgggggaggagggggtagaggttcgtggatttttatattttttatggagataaaggatggggaagaatcgtaggcgggagattttgtggtaaaggttggattatgtggggagatttagggttggatgttgggaggattgttgggtttttttagatttgagatggatttttgagagttttgttttagcgtggataaggtagtaggggatgttgaaacggtgttgtagtttttattattttttttgtttttttttggggttatagagttgtagatggtaggtttggggggtttttggggtagttttgagtgggagtaggaaagtaatatttttattaggtttggagtttgttttgttttgtgagaattagggaaggagttatttcgtaagtgttggacggtgtttgtggagttggttgggggtttcggagggttggtttcggtggaggggaagttatagagggtagtcgggtatattttagaagttttatagggagatgggttatttattgagagaggggtattggtagtttttggagtacgtgtagtataagaggttttttttttgggaaaggtaattgggggtttggtagatatcgaggtaggtgtgatggggtaggttttagtaggattgggaggagttgaatttggtgtttttggaggagttatagatgtattggtaaagattattttagttttttggttggatattgtttttttttttagtttggattttttttgttggttgttttgatttatttttttgttaggtgattttttagttaaaaaggagtttagtagagaaatgggttggtgagagtatttgatgggttttagcgagggagatagagttgcgggggatagttttttagttttggattttgtttgagtttcgggaatttgagttatgagatatgaggtatttggaaataggttatagtgaggagagtttttaggggttattagagcgggtattgaaggtttatgatgtttattttttttttttttgtttttcgttttttttattgtttttagtttgtttttattttaattttttggttttttcgttttttgttcgttgattggtattttttttttttttatattatgatttttttgttttttagttattttttttgatttttttaaaaaggtttgatttttttcgttttgagagttcgttttatttttttttggtatttgtagtttttttttttttttttttttttgttttggatttttttgattttgagtttttttttttatatttttttgtttttatttatcgttatttagattttttggttttttagtgagttttattttttttttttgttttttaagtattatattttgtatttgtttttgtttttgtttttgttttttttttttattattaatttgttttattatttgttttttttttaatagtttatcggtataaatatttttttttagagtttttttttttcgaaattttgttttttgttgtttttgtttttttagaatttggattttttggggatgtaagagtttttgatttttttgtagttttttaggtggtagtttttttttttgtttgatagttttatttttagagtttttattttggttggtttttgtaggatgtttttcgtagggagaataatatttggtttgattagagttatttgaagaggtttttttttttttttttgtttgtttagattttaatgttaaagaagtaagttttggttaaaattttattttttttttttcgttttttaggttattggaaaatggggttatgtttagatgtttattttgaatggggtaggtttagagttttgggggagttagagtttttgtttgtcggtttgttaggttttggggtattgttttttagtgtttcggagtgttataggttttagttataaggtttttttgattgggttttatatttgtagaattttttttgggaaaagagggtatcgttttaatcgtatagttatatatattttttaatttattttgttgagttgttgagagtttgtgtttttttttttatttataggatgggtttttatttttttgagttttaagttttaaggtagagatttggttgttttttatgggagttttagggataatgttgaatttttttatggtagagatgggaggagaggttttacgttgggtttttttagtttttattagggttgaattttaaggaggaattaaagataaatgtttttaataattttgtttttatttattagaggaagagattataaaaaagaagagtgatgtatttatttggttttatttagggttattttttgagataataggtttttaataaaataagtaatagtttttaaaaaatttgttattgatgtatttattttataaatatttttttagcgattttgttaagtgtggggtatttagtagtgaatgagataaagattttgtcgttatggagattgtggttttgtgagggaaataggttataatgaataattaaattatagtagaggattattgttagagagtgtttagaagtttttagttgttagttttttttagattttattatgttattttttgtttttttttgtttatttttcggatattaggagtgatttatttttatataatttttagatatagtaagggatatattttagatttattaggttagagaagtagtgttaggagagggttttttttttaagttgtggatattagttaaaataggttaggttatgatagttaatgtgtgaggtgttatggttttattttttttatagagggtttggagtttatttatttttttgttttttatagtgtttattatagtattgtaattaatagttttgtttttaattttagaggtagttgttgtaaagtgggatgataatagttttattggattagtgttgaattagatatattattattttgaaggaagattatagaagggtgttttttgtattattttattttttttttggttttagtatttatatgaattttttttattaatttttttgatttttttgttttttgatttcgatttttttgtttttttttttatttttagtagaatattttattttttattttgtaaagaaaatagaaattgatggaattgggttttttttattttaattttttgcgatttaaagtaatttgtatttttattttttttatttttcgtttttagttaggaaaagacgtattttttttttttatgttttgttattttttgtttgtttttttaggaatattgtgtatttatatttttaatatttttgttgaataatttttggggtatggaagtatttttatattttttttattttttaaatgattagaaggagttgtttttatttgttgtttttatatttttatattttatttgtttttaattgagttttgatagcggtattttgttaatattttttataatcgatatgttgttaattttaaagaagattttatggatttttattttgggtggtttttgttag

SEQ ID NO: 289 - DNA, 7309 bp, Artificial Sequence
  chemically treated genomic DNA (Homo sapiens)
atgcgattaatggtgttaattgttttttggattgtttttatagtataggataagattatattagttttagtaggttttattgaagaaagtttatgtgttttgtagaaataagatttttagtttagtttaataggagattaattatatgtttattttatttttttttaaggtatgatagtatttggttgagatgtttgtgtgtattttttgtgtgaagttgagtatgtaatttttaaagaaattataaaggagttattcgtttttaaaggaaaaatatatgaattttacgggtataaggaagatattaaaatagggttggggagaagtttttttttttttattttatagtattttttatagaaataattgattgtttgaatatatggttattgaaatatatatatatatatatatatgtatatgaaaataagagttggaatatttgattttgttttttattttttattattttagataatataggatataatatggttttattgtatatatgtgttttttggtttaaaaatattgagagtagatttttgtggaaagaaatatgaaaatttgaggatttatgcgaatgtagttagaggcgaatgtagttagaggggtttttaatttgttggtagagttgggggagagttggggtaattttattgttatgaaattggttttagatggaggtaaggaaaggtgtttattttttgttggtgttagatatagagagattttgtagtatttcgtattttaggtttagaattgtttagtgttgggtagtagttttattgagggtttggttagagtttatggggatgggtggattaggttgtttgttgtttggaaaaggttattttgaatataatgatttttatatggacggtggggtttgggggaaggtatcgtggttagggtttggaggggaagagggaggaaagtaaagaggagtttttttatgaggtaatagaaatgatagtattttttttaggttgaatttttaaaatttagttttgttttggaagattgggattgtggtattttttgtagtgtttttagatcgttttaaggtttttaaattaatgatttataattatgttgtttttttagagagtatttttttttttggttgatatgtggttagtttaggggtggaggagtttcggtagttacgaatttagacgggatgttgattgagagttttgtggttatggtagatgggaggggtgagttttatttatttaaaggtattcgtattttatcgatgagtgtggaattgtgttttttcgttttcgtagtgagacgatcgattaggattgtaggttgagtaaatgggtgttttttggtttatagcgttttttagtattagttagcgggatagagtttcgtgaattttttaaggagttattatttgtttgtttgaatgttggaaaggggtcggtggtgttgattattggatttatttaattaatatttattaaattcgttgttattaatatttaatttttgtgttttaggggtttagattttagtaagggaaatagatgggtaaataattatattagagttagttaagtattgttaaagaagttgatatagggtgttgtggggatatatgggaggggaattagaggaggtttttcggaggaggtgatatttaagttgaggtttgaaggatgtggaagagtttagtaatttttgaagattaaaaaaatggtgataaaaaagatatttttttaattttttagtgttacgatttaagagataaataagtaggtgaacgtataattatattgggttttattataagttagagtttgttttttttaggattttggtattataattttttttgaaattttgttttcggtattgatttttgggggaggtagtaatataggaatttagtgttcgttgcgaaattgatggatggtttttagttttgggtacgtttttatgtgttaaatttgtttaaatggtaggatttattttttttttagaagtatttatttgttttataggattttttatggaattttggagtttttgaggcgagagggattttggatattattgagttttattttttatttaataaatatagaagtggacgtttggataggtaaagtgatttgattaaggtaggtgtatagttattttgtaatattgggaataaattttaggttttttgattttttgtttttattttattttttttttattttttagaaataaagtttttatgtgtttttttttatagtgatatgtttggaatgtattagttagtaatttaggaagggaaaaaaataaatatataagagataaatttgttaggaggataaatttgtattgtttttgattggtttagagggtgattattattatggtagagaattatttaattagtgtaagtaaaatttttttgtgggttgggtattgtataaagatttaaacgaatttgtttatagatttgaaaagtagatacgagatttgtgaatggttggggtttttaagtttatagtataagtatgggttatattttatagtttggaggattgagttttgaaaatgggtaagtttttttatttttttgaattttattttttttatatttaaaataaggatgagtagtttttgaggttttttttacgatttttttttttatagattttagtattttataatttgatataaagagggtggatatgaatttattttttttagaaaagttttaggaaagagaatattaggttattttagtaggtgtgtagataggttagatagattttgaaatttatttagttttttttagatgtataattttattattgtttttagttgttaagagaaagtaggagagtttgtatttttattttttttttttttttttttttttttggagacggagttttattttattatttaggttagagtgtagtggtatgattttagtttattgtaagtttcgttttttaggtttacgttatttttttgttttagttttttaagtaattgggattataggcgtttattattatatttggttaattttttgtgttgttagtatagacggggttttattatgttagttaggatggtttcgattttttgatttcgtgattcgtttattttggttttttaaagtgttgggattataggcgtgagttatcgtatttagtttgtatttttatttttattgttagttttaggtttattttatttagtttattaagtgatgttgaataattaatttttatatattattaggtttatggatattatgatatttagattgatgggtgtttgttgaagggggtgattttagtaggaggatttttttacgtaaggatttatggagtttgttgttttttttttttagggtgagaattaaattgtttttatacggtgggtagaggggaattgatttaggtttggaataagagagaatattttaattgaaaagtttttggaattcgttgaattttaagatattgtgtggattagtttaggatagggagtgagaagaaattaattaaaaggtaatttcgttattttttagttggaaaaaagattagattatatttgtgtttttataattaagtagttgttggaaaaaaacgttttagatgttttttatgagaaaattgttgtttgaagtttagtagaagttatttatttgatatttatattttaggtaaggtttttcgttggagaaaatatcggtattttggataaaattgaaatgtgaaaagaaagggaagagagggtttttattatgtaagatgtttatttaaagtggatttggtttggaaagttttttaaaattttttatatgattgtggaataagttatgtggggcgcggggataagcgaattttttaaattttattacgtatgtttttatttaatttggatttttagagtggtttttagggtattttgtttaggatttagttagttgttggttatatttatgttttttagttttttgagattttatttggttttgagagggttaaaaagtagtgtggttaaatattttaggttttaaagtatttttattgtggttggggaagtaatagaattatattttataaaataatgaaaatagtgttagaaaaatatcgagagatagaaatatttttacgagttaggttatagttagagtgaaggtagggaaggtttttaaagttgggtggaggggataagttaaaaagatgtggaaattggttttttttttttatggttaaagtgtttaaaggggaaaaaggagttttaaaaatgtttttggaaatattattttttacgaatttttcggtttttgttgttttaatgttatttgtttgagatgtaaatagaggagttttgagaaagaagttgaatttgtatttttttttgtttttatttgttttaaatttgtggtatttttaataggatgaagcggaagagaaagggaaagagataaaagtgtagaaagatggaagattttagttgtaaatggttatttgtagttagatggaatagttgttgacgtttagggaaatgtatgtttttttttagatgggaaggagtagtggaaaggggtgacgagtttttggttggttattaattattttatttttttgtgtcggttttttatttggaaagtgggagtgatatttgtgtttgttttttttatttataaagattattgtgagagttataatacggtgagatatagaattttgtttttaaaaatataaagtagaattaagatgttaataataaggatagtaattgtgttagttatttgtaattatttattatagttagtcgtttaggattttggatcgtttttttggttttattatagttttggattagtttatttttaaattttttgttgaagggtggagttttgttagttatgggtagggaattatttttttttgtttttttattttttgttttttaaatatgtttagggtttttgtatttgttgttttttttgtttggtattttttttttgtggtttgttttagagttgatttttgtttttgtttattttttagcgaggatggtattttagggagttttttttttattatcgtagagagagtaggttttttttagttatgtttaatttagaattttgttttgttttttttatagttttagtattatagaaaattattttgtgtatttatggatgtttacgggggtaagggttttgtgttgtttaatttagtattttgaatcgtgtttgttgaatgaatatagaatttcgtttgttttgggagagtatagaaaatagttttttattatatattatagttagttgtaaatagtagatggttttttatattttagagagtaagaattagagagagagagaaagagagagagtttgggttttttttttttgtgtttgttttttttagagaaattggaggggtagtagttagtattttttcgttggttttattaagtatagttaaggtttttaggatatggttattttttatttgtggaagcggttttgttggggtgggtgggtgttagttggttttggtttgggttagagatatttagtggtttaggtgggcgtggggttagggcgtagacgagaaggggtacgagggtttcgtttcgaggatttagcggtaagtatcggtttcgggcgcgttttagtttatttattcgcgtgtttacggcggtattattttttataaggatttgaacgattcgggggcggtttcgtttcgttattttttgttttcggtttcgttttttttttggagggtcgatgaggtaatgcggttttgttattggtttgagggggcgggttttaatagttcgaggcggggttttcgggggtttagcgttatattattcggtcgtttaggtagcggcgtagagcgggtagtaggtaggcggcgggcgtttagacggtttttttttttttttttgtttttttagtttttgttttttcgtcgggaggtcgttcgtcgagttttgcgttagcgtcgaggtagtttcgttgcgttttatttcgtttcgtcgggtattcggagggtagcgcgtcggaggttaaggttgtttcgtacggttcggcgggcgagcgagttcgggttgtagtagtttcgtcggcggcgcgtacggtaattttggagaggcgagtagtagtttcggtagcggcggtagtagcggtaatgattttttggttcgggtttatcgtgtttttgggtagttggagtttgggggattggggcgtcgaggcgtgtatatgttcgtttagttatttttaggacgttttttgtaatttcgatatcggtaagcgtttttggtgtttcgttcgagttttacgttgtagttaggattgtagcgttgtttagggaggtagggcgagttttattttttttttttgttttaggagaggggtagacggggttggggcggagtggagaaattcgatgtttttgggcgggggcgttggtatagttgagaggggaagatgttttgtagaggaaatttatagtggttgagggagtttttggtcgtttttgtttttttaatttaggtcgtgaggtttttatcggtttttttgatatttggaaaatgtttttatttattattaacggaggaagggttagaagagaagggtggggaaagggtttttaaaatttggaatgttaattaaagtgttgggaaattgaatagttaaaaaaaaaaaaaaaagttgttcgttatgtgtacggaaagttgtaggagaaatttggagtatttcgagtttgtattattttttgcgtttatgaaatttattttttttattgagatttaatttagttgtaggttttttaggtaagcgttaatcgagtttttgggattgttaagtttgggtggatttaagggggaaaatgaggagaaagttgtggtattgatttacgttttggaggtattgtgtttgagagtgttgatagttagtagaaggtgcgaggggttatttattatatagttgtgaaaatttataggaaggttattttttttttttttgaatgtgtgtggggagggggagaatgggtagtggaaaatagatttgttattaaaagaataaatttgttaagggttatattacggtgatagttttagattggatttagtgttttgagtagagagattttgtaaagagattttttattttttagtgtgtatggagggtttcgagagtattttgggaggtttgtttgggagtgtttgggatatttgtgtttggatggttaaaggtggagtggtatttgggaaatatttttttttttttttttagtttataaag

SEQ ID NO: 290 - DNA, 7309 bp, Artificial Sequence
  chemically treated genomic DNA (Homo sapiens)
ttttatgggttggaaaggaggagagagatgttttttagatgttattttatttttagttatttaaatataagtgttttaaatatttttagataagttttttaggatgttttcggggttttttatatatattaaggagtaggaggtttttttatagggtttttttatttaagatattaagtttagtttggaattgttatcgtgatgtgatttttggtaggtttgtttttttggtgataaatttgttttttattatttattttttttttttttatatatatttaagggggaaaaaaatagtttttttgtgaatttttatagttatgtggtgagtgatttttcgtattttttgttggttattaatatttttaaatatagtgtttttagggcgtgggttaatgttatagttttttttttatttttttttttaaatttatttaaatttggtagttttagaagttcggttagcgtttgtttgggaagtttgtagttgggttgggttttagtgaaaagaatgaattttataggcgtaggagatgatgtagattcggagtattttaagttttttttgtaatttttcgtgtatatggcgggtaatttttttttttttttttaattatttaattttttagtattttagttagtattttaagttttgggaattttttttttattttttttttttagtttttttttcgttagtagtgaatggggatattttttagatgttaaaaggatcggtaggaattttacgatttaagttaggaaagtaaaggcggttaggggtttttttagttattgtgagttttttttgtagggtattttttttttttagttatgttagcgttttcgtttaaggatatcgagtttttttatttcgttttaatttcgtttgttttttttttggggtagaggaaaggagtggggttcgttttgtttttttaagtagcgttgtagttttggttgtagcgtggggttcgggcggggtattaggagcgtttatcgatgtcggagttgtagaaggcgttttgggggtggttgggcgagtatgtgtacgtttcggcgttttagttttttaggttttagttgtttaggagtacgatgagttcgagttaaggggttattgtcgttgttgtcgtcgttgtcggggttgttgttcgtttttttaaagttgtcgtgcgcgtcgtcggcggggttgttgtagttcgagttcgttcgttcgtcgggtcgtgcggggtaattttggttttcggcgcgttgtttttcgagtgttcggcgggacgggatggggcgtagcgaggttgtttcggcgttggcgtaggattcggcgggcggtttttcggcgaaggagtaggagttggaggagtaagaggaggaggagaagtcgtttgagcgttcgtcgtttgtttgttgttcgttttgcgtcgttgtttgggcggtcgagtgatatagcgttgggttttcggggatttcgtttcgggttgttggggttcgtttttttagattaatggtagagtcgtattattttatcggttttttaaaaagggggcggggtcgggggtaaggggtaacggggcggggtcgttttcggatcgtttagatttttatagggaataatgtcgtcgtgggtacgcgagtgggtgggttggggcgcgttcgggatcggtgtttgtcgttgggttttcggagcggagttttcgtgttttttttcgtttgcgttttggttttacgtttatttgggttattgggtgtttttgatttaaattagaattaattaatatttatttattttagtaggatcgtttttataggtgaggggtggttatgttttagagattttgattgtgtttggtggaattagcgggggaatgttaattgttatttttttagtttttttggagagagtaggtatagaggagaaagatttaaattttttttttttttttttttttttggtttttattttttgggatatgggaagttatttgttgtttgtagttggttatgatatatgatagaagattgttttttgtgtttttttagagtaaacggggttttgtatttatttaataaatacggtttaggatgttgggttaagtaatataaagtttttgttttcgtggatatttatgaatgtatagggtgattttttgtgatgttagggttatgaagaaaataaaatagagttttgggttggatatgattggggagggtttgttttttttgcgatagtaagggaagggttttttgaagtgttattttcgttgagaagtggataaagataaggattagttttggggtaagttataggagagaggtattaggtagggggaatagtaagtgtaaagattttgggtatgtttgaaagatagaaagtagaaaggtaagaggaagtggttttttgtttatggttgatagagttttattttttagtaagggatttgggggtgagttgatttaaaattgtagtaaaattaggagaacgatttaggattttagacgattagttataatagatgattgtagataattaatataattattatttttattattgatattttgattttgttttgtatttttaaaagtaggattttgtattttatcgtattatagtttttataataatttttgtgggtaggaaaagtaagtataagtattatttttattttttagatgaggaatcggtatagaaagatgggatgattggtggttagttaggaattcgttatttttttttattgtttttttttatttgaagagagatatgtatttttttgaacgttagtagttgttttatttaattgtaaatggttatttgtagttgggattttttatttttttatatttttgtttttttttttttttttttcgttttattttgttagaaatgttataagtttggaataaatagaaatagggagaaatgtaagtttagttttttttttagaatttttttgtttatattttagataagtgatattgggatagtagaggtcgaagaattcgtgagagatggtatttttaagaatatttttgaaattttttttttttttttgagtattttagttataggaaagggaaattagtttttatatttttttgatttgttttttttatttagttttaaaaattttttttgtttttattttaattgtggtttaattcgtagagatgtttttgtttttcgatgtttttttagtattgtttttattgttttatggggtatgattttattgtttttttaattatagtaggaatattttgaggtttgggatatttagttatattgttttttagtttttttagaattaaatagggttttaggagattggagagtatgggtgtggttaatagttgattgagttttgagtagagtgttttggaggttattttaaggatttaggttgaatgagggtatacgtggtggaatttgagagattcgtttattttcgcgttttatatgatttattttatagttatgtggaaggttttagaagattttttagattaaatttattttggataagtattttatatgatagaggtttttttttttttttttttttatattttagttttgtttaaagtgtcgatattttttttaacggaaggttttgtttggaatataagtattaagtagataatttttgttgaattttaagtagtagtttttttatagaaagtatttgaagcgtttttttttagtagttatttaattatgaaagtataagtataatttgattttttttttagttgaaaagtaacgaaattattttttggttaatttttttttattttttattttaagttggtttatatagtgttttgaagtttagcgaattttaagagttttttagttgggatgtttttttttattttaaatttgagttagtttttttttgtttatcgtgtgaaggtagtttggtttttattttaaggaaaagaaatagtaaattttatgaatttttgcgtaggggagtttttttgttagggttattttttttagtaggtatttattagtttggatgttatggtgtttatgagtttaataatatgtaagaattggttatttaatattatttaataagttaggtggggtgaatttgaggttaatagtaagaatgaagatgtaggttgggtgcggtggtttacgtttgtaattttagtattttgagaggttaaggtgggcggattacgaggttaggagatcgagattattttggttaatatggtgaaatttcgtttgtattaataatataaaaaattagttaggtgtggtggtgggcgtttgtagttttagttatttgggaggttgaggtaggagaatggcgtgaatttgggaggcggagtttgtagtgagttgagattatgttattgtattttagtttaggtgatggagtgagatttcgtttttaaaaaaaaaaaaaaaaaaaaaaagaatgaagatgtaggtttttttgtttttttttgatagttaagaataatgatagagttatatatttgggaagaattgagtaagttttaagatttatttggtttgtttatatatttattaggatgatttggtatttttttttttggaatttttttaggaaaggtgagtttatatttattttttttgtattaagttataggatgttagagtttgtaggaagagaagtcgtaaaaaggattttagaaattatttatttttgttttaaatgtgggaaaaataaggtttagagaagtgaaggaatttgtttatttttagggtttagttttttaagttgtaaggtgtggtttatgtttgtattgtgggtttggaaattttagttatttatagatttcgtatttgttttttagatttgtagatagattcgtttgagtttttgtatagtgtttagtttatagagaaattttatttatattgattaaataattttttattatgataataattattttttgagttaattagaagtaatataggtttgtttttttgataggtttattttttgtgtgtttatttttttttttttttaaattattagttaatgtattttaaatatattattataaaaaaaagtatatgaaaattttgtttttgggaaatgaaaagagagtaaagtggaaataaaaaattaaaagatttgagatttgtttttaatgttgtagaatagttgtgtatttgttttggttaagttattttgtttgtttaggcgtttatttttgtgtttattggatgaaagatagaatttagtggtatttaggatttttttcgttttaaaaattttaagattttatggggaattttgtaggataagtgaatgtttttgaaggggagatgggttttgttatttaaataggtttgatatatgggaacgtatttaagattgaagattatttattagtttcgtaacgaatattgagtttttatattgttattttttttaagaattaatgtcgaaaatagaattttagagaagattgtgatgttaaagttttaggagagataggttttggtttatggtggagtttagtgtagttatgcgtttatttgtttgtttgttttttggatcgtagtattaaaaagttaggaaggtgttttttttattattatttttttggtttttaggagttattgaatttttttatattttttagattttagtttagatgttatttttttcgggaaattttttttgattttttttttatgtatttttataatattttgtattaatttttttgataatatttagttgattttaatgtgattatttatttatttgttttttttgttggagtttaagtttttagaatatagggattaagtgttggtaataacgagtttaataagtattggttgaatgggtttaatgattagtattatcgatttttttttagtatttagataggtaggtggtggttttttggagagtttacggagttttatttcgttggttggtgttagggggcgttataagttagagaatatttatttgtttagtttgtagttttggtcggtcgttttattgcgagggcgggagagtataattttatatttatcggtggggtgcgggtgtttttgagtgggtgaagtttattttttttatttgttatggttataaagtttttagttaatatttcgtttgggttcgtggttgtcggagtttttttatttttgagttggttatatgttaattaaagggggagatgttttttggggaagtaatatagttgtgaattattggtttgggggttttagggcggtttgggaatattgtagaggatgttatagttttagttttttagggtagagttgggttttggaaatttaatttggagaaggtattgttatttttgttgttttatagggaagtttttttttgtttttttttttttttttttttagattttagttacgatgtttttttttaagttttatcgtttatgtgaaagttattatatttaaaatggttttttttaagtaatagatagtttggtttatttatttttatgagttttggttagatttttagtggggttgttgtttagtattgggtaattttgagtttaagatgcgaggtattgtaggatttttttgtgtttggtattagtagggggtaaatatttttttttgtttttatttggagttaattttatggtagtaaaattgttttagtttttttttagttttgttagtaaattgaagatttttttggttatattcgtttttggttatattcgtatgaatttttaggtttttatatttttttttatagggatttatttttagtgtttttaagttagaaaatatatgtgtgtagtaaagttatgttgtattttgtgttatttagggtggtgggaaatggaaagtagagttaaatattttagtttttgtttttatgtgtatgtatgtgtgtgtatgtatgttttaatgattatatatttaagtagttaattatttttgtgaagggtattatgaaatggaaggagaagaatttttttttaattttgttttaatgttttttttatgttcgtggagtttatgtgttttttttttaaaaacgagtagtttttttgtggtttttttgaaggttgtatgtttagttttatatagagaatatatataagtattttagttaggtgttgttatgttttgggagggaatgggatggatatgtggttggttttttgttagattgggttggaggttttgtttttgtaaggtatatgagttttttttagtggaatttgttggaattgatatggttttgttttgtgttgtggggatagtttaaagagtagttaatattattgatcgtat

SEQ ID NO: 291 - DNA, 8591 bp, Artificial Sequence
  chemically treated genomic DNA (Homo sapiens)
gtgtttgttggtttgttttttatttttggtttgaatttagagaagggtggttagttggattagggtatattcggattttgtatttttattgagttagttagtcgttatgattttcggttatgaaagtattaggtttttgttgggtttattttttagatagattttaattttgtttttttaggagtgataggaagtattgttgtttataaaagggtagttttaggatataagcgttgtttttggattagttataggtatgatattagattttaattaatagtggggatgggggttttttatttgtaattataaaaaagtaagtttatagtattaagtgtttaattttttatttattttttttaatgttttggatgtgataatttattgaggggaaattaaggtttagagaggtgtgtgtatggtatagtaattataggttagtgatagaatttaagttattttttattaattaagttttttttataatttaggaaattttttagaaagtttagaagttttttgttttagttagatttggttttgtacgggtattgggtttgtttggttgttgggataggaggttttttgaagatttttagttaaaagatgattttagtaagtttgttgagttgtttttagaaattttatttattatttttaattttaaataatagagaatttgtttttgagaagattttttttgaagaaattaaattatgagtatataattttattttttatatttaagttatggttgtgtttttagaaagtttaaggtttttaagagtaagaaatgaaagatggtatatttaaagatatttttttttttttatttcggtgtttggtttgattggtgttttgttggggatatatgagagtataagagggtagatagaaaagggtggtacgtgggaatttatagacgttagatttaatttttagggagttagtagttttattgtggtagggttaagatgagtttggggtatagttgaaatggtagtttaaagttgagtggtattgtatttttttaatatttattgtttataaagtttttgtattttttttttagttttatggtttgttgggtaatttttgggtttaatatttttagtttgtttagtttattaaagtgtagttttgttttatttaggatgtttttggttatggttgtaaagaaataggtttaattttttattattttttagttatttaaggaaatgtttgttgttaagttagttttatttttgtttttggatattaatgttaaaaatttaggtgttttaaaggattttcgttttttttgttattatttttttgagttttatttgttttttatttaggttttttagaggagttttgttttgaaggagtgatagtggtagttaggaggaggtgtgttataggagtaagggttaggaaagaataaagttcgtttgtttgttataggtatcgtttatttaatatatattttttgagtgtttattatatgttaatattgttagatgttgggggtataaagatgaatgtaatacggtgttcgttttgaagagtatatagtttagttggaagaagatagatacggaaattgaaaaattatattgcgttaaatgtttgtttagaaatattagtaaagagttagaggaggatagagttattaatgaaggagtgatatgtgaattaagttgtaagttattagtgtatttattttatatattattagttatgtattgaaaagtatatgaaaaggttttttaaatatatatattggaataatataaaaattaaataaaggaaattcgagtaaattaaaaattatggttaaaaaataaaaagttaggagtaagaatattatttaaaacgtatgtttgtttgaattgggaattaaagttgggttattttttttttagtagaaaatataaaaaggaatgaagtattagtaagaatatattaaggtaggagaatagggataggtattttaagtagagaaaatagtatggataaaggtttgaagttattgaaaggatttattttatttaaggacgagaggaaaaagaatggagttggaaaggtgagttggagttagattaggaagattttgtatgttaagttaaggagtttggattttttttgtaggtaatagagaattaatagagatatttttttttttattaagttattttgtatttttgttttaaaggatgttttaattttaggaaggaaatattgaaaatttatttttgttttggtttaaaatatatatatatatatatatatatatatatatataattaaatatagatatttttatgatttgtttaaaaagggaggtaatgttatttatatttagtaattggttgttatgttaattttaaaatttaggtgttttaaagtttattattatttggatttgtattagttttttttttttgtttttattgtttttagttttagttgttttttttttggtttttttagagaagttttgttttgaatggggtgattttggggttggttgtttagggtaggtgtgttaaggaggagtaatggttggaaaataattaagttttattgtttttagaatttttggtttttaagatgattagaaatttagtattttaatgttggtatgtaatttaaaaattttaagtaagggggaaaatttatatttaatattgtatgggttaattaatatatgtttatgagttgtttgtagacgattttggtttttggttttattggaatttattgatgtaagtgagttagtattatttttttgaagtattttgtttatttgtagtttttttaaaatagggttttttaaaaagatttggttagtgtagtagtttatgtttgtaattttagtattttgggagattgaggtgggaggattatttgggtataggagtttgaaattagtttgggtaatgtggtaaaatatcgtttttataaaagatttttaagatagttagatttggtgataggtgtttgtagttttagttatttgggagggtaagttgggaggatcgtttaagtttaggaggtggaggttgtagtgagtcgtgtttatattattgtattttagtttgggtaatagagtgagattttgttttaaaaaaaaaattaaaaaatttgtttttcgtagttataggttattaatttgattagttgttttagaaagattgaagtaatatgagggagtaaatatttgttttaatttttatttttttttttgagagtatgtatttatttagaaatatttatttagtttttgttttggggatagattagtgaaaataatgtttttggatagatggtaaagaaataattataaatcgtgatattattataaggaaaagtatatggtgttgtgtgaagtgttgtaggaggatatagtttatggggggcggatttggaggggagggttaatagaggttttttgaaaaaaatgatatttaaatagatttaaagattgtttaaaagtatgttaagtgaaaggggaagtaaggtattgtaggtagaaggaaatacgtatgtgaagattttgaggtaataggaaatttgatgtatttcgagaatagagattgagtaagagaagggaatagaatgaggttagatagggagataatagttggattatcgaaggttttgaaagacgtagttatgagtttggattttattagaagggtaatgggatagttagcgggtttttagtagattaataaaattagatttagaaagattatttttgtttagtttgagagaatcgattggagggaataagagagggtaaagttttaagtatttttttgtttattattttaattttagtatttagtatggtgtttatatataattggtatttagtaaatgtttgtggaatgaatgatcgtggaaataggagattattgtagtaattaaggttggtagtcgaatataagtgtttcgagttgagatgttttgtaagtcgaggtgatggggtttagtaatggattgattgaatgtgggggtttggggataagagaaaaataagttaggtatgatttttatgaatttggtttggtttatttatttgattggaagggttggtttaaagagataggtaagatggaagaagaggtgtagggaaagagtttatagattatttattaatttttattatacgcgtgtttgagtatttgagtaatatttggtttaagagttgggattaagttttttgagtatgaggcggtggtatattttttgcgtttcggtttttttagatgtatgcgaggtattgcgagtcgattttttattatgtaaatttttcgaatttattcgagtcgtagttttttcgtaagatcgtggtaagtattaacgtattaaattttaggtttaagttgggtgtgaaagcgtttttttgagagtggggcggaatttttacgttttttttcgttcggtattgtttttttttaggacgcgggtttgttaggtttttttcgtttttggttcgttcgcgtttttcgattcgaggttagtttatttgtcggtttcgcggcggtagcgcgttgtagtttaggttgatgtagataggtagttttttttgggttagcgatagtcggtatttagttagtttgttacggtcgttgttacggatatagagtttgtttatttatgacgttattatttttttgatttcggaagtatttatagtttttattttatagagtttgttgggaaatagaggttcgaggggaggttcggtttataagatttagaagttttagcgtcggtaaggcggttagaagtagttttgtttttttcgcgaagattttcgggggatttcgtttttattttttttcggatagagcgttatgtatgtagggatttgtagttttaggttttttagtcggttgggttgggtagtatttcgggcggagtcgacgagcgtaggatgtgagtttatagtttgggattgttgaggggtaggcggttgtaggttaggggcggttcggagttcgttggttatttagttgagaggagaggcgttttcggggacggtgagagtcgggttcgtcgatgttttcggggaagggatggacggtttttgttggagtagagcgagttcggtcgggttttgggggaaaaggcgcgggcggcgtaggggagatggagagtttcgattttttacggagggtgggcgtgagaatcggtgtgggtttttcggtagtgaggagtggttcgggttagagaagagtttatatcggttatattttttaggattttttgggtgacgtttaatttttatatttagggtttttgttagattcgttattttagtttttagtttttttttcgtcgtttttcgtgtttgacggatttttgggttttttttttttttagattttttttttttttattttcgcggttgtttgttttttgttgtgtttgggtttttattagtttcgttgcgtgagttacggattcgtttttagtttcgggtatttttaaatatttatatataaagtgcggaaggaagagtattgtggttattagtggaaattttatttttattggaattattttttggggcgttatttgttatagaatttttggaatttattggtttgggcggaatgtgattgacgttatttaggggtttaaagtaattgttttgtaggaaaggaagagattagttttggattcgtcgattttttttggtaggtttattttttgagtttttttgtattggtagaatatgtatgtgtgttttttttgattttgggaaaattaggattagatataaaatatatagggaatttgttaatatttgttagagaggtggatttatttttttgaggtgggcgggaaaagggaaggtgattttatattattttagtgttttttagttattggtaattttttggtgagggtttattttttatatttaatttttgtggtaaatgaaagagttttttagataagtcgttaaaggaatttattgttttatatagtatttacgttggttgtttatttttttggatattttttttagggatttatttaaatttttttagggataattttagtttaataaattgacgtatgttaaatatttaaaatgtgtatggtattgtgttgagtattattaggggaatatagcggtaaatttgggaaattagtgttttgtttttgggttgtatttataaggtatgagtaattgtaaatttttgtatgtgatgagtattcggtgaaattattttattttttttttgtttttattattattaatgtggtttaggttgttattatttttttttgtttagattattgttttttttggtttttttatttttttttttgtatttttataatttattttttatttagtagtaagttatttttttaaaatatattataagtaagttagattatattatttttttgtttgtaattttttaattgatttatatattatatagtaattagtatgaaatttatttttgttattatttaacgtttgttttttttgatttgatattaaattaatttttttttattgtttgtgtattagttattatgatcgtatttttgatttttaaatttgttttaattttgttattgttgagatgagatttttttatgttatttaggttgatttttttaggtttaagtagttattttattttagtttttcgagtagttgggattataggtatgagttattatatttggttaatttttttttatttgtagaaataaatttttattatgttgtttagattggttttgaatttttgggtttaagtaatttatttatttcggttttttaaagtgttaggattataggtgtgagttattatattcgttttttaaaatttgtttttaataggaattttgtatttatttttttatttgtttataatgttttttttaaattttagttgaaatgttattattttaaagatgttttttttgtttttttgtttaaattagtgtttttttttaattatttttatattattgttttattatttttattgtatttattaggttttggaattatttgtttatttatttaagtttttgttgttagtttgtttttttttattagaatgtaagttttatgtggatatgattttttatatgtgtttttttttgagtatttaatgtttggtacgtaggggtataataaatgttagttttttttttttttaaaaatttttgttatgatgtttttttgaattgtttgaaggtaaagataatatttttttattgttttttattgtttaatatagtaggtatttagtagtttaattgttgaatgagttaaatgagttagtatatattaaatgttaagagatggggttttgttatgttgttaaggttggttttgatttttgggtttaagagatttttttatttcggtttattgagtagttaggagtataggtaggtggtagtatatattttattttattgtttttagatttattttttgattttttttagttttttttttttttatttttattgggagggaagaggagagtagggttgggtttttttttaggaaaaagaaaggaaaatagttattttatagttgtttttttttgaaaaatggtgataattttaggaatttgggataaggttggtgttaagaaaggggaaggttaggaagttttagtcgaagtttaggtaatttgtattaagaatattggtcggtattttcgattttggtttattgtatttttttttgaagttgtttttatttttttttttgaagttagattttcggtggtgtttaaaataaatattggtatagattgttttggaggttggaatttttagaaaggaagtgtattttgtttttttggtttttgggaaatttttagattggttggatttttagtaggtttggttggaagtttgggattttgggaattttgataagaaagtaattggaatttgattggtagatttttagggtgatttgtttttttggttttttttaattggttttatgggtttgtttgtttttttcgttgttttgagtggagttgagttttagggaggttgatgaggtgattagggtaggagtttgggagattgtttttagttttggtttttgttatagtaaaaatggtagggaggttagacgcggtgatttatatttataattttagtattttgggagattgaggtgggcggatcgtttgcgtttaggaattcgagattagtttgggtagtatggtaaaattttgtttttattaaaaaaaaaaaaaaaaaaaattagttgggtgtggtggtgtgtatttgtggttttagttatttaggaggttgaggtgggaggattatttgagtttgggaggtaaaggttgtagtgagtcgagatggtattattgtattttagtttgggtgatagagtgagattttgtttttaagaaaaaaaaaaaaaaaaaagaaagtaaaatggtagggatttagtttttgttagggagtagtgtttgggtttgttagggagagaatgagtacggtcgtgtttttgttattgtttttttttgggttgttttagttggttcgtgttttttttttttttttttatgtatagt

SEQ ID NO: 292 - DNA, 8591 bp, Artificial Sequence
  chemically treated genomic DNA (Homo sapiens)
gttgtatatgggagagggaagagaagatacgaattagttgagatagtttaggaggagataatagtagaaatacgatcgtatttattttttttttgataagtttaagtattgttttttggtagaggttaagtttttgttattttgttttttttttttttttttttttttttagagatagggttttattttgttatttaggttggagtgtagtggtgttatttcggtttattgtagtttttgttttttaggtttaagtgatttttttattttagttttttgagtagttgggattataggtgtatattattatatttagttaattttttttttttttttttttggtagagatagggttttattatgttgtttaggttggtttcgaatttttgagcgtaggcgattcgtttattttagttttttaaagtgttgggattataagtatgaattatcgcgtttggtttttttgttatttttattatagtaggaattagggttggaggtagttttttagatttttgttttggttattttattagtttttttgagatttagttttatttagggtagcgaggaagataagtaaatttatggaattagttagagagggttagaggaatagattattttagagatttattagttagattttagttatttttttgttaaggtttttaggattttagatttttaattaaatttattgggaatttagttagtttaggagttttttaggagttagagggataggatgtattttttttttaaagattttagtttttagagtagtttgtgttagtgtttattttgagtattatcgagagtttggttttaggaaggaaagtaaaagtagttttaggagagaatgtagtaagttagggtcgggggtgtcggttagtgtttttggtgtaggttatttgggtttcggttggggttttttgattttttttttttttggtattagttttgttttaagtttttgaaattgttattattttttagggaagaatagttataggatggttgttttttttttttttttttgagagggagtttagttttatttttttttttttttttaataagaatgggagaagaaaggattagaaaagattagaggataaatttaaaaataatgaggtgagatgtgtgttgttatttgtttgtatttttggttatttagtaggtcgaggtgggaggattttttgagtttaggagttaagattagttttggtaatatagtaagattttattttttggtatttaatatgtattagtttatttaatttatttagtaattaaattattgagtgtttattatgttaagtagtagggaataatgaaaaaatattgtttttgtttttaaatagtttaaagaagtattataataggaatttttaaaaagagagaaagttagtatttattgtatttttacgtgttaggtattgggtatttagaagagaatatatatagaaagttatgtttatatggagtttatattttagtggaaggaaatagattagtaataaggatttaaataaataagtagataattttagaatttgataaatgtaataaagataataaaatagtgatatgagagtgattagggagaggtattaatttagataaagggataggaaaagtatttttgggatggtgatattttagttgaggtttgaagagagtattgtagatagatggaagagtaagtgtaaagtttttgttagaaataagttttagggggcgggtgtggtggtttatatttgtaattttagtattttaggaggtcgaagtgggtggattgtttgagtttaggagtttaagattagtttgggtaatatagtgagagtttgtttttataaataaaaaaaaattagttagatatggtggtttatgtttgtggttttagttgttcgggaggttgaggtgggatgattgtttgagtttgggaaagttagtttgggtgatatagggaaattttattttaataatgataaaattaaaataagtttgaggattagaaatacggttataatggttggtgtatagatagtagggggaagttggtttgatgttaagttagggaaggtaggcgttagatgataataaaggtggattttatattaattgttatatagtatatgaattaattggagggttgtaagtaggggagtgatatgatttgatttgtttgtagtgtattttgaaaagataatttgttgttgggtagagaatgaattgtaaaggtgtaagagagaaagtgggaagattagaggaagtagtagtttaggtaagaagagatgatggtagtttggattatattggtaataatggagatagaaaaaaagtggaatgattttatcgaatgtttattatatgtaggagtttatagttgtttatgttttgtaagtgtaatttagaagtagggtattggttttttaagtttatcgttgtgtttttttaatggtgtttagtataatgttatgtatattttaagtatttaatatacgttagtttgttagattgaaattgtttttgaaaagatttaggtaagtttttgggaagaatgtttaaggaagtggatagttagcgtgggtgttgtgtgaagtagtgaatttttttggcggtttgtttgggagatttttttatttgttataggggttgggtatgggaggtgagtttttattaggaggttgttaatgattaagaaatattagaatggtatgagattatttttttttttttcgtttattttaaaggaataaatttatttttttaataggtattagtaagttttttgtgtattttgtgtttagttttagtttttttaggattagagaaagtatatatatatgttttgttaatgtaaaggagtttaaaggataggtttgttaagagaggtcggcggatttagagttaattttttttttttttataaagtaattgttttgagtttttggatgacgttaattatatttcgtttagattaatgggttttaggaattttgtggtaggtgacgttttagaaagtaattttagtgagaatgaagtttttattgatagttatagtgttttttttttcgtattttgtgtgtggatatttggggatgttcggggttaagggcggattcgtggtttacgtaacgaagttaatgggaatttaagtataataaagggtaaatagtcgcggaggtggaaagaggaggggtttaaaaggaagaaggatttagaaattcgttagatacggaggacggcgggaggaaagttgagggttagagtggcggatttagtagaaattttaggtgtaaaggttaagcgttatttaaaaagttttgggaaatgtggtcggtgtgggtttttttttagttcggattattttttattatcgagaaatttatatcggtttttacgtttatttttcgtgggagatcggagttttttattttttttacgtcgttcgcgtttttttttttaggattcggtcgggttcgttttattttagtaggggtcgtttatttttttttcgagggtatcggcgggttcggtttttatcgttttcgggggcgtttttttttttagttgggtggttagcggatttcgagtcgtttttagtttgtagtcgtttgttttttagtagttttaagttgtgagtttatattttgcgttcgtcgatttcgttcggagtgttgtttagtttagtcggttggggagtttgagattataagtttttgtatgtatagcgttttattcgggaaagggtggaggcggaatttttcgagggttttcgcggagagagtagagttatttttggtcgttttgtcggcgttaaggtttttgggttttgtaggtcgggttttttttcgggtttttgttttttagtaggttttgtggaatgggggttgtaagtgttttcggagttaggaaggtagtgacgttataggtaaataggttttgtattcgtggtagcggtcgtggtaggttggttgggtatcggttgtcgttgatttaggagaagttgtttgtttatattagtttgggttgtagcgcgttgtcgtcgcggggtcggtaggtaggttgatttcgggtcgggggacgcgggcggattaggggcgagaggagtttgataggttcgcgttttgaggaaaggtagtatcgggcggggagagacgtgggaatttcgttttatttttaggggggcgtttttatatttagtttaggtttggagtttgatgcgttgatgtttgttacgattttacgaggaaattgcggttcggataagttcggggagtttatatagtaaagagtcggttcgtagtgtttcgtatgtatttgggagagtcggggcgtagaaagtatgttatcgttttatgtttagggagtttagttttagtttttgggttaggtgttgtttagatgtttagatacgcgtgtgatgggagttggtagataatttgtgaattttttttttgtatttttttttttattttatttatttttttaagttagtttttttaattagataggtgggttaagttagatttatgggagttatgtttgatttgttttttttttatttttaaatttttatatttagttagtttattgttaagttttattatttcgatttataaaatattttaattcggaatatttgtgttcggttgttagttttggttattgtaatagttttttgtttttacggttatttattttataaatatttattgagtgttagttatgtgtgggtattatgttaggtgttagggttagagtgatgaataagaaggtatttggggttttgtttttttttgttttttttaatcggtttttttaggttgagtaagagtgatttttttaagtttgattttgttggtttgttgagaattcgttggttgttttattatttttttgataaaatttaagtttatgattgcgttttttagagttttcggtgatttagttgttgtttttttgtttagttttattttgttttttttttttgtttagtttttgttttcggaatgtattaaattttttgttgttttaggatttttatatacgtgtttttttttgtttgtaatgttttgtttttttttttatttgatatatttttggatagtttttaggtttgtttaagtgttattttttttagaaggtttttgttggtttttttttttaagttcgttttttatgaattgtgtttttttgtagtattttatatagtattatgtatttttttttatagtaatattacgatttgtgattatttttttattatttgtttagaggtattgtttttattagtttgtttttagagtagggattgagtggatgtttttgaataaatgtatgtttttagggaagggggtggaagttgaagtagatatttgtttttttatgttattttaatttttttggagtagttggttagattaatgatttgtagttgcgaaagatagattttttggttttttttttgagatagggttttattttgttgtttaggttggagtgtagtggtgtgaatacggtttattgtagtttttattttttgggtttaagcgatttttttagtttatttttttaagtagttgggattataggtatttgttattaggtttggttattttagaaattttttgtagagacggtattttgttatattgtttaggttggttttagatttttgtgtttaagtgatttttttattttagttttttaaagtgttgggattataggtatgagttattgtattggttagatttttttaaaaagttttattttaaggaagttatagatgaataaaatgttttaaaaggatgatgttagtttatttatattagtggattttagtgaggttaaaggttagagtcgtttatagatagtttatagatatgtattagttggtttatgtagtgttggatgtgggtttttttttttatttaaaatttttggattatatattaatattgaggtattggatttttggttattttaaaaattagaagttttggaaatagtgagatttgattattttttagttattgtttttttttggtatatttgttttggatagttaattttagaattattttatttagaataggatttttttaaggaagttagaagggaaatagttgaggttgggggtagtgggggtagagggaaggggttggtgtaagtttaggtgatggtagattttggagtatttgggttttagaattggtatagtagttaattgttagatgtaagtagtattgtttttttttttaaataggttataaagatgtttatgtttaattgtgtgtgtgtgtgtgtgtgtgtgtgtgtgtgtgttttgagttagaataagagtgagtttttagtattttttttttagaattgaggtattttttggaataggaatgtaaggtggtttggtaagggagaagatatttttgttagttttttgttgtttatagaaaaaatttaaattttttagtttggtatgtagggtttttttggtttggttttagtttatttttttagttttatttttttttttttcgtttttaggtgagataggtttttttagtgattttaggtttttgtttatgttgttttttttgtttggaatatttatttttgtttttttgttttgatatgtttttgttgatattttatttttttttgtgttttttgttaggaagagaatgatttaattttgatttttaatttaggtaagtatacgttttgagtaatatttttatttttgattttttattttttaattataatttttaatttattcggattttttttatttggtttttgtgttgttttagtatatgtatttgagaagtttttttatgtgttttttagtatataattggtgatatataaagtaaatatattgatggtttataatttagtttatatgttatttttttattaatggttttgtttttttttggttttttattgatgtttttaaataagtatttaacgtagtgtggttttttagttttcgtgtttgtttttttttagttgaattatgtgttttttagggcgggtatcgtgttgtatttatttttgtatttttagtatttagtagtgttggtatgtagtaggtatttaagaaatgtgtgttgaatgaacgatgtttgtgataagtaagcggattttatttttttttgatttttgtttttatgatatatttttttttgattgttattgttatttttttagagtagaatttttttagggaatttggatgggaaataggtgaggtttagagaggtggtggtagagggaacggggattttttggaatatttgggtttttggtattggtgtttaagggtaggagtggggttggtttggtagtaggtatttttttgggtggttgggaagtgatgaggaattgggtttgtttttttatagttatggttaaggatattttgggtgaagtagggttatattttgatgaattgaataagttgagggtgttggatttagaggttatttagtagattatagagttgaaggaagagtgtaaagattttgtggatagtgagtattggggagatatagtgttatttagttttgagttgttattttaattgtattttaggtttattttggttttgttatagtggagttgttggttttttggaggttgaatttggcgtttgtgagtttttacgtgttatttttttttgtttgtttttttgtgtttttatgtgtttttaatagggtattagttaaattaaatatcgggatggggaggggagggtgtttttagatatgttattttttattttttgtttttagaaattttaaattttttgggaatataattatggtttgggtgtgggaaatagaattatgtatttatgatttgatttttttagagaaagtttttttaggggtaggttttttgttatttggagttagaagtgataggtgaagtttttagaagtagtttaatagatttattgaagttattttttggttggaaatttttaggaagttttttgttttagtagttaagtaagtttaatgttcgtatagagttagatttagttagaataagggatttttgagttttttggggggttttttaggttgtggagagagtttggttagtgaaaggtagtttgggttttgttattaatttgtgattgttgtgttatgtatatatttttttgggttttagtttttttttagtaaattgttatatttaggatattggagaaagtgagtgggagattaggtatttaatgttgtgagtttgtttttttgtggttataagtgggaagtttttatttttattgttaattgaaatttggtgttatatttgtagttagtttagaggtagcgtttgtgttttgaggttgtttttttgtgaataatagtgttttttgttatttttggggaagtagggttggggtttgtttggagaatgagtttagtaagggtttagtgtttttatagtcggaggttatagcggttggttggtttagtggggatgtaaggttcgagtatgttttggtttagttggttatttttttttaggtttagattaagggtaggagataggttaataggtat

SEQ ID NO: 293 - DNA, 8770 bp, Artificial Sequence
  chemically treated genomic DNA (Homo sapiens)
ttagtttagaggaattataaaattttaagaagttttcgaattaaatatgaatggtgatagtgaagaagaaagagaaatgttattatattaataaatataggttaagtgagtaaaggaagaaacgtgtgtatattttttataataaggttgttttttttttaattttgttattaaatttatagtgtgttttataaatatggatttttagaattatagaaatattatagttttttttttagtttgttaaagtgtttggaatttttattattaagttttaggaagttttgtaagaatattttattaagaaatataatatagtaatatattataatttgtttgaaaaatgagtatgatttattttattagttagtttcgggaaataggtttttgaaagaatggaagttttttaaattttttttttatggagatggttggtagttaaaggagtaggattatagagattttaaattagattgaagggattgagggataaatgagaaaggggaatgttaaggtaaatttttataatggtttgtattattttaagtaataggaattaatttattttagaaatatcgggtttattgttaaaattaatattgtttttagttcgtttttaataatatttattttggggttttttaatattttatttggttattaatagtagtttttatagaaatataaatgaaattaagaattgaatatttatatttatgatgtaaaataaaattatttttttaagtgttttagttaagtgttgataggaaataaaatagaatttatagggatagtggattttttgataagtttgagatgttagtatcgtacgtttttaggtaaagtgtaatagaaggaattgtatttgttattatattaattgttttttttttagtggagggtttttgattttggtattatgatttattgggttattaaggattttagttgtttttttattatggtgggttttgggtttttttatttagtttagataatatatgtaaaggatttgaggtttttagataagaagtaatatttagtagaatttggtatttataggatgatgaaatttatgatattattattttagtttttacggttataatttatagaaagtttttttttatttttagaattagtttttgtagtggttttgaatgtgtaaacgttattttttagtaatgtttgaggtagaatttgaaaatttgaaatatgatttaaagttattttataataattaagttgttatagttatttaaggttgttttttaatatgttttttatgaatttgtttttttaatagagtatagtgtagggaaaaggggagggggtaattgtataaaagatataaaaggtttagttttagtttggtttatgattgttatgttttggaattttgtatagttttagaaagagagtgttattgattattaaaaatatataatttttttttttttatttttttaatttttagaaatatgggttttattatgttgtttaggatagatttaaattttcggatttaaaggattttttttttttagtttttcgagtagttgggattgtagacgtatgttaattaataattaataattaggggttaggcgcggtggtttacgtttgtaattttagtattttgggaggttaaggcgggtggattacgaggttaggagaatcgagattattttggttaatacggcgaaatttcgtttttattaaaaatataaaaaattagtcgggcgtagtggcgggcgtttgtagttttagttattcgggaggttgaggtaggagaatggcgtgaattcgggaggcggagtttgtagtgagtcgagatcgcgttattgtattttagtttgggtgatagagtaagacgacgttttaaaaaaaaaaaaaaaaaaaaaagaattaataattaattaattgttgttgatttttgattaagaaaggtttatgaaatatgtttgagtttagtagggtttttttttatttgttatacgtggtgtttttttttattaggttttttttgttttttttatttgggtaagtatattttttttattgtatggtatagggatataggttgtaagtatagttttacgggaatcgtttaattttaagaggttatgtgtgtttattttatatagtttatgatttataaattttagtattggtgttaaaatggtacgtaatttaggaattttttaaaaatattttatataattagaattttttttttatttaataaggagatatatttttttttttaagtgtttattaaatgttaataaatatttttttttttaaagagttttgtttattttgataaggtttatagtttaaattaaattttttttaaggttttttagtattttatatttttttggttttaatttatttaataaatttttttaaattgtatttttttttttttttataagaaggtattttatttatattttttttttttttttttttttttttttttgatttattaagaaaattgttattggttttgtttatgtgttatataatagaaggggaaaaggtaagggtatagtttaatatagcgttgatttagaaggtggaaaggatagtaaagatcgtttggtggtgggagtggtaatttataagtttagtagtagaattatggaaagtggagttcgaatataatttagggttatagattatttttgtatttgattgttattattttgttataaattttggtaggtaagatgataaagtagttatattaggatagttggtagtggtaggtatgaacgtggttttttaggtttgttatttttttttattgtatttttagtttatgatattagatagtaagatatgagttagataggggtagtggaagttgtaggaggattgaagttatggagttagagatgagaggaaataggttaattttgtttataaaggagtattagtaggagagtggtgtgaggattaatattttatgtagggttttttagatatatgatttttttttgttagtttaattgaaatttaggaggttttttgaaggtgaaattaagatttttttatttttgaagtcgtattttgtttaaggttcgtgtttggttgttttgagaggttgggagataggatattaaaagagtatttgttttataggattttttttgagaggaatggtttagtaagattggttattatgggttttggagtaatataggtttaatgttattggcgattttgttttttttggttgtggaaattgggtaaatgttttaagttttttaatttttatataaaaagtatatataagtatatagtaagtatttgataaatgttattttagattttgttatttttgttagttttggattttagtaaggtttatttataatggatagttgattatttattgtttgaatgttgatagtatatttgtgaataagaagagaggataaataataagaggtttggaattggaagaaattttagttatcggttttaaaagacgaggattagtttttagagaggttattagtgatattttgttttaaatttttttttgttaaaaaagtgttattttttatttagtttttatttttatttttgtaagtttttattggcgagaggaggatatttttttaattaaaaatttgtgatatatggtttgataagtatttttaaatgtaattaaggggattatagtatagaatatttttattcggttttagtttagttaatttagtaaatgatttaaagggtttcgtgtttagagggtagtaagatagtaaaaacgttttaagatttttttttgtatagtatttgtatttttattgtttagggggttgtatttatttttatatgatttattttttttgtgtaacgtatgggggtagggagggaagcgttagtattattagttattagtattttggggtgaattgattattaggataattaaaaatatatttaataaagttttggagatatatggtaagtatcgtgatggattagaagcgatttttaagttgaaatgttgttttgaatgtaatgttagttggatgtttggtgagtagaaatagataaggggaaatggagtaagcgcggtataggggtgagtgttgttttgatttttaagtttatttaagattggggttacggggtcgggtgttttttgggatttacgttttatgtagtttggggtttagagttggtaggaataatggagatggggattaaaggttgttatcgttgttttttttcgaaatgttcgttcgggttttgtttggggttttcgtttacgcgtttattacgtgtatagtttaaattttttagagtcggttcgaggtttgcgggttcgggcgttagggtggtttttagggtttttttttttttttattttttttttttttttttatagttgatgattttttgtagaaaaataattgcgaaaaagaatttattttatttttagtttttattatcgcgatttttatatggatgtgacgtgattttagttttcgaaatgtttaggtgatttacgcggggatatttcggggcggggcgagggagttttttcgggcgtttgtagggatcgggcggggcggggtagcggggcggggtagggaaagggggcggggcggggttcgtaggttcggtcgggcggaggtcgcgcgcgtttttcgttttttgcgttttttggcggtcggttggacgtatttcgtagttcgatttagagagagttacgtgattttggaaagtttcgtggaaattttcgggtttataattcgtatataattgaaacggggtaaagtagattgcgtagtttgtagttttcgtggcgggttaagcgagtttggagttcgcgggggcggagcggtgagagcggtcgttaagagagattatatttttagtcgattttgttagcgagcgagttcgattttaggcgtttatggagcgtcgttttcgttcggtttttgtttcgattttcgtttgcggcgcgtttttgttttgattaggatttgggattttgcgaaaggatcgcggggttcggagaggtaatcgtcgcgtttttcggagaggtaattcgtcgcgtttttcggagaggtaatcgtcgcgttttttcgtgtcgtttgtatcgggtttatcgtagttaagggatgcgggtgtatgttgggtagcgatttttcgggttggtattatatatatggcgttggttttgtagcgattatggaatgggagtatgatggacgaatatgtatgggaatatgaagtgatgggagatgaggttattgatgtagaggatggagatgatagttatggagatatttagttagttgttttttttagataatgtacggaatttaagttgtagttgattggtgaagaggcgtttttcgggtttttcgatcgggtggtcgttggcgttttgtttttttcgtgttttttttggagttaagcgttgtatgtttatggttacgtagattttgtagaagcgttgcggtttttttttaaattgtgtaggattagttcgacggggcgtagggtatcgtagtggtcgttagttcggcggaggtggggggttttagttttagagatagttttttagacgtttacgggtttttgtagggggttggggttttggcgcggggtttagtttttttagtagtagtagtgtaagagaagtatgtatgtagacgtgggtcgttggtttttgttttagtttttattttacggttagattgtttttgttagttggagtcgttttatattttgttatttggttttttagaaaagtagtggtattaagtaaggaaggagtttaattttttttgagttcgttttgtttttcggttttttcgttttagatttttttgttttggaaagttagtttgggttagtgtttttatggtagttttttggtagaattattggttattaaagggatttttggatcgtaattttaatgtattagattattgagtagttaatgaatgttttatttttattgtttaaggtgttgttttgattttttttttaattttttgtattatttttgattttttggagaggtatatttttaaatttggatgaggtatttgttgataaataatttattaatttttataatgtagataaaaatgtttgtttagagtggaaaaataaaataagggggagaagagtttgagtaacggagaagttttgtggaattttagtgataaaagttgagaaattatttttaaataagatagtgaggtaataaatgttaaaaaaaaaaaaagttaagggtaatagtgtattgtttgttatttataatgtatttgaaatatttgttttttaattttaagcgtagagtggtttaagatttggaaatttgggtagtgggttttgatttttaaggaggtagttttataggttgtgtaaggttaattttattaatgagattatattggcgtattcgatattgatatttgtatgttttgtttatggtttatagtttttattattttagatttttggtgaaaaatttttagatttagaagagaaaaataagagttaggtaagtaaaaagagataatattttatttgtttaaaatttttttattgtttatttttttttatttgattgtggtaggtattgtagttataggtttggtgttgtgggattgtaaggggtaggtattgaaagatttggtttttaggtaaaattttgtttttgaatggttgtgggatttgagtagtatttgtaattttattgttttagttgtagattaaggtggtagtgtaattttagggaagggaataaggttatttttgatttttagttttattattaagtatggtgattggtttttagtaggtggttaggtagtgtttgttgggtggatgggtggatggatggatagatggatggatggatggatggatggatggatggatggatggacggacggacggacggatagatgatattgtgaaagagatttttgttgtgttataaaggaaaggtatatgtgttatttttattttgttatgattttgtttaattttatttgtagaggacgtttgatattaaaagagagtattatttgatttagagaatgatttttattatgttttttttagtaattagattaagaattttaatttaaaattattattagaaaatttttgaggagaaattatgggttatttagtttaattttttttttttgagtgggttataagaattattttaatattttattaatggtgttgagagtttagatttatatagaagtagttattttaaaatttaggttttttttttttttttttttataggtttaatatttttattaattggaaagttgttttggtaaataagatgttgtaggaatggaattaataattattgtgaaattttttagggaatgtttttgtgttttgaaaatttttttatttttttggaaattaggaagtgtggttagatattttattaagggttagtaaattatagttggttttttatagtgttttatattggagagattttatattatgttaatttgtattattttgcgttgttggtatgggttgtagatgttggtttttgttatttttttttttttatttgttagagtggttttttggtggaaatttttttttttgtttatttttagatttttattttttttattagttgattatgtttaaagattttagggtgaaaagttaggtagatttgtttttgtgttggtatttggagggtgatgataaaattttattggtagttgagttaaaatgattgagttttaatatttgtttttagaagtatagaatttattgttttattattattttgcggttttttattttttgttttcgtagagatttaggttttatcgtgttgtttaggttagttttaaatttttgagtttaagtgatttttttttttcgattttttaaagtgttaggattaaaggtatgagttattatgtttagtttattgttagtttgttttttattttgatatgaagttcggtgcggaggttttgaaggaatgttgattgtttttaaaattgtaaagtattttgttggaaatggatttttttattgattagaaaatattcggttttaattttttataaatattagaataaattttatgattaaatattttataaatatttttttttggggttaaagaggaaatattaattagtagtttaagtgatagtataaaattgtaagattttttataaagtattttattgtttttttagtatagggagggagtgataatttaagagtttgtttaagagtaggagtgtttggtggtggtttgaggggaggagttatagatttgttagggttattttgagtttttaattggtatttagtattttttaaatttagtgttgtttagggtggttttagaatgaaacgggagtttaagttggttttgaggagtagtatttgttgttgatagatagggttggttttttgataaatattattgaaaatacgggttattttttttttttttagtatttattttttgtttttttttttttgtttaggttaattttttaaagtgatgtaatttaaaatagtttagtgtgagttaatttttggggttagttagtatttcgggagtagaggtgttaagattttttgtttatagattagggtaatgataagattaaatattggggttttttgtaggtagttatagaggagtcgtattaaagttaggttaatagaatggttttttttttttttttttttttttagg

SEQ ID NO: 294 - DNA, 8770 bp, Artificial Sequence
  chemically treated genomic DNA (Homo sapiens)
tttgaaaaggaaaggaaaaaaaaaaagttattttattagtttgattttaatacgatttttttatagttgtttgtaggaaattttagtgtttgattttgttattattttgatttgtaggtaaaagattttagtatttttattttcgggatattagttggttttagagattaatttatattggattgttttaagttatattattttaaaagattagtttaaataagagaaggaaggtagagagtgggtattgaggaggaggggaataattcgtgtttttagtaatgtttgttagggagttaattttgtttgttagtaataggtattgttttttaaaattaatttaagttttcgttttattttgaggttattttgaatagtattggatttggggagtattggatgttagttaagggtttaaagtagttttgataagtttgtagtttttttttttagattattattaagtatttttgtttttgggtaaatttttgagttattattttttttttatgttggaaggatagtaaaatattttatgaaaaattttgtaattttatgttgttatttaggttgttggttggtgttttttttttagttttaaagagaagtatttataaagtgtttaattatgaagtttattttgatgtttataaagagttaaaatcgaatgttttttaattaataaaaaagtttatttttagtaagatgttttgtaattttaagagtagttagtatttttttagaattttcgtatcggattttatattagaataagaaatagattaataataggttaggtatggtggtttatgtttttaattttggtattttgggaggtcgagggaggaggattatttaagtttaggagtttgagattagtttgggtaatacggtgagatttaggtttttacgaaaataaaaaatgaaaaatcgtaaaataataatagaataataaattttatatttttaagaatagatattggagtttaattattttaatttaattgttaatgaaattttattattattttttaggtattaatatagaggtaagtttgtttggttttttattttgaaatttttaagtataattaattagtagaaggaatgaaaatttagaagtagataaggaaagaagtttttattaggaggttattttggtaaatgaaggaggaaaggtggtaaagattagtatttataatttatgttaatagcgtaggatgatgtaaattaatatgatgtaggatttttttagtgtggaatattgtaaaaagttagttgtgatttattagtttttagtagggtgtttggttatattttttaatttttaagaagatgaagaagtttttagagtataaagatattttttaggaaattttatagtgattgttaattttatttttgtaatattttatttgttagggtaattttttagttaataaaaatgttaaatttatggaagagggaggagaagaaatttagattttagggtagttatttttgtgtgggtttagatttttaatattattgataaggtgttgagataatttttgtggtttatttaaaggagagaggttggattagatgatttatggtttttttttaggagttttttggtgatagttttagattgggatttttaatttgattgttgggaaaggtatagtgggagttattttttggattagatggtgtttttttttgatgttagacgttttttataggtggaattgggtaaaattatagtaggataaaaataatatatatattttttttttgtggtatagtaaaagttttttttataatattatttattcgttcgttcgttcgtttatttatttatttatttatttatttatttatttatttatttatttatttatttatttatttatttaataagtattatttgattatttattgaaggttaattattatgtttgatgatgggattaaaagttaaagatgattttatttttttttttgaaattatattattattttagtttgtagttaaggtaatggagttataggtattgtttagattttatagttatttaggggtaaagttttgtttaggagttaggttttttaatatttgttttttgtaattttataatattaaatttgtggttatagtgtttgttataattagatggaaagagatgggtagtaggaagattttaaataaatgaggtgttatttttttttgtttgtttgatttttattttttttttttgaatttaaagattttttattaaagatttaaaatagtgagagttgtaaattataggtaagatatgtaaatgttaatatcggatacgttagtgtgattttattggtagggttagttttgtatagtttgtaaaattgtttttttagaaattaaaatttattgtttagatttttaggttttggattattttacgtttaagattaaagaataaatgttttagatatattataagtggtaaataatgtattattatttttaattttttttttttttaatatttgttattttattgttttatttaaaggtagttttttaatttttgttattaggattttatagaattttttcgttatttaaattttttttttttttgttttatttttttattttgggtagatatttttgtttgtattgtggaaattgatgaattatttattaataaatattttatttaaatttggggatgtgtttttttaaaaaattaaaaatagtataaagaattgaaaaaaaaattaaagtagtattttaaataatgagaatgaagtatttattggttgtttaataatttggtatattaaggttgcggtttagaagtttttttaataattaatggttttgttaaaaggttattataagaatattgatttagattggttttttaaggtaagaagatttgaggcgaggagatcgaaaaataaagcgggtttaaaaagagttaagttttttttttatttaatgttattgtttttttgagaggttaggtggtaggatgtgggacgattttagttgataaagatagtttaatcgtggggtaggggttggagtaggggttagcgatttacgtttatatgtatattttttttatattgttgttattggaaaagttgaatttcgcgttaggattttagttttttgtaaggattcgtgagcgtttgggaagttgtttttgggattgaagttttttattttcgtcgggttggcggttattgcggtattttacgtttcgtcgggttggttttgtataatttgggaaaaagtcgtagcgtttttgtaaggtttacgtggttatgagtatgtaacgtttggttttaaaaaagatacgaaaggagtaaagcgttaacgattattcgatcggagggttcgaggggcgtttttttattagttagttgtagtttaagtttcgtgtattatttgaaaggaatagttggttggatgtttttatggttgttatttttattttttgtattagtgattttattttttattattttatatttttatatatattcgtttattatatttttattttatgatcgttgtaaaattaacgttatgtatatagtgttagttcggggggtcgttgtttaatatgtattcgtattttttgattgcggtgagttcgatgtagacggtacggggaggcgcggcggttattttttcgggaggcgcggcgggttattttttcgggaggcgcggcggttattttttcgggtttcgcgattttttcgtaaagttttaagttttggttaaggtaggagcgcgtcgtaggcgggggtcggggtagggatcgggcggaggcgacgttttatggacgtttggggtcgggttcgttcgttggtagggtcggttgggggtgtgattttttttggcggtcgtttttatcgtttcgttttcgcgggttttaagttcgtttggttcgttacgaagattgtagattgcgtagtttgttttgtttcgttttagttgtatgcgggttgtaggttcggggatttttacgggattttttaaagttacgtgattttttttgggtcgggttgcgaagtgcgtttagtcggtcgttagagggcgtagggggcgaggggcgcgcgcggttttcgttcgatcgggtttgcgggtttcgtttcgttttttttttttgtttcgtttcgttgtttcgtttcgttcggtttttgtaggcgttcggagaaattttttcgtttcgtttcggggtgttttcgcgtgagttatttgggtatttcggaagttggggttacgttatatttatgtggaaatcgcggtgatgggaattggaaatgaaataggttttttttcgtagttgtttttttgtagaaaattattaattgtggagaagaagaagggaaataagaaagaaagaaaattttaaaaattattttggcgttcgggttcgtaggtttcgggtcggttttgaaaagtttgggttgtgtacgtgatgagcgcgtaggcgggagttttagataggattcgggcgggtatttcgagaaaaagtagcggtgatagtttttggtttttatttttattgtttttgttagttttggattttaggttgtatgagacgtaggttttaggggatattcgatttcgtggttttagttttaggtaaatttaggaattagaataatatttatttttatgtcgcgtttgttttatttttttttgtttatttttgtttattaagtatttagttgatattgtatttaaagtagtattttagtttagaaatcgtttttagtttattacggtgtttgttatgtgtttttaaggttttattaggtgtgtttttagttgttttgataattagtttattttagggtgttgatggttgataatattggcgtttttttttttatttttatgcgttgtatagggagggtgagttatgtggagatggatgtagttttttgggtagtgggggtgtaggtgttgtgtagggaggagttttagggcgtttttattgttttattgttttttaagtacgggattttttggattatttattagattggttaaattagaatcggatggaaatattttgtattatggtttttttaattatatttaagaatatttgttaggttatatattataggtttttaattagaaaagtatttttttttcgttagtaaggatttgtagagatgggggtgggggttggatggagggtggtatttttttggtaaaaagaagtttggagtagagtgttattagtggtttttttgaagattggttttcgttttttaaaatcgatggttggaattttttttagttttaaattttttgttatttgttttttttttttgtttataaatgtgttattaatatttaaataatggatagttagttatttattgtaaatggattttgttggagtttagggttagtagaaatgatagggtttaaaatgatatttattaagtatttgttatatgtttatatatgttttttatatgaaggttaagaagtttgaggtatttgtttagtttttataattaaaaggggtagagtcgttagtggtattaagtttgtgttattttaaagtttataatgattagttttattagattattttttttaggaaagattttgtgagataggtatttttttggtgttttgttttttagttttttaaaatagttaaatacggattttagatagaatgcggttttagaggtagaagggttttggttttatttttaggaaattttttgggttttagttgagttggtagaagaagattatgtatttgaaagattttgtatggaatgttaatttttatattatttttttgttggtgtttttttgtaaatagagttggtttgtttttttttatttttggttttatgattttaatttttttgtagtttttattgtttttatttggtttatgttttgttgtttggtgttatgaattgggagtgtagtaaagaggagtgataagtttgaggggttacgtttatatttgttattgttaattgttttgatgtaattgttttgttattttgtttgttaggatttgtgataaggtaatagtagttagatgtaggagtggtttatagttttggattatgttcgaattttattttttatgattttattgttgggtttgtgaattgttatttttattattaggcggtttttattgttttttttattttttaaattagcgttgtgttgggttgtatttttgttttttttttttttattatgtaatatatggataagattaatgataatttttttggtgaattagaaggaaagaaaagaagagaaggagagagtatagatggaatgtttttttatgaaaaaaaggagaaatataatttggggagatttgttgaataagttgaaattaaagagatatagaatgttgaaaagttttgaaggagatttaatttgagttataggttttgttaagatggatagaattttttaaagaagagaatatttattaatatttagtagatatttaggagaaaaaatatgtttttttattagatgaaaaaggaattttgattatgtgaaatatttttggagagtttttaagttacgtgttattttgatattaatgttggggtttatgggttatgaattatgtaaaatgagtatatatgattttttggaattaaacggttttcgtgagattgtgtttgtagtttgtatttttgtattatgtagtaaaaaagatgtgtttgtttagatggggggagtaggaagaatttgatgaaagagagtattacgtgtgataagtgagaggagattttgttgagtttaaatatattttatgagttttttttaattaagaattagtaatagttgattggttgttgatttttttttttttttttttttttttgagacgtcgttttgttttgttatttaggttggagtgtagtggcgcgatttcggtttattgtaagtttcgtttttcgggtttacgttatttttttgttttagtttttcgagtagttgggattataggcgttcgttattacgttcggttaattttttgtatttttagtagagacggggtttcgtcgtgttagttaggatggtttcgatttttttgatttcgtgatttattcgttttggttttttaaagtgttgggattataggcgtgagttatcgcgtttggtttttggttgttgattgttaattagtatgcgtttgtagttttagttattcgggaggttgagagggaagggttttttgagttcgggagtttgagtttattttgggtaatatagtaagatttatgtttttaaaaattaaaaaaataaaaaagaagaaattatgtatttttaataattagtgatattttttttttgagattgtatagaattttagggtatggtagttatgggttaaattaaaattggattttttgtgttttttgtataattgttttttttttttttttttgtattgtgttttattggaaaggtagatttatagaaaatatattgggaagtagttttaggtaattatggtagtttagttattgtagggtagttttgaattatgttttagatttttaaattttgttttaaatattattaaagggtaacgtttgtatatttaaggttattataagggttagttttgagaataaagagaagttttttgtggattataatcgtgagaattgggataatgatgttataaattttattattttatgaatgttaaattttattgaatgttgttttttatttagggattttagattttttatatgtgttatttggattgaatggagaaatttaagatttattatggtggagggataattgaagtttttagtgatttagtgagttatagtattaggattaaagattttttattgggaaggaggtagttggtgtaatgataagtatagttttttttgttgtattttgtttgaaagcgtgcgatgttgatattttaaatttgttagaaaatttattatttttgtgaattttgttttattttttgttaatatttggttgaaatatttgggaaagtaattttattttatattataaatataaatatttaatttttaattttatttatgtttttgtgaaggttgttattaatgattaaataggatgttagaaagttttagaatgggtgttattaggaacgagttagaagtagtgttggttttagtagtaagttcggtgtttttgagataaattagtttttgttatttggaatagtgtaagttattgtgaaaatttgttttgatattttttttttttatttgttttttaatttttttagtttagtttggggtttttataattttgtttttttggttgttagttatttttataaaaaaagaatttgaaaggtttttatttttttagagatttgtttttcgggattggttggtaagataaattatgtttattttttaaatagattgtgatgtgttattgtgttatattttttgataaaatgtttttatagaattttttagagtttaatggtggaaattttaagtattttagtaggttggagaaagagttgtggtatttttatgattttgagagtttatgtttgtaagatatattatggatttaataataagattgggaggggaataattttattgtaggaaatgtatatacgtttttttttttatttatttagtttatgtttattgatgtgatgatattttttttttttttttattgttattatttatgtttgattcgaaggttttttggagttttatgatttttttgagttga

SEQ ID NO: 295 - DNA, 6126 bp, Artificial Sequence
  chemically treated genomic DNA (Homo sapiens)
tggggatttttttaaatagaagtattttattgattattaagaaaatagttttaagagtttttatttaatgaagatatttttattagttaggtatagataaattatatgggtattagggaagtggggagtatttttgaatattagagatgattaagttatattaataatttttgaggagaaattttgagtaggtgtagagtattttttagtattttgttgatataaatatttatttgtttagaagttatttgatgagtagttatttgaaatatgtattagttaattaagaatttgattttttgggattgagtaggtattagatgattatttgagtttttggaaattttagttgaagtgattagagtgattggaaaaagtttataagtaagaggttgtattttttttttgagttgattagaataatagatttttgttatggattgttgaggttatttttttttattttttaatttttttatttagaggtgttattaatttgattgtgatttgtagtttaagagagtttttttttatatgtttttatttgtatttatggttatgagtagggtgaagtttagagaattatattttttaatagtttaaatgattatgttattttgttatggattgaatgttgtgttttttaaaaatttagatgttgaaattttaatttttaaggtgatgttattaggaaagggggtttttggatggtgattaggttatgtaggtggagttttaataaatacgattagtatttttataaaagagattttagagaattttttaattttttttgttacgtaaggttgtaaggtaaagttggtagtttgtaaattagaagaaggtttttattagaatttaattatgttggtttttggatttttaatttttagtttttaaaattgtgagaaataaatttttgttgtttaaatttgatatttagtttatgatagtttgttgtaatagtttaaagtgattaagatatatttttatgtttaaaattttttagtgttttgtatggttttttgaagaaagattggaattatttttatttgtaatttagttattgtttatttatttttttagttttttttggtttatataatgttttgttttttatgtagtaatcgtattggaatatttttagttttttgaaattttattttgtttttttttattgggagatttattaatattttgttttttttgtttaaaggttttttttttttatttttttattatgtgtttattatttgttaatatacgtagtttttagagtttttgttaaaaggtatatggagttaggtttttttattgttatttatttttttttatgtgatatatagttttgtttatatatttgtgtgattaaggttaatttttaaagaaagggttatggtaatgaatggttagtaatgttagaattatattataggtgagtagtgaattataagtagtaattatttatttttagtttaatacgtttaggtaaatttttaaataattggtgattttattagaaagtgatgttattagaaagtgatatttttttttattagaaagtgagttagttagataattttatttttatttttttgtatattattttttaaaagatatatttatatatatattttaaaatatagtttagatgatttataaaggtaaatagtttgtgttttaaatattaatatggttaaaattgtgttttttaaggaagaaattataaatattaataaaataagttaatgggttatttgttgttttttttttttattttttttgttttttttataaaattagaataaaatttttttttaataattatgaaataataaggaatttgtttttgttttttaagttaatatttttttttttgtataattagaatcggtatttttaatttttaggtgaggaagtgtaggtataagatgttttagatattttttagttaatttagagttgtatgttttgttttttaaattatttaagttaattgtttttttgagttttaggtatttttattatgatgatgattataaatgattatttggattagaggttgtgttattgtgttaaagagataaagtgttttttttgtaggaatttttaatatttaggtattatttttttaagttttagaagtggttgaaatggggttttggggtagtagatagttattgggggttaatttaaaatttatttaatgtgggatttaatttagaagagtttaggaaagaagagatgaggaatatttgatgaggtgttttttagaaagttagcgttatatatatttggtgtttagaaatagaaggttaaagttacggaatattttgtttaatgttatcgatggtttttgttaatgagggatttgttataggaagatgaatgtagttttttagttattgtttaaatgtttttttttgggtttagtttggaatttttgggtttattttaattaaattttaaaatgaattttagtttagagtgtttaaagtttgtagtttatagtagtggattatttagaaatattttaggggattggttagattgttttaagaatataatagatgaaatgattgataatttatggtttttgttagttttttgttagtgagtgatgaataaagggtttatagttaggttttgagatgtataattaatatatagtttattttgtgattttagataaatggtgttttaatttgtttttagtttatagttaattattaattttttgaatttttaaattattattatcgtttttttgtagggagagttagaatttgagttaaaagttttagcgaatattatagaaaaataagtagtttttgtttttaggagtttataatttagatttgttttgtgtttatataaacgtttttatgagaattttagatgataatgatatttaatgagtattatgtgtcggatattatttttagtgttttatattttttatttaatttaatttttataataatcgttatgatattttgaggtagatgtgattattatttttattataggaataataaaaaatggaaataaaaataggttaggtaattagtttgaggttatagagttaggaaaaattggagttggggtttaaatttaggttataaaggttagtattttaggtatttttttagaataattataattataggaaatattttttatgggttaggtattgtgttgagttattttatatgtattattttatttaatgtttataattagtgatgattattatttatataattgttttttaaacgtttttatttgtttttttttacgtttttgtaatattagtgtgtttttattttatagatgaggtttagggagacgtaaattttttttagggttaatattgaaggatttagttattgattagttttttttaaggtttgatatttatatattggtattattttatgttttgagaaaaatatttttaaataatattttagataaatattattttaataaaaataataatattgttatttatattgtgttttattattaatatttggattgatttgagttttatggtaagtttaagtgttgatattttaggttgtagatgttaaaattacgatttaaaatataaggtgtgatttggagttatataattttgtttatatttattgagttatatttatttattagtttatttaagaaattagtatgttgttatattttggtttttgagggataaagttgaatgatatttcgttttttgtaatttgtaggatggaatagtttgtggatttattttgaattcgtggtggaaggatgttttttggaaggggtagatgttttgattttggtaagttatttttgttttttaggggtttttttttttgattttttatttttttttttttgaatttggtgaaaggtagtatttgtttttttttggagatatataatttgaatatttggttttgatggggaagtagttttgtagggatttttttagttatttgtaaataattttagtggtaattcgcgaattgtaatttatgaatgggattatattttataagttattaagtttaatttttagattagggaattaatgggggagatagcgaattttagagtaaagtgttaaatttttgtcgatagtttgaggttagtggaaagatttcgaggaggttattttagaagtttagcgcgtaggaagtttcgatattaatagttttttgatgatggtggggttggtgaagggaatagtgtttcgtaaggttatttttgttttaggtagtttaatttttattttgtagattttttttggttttaattattttagataataaggagtgaatgtagaatagtacgggttttagggttaattagatattagttagaaaaatttttattatatggtttatgtaaatttgaagatgaatgattgcgaatttttcgaaaagggtttagataatgttatgtataaagaggggttttgtaatttgaggttttagaattcgaagtgaaggggttaggtagtcgggtacggcggaaatttatagttttcgtttagcgagaggataaaggtttgggatatattttaattgcgttcggattttggttggatcggatttttagggtggaggagatataagtatagtagttgtttagcgtgtgtttagtttttttatcgttggtttcggttgttaggaggttggtcgttggcgggaaggggtcgggaaattttagagtttcgcggagatagtagtcgttttgttttttagttcggtggttttttttttttttgtttttttaggggttagatattatcgttttattttttacgttttatttttttgggggatttttttcgttttagttttgaaagcgttaattttggagttttttgtatatttttcgatcgttttcgtttaagttttttaaaaaagaaaggtgtaaagtttggtttaggatagaaaaatgattgattaaaggtaggcgatattttttgttgtcgggacgttatatataacgtgatgagcgtacgggttgcggagacgtatcggagcgttcgtttagtcgtcgtttttaagtttttgaggttttcggggattataatgaataagttgttgtgttgcgcgttcgtggtaagtttttgggttagtcgacgggtgttcggcgtttggggaggttgttgttatttggttttttaattttttagcggatcggcggggagaaggttttattcgtttttttttaggagaggtttggggttaggttggagtaggaaatcgtttttaagttatgttatgttttttttagggtgtttttttacgttgtaaagtttttgttgattttatggaagatagtaagagagagatagatagcgagagagagggagagagagagagagagaaatttgtttgaaagttttagttattaattttttgtttttattttagaatattaacgtttttatgtagtttatattatttttgtttaatgaatttgaatttttattattagtggtaaagaagtggttttttagatttagagtaagttggaagaagacgttagtttttttaaaattattataattagaatatgatatgatagatttttttaatgtaaatattatgtgaaattttgaataattaggagaaaagattttttatatatatattttttaattgtgtaatgttttaataaaattttattgttaaaattattttattttttaattttaatatattgtggagaatattggtagtatgttatgttttaaaatatatttaaagaattgaagtttattaaatagggttaaaaattgtgtttaaaatgttatttggaaaagaaaggaatttttgtgatttagttttttttttaagtttaggttttgattaagttaataagatttgtatgtaggtttttttatgattaatgatttattttttttatgatattagagtgtagagtatattaagatatgaattagatatttatgtaaggttaggaaaagttatatttaagttatatatgtgttttggatgtgtttgagtaaatgtttgaattttaatttttaatttataaataatgaatagaaggttaggtagttttttatttagtttttaggatatagaaatataa

SEQ ID NO: 296 - DNA, 6126 bp, Artificial Sequence
  chemically treated genomic DNA (Homo sapiens)
ttatgtttttgtattttaggaattaagtagaagattatttagttttttatttattatttgtgggttggaggttgaagtttaaatatttatttaaatatatttaaaatatatatgtggtttaaatatggttttttttagttttgtataaatgtttgatttatattttgatgtattttatattttagtgttatagagaaaataagttattggttatagaaaaatttatatgtaaattttattaatttgattaaaatttaagtttaaaaaaaaagttaagttatagagattttttttttttttaaataatattttaaatataatttttagttttatttagtgaattttaattttttagatatgttttagaatataatatattgttaatattttttatagtatattgaagttgagaagtgaaataattttaataataaaattttattaaaatattatatagttaagaagtgtgtgtgtgagagatttttttttttaattatttaaaattttatataatatttgtattagaaaaatttattatgttatattttaattataatggttttaagaagattaacgtttttttttaatttattttgaatttaagggattatttttttgttattaataataaaagtttaagtttattaagtaaagatagtatggattatatgagggcgttaatattttgagatgaagatagaaggttaatgattaaaatttttaaataagtttttttttttttttttttttttttttttcgttgtttgttttttttttgttgttttttataaagttagtaggaattttgtagcgtaaaaggatattttaggggaagtatggtataatttgaaagcggttttttgttttagtttaattttaagttttttttgggagggagcgagtggagtttttttttcgtcggttcgttgggaggttgggagattaggtggtagtagtttttttaggcgtcgggtattcgtcggttggtttagggatttattacgagcgcgtagtatagtaatttgtttattgtggttttcggaaattttaggggtttggaggcggcggttgggcgagcgtttcggtgcgttttcgtagttcgtgcgtttattacgttatatatagcgtttcggtaataggaagtatcgtttgtttttgattagttatttttttattttggattaaattttgtattttttttttttaggaagtttgggcgggagcggtcggggggtgtgtagaaagttttaggattaacgtttttagggttggggcggaaaggattttttagggaggtggggcgtgaggggtggggcggtggtgtttggtttttgggagagtaggggaaaaaaaagttatcgggttgaggaataaggcggttgttgttttcgcggggttttgaggtttttcggttttttttcgttagcggttagttttttggtagtcgggattagcggtgggagggttgggtatacgttgggtagttgttgtgtttgtgttttttttattttgagagttcgatttagttaagattcggacgtagttggagtgtgttttagatttttgttttttcgttgggcgaaagttgtgagttttcgtcgtattcggttgtttgatttttttatttcgggttttgaaattttaaattatagggtttttttttatgtatggtattgtttgagtttttttcggggagttcgtaattatttatttttaagtttatataaattatgtagtaggaatttttttaattaatgtttgattggttttaaagttcgtgttattttgtatttattttttgttatttggggtagttagagttagagagaatttgtagagtgaaaattggattgtttggggtagggataattttgcggagtattgttttttttattaattttattattattaaagggttattggtatcggagttttttacgcgttgaatttttggagtagttttttcgaggtttttttattagttttaagttatcgatagaagtttggtattttgttttagggttcgttgttttttttattaattttttggtttagaagttagatttgatgatttgtaaagtgtggttttatttatggattatagttcgcgggttgttattgaaattgtttatagatggttgaaaaagtttttgtagagttgtttttttattagggttaagtgtttaagttatatgtttttagagaagggtaaatattgttttttattagatttaagggaaggaaggtgaagaattaggagaggggatttttggggagtaaggatggtttattaggattagagtatttgttttttttaagggatatttttttattacgagtttaaagtggatttatagattgttttattttgtaaattatagaagacggggtgttatttagttttgttttttaagggttagaatgtaatagtatgttggttttttaagtgaattagtgaataaatgtagtttagtgagtgtggataaaattgtatgattttaaattatattttgtattttgaatcgtagttttgatatttgtaatttgagatattaatatttagatttgttatgggatttaagttaatttaagtgttagtagtgaaatataatataaatagtagtattattgtttttgttagagtaatgtttgtttaggatattatttgaaggtgttttttttagaatataaaatgatgttaatatgtgggtgttagattttggagaaaattaattaataattgagttttttagtgttaattttgggaaaggtttacgtttttttgagttttatttataagataaaaatatattgatattgtagaaacgtaagagaaagtaaatgggagcgtttaaaaaataattatataaatgatggttattattaattatgagtattaaataaagtaatgtatgtaaaataatttagtataatgtttggtttataggaaatattttttatagttatgattattttaggggaatatttaagatattggtttttgtaatttagatttgagttttaattttaattttttttagttttgtgattttagattagttgtttaatttatttttgtttttattttttgttatttttataatgaggataataattatatttattttaaagtattataacggttattataaagattgaattagataaaagatgtaaaatattaaaaatagtgttcggtatatagtgtttattaagtgttattattatttgaggtttttatggggacgtttgtatgagtataaggtaaatttagattgtaagtttttgagggtaggaattatttatttttttatggtattcgttgaagtttttagtttaaattttggttttttttgtaaaggagcgatggtggtaatttggggatttaggggattggtaattagttgtaagttggagataggttggggtattatttatttagaattataaaatagattgtgtattgattgtgtattttagggtttaattgtgggttttttatttattatttattgatagaaaattgatagagattatgaattattagttattttatttgttatatttttggagtaatttggttaattttttagggtatttttaagtaatttattattgtgggttgtaggttttgaatattttgagttgaagtttattttaagatttaattggaatggatttagggattttagattgaatttaaaaggggatatttgaatagtaattggaagattatatttatttttttgtgatagattttttattggtagaggttatcggtgatattaagtagaatgtttcgtaattttaattttttgtttttaggtattagatatatgtgacgttaattttttaggggatattttattagatattttttatttttttttttttaaatttttttgaattaggttttatattgaatagattttggattgatttttagtgattgtttattgttttaaaattttattttagttatttttaaagtttagagaaatggtgtttgaatattaggagtttttatagggaagatattttatttttttagtatagtagtatagtttttgatttagatggttatttataattattattataatggaaatatttgagatttaggaaagtaattgatttaggtgatttgggagataaggtatgtagttttaagttaattgaaaagtgtttaaaatattttgtgtttatatttttttatttgaaaattggaaatatcggttttggttatgtagagaaaaggatattaatttgaagaataagaataaattttttgttattttatggttattaaaaagaagttttattttgattttataaaaggaatagagaaaatggaggagaaaaatagtagatagtttattgatttattttattaatgtttataattttttttttaaaaaatataattttaattatattaatatttgagatataaattatttgtttttataggttatttagattatgttttaaaatgtatatgtgggtatgttttttaaaaaataatgtatagaaaggtaaaggtaaagttatttagttgatttattttttgatgaagaaagatgttattttttgatgatattattttttgatgaggttattagttgtttaagggtttgtttgaacgtgttggattaggggtaagtagttgttatttatggtttattatttatttataatgtgattttggtattgttagttatttattattatagttttttttttgaaaattggttttaattatataaatatataaataagattgtgtattatatgaaaagaaataagtggtaatagaaggatttgattttatgtattttttaataagaattttgaaaattgcgtatattgataaatgatgaatatatggtgaagaggtggggagggagagtttttgggtaaggaggatagggtgttagtaggttttttagtgggaggaagtaaggtgggattttaaggaattagaaatattttagtacggttgttgtatggagagtaaggtattgtgtggattaggagggattgaagaggtgagtagatagtggttaggttgtaggtggaagtgattttagtttttttttaaagaattatataaagtattagagagttttaagtatgggagtgtgttttaattattttggattattataataaattattataaattgggtgttaaatttaagtaataaaaatttattttttatagttttggaggttagaagttggaggtttagaaattagtatggttgagttttgatgagggtttttttttggtttgtagattgttaattttgttttgtaattttacgtggtagaaagggttagagagttttttggggttttttttataagggtattaatcgtatttgttaagattttatttgtatgatttaattattatttaaaggtttttttttttaatagtattattttgagggttaggattttaatatttgaatttttgaggaatataatatttagtttataataaaatgatatgattatttaagttgttgaagggtgtaattttttgaattttattttgtttatggttataaatataaataaagatatgtaagagaaaatttttttaaattgtaaattatagttaaattgatgatatttttgggtagggaagttgggaaataaggaaaaatgattttagtagtttataatagggatttgttgttttgattagtttaaggaagagatataattttttgtttataaattttttttagttattttagttattttaattggagtttttagaaatttagatagttatttagtgtttatttagttttaagaaattagatttttagttaattgatgtatattttaaataattatttattagatggtttttgaataaataaatgtttatattaatagagtattaaagaatattttatatttatttagggtttttttttaaaaattattgatgtaatttgattatttttaatatttagaaatgttttttatttttttgatgtttatgtaatttgtttatatttggttaatgaagatgtttttattagataaaaatttttaaaattatttttttaatagttaatgaggtgtttttatttgggaaagttttta

SEQ ID NO: 297 - DNA, 5536 bp, Artificial Sequence
  chemically treated genomic DNA (Homo sapiens)
tatagtttttaaggtgggggggggtgttattagcgttttttgtttttagtatttaaggagttttttaggagaaagagtaagttttgaggagttttttgagttcggtattggtgttgaggagggagttagagaagagaggggttcggggtcgcgtagaggcgtagaggtgggggtatttcgggttaggtagaggtggatttttttatcgtagtgggcggagaagtatttatagtgttagaggttgaagttgagcgatatgttggttaaattttattagcggtttattaagtattcgttgttgtttaagtcggtgttgaggaagatcgaggagtcgcgcgttaaggaggtcgtcgtcgttatggtaattttgatggttagcgggagtcgttttttttgcgcggttttttgtttcgttatgattttggatttgaagtttttttatttgtttttagatcggtttcgtggagcgttttatttattacgtgaacgcgtgtatgcggtagcggtaggagcggtagcggttggcggtcgtggtgagtcgtatcgacgtttacgaggtggtggaaagtagtagcgacgaagtggataaggtgggcgtgtgtgtttgcgggggttgtcggttgggagagaggaaggtttagttggtaggtaggggttgtgttgggtattttattgaggatgtttagttgagatgggagttagtttttggttttttttacgtttacgttattcgtttttagtttttgaaggaatttttgtatttggatttgatagcgtttatttttggcgttttttcggaggagacgcggtagttgttgttggaggggagtttgaggatgaaggaggggaaggatagtaaggtgattttagggttattttatttttgtgttttgttttttttagggattttttgggttttagttattggtttttagttttgtagttttttcggtggttatttaagaattagtgattttgttatagtgaatgatagttttttgtttgttatttataaatttagtagtagggttttagtttttgaaggtattagttgtgtttatttgttggtgttatatgggtttttggtgggagggtagttatattttataagtgggttaggaattttagagttttgttattgtgttatggtttttttaggtatggggtaggttgagagtttgtatacggtgattttaaagttattagttttttttttaatgtaaatttgtattgagataagttattaacgtatattttagtgaaagagaattatttttttttttattttaattttatttgaaggtttatggtgggaggagtgtttgataaaaatcgagtgtttttaggggaggttggtgttatagtttttggttttgattttgttggtttttttggttatttttttttttgttattgtagatggatgtgtattgttttttttttacggatttgttgttggtgattaaagtagtgaagaaggtagagaggattagggttattaggttatttttgttcgtggataagattgtgtgtcgggagttacgggattttggtaaggagttttggttttttgtttttggttaggggttgtgatgggtgggggttatcgtttttgttgatattgatttgggttttttttaattagggttttttttttttatttatttgaatgagttttatagtgttgtaggggtttatacgttttaggttagtggttaggttttgtgtcgtggttgggtggatattatttataatgtttaggtgagtgtagagtagtgagtgggtgggtaaggtagattagggagatgttggttataatttattttgttttatgtattttaattttgtttgtagaattagttgtaatagttgcgtgtataggagtttttaggtagttagtagtttttgtagagtttggaagaggaggaggatgagtaggaggaggaagaggaggaggaggaggaggaggaggaaggcgaggatagtggtattttagttgttagtttttttattattatgcggaaaagtagcggtagtttcgatttttagtattggtacgtttgtttatgattatttagtaggttaaattaggataagtattttagtttaggatttttgaaggtttagttacgtttttttttttttaatggttttttgttatgaatattgtgggagcggggttttgttttttttagagttcgggtggggagggtagatatttttttatgtgttgttagttttgatttattcgtggtagttgtttggggtgttgtgttgaggatttttagggtagatttagttttggtagggaagagtgttgggttcgttattgaggtttgttgtgggtattggagttggaagatttgttatatttgttatatgttgttatttttgagtttttagttttaggagggtagagggtataaattatcgtgtattgtttagtttggggttgttttaggttatttaggttttatggtttgggttgattttgtttttggttttatagtgttttagatggttttacggagattttggttatggttgtggtagagtttggggatacgttgttttttttcgagttcgatagcggtttttttagtttttagtttgatgagattttttttagtattattgttttatttgttacgtttattagtgagttgttgtttttgggttcggtggacggtcgtttttgttttatggattttgtttacggtattttttttttaatttttttataagattttgtggttttaggtttaatggtagagttagtgtttcgggttttagagtttttacgagtttttttttttttattttcgtttcgttttcgtcgtcgtatttttgtttagttgttgagttgttcgttttatttgtttaagtttaagttcgaggttagttttttttagttgttggtaggggttggtatttatgggatattttttgtttttagtcgtagtttgttagagttttgtttggttgttttagttttaggtattaggatttagggttttttttaggaagttgggtttagttgggattgtcgaggggtttttagttttggtagcggttttgggttagtcggttgtttggtcggggaatttgtaggtttttataggaagaggtgtggagatttgttttcgggggttttttttagggtttagtttgagtttttattaggggtttttgtttagtataggaagttgattttggtttagttttatcgaattaggattattttgttgtttaattttacgtttattgtttcgtgagtggtttggattggggtagggtaggtggtttagggtattggtatgggggtttatttatgtttgggagtatcgtatttggggagggttatggcggagggagtttgaattttgtttagtgtttgggcgtagggggttgtggtgggtagtagtgaaggggtttgaggagtgtcgtggggaagagagggtgattagagttattttgaatggcgttagttaaagaaggattttgttttttttttattttgtagggaggtttgagtagagggaggtttttaagagtgttattgattaagagatagtagatagtttgttttttggggcgtgtcggtatttgttttagttattgttttttgtatgtatgagtcggatgttgggtaggatttttgtttacgttcgggttcgatttgcgttttgtcggattggatggagtggaggaggtttaggttatagtattattttatttgtttaggtagtttttcgttatttatttttcgaagttattagtttagttcgagtttttagggttgggtttttaggttgtttattttatttttatttttattggtttttagtgggatttatttttgttttgtttttatttttttagttttataggttatttttggtttgggttgggttttgtgaagttacgtatttattgagtttttggtttttttataaagatttgtttagattttattgggaagagttttttgttttggggtttagtgattcggggtatttgagtttagggcggtttttttgtgtttttgtgtttttttatttgttacggatgggttacggatggagtttgttatgggaagtattgggaagtaatggggtgtggggtgttattagattaatatttttagatttttttatttttagttattattagagtttttttttaggtgtttttcggggatttagggttgaatttgtttagtttttatatttaggttagtttttttgggaaggtgggttttttatgggggtttttttaggaattttttttttttttttaatatagagttttattttgttatttaggttggagtgtagtggtgtgatgtcggtttattgtaatttttgtttttcgggtttaaacgatttttttgttttagttattttagtagttggaattgtaggtgtgtattattacgtcgggttagtttttgtattttaagtagagacggtattttattatattggttaggttggtttcgaatttttgattttaagtgtttcgttcgtttttgttttttatagtgttagaattataggtttgagttattgcgtttggttttttgcggtatttttggtttaattttttttatggttggggacgcggaggtcgagagagaagttatttgttttggttttattttgaagtggtttttagggttggggcgagagtcggggtggggatcgagatgtagttttattttgtgtttttggtcgtagtaggtagtttagcgtttcgcgtgttttatttggtttgttcgttgtcgtttaatgagtttaggtttaggtcgagtagagggggtatttggtcggattcggttgggttcgggcggtttcgttttttttcgttcgttaggcgggtttttttagacggcgcggggcgggttttgcgggcgcggggttgaaggcggaattacgacgggtagagagtacggagtcgggaagtttttgggcgttcgtcggagggttatggagtagcggtcgcggggttgcgcggcggtggcggcggtgagttgagacgtaggaggttaggggtagttttgagttttgttttaagagtttcggtgaaggaaggggtttcgggcgcgtttttattttaagttttattgggggttgggttggtcgtttttttcgatttcgttaaaggtttttttagggcgtagtttttttattgagaggaaattttttttaggagggtttgggggttttaggtagagtattattagtgttttttttttaatagaaagtatgggtgggggtgggggcgttgttggatttttgttttggtggaggggaaatttgtgaggggttggtaagcgtttttttcgaagtttggtgtgtgcgcggggggaaggaagttagttttttttttatttatgggtattttttttgttcggggtttgggaagtgggttgttttgtgggtaaatgttggggtttttgaaatggaggagacgtagtagggagaggttttacgtgggtagttgcgttgagagttagtagtatttgttttttagg

SEQ ID NO: 298 - DNA, 5536 bp, Artificial Sequence
  chemically treated genomic DNA (Homo sapiens)
tttgggggataggtgttgttgatttttagcgtagttgtttacgtggggtttttttttgttgcgttttttttattttagaggttttagtatttgtttatagagtagtttattttttaggtttcgggtagaaggggtgtttatgggtggagaggaaattaattttttttttttcgcgtatatattaggtttcggagggggcgtttattagttttttataagttttttttttattagagtaggaatttagtagcgtttttatttttatttatgttttttgttgggggagggatattgataatgttttgtttggggtttttagatttttttgggaggggtttttttttagtggaagggttacgttttggaggagtttttaacgagatcggaaagggcggttaatttagtttttagtgaggtttggagtggagacgcgttcggggtttttttttttatcgaggtttttgggatagggtttaaagttgtttttagttttttgcgttttaatttatcgtcgttatcgtcgcgtagtttcgcggtcgttgttttatagtttttcgacgggcgtttaggggtttttcggtttcgtgttttttgttcgtcgtggtttcgtttttagtttcgcgttcgtagggttcgtttcgcgtcgtttagaagggttcgtttggcgggcggggggaggcggggtcgttcgagtttaatcgagttcgattaggtgttttttttgttcggtttagatttgagtttattaggcggtagcggataggttaagtagaatacgcgaagcgttgggttgtttgttgcgattaggggtataggatagagttgtatttcggtttttatttcgattttcgttttaattttgagaattattttaaggtagagttagggtaagtgatttttttttcggttttcgcgtttttagttatggaggaggttgggttaaaagtatcgtaaggggttaagcgtagtagtttaggtttgtaattttagtattatgggaggtagaggcgggcggaatatttggggttaggagttcgagattagtttgattaatatggtgaaatgtcgtttttatttaaaatataaaaattagttcggcgtggtggtgtatatttgtagttttagttattagagtggttggggtaggagaatcgtttgaattcgggaggtagaggttgtagtgagtcgatattatattattgtattttaatttaggtgatagagtgagattttgtattaaaaaaaaaaaaaaagtttttgaagggatttttatggaggatttatttttttaagagggttggtttgagtgtgggaattgggtagatttagttttgaattttcggggggtatttggggagaggttttgatggtggttgaaggtggggaagtttgggggtgttggtttggtggtattttatattttattattttttagtgttttttatggtaagttttattcgtggtttattcgtggtaagtggaggagtataggaatataaggaggtcgttttgaatttaagtgtttcgagttattgggttttaaagtaaaggattttttttagtggagtttagataagtttttataaaagaattaaaagtttaataaatacgtaattttatagaatttagtttaagttaggggtggtttgtgggattgggaaggtgggggtagggtaggagtgaattttattggaggttagtgagggtagaagtaggatgggtagtttaggagtttagttttgaagattcgagttgagttggtaatttcggggagtaggtgacgaggggttgtttgggtaggtggggtggtattgtggtttgggttttttttattttatttagttcggtaaagcgtaaatcgggttcgggcgtaggtagggattttgtttagtattcggtttatgtatataggaggtagtagttgaagtaggtgtcggtacgttttaggaggtaggttgtttgttgttttttggttaatggtatttttgggggtttttttttgtttagatttttttatagggtggggaggggatagagtttttttttggttgacgttatttagagtggttttggttatttttttttttttacggtattttttaggtttttttattgttgtttattatagttttttgcgtttagatattgggtagggtttaggtttttttcgttatgattttttttaaatgcgatgtttttaggtatgagtgggtttttatgttagtgttttgagttatttgttttattttagtttaggttatttacgaggtagtgagcgtggagttaagtagtagggtggttttgattcggtagagttgggttagggttagttttttgtgttgggtagagatttttggtgggggtttaggttggattttgggagaggttttcgagggtaggtttttatatttttttttgtgggagtttgtaggtttttcggttaggtagtcgattagtttaggatcgttgttagggttaggggtttttcggtaattttagttgggtttagttttttgaggggagttttgagttttaatatttggggttggaatagttaggtagagttttgataggttgcggttgggggtagagggtgttttatgggtgttagtttttgttagtagttggaggaggttggtttcggatttagatttgagtaggtggggcgggtagtttaatagttggataggggtgcggcggcggagacggggcgagggtggaggggaaggaattcgtggggattttggggttcgaggtattagttttgttattgggtttggggttataaagttttgtaaggaggttggggagagggtgtcgtaggtagagtttatggagtaggagcggtcgtttatcggatttaggggtagtagtttattggtgggcgtggtagatgaggtagtggtgttgagagaggttttattagattgggagttgaaaggatcgttgtcgaattcgggggaggatagcgtgtttttaggttttattataattatggttagggttttcgtggagttatttgaggtattgtggggttaggagtagagttagtttaggttatgaaatttagatggtttgaggtagttttaggttgggtaatgtacggtggtttatattttttgtttttttggggttggaggtttagagatggtagtatgtggtaggtgtggtagattttttagttttagtgtttataatagattttagtagcgagtttagtatttttttttgttaaggttggatttgttttaaggatttttagtatagtattttaggtagttattacgaatggattagggttggtagtatatggaaaggtgtttgttttttttattcggattttgggggagatagagtttcgtttttatagtgtttatgataagaggttattgggaggaagggagcgtggttgggtttttaggagttttgggttagagtatttgttttggtttgatttgttgggtggttatgagtagacgtattagtgttgagagtcggggttgtcgttgttttttcgtatgatggtaggggagttggtagttgaagtgttattgttttcgttttttttttttttttttttttttttttttttttttttttgtttatttttttttttttttaggttttgtaggggttgttgattgtttgggggtttttgtgtacgtagttgttgtagttggttttgtaggtaaggttggggtatatgggatagaatgggttgtgattagtatttttttaatttgttttgtttatttatttattattttgtatttatttgggtattgtaaatggtgtttatttagttacggtataaggtttggttattggtttggaacgtgtaggtttttatagtattgtgaaatttatttaggtagataaggaggaaggattttggttagggaaggtttaagttagtgttagtagagacgatggtttttatttattatagtttttgattaggaataggggattagggttttttattagggtttcgtagttttcggtatataattttgtttacgagtaggggtggtttgatgattttggttttttttgttttttttattgttttggttattaatagtagattcgtgaagaggaagtagtatatatttatttgtagtggtaggagggggggtggttagagaggttagtagggttagggttagggattgtggtattagttttttttgggagtattcggtttttgttaaatattttttttattatgaatttttaagtaaaattaaaatgaagaggaagatgatttttttttattgagatgtacgttgatgatttattttaatataagtttatattaaaaagaagattggtgattttgaagttatcgtgtgtaagtttttagtttgttttatgtttgaaggggttatggtatagtagtaaggttttggggtttttggtttatttgtggaatatggttgtttttttattaggaatttatgtggtattaataaatgggtataattggtgtttttaagggttaggattttattgttggatttgtgaatggtaggtagagaattgttatttattatgataaggttattggtttttgagtaattatcgaagggattgtagagttgagaattagtgattggggtttaggaggtttttaggaagggtagggtataggggtggggtggttttggaattattttgttgtttttttttttttttatttttaggtttttttttagtagtagttgtcgcgtttttttcggggaggcgttagggatgggcgttgttaagtttaggtgtagaaatttttttaggagttggggacggatggcgtgaacgtaggggaggttagagattgatttttattttagttaggtatttttagtgagatgtttagtatagtttttgtttgttagttgggttttttttttttttagtcggtaattttcgtagatatatacgtttattttgtttatttcgtcgttgttgttttttattatttcgtaggcgtcgatgcggtttattacggtcgttagtcgttgtcgtttttgtcgttgtcgtatgtacgcgtttacgtggtggatgaagcgttttacggagtcgatttaggggtaggtgagggagttttaggtttagggttatgacggagtagagagtcgcgtaggggggacggttttcgttggttattagggttattatggcgacgacggtttttttggcgcgcggtttttcggttttttttagtatcgatttgagtagtagcgggtatttggtgagtcgttggtggggtttggttagtatgtcgtttagttttagtttttggtattgtgggtgttttttcgtttattgcggtgggggagtttatttttgtttggttcggggtatttttatttttgcgtttttgcgcggtttcgggttttttttttttttgattttttttttaatattaatgtcgggtttagagggttttttagaatttgtttttttttttggggagttttttgaatgttggaggtagggggcgttggtgatatttttttttattttggagattgtg

SEQ ID NO: 299 - DNA, 6361 bp, Artificial Sequence
  chemically treated genomic DNA (Homo sapiens)
atatttttttttagaggacgttgtgattgttattttagggtttacgtttgataattttattgtggttgtttttttgggtttgttgttattgatttatatttttatggttatttttttttgtatttggacgtagtagtaattttttattggatgtggatattgtgttgtgacggttttgattatttggtatttttgttgggttgttttgggtttttttttaaaggacgttgcgttgtgttttgcgtggagtttagttttttgttttttattttggttttcgtgtggttggttttgaagttttttagagtaggtttagtttagttttttttgtaggaagagtttagttttatttttaggacgggttttgttgggtggttgtcgatagtttaggattttttaggattttttttttggcggtcggaatttttgttttttatttgtgagttttaggggtcgggggtttatagttttttagggttttatttatgttgaaagtttattttttatatgtatggcgttcgatttcggaggttttagagatttttaggtagttttttggagttttttgtttgtgtagttttttttttttcggagttttgtttgttaggtttttttgcggatgtttttttgagttttgatttttttttttttagttcgttaggattgttggatttgtttggatgttcgtttttgttcggttatttttaatgggtttttattttagggttggggtgattcgggttgaaaatagtttattttgagttttagtttcgagttttcgtggtaggagggaaattgttggttgtgttattttacggcggttggaacggacgggattagttttttttagaggggtatttcggttggttttagaatttttttttgttgtgaaagttgttaggtatattttatattggttattttttattttaaatgtgcgtttattaatgaaacgttttaataggattttttggattaaaatattgagtattgttttgtaatttgttttttagaaggtcgtgttttttcgtttgggattttgttgttttttcgtcggttatttcgtatacgtttcgttgtttttttgggtcggtttagttattttacgtttttgtgtgtgtattgagatatttattttggtacgttttttttttttagtacgtggtttttacgttgtgtttgtttagttcggagtttagaggttttcgtagttttttataattttatggtgtagtgatttgaggttttttttggtttagttttttttttagggttaggggtttatgtattgaattaagacgggaggtgttttttttttgagttttgtttttgttgaatttggaaggtagcgtttagtggcggtttagatttttagagttttttttgaggttcgatatttttttgttttttttagggagattttttggtttggtttttagttttcggtgtttcggtttttttatttggaaggtggggatgttgaaggtgtttggtttgtggttgtgtattaagttagggtgattgtgagtttttagagttcgaatgtttggaaggaagggcgcgagttgggtgcgtgtgagtgttttgattatggatatagagcgtggggttttttggagggttggaatttaggtgggggatgttcgggtggtgggatagagtggggttggaggagagggtttgaggaatgtttcggttatagatattttaagtttatgggaggttaggagttggttataaggaaggtgaggtggggaatagagttggggtttagggttttgatttggggtgagaggtgacgttattttcgaggtagaaagacggttaggggaggggaggaggtggggaaagtagacggacggggaggcggggggagtttagggttaggagtgttaggggtaggtatttgagatagaggtattttgaggttttttagtaggtaattgatattttggtttgtagcggggaggaatcggggttgggttggaggtttggggacgtttggggttgttttaatttttagtagatattttattttttgggaagttttagttgttttagattttttttataatgttttgattatttttaatttttaagtttttttttttttgtttttaagttcgaggttttggagttgttttcgttttgggttatgagagttggatatagagttttttaagttttacgggttttttgtatcgtcgtttgtttcgtttttttgttttttttttcggttttttttgtgagggttgtttatttaggtgatttcggagtcgtttttttacgtttttatttgttttgtatatcgtttattagtttgatagttgtttaaagtttttagagtatagaacgggtttggtgtttgcgttttcgtttcggggtgggttacggtcggttttgtgtttcgtttttttttcgtttattagcggtggattttagtttttttttgtagtagtatttaatttatatatttttttagagacgcgtagtttatttcgttttcgtagttttttttttattttttagagttttttatggtttgggtagtttattttgagtgttcgtattatacgattgtagacgtttggtttttggatttaaattttttattagatcgtgattaggatggtaatgattaggtttcggttttagttttttgtttggtttgtattggtatagtattgggtttggggagttttcgcgataggaggcgtggggttcggggtgtttatttgtttttttttttttgttggtaatggtgggtttcgggatgggggtagtgatattttgcgggtagtcgtgttaatgtagatggttgggtgttgggtagggtttcgtttttcgtttttttgggttgttttattttttttttgatgattttggggttttgtatagggtttggcggtgttggtgtcgggagagtttacgttgaatggatgaaggagtgagtgttgtatttagcggggggcgttgagcgttgggtggggagtttaggatatttttttttgttgttcgggaggtaatattttggatttttggagtttgtattttgtgagagcgggtaggttatagagaagggagaaaagggacggagggtcgaggcgggcggatacggggagtagggagcggggatagggtttatttagtaattagagaaggttttaaggaagaggtgatattttagtaaagatttggtattgtttgtgttttcggtggggtagatgggttttttttagtttttttgaggtttggtatttggggttttatgttaggtttggggttttggtgtgggagttgaagtcggggtaggaggggtatggaggaaggggtaggaggggttgagttttattgatgtttgtgttagttttgttttttgttatgttttagttttttttttttttagggtggggtggatgagacgattttggaggacgtatttgagagagtggggttggagtttcgtatcggtaggtgtaggcgttgtgtttgtttttggaggttgggcgtttttggggagttggtgagggaacgtgttgtttttgtattttggagtttttatgtttttttggggttttcgggagtggaggatgtaaggggtttttttttttttttttgtaagatttatatggttttgtatgtgggggatatttttggtagggggcgttgagggttaggatgtgagtgtattagggaaatagtagatggggttttttttttaggttttagttgtggggtgggagtttatgtttttgcgtgttttttgggggttttttttttattgggtgttatttggttttttattttgttttagagtattggggtttgggttcgtttattttggatgttggttaggagtgtatttgtttttggagttcgggacgtttggttttataggacggtgtcgtatattatagtcggtttaattttatttttgtttgttttttttttagggtcggtttgtagggttgtatattttttagttggggtgtaggttttcgggtttttgttatagatttttgtggttggttattttgttaatttttttgtaggtgagggtgggcgtaatttttaaggttttttttattagatgttattgagttttttaggggttagggttggattttggagggggttatttggttgaagttaggattaggaggggtagggggtagtcgaggggtagggggcggttttgggttaggcgtttggtagatgggtttgttggaggtgggggtttttggtgtgtagtaggcggtgttagagggggtgattgggatttgttttgggtaagtataggcggtgcgtgatagatttgggtttttattgattgtattacgtttagtagtaggaaggggttacgggggtattggcgtcgttacgtgggttacgaggttttatgtgatgtagggagcgaggtcgttacgagggatttattggtgtttgttttggggtttcgggattgtgggttgtttttattcggaggtttttttattattaggttttgtggggtagggaagtttagtggggtgtagggagttaggaagttggggtggggttagggtagggtttatagggagatcgggcgaggttggtagtttttttagttcgcgtagcgtttttgtagggggagtaagagttgtttttttattttttttaggggacgggtaggggtattttgggttttttttatttttttacgtagggatataggtttggtgggtttatgattgaaattggttagatcgtattttggtggttttattcggaagggaagtttattttgtttagtagaagttgagatgggaataggaaatttatagggtttttttattcggtaaaaatgttagttagcgtttcggggagtagtcgagggtttttgagtgtgtgagtgaggtggggaaatatagatggattttggggggtttttttttttataggaaattcggagtggattggaatggtgtagggggagaattcgttttttttatcgggcgttttttttatatcggttttttttttcggttttgtttggatagtttttgtttttcgtagggtttatttgtgttttttagcgtcgttttatttagtaggtttgagtttttttttgttgttagatattttttgttgtttatttttttgttgttcgggttttgaggtatagtttgttatatcgaggcggatttttttttttttttttttttttttttggtttatagtcgtagtaatggcgttgagtttttttgttggagtttattttgttagttgggttttcgagttgtcggtttgagtttgaggtatggagttttttggagattgggggttttttttttggagatttatttttaaaatcgacgttttgaggttggtgagttttcgagtttttttttcgtttgttcgtagattttagttttgattttagggttttttatagattttttttttatgtttttgttttggtcgttgttggtttcggcgtttagttcgttttttgttgtttggggttttcgggttaatttagatttttagtattgggtttattatagtggggtgagtagtagagttatagttttatttagtagatttttttttgcgtgtgttttttatttattatttcgtttacgggtagttggtgagtttttatttggtcggatgtgggtatttttgggggttgggtgtttttgggcgtttttgggcggggttttcgagtaggtgatttaatttttcggtagttttgattttggtgataggtgataagattagtgtgtagtagggggttggatttaggtgggtggggtggggatattttttatgtttatgtggtatttttgtttgtttagttattatttttattaggggttttcgattgtttattagttagtttaggaacgaggttacggtagagttatttttttcgatgtggttttgattagtttgttatttattgtttggtttgtgagtttttggggtttatttttggttgtttttgttggttttttaggggttagtaggtttaatttaggttagtaggggggtcggtaggttgtttgtttagtgggtttaatgtttttaggtgtggggtgtggggtttttggcgagggtagagttttagtttttagggtttcgcgttgttaggtagcgttattagggttggaggaggggcggtttttattttatttcgggttttagcggtcggtaaggttgttttatgagtttggtttggggttcgtttttgttttttttattaggtattgtcgtttttttttattgtatagagggagatttaggttgtggggttaagtttggtagagtttatagggtagttagggtattttttaatgtttgttttgatttttttagg

SEQ ID NO: 300 - DNA, 6361 bp, Artificial Sequence
  chemically treated genomic DNA (Homo sapiens)
tttaagggggttaggataggtattgggagatgttttggttgttttgtgggttttgttaggtttggttttatagtttgaatttttttttgtgtaatggggaggagcggtagtgtttggtagagaggatagaagcgggttttaggttaggtttatggaataattttgtcgatcgttggagttcgggatagggtggggatcgttttttttttagttttgatgacgttgtttggtagcgcggagttttgggaattggaattttgttttcgttagggattttatattttatatttgggagtattgagtttattgggtagataatttgtcggtttttttgttggtttaggttggatttgttgatttttgaagagttagtaggggtagttagggatgggttttagaggtttataagttagatagtgggtgataggttgattagggttatatcggggagggtggttttgtcgtggtttcgtttttgggttggttgatgggtagtcgggggtttttgatggggatagtggttggataggtaggagtgttatatgagtatggagagtatttttattttatttatttgggtttagttttttgttgtatattgattttattatttgttattaaggttagggttgtcggggagttgggttatttgttcgagggtttcgtttagagacgtttagagatatttagtttttagaagtgtttatattcggttaaatgggggtttattagttgttcgtggacggagtggtgagtgggggatatacgtaggaggaggtttgttgggtagggttgtggttttgttgtttattttattgtggtgagtttagtgttgggggtttgggttgattcgagagttttaggtagtaggggacgggttggacgtcggagttagtaacggttaggataggggtatggggaagagatttgtgggaggttttggggttagaattgggatttgcgagtagacggagaggaggttcgggggtttattagttttaagacgtcggttttgggggtggatttttagggaggaggtttttagtttttaggaggttttatgttttaggtttagatcggtagttcgggaatttagttagtaggatgaattttagtagaggaatttagcgttattgttgcggttgtgggttagaagagaaagagaaagagaaagagaattcgtttcggtgtgataagttgtgttttagaattcgagtagtaggagagtgggtagtagggggtgtttggtagtagagaggggtttaggtttgttgggtggagcggcgttgggggatataggtgggttttgcgggaggtaggagttgtttaggtaaagtcgaggggaagggtcggtatgaaggaggcgttcgatgggaggggcgagttttttttttgtattattttagtttatttcgggttttttgtagaagggggagttttttaaagtttatttgtgtttttttattttatttatatatttagggattttcggttgtttttcggggcgttgattgatatttttgtcgaataaaggggttttgtgggttttttgtttttattttagtttttgttgaatagggtaaatttttttttcgaataaaattattagaatgcggtttggttaattttagttatagatttattaggtttgtgtttttgcgtgagggggtgggaaaagtttagagtgtttttattcgttttttgggaggggtggaagggtagtttttgttttttttgtagagacgttgcgcggattgggaaggttgttagtttcgttcggtttttttgtggattttgttttgattttattttagttttttggttttttgtattttattgggtttttttgttttatagagtttggtggtagggagattttcggatggagatagtttatagtttcggagttttaaggtaggtattagtgagtttttcgtgacggtttcgttttttgtattatatggaatttcgtgatttacgtgacgacgttagtgttttcgtggtttttttttgttgttggacgtgatgtagttaatggaagtttaggtttgttacgtatcgtttgtgtttgtttagagtaggttttagttattttttttggtatcgtttgttgtatattaggaatttttatttttagtaagtttatttgttagacgtttggtttaggatcgttttttgtttttcgattgttttttgttttttttggttttgattttagttaggtgattttttttagggtttagttttggtttttgggggatttagtggtatttggtggaaaggattttggggattgcgtttatttttatttgtaggagagttggtagggtggttagttataggaatttgtggtaggagttcggggatttgtattttaattagaaagtgtgtagttttgtaggtcggttttggagagggagtaggtaggggtgaagttaggtcggttgtggtgtgcgatatcgttttgtggggttaagcgtttcgagttttagaggtaggtgtatttttggttagtatttagggtggacgagtttagattttaatattttgaggtagggtgggggattaggtggtatttagtggaggaaaagtttttaagagatacgtaggagtatggatttttattttatagttggagtttgggagaggagttttatttgttgtttttttggtgtatttatattttggtttttagcgttttttgttaggaatgttttttatatgtagagttatgtgggttttgtaaggaagaagaagggggttttttgtattttttattttcgggggttttaggagggtatgggggttttagggtgtagggatagtacgtttttttattaattttttaagaacgtttaatttttaagagtagatatagcgtttatatttgtcggtacggggttttaattttatttttttagatacgttttttagagtcgttttatttattttattttggggaggagggaaattgaggtatggtaagagataagattaatataggtattagtgagatttagttttttttgtttttttttttatgttttttttatttcgattttagtttttatattaaggttttaagtttgatatagggttttaggtgttaggttttaagggggttgaagggagtttatttgttttatcgagggtatagatagtgttaggtttttgttgaaatgttattttttttttgaggttttttttgattgttgagtaagttttgttttcgttttttgtttttcgtattcgttcgtttcggtttttcgtttttttttttttttttttgtggtttgttcgtttttatagaatgtagattttaggggtttagggtgttatttttcgggtagtaggaggaaatgttttgggttttttatttagcgtttagcgtttttcgttaagtatagtatttatttttttatttatttagcgtgggttttttcggtattagtatcgttaggttttgtgtaggattttagggttattaggaaggaaatgaggtagtttaaggaggcgggagacggggttttatttagtatttagttatttgtattgatacggttgttcgtaggatattattgtttttatttcggggtttattattattagtagggagagggaggtaggtgagtatttcgagttttacgttttttgtcgcggggattttttagatttaatgttgtgttagtgtaggttaggtagggggttgaggtcgaggtttggttattgttattttggttacgatttggtgaaggatttgagtttagaagttaaacgtttatagtcgtgtggtgcggatatttaggatggattgtttaggttatggggggttttgagggatgaagaggaaattgcgggggcgaggtgggttgcgcgtttttgagaaagtgtgtgagttgagtgttgttgtagagggaagttggggtttatcgttggtgagcggggaggggacgggatatagaatcggtcgtggtttatttcgagacggaggcgtagatattaggttcgttttgtgttttggaggttttgggtagttgttaggttagtggacggtgtgtagagtagatggaggcgtgaggaggcggtttcggggttatttaggtgggtagtttttataggggaggtcgagggggagggtaggagggcggagtaggcggcggtgtaggaggttcgtggaatttggagggttttgtgtttagtttttatggtttagggcgggggtagttttaaggtttcgggtttggggatagaagggagaggatttgggggttgggggtggttagagtattgtgggagggatttggggtagttggggttttttagagggtgaggtgtttgttgggaattggggtagttttaggcgtttttaggtttttagtttagtttcggttttttttcgttgtaggttagggtattaattgtttgttgggaaattttagggtgtttttgttttaagtgtttgtttttgatatttttggttttgggtttttttcgttttttcgttcgtttgttttttttattttttttttttttttggtcgtttttttgtttcggggatggcgttattttttattttaaattaggattttgggttttagttttgttttttattttattttttttgtgattaatttttgattttttatgggtttggggtgtttgtggtcggaatattttttagatttttttttttagttttattttgttttattattcgggtattttttatttgggttttagttttttaaggggttttacgttttgtgtttatgattaggatatttatacgtatttagttcgcgtttttttttttagatattcgagttttggaagtttatagttattttagtttagtgtatagttataggttaggtatttttaatatttttattttttaggtgaggaaatcgaggtatcgagagttgggggttaggttagggggtttttttggggggagtagaggagtgtcggattttagaagaggttttgggggtttgagtcgttattgggcgttgttttttaggtttagtagggatagagtttagggggaaggtatttttcgttttggtttaatatatggatttttgattttgggaaagggattgagttaggggaggttttaggttattgtattatgaagttgtggggagttgcgggggtttttgggtttcgagttgggtaggtatagcgtggggattacgtgttgaggggaagaagcgtgttagggtggatgttttagtgtatatataggaacgtgaaatggttgagtcggtttagagaggtagcggagcgtgtgcggggtggtcggcggagaagtagtaggattttaggcgggagggtacggttttttgagaggtaggttgtaggataatatttagtgttttgatttaggaggttttattagggcgttttattgataaacgtatatttgaggtggagggtggttagtgtagaatgtgtttggtagtttttatagtaaaggagaattttagaattaatcgaagtgtttttttgaagggagttggtttcgttcgttttagtcgtcgtggagtaatatagttagtagttttttttttgttacgaaagttcgagattgaaatttaggatgaattgtttttagttcgggttattttagttttggggtggaggtttattgaggatggtcgagtaggggcgggtatttaggtaggtttagtagttttggcgggttgaggagaaggaggttagggtttagggaggtattcgtagagggatttggtaggtagagtttcggaaaggagggaattgtatagatagaaagttttagaaggttgtttgagggtttttgaggttttcggagtcgggcgttatgtatgtggaaggtggatttttagtatgggtgggattttagggggttgtggattttcggtttttgggatttataggtgggagataggagtttcgatcgttagggggagagttttggaggattttgggttgtcggtagttatttagtagggttcgttttgggagtggggttggattttttttgtaggaaaggttgggttggatttgttttaagaggttttagaattagttatacgaagattaaagtgaagagtaaggagttgaattttacgtagaatatagcgtagcgttttttaaaggaaggtttaaaataatttaataaaaatgttaggtgattaaagtcgttatagtataatgtttatatttaatgagaaattgttgttacgtttagatgtagggaagagtaattatgggaatgtgggttagtagtaataggtttagaagggtagttatagtggaattgttaggcgtggattttgaaatgataattataacgttttttaaaggaaaatgt

SEQ ID NO: 301 - DNA, 6089 bp, Artificial Sequence
  chemically treated genomic DNA (Homo sapiens)
ttttatatgagattatatttgttttattttttttgatggttatagttttttattgtgaggtttttagtgacgaatagttttgttgttttaggtttttatgaatagatgtgatgttatagtaaattatattgtatttgagattttaagtatttgagtaagtatatttgttagatataatagtgttttttttttaaagagttagtaaagttttttttttttggtttttggttttttaggtatggttttttttttttttttttttttttgagatagagtttttttttgtcgtttacgttggagtgtgtagtggtatgattttagtttattgtaatttttgttttttaggtttaagtaattgttttgttttaggtttttacgtagttaggattataggtgtgcgttattatgttcggttaattttttgtatttttggtggagacggggttttattatgttggttaggttggttttaaatttttgattttaggttattcgttttttttagttttttaaagtgttgggattataggtatgagttatggcgtttggttttaggtatggtttttattggttgtttttttttttttattattttttaaatatttattatttggtttgtattagggatatatttaaaggttattaatgatttgtttttttagtgtatcgtttttgatttttttgtagaatttgattttattttttaatttaggttaaaatttttttttgtttgattgttatgggagatttttttttttttttttttttttttttttttgagatacggttttatttcgtagtttagattgtagtgtagtggcgtaattttggtttattgtaatttttgttttttaggtttaaacgatttttttgttttagttttttaagtagttgggattatgtacgttattacgtttggttaatttttgtatttttagtagagattgggttttattatgttggttagattggttttaaatttttgattttaggtgatttatttgttttagttttttaaagtgttgggattataggtgtgagttattgtatttagtttgggagataatttttgttttttttttatttttttaattatgtttgttttgttttttttgtttgttttttaaaggttagtaatttggtagaggttgagggagtggagttttttgggttagttgttttagtttttttttgttttgtttaggtagttttttttatttattttattatttggattttagaggaatttgacgttttgattaatatttaagtttaaaattttttttaggtttaagttttgtatttaaaaaaaaaagtatttttttaaatttttgtattttatttttatgattttagtatttattatggattattttaaaaatataaaaagaggttaggcgtagtggtttacgtttataattttagtattttgggaggtcgaggcgggcgaattatttgaggttaggagttcgagattagtttggttaatatattgaaatttcgtttttattaaaaatataaaaattagttaggtttggaggtacgtatttgtaattttagttattagggaggttgaggtaagagaatggtttgaatttgggagacggaggttgtagtgagttgaaattttgttattatattttagtttgggtgatagagtgagattttgtttaaaaaaaaaaaaaaaaaaggtatgagtagttgtataatatgttttatttgttttttgggtggatataaataaaataggtagggtttgaatagatagatataaatagaggttttatttggaaagatagaagattgatagtggttgggtattgtggtttatatatgtaattttagtattttgggaggttgaggtaggaagattatttgagtttaggagtttaagattagtttgggtaatatgatgaaattttatttttataaaaaatataaaaattagttgggtatggtggtatgtgcgtagttttagttatttaggaggttgaggtgggaggatcgtttaagtttagaaggtggaggttgtagtgagttttgatggtgttattgtattttagtttgggtaatagagtaatattttgttttaaaaaaaaaaaaaaaaaaaaaggttgggtgcggtggtttgtatttgtaattttagtattttgggaggtcgaggcgggtcgattacgaggtgaggggattgagattattttgtttaatatggtgaaattttgtttttattaaaaatataaatattagttgggtatggtggcgtatgtttgtaatttcggattatgaggttaggagatcgagattattttggttaagatggtgaaattttatttttattaaaaatataaaaataaaattagttagatatggtggtgggtgtttgtagttttagttattttggaggttgaggtaggagaatggtatgaatttgggagtcggagtttgtagtgagttgagatagcgtttttgtattttagtttgggtgatagagtaagattttgttttaaaaaaaaaaaaaaaaaattaaaaaaaaagaggaagattgatagtaattattgtttttggtaagagagaggaaatttagggtaggaaaaagatttattttttattgaaaaatttttggtattgtttgaatatttattttttaataatatgaattttaaaaataagaattattagtggttgggcgcggtggtttatatttgtaattttagtattttgggaggttaaggtaggtggattacgaggttaggagattgagattattttgtttaatatggtgaaattttgtttgtattaaaaatataaatatttgttgggtatgatggcgtatgtttgtaattttagttatttcggaagttgaggtaggagaattatttgaattcgggaggtagaggttgtagatcgtattattgtattttagtttggtaatagagggagattttattttaaaataaataaataaataaataaataaataaataaaaaattatttaggttaggtggtttatgtttgtaattttagtagtttgagaggttaaggtcggtgggttatttgaggttaggagttcgaaattagtttgattaatacggtgaaatttcgtttttattaaaaatataaaaattagttaggcgtggtggtatgtatttgttattttagttatttaggaggttgaggttagagaatcgtttgaatttgggaggtggaggttgtagtgagtcgagatcgcgttattgtattttagtttgggtaataatagtgaaattttagtttaaaaaaaaaaaaaaaaagaataagtttttaaaggttggggtgtttggaggatgaaataaagtagaagggatggtaggtttttttggtatattttttgggttttaagaaagtgtaaagaataagaaaaatataataaaaggaaaataataaatattaatgtatttattatttagtttaataaagaaaatataataaatataggtgaagttttttttgtgtttttttttttttttattatttattttagagataattattatattgaattaggagtttgttatttttttaaattttaattgagttttgtatttttgataaatatttggacgtttttatatgggtattttatttagtatggttaaaagtaaatttaagttgggtttagtggtttatatttgtaattttagcgttttgggaggtcgaggtgggtggattatttgattttaagtgtttgagagtaatttgggtaatacggtaaaaatttatttttataaaaaatataaaatttattaggcgtgttggcgtatgtttgtagttttagttatttggaaggttgaggtgggtagattatttgaatttaggaggtggaggttgtagtgagttgtgattgtgttattgtatttagtttgggagatagagtgagattttgttaaaaaaaaaaaaaaaggtaaatttaagtgatttatttatgtaaatagaaaaatgtattatataaatgtatttatttagaatttagggatcggtgaaataaaagatatcgtatcggtaggtttgtttgtaatttttgggatatattaggtgttagcggtgatgatttttggatgtttggattgtggatttttaaaatggttttatttgtttatttgtatttttaaatttttaataatggaatatagattattgtattattattataatattttaaatttattttttttttagttttttttttacgagtttttattttaaatgtttttttttttgttagtggtattgtgcgttttttttagtgtattatttttgatttttttgtagaattttttttttttttgagatagagttttgttttgttatttaggttggagcgtagtggtttgattttggtttattgtaaatttcgttttttgggtttaagtacgtttttttgttttagttttttgagtagttgggattataggtgtttgttattatgtttgattaatttttgtatttttagtagagacggggttttattatgttggttaggttgttttggaatttttgattttaagtgatttatttgtttcggttttttaaagtgttgggattataggagagcgttacggcgtttagtttatattagattattttttaaaatgtttttgtaaagttagggtttcgttatgttgtttaggttgattttgaatttttgggtttaagtaatttttttgttttttgatttttaaagttttgggattataggtgtgaatttttgtagttggttttaatgttaagattttaaggggtatagtatagattttgttttgtttatttttttggtattttttatagagtatagtttattaatagatgttttagaaattgttattgaatattcggtttgatgttgtgggtttgtttgtattttgtaattgttatttggttgagaaattttttttataaataagtagtttttgttttagatgtgatatgttttgatatttatattttgttttttattttatttaagatttaaatttagaaatttgaattagatgtggtatttaaatttttagttgtcgcgaagatatagatagttttcgtaagaatttacgaagtaggcgaagtttattgtttttaatattttagttgtttttgttgtatttgttttggaatttttgtagagatattatttgtttttttaggttgttttttttgtagtttttttgttttttttttgtgattatgttgtagatggttgggtagtgtttttaaaatgaatattttgatagtttgttgtatgtttgtatattttgttaatttcgatgtttttttaatattttttttttaatatgttagcgttattgtaatgtaagtaagtaatattgtttgaacgattatttattggtgtgaattattttgtttatatggattgtttatttagagaattaatataatgggtatgatggtgagtttttttgaattaaaaagagaaaggaagtaaggtagtgattttaatgtttatggaaataaagtaattatttggaattgaatttgatatgatttagtattattagtaatatagattttttttaaaaattagtttttttaattaagtgatatttagaatttaaaagttaatgtttattaattaaggtgattgaatggaaataatttatatttgattattttgttattaaaataatttataatttattattttagtaaaataattaagtatgatagtcgggtgcggtggatggtttatatttgtaattttagtattttgggaggtcgaggtgggtgaattatttgaggtcggtagtttgaggttagtttggttaatttggtgaaattttgtttttattaaaaatataaaaaattagttgggtatggtggtataggtttgtaattttagttattcgggaggttgaggtaggagaattgtttgaatttgggaggtggaggttgtagtgagtcgagatcgcgttattgtattttagtttgggtaatagagtaagattttgttttaaaataaataaataaataataataataaagtatgtgaatattatgttattagtttattatttgtttgatgttttttttataaagg

SEQ ID NO: 302 - DNA, 6089 bp, Artificial Sequence
  chemically treated genomic DNA (Homo sapiens)
tttttatgaaaagaatattagatagataatgagttgataatataatatttatatattttattgttattatttatttatttattttgagataaagttttgttttgttgtttaggttagagtgtagtggcgcgatttcggtttattgtaatttttattttttaagtttaaataatttttttgttttagtttttcgagtagttgggattatagatttgtgttattatgtttagttaattttttgtatttttagtagagatagggttttattaggttggttaggttggttttaaattgtcgattttaggtgatttatttatttcggttttttaaagtgttgggattataggtgtgagttatttatcgtattcggttgttatatttgattattttgttaaaataatgaattatggattgttttgatagtaaaataattaagtatggattatttttatttaattattttaattaatgaatattgatttttaaattttaaatattatttaattagaagagttgatttttaaaaaaaatttatgttgttaatagtgttgaattatattaagtttagttttaaataattattttgtttttataaatattaaaattattgttttgttttttttttttttttgatttaagaaaatttattattatgtttattatgttgattttttgaataagtagtttatatagatagaatagtttatattaatgaataatcgtttaagtaatattatttatttgtattataataacgttgatatgttagaggaggagtattagaagaatatcgaagttgataaggtatgtaagtatgtaataaattgttaaaatatttattttgggagtattgtttagttatttgtaatatgattataaaaagaaaataagggagttatagaaagaatagtttggaaggataagtaatatttttataagaattttagagtaaatgtagtaagagtagttagaatgttgagaataatgaatttcgtttgtttcgtgggtttttacgggggttgtttgtgttttcgcggtagttaaggatttgaatattatatttaatttaagtttttaagtttgagttttggatggggtaagagatagggtgtaaatattagggtatattatatttgaaatagaaattgtttatttatagaagaaattttttagttaggtgatagttgtaagatgtagataagtttatagtattaagtcgaatgtttagtaatagtttttggaatatttgttaataagttgtattttgtgagaggtgttagggagatagataagataaggtttgtgttgtgttttttaagattttaatattgaggttagttgtaggggtttatatttgtaattttaggattttgggagttaaaaggtaaaaggattgtttgagtttaggagtttaaaattagtttgggtaatatggcgaaattttgattttataaaaatattttaaaaagtagtttggtgtaagttgggcgtcgtggcgtttttttgtaattttagtattttgggaggtcgaggtaggtggattatttgaggttaggagttttagaatagtttggttaatatggtgaaatttcgtttttattaaaaatataaaaattagttaggtatggtggtaggtatttatgattttagttatttaggaggttgaggtagggagacgtgtttgaatttaggaggcggagtttgtagtaagttaagattaggttattgcgttttagtttgggtgataaagtaagattttattttaaaaaaaaaaaaaattttataggaagattagaggtgatgtattaaggaagacgtataatgttattgatagaaaaagagatatttagggtaagagttcgtggaaagagggttgagaggaagataggtttggggtattataataataatataataatttatgttttattgttgaaaatttagaaatatagatgagtagataaaattattttaaaaatttatagtttaagtatttagaagttattatcgttaatatttggtgtattttagaagttgtaaatagatttgtcgatgcgatgttttttgttttatcgatttttgaattttagatagatatatttatatagtgtatttttttgtttatataaatggattatttgaatttgtttttttttttttttttgatagagttttattttgttttttaggttgagtgtagtgatataattatagtttattgtagtttttattttttgggtttaggtgatttgtttattttagttttttaagtagttgggattatagatatgcgttagtacgtttggtaagttttgtattttttgtagagatgggtttttgtcgtgttgtttaggttgtttttaaatatttggggttaagtgatttatttatttcggttttttaaagcgttgggattataggtgtgagttattaagtttagtttgaatttgtttttaattatattgagtgaaatatttatatagagacgtttagatgtttgttaaaaatgtaggatttaattaaaatttgaggaaatggtaaatttttaatttagtatagtgattatttttgaggtaagtggtggggaagaaggggagtataaaaaaggttttatttgtgtttattatattttttttattaagttgagtggtggatatattgatatttgttgttttttttttgttgtattttttttattttttatatttttttaaggtttaaggagtgtgttaaggaaatttgttattttttttattttattttattttttaagtattttaatttttaaaaatttattttttttttttttttttttgagttggagttttattgttattgtttaggttggagtgtaatggcgcgatttcggtttattgtaatttttattttttaggtttaagcgattttttggttttagttttttgagtagttgggatgataggtgtatgttattacgtttggttagtttttgtatttttggtagagacggggttttatcgtgttggttaggttggtttcgaatttttgattttaggtgatttatcggttttggttttttaaattgttgggattataggtatgagttatttagtttggatgattttttatttatttgtttgtttgtttgtttgtttgttttgagatggagtttttttttgttgttaggttggggtatagtagtgcgatttgtaatttttgtttttcgggtttaagtgatttttttgttttagttttcggaatagttgggattataggtatgcgttattatgtttagtaaatatttgtatttttagtatagataggattttattatattgggtagaatggttttagttttttgatttcgtgatttatttgttttggttttttaaagtgttgagattataggtgtgagttatcgcgtttagttattgataatttttgtttttaaaatttatattattaaaaaataagtatttaaatagtgttaaagattttttaatgaaaagtaagttttttttttattttggatttttttttttttgttagaggtagtaattattgttagtttttttttttttttttggttttttttttttttttttgagatagaattttgttttgttatttaggttggagtgtaggggcgttattttagtttattgtaagtttcgatttttaggtttatgttatttttttgttttagtttttagagtagttgggattataggtatttattattatgtttggttaattttgtttttgtatttttagtagagatggggttttattattttagttaggatggtttcgattttttgattttatgattcgggattataggtatgcgttattatgtttagttaatatttgtatttttagtagagatagggttttattatgttgggtagaatggttttaatttttttatttcgtgatcgattcgtttcggttttttaaagtgttgggattataggtgtaagttatcgtatttagtttttttttttttttttttttttaagatagggtgttgttttattgtttaggttggagtgtagtggtattattagggtttattgtagtttttattttttgggtttaagcgatttttttattttagttttttgagtagttaggattacgtatatgttattatgtttagttaatttttgtattttttgtagagatgagattttattatgttgtttaggttggttttgaatttttgggtttaagtgatttttttgttttagttttttaaagtattgagattatatgtgtaagttatagtgtttagttattgttagttttttgtttttttaaatagagtttttgtttatgtttgtttatttagattttatttattttatttgtatttatttaggaggtagatagagtatattatataattgtttatattttttttttttttttttttaaatagggttttattttgttatttaggttggagtgtggtggtaaaattttagtttattgtaattttcgttttttaggtttaagttatttttttgttttagtttttttagtagttgggattataggtgcgtgtttttaggtttggttaatttttgtatttttagtagagacggggttttagtatgttggttaggttggtttcgaatttttgattttaagtgattcgttcgtttcggttttttaaagtgttaggattataggcgtgagttattgcgtttggtttttttttgtatttttaaagtagtttataataaatgttaaaattatgaaaataaaatgtagaaatttaaaaaaatatttttttttttaaatgtaggatttgagtttaggaaagattttgaatttagatattgattaaaacgttaaatttttttggggtttaggtggtgaggtaagtgggagaggttgtttaggtaggatagggagaagttgaagtagttggtttaggaggttttatttttttagtttttgttagattgttgatttttggaagataggtaaaggagataggataaatatgattagagaaatagggagagaataaaaattattttttaggttgggtgtagtggtttatatttgtaattttagtattttgggaggttgaagtaggtggattatttgaagttaggagtttgaggttaatttggttaatatggtgaaatttagtttttattaaaaatataaaaattagttaagcgtggtggcgtgtataattttagttatttgggaggttgaggtaggaggatcgtttgaatttgggaggtagaggttgtagtgagttaagattgcgttattgtattgtagtttgggttacggagtgagatcgtgttttaaaaaaaaaaaagaaaagaaagaaaaaaaaattttttataatagttaagtaaggagagattttagtttgagttagggagtggagttaaattttataggaagattaggggcgatgtattaaagaagtaggttattgatggtttttgagtgtgtttttgatgtaagttagatggtagatatttaaggagtggtgaggaagaggaggtagttaataggagttatgtttgaggttaggcgttatggtttatgtttgtaattttagtattttgggaggttgaggagggcggataatttgaggttaggagtttgagattagtttggttaatatggtgaaatttcgtttttattaaaaatataaaaaattagtcgggtatggtggcgtatatttgtaattttagttacgtgggagtttgaggtagggtaattgtttgaatttgggaggtagaggttgtagtgagttgagattatgttattgtatattttagcgtgggcgatagagggagattttgttttaaaaaaaaaaaaaaaaaaagggaattatatttgggaagttagaagttaggggaagaaagttttgttaattttttggaaagaaaatattattgtgtttgatagatatatttgtttaggtatttaaaattttaggtataatgtagtttattgtgatattatatttatttataagagtttagagtaatagaattgttcgttattgggagttttataatggaagattatggttattagaaagaatgagatagatgtggttttatatgaaa

SEQ ID NO: 303 - DNA, 6080 bp, Artificial Sequence
  chemically treated genomic DNA (Homo sapiens)
ttttggttaagatttgatttgggtttattaaggtggacgttgggtttcgttaggttggagttcggagggtttgttgggcgagtagggtaggtgtaggtcgtttgtttcgttacgtttttgggttaattttgtatcgttttaggtgtcgatggttgttttcggttttttgtttacgtatgttatgtatattttttgtttcgcgggattataataaaaattttggtagacgggagttttcgatcggtattgtgggttgtatatttgtggtatggaggtttgggtcgtgttcgtttttgattggagaggggttttgggaggtttgggtcgtgttcgtttttggttggataggggttttgggaggtttgggtcgtgttcgtttttggttggagaggggttttgggagatttgggtcgtgttaatttgtggttggaaaggggttttgggagatttgggtcgtgttaatttgtggttggagaggggttttgggagatttgggttgtgttaatttgtggttggagaggggttttgggttagggtggaggtgagggtagcggggttaagtgggattttggaggttggtttttgggtgcgagttttagattgagtggggagcggggggagagattgggaaagtttaggtttaaggttgtttggggtggaggtttttggttaggcgttgataagggtagttggtttttgagtttcgggttgtttaaggagtttgggagtggttgattttcggggttttgtgtttttggaggaggagtgtagagatttgtttttttttttttttatatttacgtttattttttgttgtatttggaagggggttttagggtttttgagtatttcgaggagtttttgtaaagggtttatacggtttttatgtttttgttataggtgtttagggggatagttattttggaaattatagtttttgtttgagttaattttttgtttattttgggtttcggtcgttttatttttgcgtatttaagagttttgggatttgaatgagaatgattatagcgattttatgtaacgtggttttatagtggagaaatttaggtattcgttagtagcgtggatgcgcgagtgttggcgtgtttagatgagtttttagtttttcggtttatattataggtgtttatagacgtttttaaggttttggggtcgttttcggtcgtgcgggaatttttttaagttggtgtttgggagtggggtatttttcgagtagtatagagtttgttttcgagcgttagttacgttcgaggttatagttcgggaataaggcgggagtagttttgtaggtttttcgtagggaagatatttcgggcgtttaagcgatatttgtgtttttcgggaggcggaggtgtttgttcgtttttatggtgttaggggttgaagagaaatattttcgagggttaagacgttttattgtatttgttttttttttttttttttttttttgtcggagttttgttgtgttatttaggttggagtgtagtggtgtgattttagtttattaatttttgtttttcgggtttacgttatttttttgttttagttttttaagtagttgggattataggcgtttagtattatattcggttaatttttgtattttattagagatagggttttattatgttggttaagttggttttgaatttttgattttaggtgatttatttgtttcggtgttttggagtattgcgattttaggtgtgagttattacgtttggtttttattgtatttatgagtaagaaatatatagtcgaggtcggttacggtggtttacgtttagaattttagtattttgggaggttgaggttagacgatcgtttgagtttaggagtttgagattcgtttgggtaatatggtaagatttttttttatgaaaaatagaaaaaattagtcgggtgtggtggtgtatgtttgtggtttcggttatttgggaggtcgaggtgggaggattatttgagtttaagagatggaggttgtagtgagacgtgattggaaaaaaaaaaagaaatttaaaaaattatttaagaagaaatatatgaagttttatggaaggttttgttgagggtttggtatagtttggatatttcggttatcgtggttggtgtggtttagtttcgtagttgtattcgttgttttatatagcgtttttgggttagttttttttttttttgcgttttttaatagcgtacgttgtttacggttgtttaggttttttgtgtttggcggatggtttttttttgtcggtgtcgtggaagtggggaatcggtttcgggggtgtatagtgggagcgttacgcgttatttataatagtttaaggtgtcgggattataggtggttgtaaggaagacgtttatttttggtttcgggttgttttggattttttttgtttttgtagttggtttttttttttgggtttttttttttttaaatttttgttttttatttattttttgttaattataagttttttttttcgtagtatagggaagttagaggtcgttttgttttttatttagtatttttatcgagtttttcgggtttttgtatacggtttagtttgtaggttttgtatagggttggggtcgcgtttttgagagtttttcgtttttcgtttcgtggggtaggcgaggttagatttttaggtaggatggcgggtgggtgggggaaggggttaggtggtcgggattggagcggttagattttgtggggttcgtaggtcgacggttatgggaaaggggttttttttttaaatttggcgtttatatttatcgttttttgtttttttttttttgggtatagtattttttaggtttcgtgggatttattttttagtaggattttttgtcgtatttttagatggatacggggttatttttttttggtttttatgtttatttttttcgttttttcgtttgacgttatttttgttggtaatttttgtgttatttgtgtcgaaggttttgtttgaattttggtttagtgtttatttgtatttttttcgtggggttttatagttgtttttttggacgtacgtaagggttgtttttcgttcggttcgtgggttgttttgttgtgtgaatgtttcgttatttgtgttatcggtgagttgtttaataagatgaataagttatttttagtttcgtagtttaaggataggagttacggggagtcggggaggggttttttgcggcgagagggatgggagggtggacgttatatttttgtagttttttcggggattattttgtgtggtaagttgtttttcggttgtttaaagtgttagttgcgttacggggcgggggggaggggtttttttgttcgttggtcgttttttatttggttttataaattgttcgtttttttaattttgtttttgtttttagatggatgatttatatcgtgtggtttgatgagtattttttattttttgtgatggagtttcgttttgttatttaggttggagtgtaatggtgttattttggttcgtcgtaatttttgttttttaggtttaagtaatttttttgttttagtttttcgagtagttgggattataggcgtgcgttattacgtttggttaattttttttgtatttttagtagagacgggttttttttatgtgggttaggttggtttcgaatttttgattttaggtgattcgaggtttatttcggttttttaaaatgttgggattacgggcgtgagttattgatggcgtttttttttatttaggggtttagatttttttttagtttcggggttgaagatttttaggttttttaaaggtttttaggtttagttggttttattttttttttttcgagcgtcgggggcggtttggagttgtagagattttttttttttttgtagtgtttgagggttgtttttttaaggtaggtttttatattttggatttgagaatttcggggtgttataaatagttaatttttgttatttattttggaaaaggaggaatcgttttacggggtgaggcggtggttgtaggttttaaaagggtgttgaattatatttacgtttacgttttcgagagtttttatttttagtatttatgggggtttttatttgtgttggacggcgtagaagtagggttgggtaatttagggaggttttttggtggaggtagggttttagaatttttcggtgtttataggggaaattgaggtttagaaagatataggatagttttttaagagttttgcgaggggtttttttttaatttttttcgggatttggatttgtttggtgtgacggatgaaggtggttttgagagatcgggttttgggtgttcgcgggggcggttgatattgtttcgaggaggcgttagtattttttcgtttttttattagttttttttggtgttttttttaagtttcggggaattttttaggttggtttgaggggggttttggagagttgtaagtaagggggaggggagtttataggtttgtagtttatggtgagttttatatttgaagttagttaggtggggtgtgttgagtcgaggggtttttgtttttattttgtggggttttttagtacggggttttatggttgaggttttttgggggtggttagaatttgtggagatttttcggggattcgtagatattattcggaggtagtgggatggaggagtgattggttgattttcgttttttaaggggtttttatgggataaggtgttataaacgtcgttttttgtattggggatattaatgtggtcgtagattttgtatagaaaatttttttgattttcgttagtttggttttttcgtttttgtcggcgatttgcgggggatcgggttgtgttcgtagtgtttatattttttttttatacgtattttatttgggtcgggatttttaggttatgaacggttttagttattttcgggtagggcgggtgaggacggggacggggcgtgtttaattggttgtgggtttttgaaattcgagtatggtatagtacggggcgatgggcgcgtttcgggttttgtgcggtttggcgttgttgtgcgcgtttagtttgggttagcgttttatcgggggtttcgggtgcggttttgggcgttttttgtttgggacgggaacggacgcgcgttgttgtcgggtttatacgacgcgttgttgtcgcgattattcgggtaagtaaatcgcgtttatttaacgcggatcggttaaggcgtttcgcggaagtcgggatgggtgggcgttttttttttcgtgtttagatcggcgttgttgaggtttaaggagggtgggtatagagtcgttagtagcgggagtttttcggagggaggtaggattttagagggaggcggaggtgtgttagttttagttagtggtttcggtcgggagtaggggtgagttaggtgggagcgtttttaagaggggtttggggtttggaggtggaggacggttgttttaggttttgttgggcgggtcgtgagtttttggttatcgtttagtttttttttgtttagttgagggtttttttgtattatcgtttggtttgttgtttgtttttgatttgtatttggggatgagggtttagttgatacggttggtttggagaggaagttggtagggaagttattttagagtttttttttttagggtttgtgggttgggaagggaggttttgttcggaggtttagtgtggttggtggtggggatagtagcgtttagatattaggtaggcggtttttgaggtgtcgacgggtttttaggggattgtgtattgttgggggttatttttgggttttgtaggggtagtttttggttgtatatggagttagtatttgggtaggggtagttgtggggcgtaaagggggagtagttaggttatatggttttaggagaaagagatagttggataaatttagggtttagatttttagttaggagttttttgttttttggagttaattgtgggtggagaacggataattttatttttttggagggtcgaggggaggtttggggaggagggggttttagtttagttgttggggggttggtttgttttttgtttagg

SEQ ID NO: 304 - DNA, 6080 bp, Artificial Sequence
  chemically treated genomic DNA (Homo sapiens)
tttgggtaggagataggttagttttttagtagttgggttgaggtttttttttttttaggttttttttcggttttttaggggagtgaggttgttcgttttttatttatagttggttttagggagtagagggtttttggttgggagtttggattttgggtttatttagttgttttttttttttggggttatgtggtttggttattttttttttgcgttttatagttgtttttgtttaggtgttaattttatatgtaattaggagttgtttttgtaggatttaggggtggtttttaatagtgtatagttttttggaggttcgtcgatattttagaggtcgtttgtttggtgtttgggcgttgttgtttttattattagttatattgggttttcggatagagtttttttttttaatttataggttttggaggaagaagttttggggtgatttttttgttagttttttttttagattagtcgtgttagttgaatttttatttttaggtgtaggttagaggtaggtagtaggttagacggtggtgtaggggggtttttaattgggtaggagggggttgggcgatggttaagggtttacgattcgtttagtaggatttggaatagtcgttttttatttttagattttagattttttttgagggcgtttttatttggtttatttttgttttcggtcggggttattggttggagttggtatattttcgtttttttttgggattttgttttttttcggaaggttttcgttgttggcggttttgtgtttattttttttagattttagtaacgtcggtttgagtacgggaaggggggcgtttatttatttcggttttcgcgggacgttttggtcggttcgcgttaagtaaacgcggtttatttattcgggtaatcgcggtagtagcgcgtcgtgtgaattcggtagtagcgcgcgttcgttttcgttttaagtaggaggcgtttagggtcgtattcgggattttcggtggggcgttgatttaggttgagcgcgtatagtagcgttaggtcgtatagggttcgaaacgcgtttatcgtttcgtgttgtgttatgttcgggttttaagagtttatagttagttggatacgtttcgttttcgtttttattcgttttgttcggaggtggttgggatcgtttatgatttgagaatttcgatttaggtgaagtgcgtgtgaggagggggtgtagatattgcggatatagttcggtttttcgtaggtcgtcggtaggggcggggaaattaggttggcggggattagaaaggttttttatgtaaagtttgcggttatattggtgtttttagtgtagggggcggcgtttatagtattttgttttatgggggttttttggagggcgggggttagttaattatttttttattttattgttttcgggtggtatttgcgagttttcgagaggtttttataaattttggttatttttagagagttttaattatggagtttcgtgttggggaattttatagaatggggatagggatttttcggtttagtatattttatttggttggttttaggtgtgaaatttattatgggttgtaggtttgtgggttttttttttttttgtttgtagttttttaggattttttttaggttaatttgggaagtttttcggggtttgggaggggtattaggaggagttggtggggagacgagagggtgttggcgttttttcgggatagtgttagtcgttttcgcgggtatttagggttcggttttttagagttatttttattcgttatattagatagatttaggtttcggagggagttgaggaggagtttttcgtagagtttttgggagattgttttatgtttttttgagttttagttttttttgtgggtatcgaggggttttgggattttgtttttattaggaagtttttttggattgtttagttttgtttttgcgtcgtttagtataggtggagatttttatgaatgttgggggtgggggttttcgggaacgtgagcgtggatgtggtttaatatttttttgagatttgtagttatcgttttatttcgtaaggcggtttttttttttttaaggtaaatgataggaattagttgtttgtgatatttcggagtttttaaatttaagatgtaggagtttgttttggagaggtagtttttagatattgtagagaaggaaggggtttttgtagttttaggtcgttttcgacgttcggaaggaaaggggtggggttagttgggtttgggggtttttgagaggtttggagatttttagtttcgaggttgggagggggtttgggtttttggatagaaagaggcgttattagtggtttacgttcgtaattttagtattttgggaggtcgaggtgggtttcggattatttgaggttaggggttcgagattagtttgatttatatggagaaagttcgtttttattaaaaatataaaaaaaattagttaggcgtggtggcgtacgtttgtaattttagttattcgggaggttgaggtaggagaattgtttgaatttgggaggtagaggttgcggcgaattaagatggtattattgtattttagtttgggtgatagagcgagattttattataaaaaataaagaatgtttattagattatacggtgtgagttatttatttagaggtagggatagagttagaggagcgagtagtttatggggttaagtgggaggcggttagcgggtagaggagtttttttttttcgtttcgtggcgtagttgatattttgaatagtcggagagtagtttgttatatagggtggttttcggaggggttgtaggggtgtgacgtttatttttttatttttttcgtcgtagaaggttttttttcggtttttcgtgatttttatttttgggttgcgaggttggaggtgatttgtttattttattgagtagtttatcggtgatataaatgacggggtatttatatagtagagtagtttacgggtcgggcgagggatagtttttgcgtacgtttagaagggtagttgtgaggttttacggggagggtgtagatgggtattgagttagagtttaggtagggttttcggtatagatggtataggagttgttagtagagatggcgttaggcgagggggcggggagggtgagtatggagattaagaggaggtggtttcgtgtttatttgggggtgcggtaaggggttttgttggggaataagttttacggggtttggggggtgttgtgtttagaggggaggagataggaagcgatgggtatgggcgttaggtttggggaggaggttttttttttatagtcgtcgatttgcgggttttataggatttggtcgttttagtttcggttatttgatttttttttttatttattcgttattttgtttggaggtttggtttcgtttgttttacggggcggggggcggggggtttttagaggcgcggttttaattttgtgtagggtttgtaggttgaatcgtgtgtaggaattcggggaattcggtgaaggtgttggatgggggataggacggtttttgatttttttatgttgcggggggggaggtttgtggttagtagagagtgggtggaagatagaggtttgaggagagagagatttaggggagaaaattagttgtagaggtaggaggggtttagggtagttcgaggttagagatgggcgttttttttatagttatttgtggtttcggtattttgggttgttgtgagtggcgcgtggcgtttttattgtgtattttcggggtcggttttttatttttacgatatcggtaggggggagttattcgttaggtataggaggtttggatagtcgtgggtagcgtgcgttgttggaggacgtagggagagggaaggttggtttagggacgttgtgtggggtagcgggtgtagttgcggggttgggttatattagttacggtagtcggagtgtttaggttgtgttaggtttttagtaaaattttttatgaggttttatgtgtttttttttaagtaattttttaaatttttttttttttttttagttacgttttattgtagtttttattttttgggtttaagtgatttttttatttcggttttttaagtagtcgggattataggtatgtattattatattcggttgattttttttattttttatagaaaagggttttgttatgttatttaggcgggttttaaatttttgagtttagacgatcgtttggttttagttttttaaagtgttaggattttaggcgtgagttatcgtgatcggtttcggttgtgtgttttttgtttatgagtgtagtgagggttaggcgtggtggtttatatttggaatcgtagtattttagggtatcgaggtaggtggattatttgaggttaggagtttaagattagtttagttaatatggtgaaattttgtttttaataaaatataaaaattagtcgggtgtggtgttgggcgtttgtagttttagttatttgggaggttgaggtaggagaatggcgtgaattcgggaggtagaggttggtgagttgagattatattattgtattttagtttgggtgatatagtaagatttcggtaaaaaaaaaaaaagaaagaaaaaataagtgtagtgagacgttttagttttcgggagtgtttttttttagtttttgatattatggaggcgaataggtattttcgtttttcgagggatatagatgtcgtttagacgttcggggtgttttttttgcgggaagtttgtagggttgttttcgttttgttttcgagttgtggtttcgggcgtgattggcgttcgggagtaggttttgtgttgttcgaaggatattttatttttagatattagtttgagaagattttcgtacggtcggggacggttttagggttttgggagcgtttgtggatatttgtggtgtgggtcgaggagttgggagtttatttgaatacgttagtattcgcgtatttacgttgttggcggatgtttgggtttttttattgtggggttacgttatatgaagtcgttgtggttatttttatttagattttaggatttttaagtgcgtaggagtgggacggtcggggtttagggtggatagaaagttggtttaagtagaaattgtggtttttaaggtgattgtttttttggatatttatggtagggatataggggtcgtgtgggttttttgtagggatttttcggggtgtttaggggttttgggatttttttttaggtgtagtaaggggtgggcgtaggtgtggaggggaagaggggtaggtttttatattttttttttaaggatatagagtttcgggggttagttatttttaagttttttgggtaattcggggtttaggggttagttgtttttgttagcgtttggttaggaatttttattttaggtagttttgggtttgagtttttttagttttttttttcgttttttatttaatttggaattcgtatttagggattaatttttagggttttatttgatttcgttatttttatttttattttggtttaagatttttttttagttataggttggtatagtttaagttttttaagatttttttttagttataggttggtacggtttaagttttttaagatttttttttagttataggttggtacggtttaagttttttaagatttttttttagttagaggcgggtacggtttaagttttttaagatttttgtttagttagaggcgggtacggtttaagttttttaagatttttttttagttagaggcgggtacggtttaagtttttatgttataggtgtgtagtttatagtgtcggtcggagattttcgtttgttaaggtttttattgtggtttcgcggggtaggaggtatgtatggtatacgtaagtagagagtcggaggtagttatcggtatttagaacggtgtagagttggtttaggagcgtggcggggtaggcggtttgtatttgttttgttcgtttagtagatttttcgggttttagtttggcggggtttagcgtttattttggtgggtttaggttagattttggttaggg

SEQ ID NO: 305 - DNA, 6167 bp, Artificial Sequence
  chemically treated genomic DNA (Homo sapiens)
tttgttcgtgattttaggatatgagttattaaggggttggttcggtatatttagggcgttgagataagtaggattgaaggataagaaaaggttatttgttttggttgtgggttagttttaagtagggaaggagtagggttttcgttgtttaagtaattttgtaagatagatttttattgggattttgaggttaggttagaaggagttggttttgtggttggttttgaaagtttattttaaaaagaatattgtatggagatttttttatggtggaaagagttttttttagtataattatagtttagttttttaaattgtttttagttatatatagtatttgttgtattttaattttttgtacggttttttagtaggtgttttttagttattgaggagtttattaaaaagttagatattaggtttttaatagatatgggcgtggggtttaggattttgtatgttttataagttttttagatgatttttatgttggttgaagttggaaagttatttttttaaaagatttattagaatgttcggtatatagtaggtgtttaataattgttagtggatagatcggttgttttcgtatacgtggtttgttcgtggttttgtttttttttattttcgtttgtaggagtgtagttatttatttattggggtgggagatgttaggggatttttgagggttgtagattgagttgggaagtgaggagaggttttagggagtgtttggttaagagtttagattttgtatatgtagtttttgagttgaggatttgagggttatagttttatttttgtttgaagattgtgttgttaataaggagtaaatggggatttttttgcgttgtggggttgggagtttattagatgtatggtttgggagtttgggttgggtatatagggtttaggagtgattgggttggattgggtttttgagttttgattcggatatttatgtatttatttatttatttatttatttatttttttaagtttttatttttttatcgttttttgcgtattttttattttgtatttggtttttatttattttaattttattaagtttttcgttaggtattttttgggttagaatatataggagatgtataagaagggatttaattaagggaaatagagggaattaagagtaagtttttttattttcgggtattatatagtttagtagtgtgagagttttatgttgagaagagttttttggttatggagaggttattaaattaggtttgaattcgttgtatttcgtattagttggataagtatattataaagtttgttttttatttggtgtaagataaagtgtgtaagttatttttttataatcgttagtattataattattaagagaggtgagggtcgtgtaagtaattaatatcggagtaagtgttatgttaatagtttgtagacgtattatgttattttgtttagtttgttggggtgtggttaagggtggttttataggagagtacgagtggagttgtgattggaaggataagtaggtgattattaaataaataaagaggaaaatatattttaggtagaggaatttgtatggataaaagtatggaggtgggaatttagggttgtttcgaatgtttagggagttggtttgtagagttggggttcgtggtggggttttgtttggtgggttagttgggttaggatatgaaggtttttagtgttttgtggaggaggttgaaattagttttaaaggttatggagagttatgggttaggttgttttttaattttggcgttttggacgttttgggttgggtaattttttgtggatgaggttgttttgagcgttgtgggatgtttggtagaattttggtttttatttgtgagatgttagtagtatttttttttgttttttgtagttgcgattatttaaaatgtttttagatattgttaaatgtgttggggtgggagagggggtaaaatgatttttgggttgagaaattttgggttaggagagtggtatgagtggttaatgttttgtagggttgggtttgattattttacggaaaggtagattcggggatagagtttgaaggttagagttttatcgggaggtttagagcgttatgggtgggagatagagttagggttgggttgtggggtagaaggagagagtttaggttttttatattgtttttgttgttattgagttttattatattttttagtggtaggtataatatggtgagtgttaagattaattttttttttatttatattgaagaaaaagtttcggattacgtgtgtaggttatgtggagagataaattggtttagttagaattggttatcgttatttttagtttaaataagatgtggggttggagaagttaagagagaggattttggggaaggagtcgttattgggttgagtgttttttgttgttttttggagcggagagggtatttttttttattttgggttaagtaggaggggatacgagggagttatttgggggttttatattttaggagtttaaggattataatataggtggaagatttttgtttattttgtttattgttgagtttttagtattttagggttggtatatagtaggtgtttaataaaggagtttgtggttggatggatttgagttagtattgttggagtgagttagggtgtacggagagttagttgggttgttattggtgcgtagtaaagggtaggtaattatggattttagcgaggaggttagtttgattatttttattttaaagtgttttttagtaggtaaggcggttttagtaggagaagttaggaggatattattttgtaggagttgaaggggaggtggtgaattgtggttagtaggaggtgtaggtattttaggtgttggggagttgtggttagtggagttagtaagaaggtttttaagaaatttgtattagagttttagagagaatgagttggaaattgtttttaaagtttttagtgttagatgggtgataattttggttgttatggaatattgtgtttttttttttttaaatttttatttttgggtttgattttggagttaagaattgtatttggtagagtttagagagaagtcgtttgtttttaagtttgggtcggtttggagaaggggagaagttttatgttgtatagagattaagtttgaattcgtttttaggatgggatttaagtttgggaggatttttatttttaggaggtgatggtgttatttattgggatagggaaattggtaggaggagtcggttgttgagggttgggggtgtagatagtttgttggatttattggttttgaggtgtgtggaggataattagagagaattattgttttttgtttttacgaggtgatattttttttttgtttttagttttattttagggattaaggagtttttggagttgtttttaggtatttttataagggttagaagagttttgtatgtttgtttagcggttttgtagagttaaggttgtgggttatattagttatatttttagcgtggtttatgttatagaaatatgtggaaattaggtgattttttagttttttggttaggaggtggggttttttatttttagggagttattttttagttttttatttagtatttagtatttagaagtattatttttgtaggttttattgtggggttggtggtcgggagtaagggtttttgtatttttttaggtagtttgtagtgaggaaatagggaatagaatagttttttgttatttagtttattttaatttttagaaatgttttatgtgttgggggttaggattttcgtaatttagggttggaggaatgtgttttggtttcgtagggttggttttgtattagggttggtatttaaagtggggatggggggatagattgtagttggaatgggtgttcggttatgatgtaaattttggggaagttagtttttttgggtttggttttagtagttttttagggttttgtagtttttttggtgatatttttttttagtttttgtttatttgttttttgtttgggtaggagatttgagtagggaagtgtagagttttttttttgtgagaaggttggatgcgtgtttaaggataaatgaatacgcgaagagtagtaataatagttaagatttataaatgtttattgttatatatgtagatatttatttaagtatatataaagtatagattgtattatgtatattatatatttttaaatttttagaatagttttatgaggttagtttagagatttagatttaggtggtttggttttagagtttaaataggtcgagtgtagtggtttatatttataattttagtattttgggaggttagaggcgggaagattatttgagggtgggaagaatacgtgagtttaggagttcgagattagtttggataatatggcgaaattttatttttataaagaaattagtttagtatggtggttcgagtttgtagttttagttattcgggaggttgaggtgggaggatcgtttgagcgtaggagttggaggttgtagtgagttatgggtgaaagagtgagattttgttttaaaaaaaattaaaaaataagaattaaatatatttaaaatagagtttaaataagtgaatgatttagaatttttttggtttttttaaagtagttgttaattttgggggatgtttttttaaattagtgttttatttttacgggatagggaagtttgtgggagttgggagggtaggtggaggtcgggtaggtggagatggtgattcgaagaggaggggacgataggaggaggttgaggggttattcgagtgttgggagtgacgttggaggtatcggtttagcgatgttggagtggtcgggtcggaggtttagtagtagcgtttggggaggggcgtgggggaggcgtgtttaaggtcggttggtttcgtttcgtttcgtcgtttggtttttggttcgttggggcgcgggttttcgtttttagtcgagggttagcgagcgtagcggagtttggagagaaggcgttgggttgcgagggcgcgagggcgcgagggtagggggtaatcggatttcgttcgtatttatggcgttcgtcgtcgtttgggtcgcgttggtcgtcggattggagttttgggttgcggcgtacgttttgttcgtttaggtgggtgattcgcgcggtttacgggggatagtcgtttcgtatgtttattcggttggtgcgtagttttcgggtgttcgggtcgcgttttttcggggcgttgttacgggttgggaggttgggagttttagtcgtcgttttttattcgtattagatacgcgcgtttttggggattcgttggggatttcgggttcggtatacgtgcgttcggggtataattttggttttcgaagttttttttattcgcgtcgtgataggggcgtattttggttttttcgcgagcgtaggtcggggtatttggggttgagtagcgggttttgggtagattttcgttagattcgggatttttttttttttatttcggcgattgtcgcgatagttttttttttttacgcggtggagaaggggttgtgtcggggcgttgttttattgtttacgtcgggtattttttttaaaagattttttttttttttgggcgacggtttttcgattttttagaaatattagggttttgtgtttgaagagtaggattaggtgtgtgttaggtttattgagggtatagttggagggcgagttgtttgtttgtttttttcgatgcgttcgggggttattgtagagtttgttttttgcggtttttggggatagggtaagcgagggaggtttgggttggtaatcgagtaaggtaaatgaagttttcgggggtcgtaggaaaatggagatagtagaaattttagggtttttatttaatatgaacgttatttttatagtagtaacgggcgtataagggattgtgtattttttgtttgtttttgattgttttttggtttggtaatataggataattttatttttgttttattgtttttatggtttggtaagataagataaattattttttagagaaggaaaattgaggtttagagaatttgtattttatggaagggtttggggggaattttttttttaaagggggttttttttgttttcggtttttgtgttttga

SEQ ID NO: 306 - DNA, 6167 bp, Artificial Sequence
  chemically treated genomic DNA (Homo sapiens)
ttagggtataggggtcgaaggtaggagaggttttttttggaggaagagttttttttagatttttttatgaaatataagttttttgagttttagttttttttttttaaaaaatggtttattttattttattaaattatggagatagtaaaataaaaatggggttattttatgttattagattaggagatagttaaaaataggtaaagggtgtatagttttttgtacgttcgttgttattgtgggagtgacgtttatattgaataggagttttagggtttttgttgtttttatttttttgcggttttcggagattttatttgttttgttcgattattagtttagatttttttcgtttgttttgtttttagaggtcgtagaaaatagattttgtagtagttttcggacgtatcggaggaagtagataggtagttcgttttttagttgtgtttttagtggatttgatatatatttggttttgttttttagatataggattttggtatttttaagaaatcggaaaatcgtcgtttagaggaaaaggaagttttttgaagagggtgttcggcgtgggtagtggggtagcgtttcggtatagttttttttttatcgcgtgggagggaagggttgtcgcggtagtcgtcggggtgagggaagaggggtttcgggtttagcgggggtttgtttaggattcgttgtttagttttaaatgtttcggtttgcgttcgcggaggaattagggtgcgtttttgttacgacgcgggtaagaggggtttcgggggttagagttgtgtttcgagcgtacgtgtgtcgggttcggagtttttagcgggtttttagaggcgcgcgtgtttgatgcggatggggggcggcgattgggatttttagttttttagttcgtgatagcgtttcgggagagcgcggttcgggtattcgaaggttgcgtattagtcgggtggatatgcggggcggttgtttttcgtgggtcgcgcgagttatttatttgggcgggtaaggcgtgcgtcgtagtttagagttttagttcgacggttagcgcggtttagacggcgacgggcgttatgggtgcgggcggggttcggttgttttttgttttcgcgttttcgcgttttcgtagtttagcgttttttttttaggtttcgttgcgttcgttagttttcgattgaaagcgaaagttcgcgttttagcgggttagaggttaggcggcggggcggggcggggttagtcggttttggatacgttttttttacgtttttttttagacgttgttgttgggttttcgattcgattattttagtatcgttgggtcgatatttttagcgttatttttagtattcgggtgattttttaatttttttttatcgttttttttttttcgaattattatttttatttgttcggtttttatttgtttttttagtttttataggtttttttgtttcgtgagggtgaggtattaatttggaaaaatattttttaaagttgatagttgttttaggggaattaagagaattttagattatttatttatttagattttattttaaatatatttaatttttattttttaattttttttgagataaggttttatttttttatttatagtttattgtagtttttaatttttgcgtttaagcgatttttttattttagtttttcgagtagttgggattataggttcgggttattatgttaggttgatttttttatagagatggggtttcgttatgttgtttaggttggtttcgaatttttgagtttacgtgttttttttatttttaagtgattttttcgtttttggttttttaaggtgttgggattataggtgtgagttattgtattcggtttgtttagattttagagttagattatttgggtttggatttttgaattgattttataggattattttaaaaatttaaagatatgtaatatatataatgtagtttgtattttatatatatttaagtaagtatttatatatataataataggtatttataaattttggttgttgttattatttttcgcgtgtttatttatttttaaatacgtatttagtttttttatagggagaagattttgtatttttttgtttaagttttttgtttaggtagggggtagatgaatagaggttgggagagaatgttattagggaagttgtagggttttgaggggttgttgagattaggtttaggagagttggtttttttaggatttatattatgatcgagtatttattttagttgtaatttgtttttttatttttattttgagtgttagttttaatatagggttagttttgcggggttagagtatatttttttagttttggattacgggggttttagtttttagtatatagggtatttttaagggttggggtgggttgggtggtaggaggttattttgttttttgtttttttattgtaggttgtttgaagaggtatagagatttttgttttcggttattagttttatagtggagtttgtaaggatggtgtttttaggtgttgagtgttgagtgagaaattgggaagtgattttttggggatggaaaattttattttttgattaggaggttgggaaattatttggtttttatatgtttttgtgatatggattacgttgagggtgtggttggtatgatttatagttttaattttgtagagtcgttggatagatatgtagagtttttttggtttttatgagaatgtttaggagtagttttaaggattttttgatttttaaaatagagttgaaggtaggagggagatgttatttcgtggaagtaggggataatagttttttttagttgttttttatatattttaagattaatgggtttaatagattgtttgtatttttaatttttaataatcggttttttttgttagtttttttattttagtgaatggtattattattttttgaaggtggggatttttttaggtttaggttttattttgggaacgaatttaagtttaatttttatgtaatatggggtttttttttttttttaggtcgatttaggtttgagagtaggcgatttttttttgaattttgttaagtgtagtttttgattttagggttaggtttaggggtgagggtttgggaaggaaagggtatagtgttttatggtagttaaagttgttatttatttggtattggggattttggggatagtttttagtttattttttttggggttttagtgtaggttttttggagatttttttattgattttattggttatagttttttagtatttgaaatgtttgtattttttgttggttataatttattattttttttttagtttttataggatggtgtttttttggttttttttgttgaggtcgttttatttattaggaagtattttgggatggagatggttaggttggttttttcgttggggtttatggttgtttgttttttgttgcgtattaatagtagtttagttaatttttcgtgtattttggtttattttagtaatgttggtttaggtttatttagttataggtttttttattaagtatttattgtgtgttagttttggagtgttggggatttagtagtggataaaatagataagaattttttatttgtgttatggtttttaaatttttgggatatgaagtttttagatggttttttcgtatttttttttgtttggtttaaggtaagaggaagtgtttttttcgttttaaagggtagtagggggtatttagtttaatggcgattttttttttaaaatttttttttttggtttttttaattttatattttatttaggttggaggtggcgatggttagttttggttgaattagtttgtttttttatatgatttgtatacgtggttcgggattttttttttagtgtgggtgggggggggattgattttgatatttattatattgtatttgttattggggaatatggtaaaatttagtgatagtagaggtagtgtggagggtttggattttttttttttgttttatagtttagttttggttttattttttatttatgacgttttgggtttttcgatgaggttttggtttttaggttttgttttcgaatttgttttttcgtggagtggttaggtttagttttgtaaagtattagttatttatgttatttttttagtttaggattttttaatttagaggttattttatttttttttttattttagtatatttggtaatgtttggagatattttgggtggtcgtagttgtagggggtagggagaggtgttgttggtattttataggtagaggttaggattttgttaaatattttataacgtttaggatagttttatttatagagaattatttagtttaaagcgtttagaacgttaaggttgagaagtaatttagtttatggttttttatggtttttagaattgattttagttttttttataagatattggaggtttttatgttttggtttagttggtttattaggtagagttttattacgaattttagttttataggttaattttttgggtattcggagtaattttgagtttttatttttatgtttttgtttatgtaggtttttttgtttgaggtgtgtttttttttttgtttgtttggtgattatttatttgtttttttagttatagttttattcgtgtttttttgtgaaattatttttgattatattttagtaagttgggtaggataatatggtacgtttatagattattagtataatatttatttcggtattagttgtttatacggtttttattttttttagtaattgtgatattagcggttatggaaagatgatttatatattttattttgtattaggtggggggtaagttttatggtatgtttatttagttaatacggggtatagcgggtttaaatttggtttggtggtttttttatagttaaggggttttttttagtatggagtttttatattgttgaattgtgtgatattcgagggtagggggatttgtttttggttttttttattttttttgattgagtttttttttgtgtattttttgtatgttttggtttaggagatatttaacggggggtttgataaagttgaagtgaataaggattaaatataggatgaagggtacgtaggaggcgatgaagggatgaagatttgagagaatgaatgaatgaatgaatgaatgggtatatggatgttcgggttaaggtttaggaatttagtttagtttaattatttttaggttttgtatatttaatttagatttttaagttatgtatttggtagatttttagttttatagcgtagaaaagtttttatttgttttttgttgataatatagtttttaagtagagatggaattgtggtttttaggtttttaatttaggggttgtatgtgtagaatttgagtttttggttagatattttttggagtttttttttattttttagtttagtttatagtttttagaggttttttgatattttttattttagtaggtggatgattgtatttttgtaagcgagggtggaagaaggtagggttacgggtaggttacgtgtgcgaggatagtcggtttgtttattgatagttattgaatatttattgtgtatcgggtattttagtggattttttggaggagtggttttttagttttaattagtataagaattatttggaaggtttgtgaaatatgtagagttttgggttttacgtttatgtttgttgagggtttaatatttggttttttaatggattttttagtgattgaggggtatttgttgagaaatcgtatagagggttgaggtgtagtaggtgttgtgtgtggttgagggtagtttggaaggttgagttgtggttgtgttgggaggggttttttttattatggggaggtttttatgtaatattttttttggagtgagtttttagagttagttataaagttaattttttttgatttggttttagggttttagtgggaatttattttatagggttgtttggatagcgggaattttattttttttttgtttaaggttggtttatagttagggtaagtaatttttttttgttttttagttttgtttattttagcgttttgaatgtgtcgggttagttttttgatgatttatgttttaaaattacgaatagg

SEQ ID NO: 307 - DNA, 5148 bp, Artificial Sequence
  chemically treated genomic DNA (Homo sapiens)
  unsure 4258: n is a or g or c or t
tatgtaatgttaggatagtattcgttatatattgcgtagtttgtagggttgtggtgatggtgattgtgggggtgacgggaggtagagagtttagggatagtttaggataggcgggaatataagtatatgtgaaaagtaaggcgatcgttaattttgaggaaaataaatgggtattattcggggaggtcgggtagttttgttttaaatattattcgtgtcgggatgatatggatagggtagcgtgtggaagataagttttttttatcgtttacggggaatttttgtattggaagttttagaagtagtagtattaggtgttttttggaaataggtagttagaaagcggaagtatagtatttatttttttatttaggaaattgttttcgttttttttgttgtagaagaagtagtagttggaagaggtagttaggtgttgattttatcgtaagtttgaggttttttttgggtttttttaattttatgtttttatgatgtttataaataattaaataagttgtgagttgttattttttgttattgaaattaaaggtgtttttttttttaatttttttagacgaagttttattttgtcgtttaggttggagtgtaatggcgtaatcgcggtttattgtaattttcgttttttaggtttaaataattttttcgttttagttttttgagtagatgggattataggcgtttgttgttatgttcggttaatttttgtatttttagtagagatagggtttttttatgttgattaggttggttttaaatttttgatttcgtgattcgtttatttcggttttttaaagtgttgggattataggcgtgagttatcgtttcggattgaaattaaaggttttttaagtagttgttcgttgtgtgtgtggtgaattcggggtttgaatgtaggtgggacgtagttttttaagcgtcgggagtcgttggttttttacgtttgtcgatttagtaaatgtgttttggagtttttgacggacgcgattttgaatttagaaggaaagcgttttatttcgagatgttgattgacgtgttttttatagcggtgggatttgggaagtcggtgacgttcggtgtggaggacggttgtgacgtttttcggtggggatacggtgtaaaggcggcgtggaaatttggtgtacgattttataataaattgtaaaataagcgttttatttggtgagatgaaaagatcggtaggagacggtatttcgggttttgaatgttttttttattgtggcgaaagggttttgtatagttgtttagggattatttaggttttgggggaattatagtttttgggtagttttttcgtagtttgggtttttttgtgttttatattatttgttttttggttttttttttttttttttttttaatttgtcgtttattttatttgtcgtaggttgggtggtgtattattcgggtttagttggacggggttttagagggcgagggttgagtttgtttagaagttttgtttttagtatttaaaatagggaaatggatttacggggatttaatttatttttttgaatgatagagttgggaggtttgggttagattagcgaggttttaggaaatatagtttgaggggtcgggttggacgggggtagtataggggttgttttgggtttttttttaggtcgttttttttttagagtttttttcgggttttcgggagttagtttttgtttatatttagttaggacgtttattagaatttgtttaggtacgcgggggttttttttgttttttttattttgtattttgtggttttagacgtgaggtgttttttttcgcggggggttttttttgttttttttattttgtattttgtggttttagatgtggggtgttttttttagcggggggttttttttgttttttttattttgtattttgtggttttagacgtgaggtgttttttttcgcggggggttttttttgttttttttattttgtattttgtggttttagatgtggggtgttttttttagcggggggttttttttgttttttttattttgtattttgtggttttagacgtgaggtgttttttttagcggggggttttttttgttttttttattttgtattttgtggttttagatgtggggtgttttttttagcggggggttttttttgttttttttattttgtattttgtggttttagatgtgaggtgttttttttagcggggggttttttttgttttttttattttgtattttgtggttttagatgggtgttttttttagcggggggttttttttgttttttttattttgtattttgtggttttagacgtggggtgttttttttagcggggggttttttttgttttttttattttgtattttgtggttttagatgtggggtgttttttttagcggggggttttttttgttttttttattttgtattttgtggttttagacgtgaggtgttttttttagcggggggttttttttgttttttttattttgtattttgtggttttagatgtggggtgttttttttcgcgggggggtttttttgttttttttattttgtattttgtggttttagatgtggggtgtttttttacgtgggggttttttttgtttttttttgttttttttattttttagatattttttgtttttttttattttaggtggcggttgtttagtagttggggtttggttcggttttttatttttgtttatttttagcgatttttattttggtttttggttttttgttgtatagtaggtgaaagttattttttcggtggagggggtgtggttggtagtttttggttatttttagtttattttttattgtttttttgatgaggattaagggttaataaatgtttgttgaatttttttgtttttggggtgtttgggttgtgtgtgtttgggtttgtttgtcgcggggggaacggggtaatataatcgtagattataggtttttgaaatttggagaattttagtttttgtggtgatcgaagtttaggttaggtttatgaatttcgggcgtcggtaagttagggatgggggtggggttggggttgtttggagtcggggtttgtgagaggtgaggtcgaagttcgtttcgtcgggttttgtggttatttgggtttaggattgtttttttattatgtttggttgttgttttacggttttttggagttttagggttatatttatttcggacgtagtcggggtaagggttttggggtggtagtttttttgacgttttattgtttttttttggtatttatattttagtgttttgagggtttagtgatttgtaggattagtagggttttgtttaggtgatgggtcgagagtgagattttgttttagaaaaaaaaagaaattagttgattgtaaatgtgaggatttatttttgaatttttaatttttttttatcgatttatatatttatttttgttttattattaattatattgtttttttgatgattgtagttttgtagtaaggttttttttgttatattgggtttttttttgttttgtttagatagagtttttgtcgtttaggttggagcgcggtggtataatttcggtttattgtaattttcgtttttcgggtttaagcgatttttttgttttagtttttcgagtagttgggattataggtatttattatcgtgtttggttaatttttgtattttagtagattgtttttgttttttggttaggaatcgtttaattttgaaagtttggtgagaagatacggcgagaatcggggtttagtatagatgatggcgatagcggagaagggaaggtaagggagggggtttaagtttttatttttatgggattttttgtgtttattatgtttttttttatgatttttgttagtatgttaatgattttgttaatatatttatatttgtttttttttatttaatatttgtgtggtatgtttttttttattgtttgatgtttaaatttgttgtgtttttatgttttagatgatttttgtttttggaagttatatagagttagttgtttgttttgtttgtttgtttgtttttttttttttttgagacggagtttcgtttttgttttttaggttggagtgtaatggtacgatttcggtttattgtaattttcgttttttaggtttaagtaatttttttgttttagttttttaagtagttgggattataggtgtttattattacgtcgtatttattttgtttttttagtagagacggngttttattgtgttagttaggttggttttgaatttttgattttaggtgatttattcgttttggttttttaaagtgttgggattataggcgggagttatcgtgtttggttatgggtgtttgttttattatggttgtggttattgttgtttagagttagttttgggtatataagggggattatgttttagtagtgttatagttttgaaggtttagattgaggagttgttttttttgatttagtgttgttttagtttatttacgtgttttatggatttttttgttgagggtcgagtcgtaggttaggttttattgtgttttggggtttgaatacggtggttttgggtagaagaggttagaaggtagaataagttaatgttgggggtgtttagatttcgtttttgtgtttagtttatagttagggttttcggtttgttattttttttttttcgttttttttgtttttttttttttttttttgttttattgtatagtttttatagttatatttcgtaaggaaaatttagattttggcgatagtagagacgaggatgtgcgtgggggttcggcggttgggtcgcgggtcgtgtgcggttttgttttttttgggtttggggttgagtatcgtgacggggttttattgtgtcggggatatttattttagtaacgatcggtgttgttacgagtgtaggttaggtgaggttttaggaggggtcgttacgtacgggtattttagggattgggggttggggtagggatgggttagttaggaggttggttttggggagggggcgggtgaggggtcggttaagtttggtagaggagtcgtttgggggggtttacgggcgtaagtttggggtttgatcgttgtttgacgtcggtttttgttgtagg

SEQ ID NO: 308 - DNA, 5148 bp, Artificial Sequence
  chemically treated genomic DNA (Homo sapiens)
  unsure 891: n is a or g or c or t
tttgtagtagaggtcggcgttaggtagcggttaggttttaggtttgcgttcgtggatttttttaggcggtttttttgttaggtttggtcggttttttattcgttttttttttaggattagttttttggttggtttatttttgttttagtttttagtttttggagtgttcgtgcgtggcgattttttttgaggttttatttggtttgtattcgtggtagtatcggtcgttgttggggtaggtgttttcgatatagtggagtttcgttacggtgtttagttttaggtttaggaggagtagagtcgtatacggttcgcggtttagtcgtcgagtttttacgtatattttcgtttttgttgtcgttagagtttgggttttttttgcggggtgtggttataaggattgtgtagtagggtaggggagaggggaggagggtagaggaggcgggaggaggaaggtggtaggtcggggattttggttgtgggttgggtataaaggcggggtttgggtatttttagtattggtttattttgttttttgattttttttgtttaagattatcgtgtttagattttagggtatagtagggtttggtttgcggttcgatttttagtaaaaaggtttatggagtacgtgggtaaattgaggtagtattgagttaggagaggtaattttttagtttggatttttagggttgtggtattgttgaagtatggttttttttgtatgtttaagattagttttgagtagtagtgattatagttatggtaagatagatatttatggttaggtacggtggttttcgtttgtaattttagtattttgggaggttaaggcgggtggattatttgaggttaggagtttaagattagtttggttaatatagtgaaatntcgtttttattaaaaaggtaaaatgagtacggcgtggtggtgggtatttgtagttttagttatttgggaggttgaggtaggagaattgtttgaatttgggaggcggaggttgtagtgagtcgagatcgtgttattgtattttagtttgggggataagaacgaaatttcgttttaaaaaaagaaagaaataaataaataaataaaataaataattggttttgtgtggtttttagagataagaattatttgaaatataaagatatagtaagtttgaatattaagtaatggaaagaagtatattatataaatattaagtaaaaggaagtaggtgtggatatattaataaagttattaatatattaataaagattatggaagaaagtataatagatataggaggttttataaggataaaagtttgagtttttttttttattttttttttttcgttgtcgttattatttgtgttggatttcgattttcgtcgtgtttttttattagatttttagaattaagcgatttttggttaagaaataaaagtaatttgttaaaatataaaaattagttaggtacgatggtgggtgtttgtaattttagttattcgggagattgaggtagaagaatcgtttgaattcgggaggcggaggttgtagtgagtcgagattgtgttatcgcgttttagtttgggcgatagagattttgtttaaataaaataaaagaaaatttaatgtaataaagaaaattttattataaagttatagttattaagaagatagtgtgattgataatagaataaggatagatgtatagatcgatggaaaagaattgagggtttagaaataggtttttatatttatagttaattgatttttttttttttttgagatagggttttattttcggtttattatttgggtagaattttgttgattttgtagattattggatttttaggatattgaggtgtgaatgttagaaggggatagtgggacgttagggaggttgttattttagggtttttgtttcggttgcgttcgaggtgggtataattttggggttttagggggtcgtggggtagtagttaggtatggtgaggagatagttttggatttaggtgattatagaattcggcggggcgagtttcggttttattttttataagtttcggttttaggtagttttaattttatttttatttttaatttgtcggcgttcggagtttatgggtttggtttagatttcggttattatagggattgaggttttttagattttaaaagtttgtgatttgcggttgtgttgtttcgtttttttcgcggtagataagtttagatatatatagtttagatattttagaggtaaaggaatttagtaaatatttattgatttttggtttttattaaggaggtagtgagagatgaattggaagtgattaggggttgttagttatattttttttatcgagaagatgatttttatttattatatagtagaaaattaaaagttaagataaaaatcgttggggatgggtagggatgggggatcgggttagattttagttgttgagtagtcgttatttgaggtggggaggggtaggaaatgtttggagagtagggagggtaggggagggtagaaaggatttttacgtgagggggtattttatatttggggttataggatgtagggtggggagggtagaaaggttttttcgcgggaaggggtattttatatttggggttataggatgtagggtggggagggtagaaaggatttttcgttggagggggtattttacgtttggggttataggatgtagggtggggaggatagaaaggatttttcgttggagggggtattttatatttgggattataggatgtagggtggggagggtagaaaggatttttcgttggagggggtattttacgtttggggttataggatgtagggtggggaggatagaaaggatttttcgttggagggggtatttatttggggttataggatgtagggtggggagggtagaaaggatttttcgttggagggggtattttatatttggggttataggatgtagggtggggaggatagaaaggatttttcgttggagggggtattttatatttggggttataggatgtagggtggggagggtagaaaggatttttcgttggagggggtattttacgtttggggttataggatgtagggtggggaggatagaaaggatttttcgttggagggggtattttatatttggggttataggatgtagggtggggagggtagaaaggatttttcgcgggagggggtattttacgtttggggttataggatgtagggtggggaggatagaaaggatttttcgttggagggggtattttatatttggggttataggatgtagggtggggagggtagaaaggatttttcgcgggagggggtattttacgtttggggttataggatgtagggtggggagggtagaaagaattttcgcgtgtttaagtaggttttggtgggcgttttggttgggtgtaggtagaggttggttttcggaggttcgaggggggttttgagaagggggcggtttgagggggagtttaggatagtttttatgttgttttcgtttagttcggttttttaggttgtgttttttgagatttcgttagtttaatttaaattttttagttttgttatttaaaggaatggattaggttttcgtgggtttatttttttgttttgggtgttgaggatagagtttttggatagatttagttttcgttttttggagtttcgtttagttgggttcggatgatgtattatttagtttgcggtagatgggatggacgataagttaggaggaaagaagggggaaaagttagggggtaggtggtgtggagtataaaggaatttagattgcgaagggattgtttaaggattgtgatttttttagaatttgagtggtttttgggtagttatgtagggttttttcgttatagtggagagggtatttaaggttcggggtgtcgttttttgtcggtttttttattttattaggtaaaacgtttattttataatttattgtaaggtcgtgtattaagtttttacgtcgtttttatatcgtgtttttatcgaggggcgttataatcgttttttatatcgggcgttatcggttttttaagttttatcgttataaaggatacgttagttagtatttcggagtgagacgttttttttttggatttagaatcgcgttcgttagagattttaaagtatatttgttagatcgataggcgtgaggagttagcggttttcggcgtttgggaggttgcgttttatttgtatttaggtttcgggtttattatatatatagcgggtagttgtttaagaaatttttgattttagttcggggcggtggtttacgtttgtaattttagtattttgggaggtcgaggtgggcggattacgaggttaggagtttgagattagtttggttaatatggagaaattttgtttttattaaaaatataaaaattagtcgggtatggtagtaggcgtttgtaattttatttatttaggaggttgaggcgggagaattgtttgaatttgggaggcggaggttatagtgagtcgcgattgcgttattgtattttagtttgggcgatagagtgagatttcgtttaaaaaaattaaaaaaaaaaatatttttaattttaatgataagaaataatagtttataatttatttagttatttgtgaatattataaggatataaagttagaaaagtttaaaggaggttttaggtttacgatgaaattagtatttggttgttttttttagttgttgttttttttgtagtagaagagacggaggtagttttttgggtgggggggtgggtgttgtgttttcgttttttaattgtttgtttttaaaaagtatttgatgttgttgtttttggagtttttagtgtagaaatttttcgtggacggtgaaaggggtttgttttttatacgttgttttgtttatattatttcggtacgaatgatgtttggggtagagttgttcggttttttcgggtggtgtttatttgttttttttagagttggcgatcgttttgttttttatatgtgtttgtgttttcgtttattttgagttgtttttgagttttttgtttttcgttatttttatagttattattattatagttttgtagattgcgtagtgtgtggcgggtgttgttttgatattatatg

SEQ ID NO: 309 - DNA, 8524 bp, Artificial Sequence
  chemically treated genomic DNA (Homo sapiens)
taggaattagttatatggttggtttatagttaaagttaataggttttttgtattttgtattttagggagttagatagtttttttttaggtttattaaaggaggtagaattcgttttatatttatagtttaaaattttaatttttttttttttgtttatatagtaattttggggaggaaggaggtttttggttttattgagtagttaggtgtttataggagaaggttatttttttttttttcgttaagggtggggtagtggaaatttaaaggaagttttttatggagattgagaggtgattgtaagtatggggtgttgggatgttgttttttgatgggtggtggattgtgggtagtggattgtgtttatttgagtagggtagaggagaggtgagaagaggggtattgtggtgtagttgattggatgcgtgagtttttttaggttaagtggacgttgtagtaattagtttggttggagtatttttttggtggtttatttaagtaggttgattgttgggtaagagggttaggatattggtaggttttaggtggtggggtggggtaggcgaggttaagtttgggttggatgattttgtgagagaattgtgtagtggagaagtcgttaaggaatttatttatttgtttatgagaaattatatatggatacggggttggggtgggggtggtagggtatgttttttaattagattattcgttttatttttattaagtttttttttttttagtaggtagggttttggtttaagttaatttttgaatgagtaagagagaagataaaatgagatttaaattgagtttgagaataaaggtttaaaggatggaggtttaataatagaaagtgatttaaaagtaatgtaatttgtttaaaatgttattaagggatggaaaagggagatttaatatagtatggttgaaggtagagattaggggagaaaatttttattattatattttatagagttgaatcgttttaatatattggttttataagtaaatagaaaaattgaaatatagtgtggtcgggttagagttttgtttgggtaaagttgttttaggttttgagagagtatagggggataggttggttgttagagagagatttttagaggagggttgtttgagatggattttgaagggtgagaaagagttggttaggtgaaaggagagtggtagtgggaagggagttttttaggtagaggtgatagtacgggatatttggggagtggggttggagtatgaaggggaaggtaggaaggatgtttagagatgtatattaggaggtttatggttttgtagttttgtaagtttaaggggtgagggttttggagagttattttaaattttggagtaatataattggatttgtatattagatagaatattttggatgttagattttggtagcgttgtggatattggatttttaggtatgttttttatttatttatttggtattgtgaatttatttttttataaaggttattttatttttgagtttttaaaattttggttttttatttttttgaatgttttttgttttatttttattgtagaattttttattgttttttttttgattggttttcgaatattgttatttttttttaaattattttttcgttttttttttttagtatattttttttagtttaataagattttaggttttttttgggtttgtgtttattagtatatgtttttttaggatatgtatatattaaaatattttttttttattttatttggttttcgttttatggggtaattcgaaggttaatatttatttttttatatattaatttaagttgttttaattgttgttatgatatgttttatataatataattaatgttttaattttgtgtatttgtttttttaggtagttttgtgaaaggtttaattttggaattaagtaaataaagaataagtaatggttgaaattattatagtaatattttttttttaaaggatttaaaatcgtgtttgttttttttaaagtatgttaaaaagggaaaagatattttaattttttttttattttgggtatgtttgggtggttttaatgaagttttttggattttgattttaagagtttttggttttttggtatttgattattatttttaagaggttattgtagtttgaggtttgtgttgagattattagtttcgtattttttgttattaattttttgttatgattggaggttgtatttaggatgagaagttgttgaatttatttatttatttatttatttatttagtatttatatattggtgttttattatgtatttaggattgggatagatttagttttgtttttagggagtttatagttaaatgggattaggtagaaggagttatgagttggtatgttaaatgttgtggtaatataggggaggaggtagggtgggatagagtatttatttttgttttagggagttggggaaggtgtaagaggaggtaatatttaaattgtttaagaaaggagaaggaaaggaaggaaatattaagagtaatgagataaatcgtaaggaaaaaagattgtgtgtttgggaagtggggagaggttgaagttagtgtgtatgggaggacgtggtaggaagtaagtatagaaagagaggttggggttgagtgaggaagggtgtgttttgttaggataagaaatttggattattttgagggtgtagggaaatttaaagaggtttttatgtaggaaagtgttttagtcgattagatttggagtttattaagagaatcgtagtagtgtaaagagttgtttggtatatagtaggtgtttaataaattttgtggaatgagagaggttgttgggatagtttagatgaaagatggtattttttgaattagggtagtggtagaggtgatagaaaataagggatggattttagaggtagaatttataagatttgtaaatgtgtttttaatagtagaagttatgagaatggggttagaagtgttttttttttttattttttttgatttgtgaggtttggttttttgtttttttttagaaattgagagtttggagggttattattttaatcgttgtttagtttaagtttttaagttttttttggagaaaaatttaggtttaagggaatatagttttttagaggtagaggttgtattagaatttaggtgttttatgttgtaaagtagagtgttaatattggtttaagaatattttgagggttaggtgcggtggtttatgtttgtaattttagtattttgggaggttaaggtaggcggattatttgaggttaggagtttgagattagtttggttaacgtggagaaatttcgtttttattaaaaatataaaaattagttgggcgtggtggcgttagtttgtaattttagttattcgggaggttgaggtaggagaattgtttgaatttaggaggtagaggttgtagtgagtcgagattatgttattgtattttagtttgggtaatagaatgagattttgttaaaaaaaatttaaaaattaaaaattaaataaatatttaaaaaataaaacgaaataaaaaataaaaaaataaaagtacgtttttagagtttatgaatttaggaaatgtaggtataagtgtgtgtgtttttgtaaaatgagagggtttcgagttttttaatatatttaaagtgttttatgatgttataaaaggttggtttattttttttttttttttgagatggagttttgtattgtcgtttaggttgaagtgtagtgatgtaattattgtaattatggtttattgtaattttgattttttgagtttaagcgatttttttgttttagttttttgagtagttgggattataggtgtttgttattatgtttggttaatttaaaaatttttttattttgtagagatgggggttttgttatgttgttaggttggttttgaatttttggttttaagtaatttttttttttggttttttaaagtgttagattataggcgtaagttatcgcgtttggtttttatttttatttttatttttatttattatttattttttttttttttgagattgagttttgttttgttttcgaggttggagtgtagtggtacgatttcggtttattgtaatttttgtttttgcggtttaagcgatttttttgttttagtttttcgagtagttgggattataggcgaacgttattatattcggttaatttttgtatttttagtagagacggagttttattatgttggttaggttggtttcgaatttttgattttaagtgatttgttcgtttcggttttttaaagtgttggattataggcgtgagttatcgcgttcggttttatttttaataaatgtttgtttttaggtgttgggtgggaggtgggatggaatggaatgaggtgaggacgtatggatgtatggatgaatggatgggaagttgagacgacgcgtttatacgagggaattttttttgaaagagagcgaaattttgagttgggaaatttttttttgaaacgtttttttatattttagttgtggttttttcgttttttgcgtggtggtgtggggggaatttttttaggttttttcgtagtggagtttttttcggttttgttaggatatttagaggtagcggagagcggggtagggaggggaaaatcgtgagggtttttgtggtaggttttagtatttatgggattttttttcggtcgtaggaagtaggttagtttttagttcgtttcggtttggtttttgtgggatttgggggtaaagaagaagagttgtttttgggattatgttttttttcgtatatagtaagatgcgtttttaaattttcgggggaattagatttgtgggaatgttttggggaaatttttgcgcggtgaattgttgggggtttcgttttttcgataggtggatcgcgattggtttttgaagatttcgttttttttttgggcggggttaaggttggggtaggggagttagtagaggtttcgttcgggcgtttagtggttttgtcgtttggttttatttcgttatggttcgtttgtttttgtagtgcgttttttggggttgtttgttgatcgttgtgagttgtttttgtttcgattagacgggagttgggagtggggaatgagaaggaaagggaaggaagatttcggggaagaggtttttttggttgatttttgtgggggtaggagggtgggtgggagttgggtaaggtgttttcgtttttggttgaatggggtgggttgttttttttttttttcgggttggggtttcgggagcggtttataggggtcgtttagggaaggtattggttgtttaagcgtgtttagacggtttggacgggtttagggagttttagaggttggttatatagagattggtagggggtttagagggcgggaagtgaggcggattaagggaaggggcgggtttggttcgttttttgttttttttttattgtggatagatgttagtttttgtaagtagttattatttttttgttagttggggttgtttttttttagggtattttgtgggaataagagatgggtgtagaggtttaggtatttttgtgagaaggtaaggagtttttaatatcgttttttatttcgaatcgtattttgggtgttttaatttaggaggaatttttagggttttgttttttttttttgaatttaagatgatataggagatttttggggagatgaatagtttatgggatataataaagggttaggagattagagttttggttggttttgatagggttggtgattagagggttggagaaattaggggtttttttaggtattagaggggtttagagttaattaagtatattttcgggatttttagaagtttatatttgatttattttttgtttaaatgtatttttgtagttttttattttggaggttgggaattttttaagtatttggtttttttattttagtttttttggtttttttttattttagagggttgtagatttttgtttgaagtttgggtaggaatgatttatggtattaaggaaagtaagggaagtagtaagggaagagagggagtggggaggttgttttggttttatagtttttatttttatttgaagtaatggtttttagggaatagggaggtagggggagggcggagttggaaagaggtaaaggggggtttttgtggtaggagtggagaaagagttagaggaggtggggtgaagggtgtgatttaggttttttaagagtagagtttgtttttataatttttaattttggttttaggtagaggttgggttgtgataataatgttagaagttatttattgagggttttttgtgtgttaggttttgagttaaatattgtttgttttttttgtttgattttttataatttttttattatatagatgggtaaattgaggtttagaaagggggattgttttgttaaaggttttatagttagttaatggaagaatttggttgtgaatttatatttgtatgattttcgagtttgttttttagatagtgagagtttttaagttttggttttgagttgttttgtggtagaaggattagaattatggggagtgagaattggagattgatagatttttaggggagcgttttattttttatgtgtttgaagatggtattaaggatttttttatttttgggagtgtgggagttttacgtttataggatggtgttttgtaatgagttggtggggggtagtagttttttttatttttttttttattttgggtaagatatatttttgtaagtaatttgttgagatatttaggttgaatgagagttattagttaggtaggattttggatagttagttaggtagtcgggttgtttgttatatattatgtaagtagaaataaatgaatgatgattaaaattgttatttaatgagtatttattatgtttttgatattgtgttaggttatatatatgtatttttttttattttcgtaatttaatttgtagggtaggtattattatttttattttagagatagagaaattgaggttaagagaagtaaaataattagtaagtgttataaagttaggattggagtttaaagttgtttgatttttaaatttgtgttttttttattggttgtttttaaattgtgggatagttttaaggagtatatggatatagaattaaatatatatttattttatagtttttttaaaaattttttttatttttttaaagaggaagtttttggagttagaatagagttaatgttttttaaaggtttgttaattttttttttaaaataaaaattaagagtaggtttgggagggtttttaataagtaaataattagttgggttttaataattttgttttgtttttttagaatttatttttagggttattttttatttatgagaagtgatattggtttttgttttttggtaatgatgtgaggtttatatttaaagtaaatgtatcggttaggtacggtggtttgtgtttgtaattttagtattttgggaggttaaggtagttagattatttgaggttaggagttttagattagtttggttaatatggtgaaattttgtttttattaaaaatatataaattagtcgggtatagtggtatatatttgtaattttagttatttaggaggttgaggttggagaattgtttgaatttaggagatagaggttgtagtgggttgagatgatgttattgtattttagtttgggcgatggagcgagattttgttttaaaaaataaaataaaagtattgaaattaataataagtaattaatagtatgggtggtatttggatgtagtaaaatggtgaagatgaaatataagttgatggagagaggagtattgagatttgagtttttatttggattttgttattgtgagattttgggtaagtgatttttttttttggtgtttagttttaattatttgtaaaatgaaagtgtgagtttatttttttagttttatattttagtattttatgagggaagggttggatgaatagatgatgaggagttggaggaagaaaatatgatgggttttggaaaggagtaggaagggaagtagaagaataggaggaagaggttaagtgttaaatatagttttaaatagtattgggattagttgaagttagttagttttaggattttaggggagttgttggagtttttatattttatgggatttttgggaagaggaatgatttaggtattaagttttaaggaattttgttttgtttagagaatattgtgagtttatagtattattgttttgtaaaaatattagaatgattttttgggtgcgattataattagtttagttgataatttatttgaaaataaatatgttaaatattatgtaggttttattttttgttttgatttgtattttagtttgtagtttttgttttggatgatttttatttttttgttgaagaagttgtaacggagattttaagatttttttaaattgtataattttgtttttagg

SEQ ID NO: 310 - DNA, 8524 bp, Artificial Sequence
  chemically treated genomic DNA (Homo sapiens)
tttaaaaatagaattgtgtaatttgaagggattttgaaattttcgttgtaatttttttagtagaaaggtaaaagttatttaggatagaggttgtaaattgaagtgtaagttaaaatagaaagtggaatttgtatgatatttggtatgtttgtttttaagtaaattgttaattgagttgattataatcgtatttagagaattattttggtatttttataaagtaatggtattgtaaatttataatattttttgaatagaatagaattttttggggtttgatgtttgagttatttttttttttaaagattttataggatatggggattttagtagtttttttggagttttgaagttggttgattttagttggttttagtgttgtttggggttatgtttagtatttggttttttttttttatttttttgtttttttttttgtttttttttaaagtttattatgttttttttttttaattttttattatttgtttatttagttttttttttataaaatgttagaatgtaaagttggaagggtaaatttatatttttattttatagatagttgagattgagtattaaagaggagggttatttgtttagagttttatagtgatagagtttaaatgagaatttaggttttaatgtttttttttttattaatttgtgttttatttttattattttattatatttaggtattatttatgttattaattatttattgttaattttaatatttttattttattttttgagatagagtttcgttttatcgtttaggttggagtgtagtggtattattttagtttattgtaatttttattttttgggtttaagtaattttttagttttagttttttgagtagttgggattataggtgtgtattattatgttcggttaatttatgtatttttagtagagatagggttttattatgttggttaggttgatttaaaatttttgattttaagtgatttgattgttttggttttttaaagtgttgggattataggtataagttatcgtgtttggtcggtatatttattttaaatgtaaattttatattattgttaagagataagaattagtattattttttataaataaaaggtaattttaaaaataaattttggggaaataaaataaggttattaaaatttagttggttgtttgtttgttgaaggtttttttaggtttgtttttgatttttgttttaaaagaaggattagtaagtttttgagaggtattaattttattttagttttagagattttttttttgaaaaaatgagaaggatttttaaaagaattgtaaagtaagtgtatgtttaattttatgtttatgtgttttttaaaattgttttatagtttgggaatagttagtgaaaagaatataagtttgagagttagatagttttagattttagttttgattttgtaatatttattagttattttgttttttttagttttagtttttttatttttaaaatgggagtaataatgtttgttttgtaggttggattacgaagataagaaagaatatatgtatatggtttagtatagtgttaggaatatagtaggtgtttattaaatggtaattttaattattatttatttgtttttgtttgtatgatatatggtaagtagttcggttatttggttggttgtttagaattttatttaattggtggtttttatttaatttgggtattttagtaaattatttatagaaatgtgttttatttaaaatgggaaaggaagtagaaaaggttattgttttttattagtttattgtaagatattattttgtgaacgtggagtttttatatttttaaagataggaaagtttttgatattatttttaaatatatgagaaataaaacgtttttttaaaagtttgttaatttttagtttttattttttatagttttggtttttttgttataaaatagtttaggattagagtttggagatttttattatttgagaggtaggttcgggaattatgtagatgtagatttataattaggtttttttattagttagttatgagatttttggtaagataatttttttttttgagttttaatttgtttatttgtataatgggggagttgtgagaaattagataaagaaaataggtagtgtttggtttagagtttgatatataagaagtttttaatagatagtttttgatattgttgttatagtttagtttttatttggagttaaagttgggagttatgagggtaaattttgtttttgagaagtttggattatattttttattttattttttttggttttttttttatttttattataagggtttttttttatttttttttagtttcgttttttttttgtttttttgttttttaagagttattgttttaggtgaaagtgaaagttgtgggattaaagtagtttttttattttttttttttttttgttgttttttttgttttttttgatattatgggttatttttgtttaggttttaggtaggaatttatagttttttaaagtagggggaggttagaggggttgggatgaaggagttaggtatttgggggatttttagtttttagaatgaggaattataaaaatatatttaaataaaaagtgagttaagtgtaggtttttgaaaatttcggagatatgtttggttggttttgagtttttttggtgtttggagaaatttttggtttttttagttttttgattattagttttgttagagttaattagaattttggttttttaattttttattgtgttttataaattgtttatttttttaggggttttttatgttattttaaatttaggagaaaaaggtaaagttttggggattttttttaggttggaatatttaagatacggttcggggtggaaggcgatgttaaaagttttttgtttttttataaaagtatttgggtttttgtatttattttttgtttttataagatgttttggaagaaggtagttttagttggtaaggagatgataattatttatagaggttggtatttgtttataataagaaggggataggaaacgggttagattcgtttttttttttggttcgttttatttttcgttttttgaattttttattagtttttgtgtggttagtttttgaggttttttaaattcgtttaggtcgtttaggtacgtttgggtagttagtgttttttttgagcggtttttgtaggtcgttttcgggattttagttcgggagaagagagaggtagtttattttatttagttaggagcgggggtattttgtttagtttttatttatttttttgtttttataaaaattagttaggaaggtttttttttcgaagtttttttttttttttttttttattttttatttttaattttcgtttggtcggggtaaaaataatttatagcggttagtaagtagttttagaggacgtattgtagaggtagacgaattatagcgaggtgagattaggcggtaggattattgggcgttcgagcgaggtttttgttgatttttttgttttagttttggtttcgtttaggaaaggggcggggtttttaaagattaatcgcggtttatttatcgggggggcggagtttttagtaatttatcgcgtaggagtttttttagaatatttttataagtttaattttttcgggagtttagggacgtattttgttgtgtacgggaggaggtatggttttagagatagttttttttttttgtttttaggttttataaaggttaagtcgaggcgggttaggagttagtttgttttttgcgatcggagagagattttatgggtgttggggtttgttatagggatttttacggtttttttttttttgtttcgtttttcgttgtttttaggtattttggtagaatcgaaagaggttttattgcggagaggtttgaggaagttttttttatattattacgtagaaaacgggaaggttatagttggggtatggggaggcgttttaaggaagagttttttaatttagaatttcgtttttttttaaaggaaattttttcgtgtgggcgcgtcgttttaattttttatttatttatttatgtatttatgcgtttttattttattttattttattttattttttatttagtatttggagataggtatttattaagagtggggtcgggcgcggtggtttacgtttgtaatttagtattttaggaggtcgaggcgggtagattatttgaggttaggagttcgagattaatttggttaatatagtgaaatttcgtttttattaaaaatataaaaattaatcggatgtagtggcgttcgtttgtaattttagttattcgggaggttgaggtaggagaatcgtttgaatcgtagaggtagagattgtaatgagtcgagatcgtgttattgtattttagtttcgaaggtagagtaagatttagttttaaaaaaaaaaaaaataaataataaataaaaataaaaataaaggtgggggttaggcgcggtggtttacgtttgtaatttaatattttggaaggttaaaaagggagattgtttgaggttaggagtttaagattagtttggtaatatggtaagatttttatttttataaaataaagaaatttttaagttagttaggtatggtggtaaatatttgtagttttagttatttaggaggttgaggtaggaggatcgtttgagtttaagaagttaaggttgtagtgagttatgattgtaatgattatattattgtattttagtttgggcgatagtgtaaaattttattttaaaaaaaaaaaaagagtgggttagttttttgtggtattataaaatattttaagtatgttaggaaattcgggatttttttattttgtagaaatatatatatttgtgtttatattttttgggtttatgaattttgaagacgtgtttttgtttttttgttttttgtttcgttttgttttttgggtgtttgtttggtttttggtttttgggttttttttgatagagttttattttgttgtttaggttggagtgtagtggtatgatttcggtttattgtaatttttgttttttgggtttaagtaatttttttgttttagtttttcgagtagttgggattataggttggcgttattacgtttagttaatttttgtatttttagtagagacggggtttttttacgttggttaggttggttttaaatttttgattttaggtgattcgtttgttttggttttttaaagtgttgagattataggtatgagttatcgtatttggtttttaagatgtttttgaattagtgttaatattttgttttgtagtatggaatatttgggttttggtgtagtttttgtttttgaaggattgtgtttttttaggtttaaatttttttttaaggaaaatttaggagtttgaattagataacggttgaggtgatgattttttaagtttttaatttttggaagaggataagaggttagattttatagattagggaggatggaagaggaggatatttttaattttatttttatggtttttgttgttaagggtatatttgtaagttttgtggattttgtttttaggatttattttttattttttgttatttttgttattgttttaatttagagggtgttattttttatttggattgttttaatagttttttttattttataggatttattgagtatttattatgtgttaggtaattttttatattgttgcgatttttttgataaattttagatttgatcgattgggatatttttttgtataaaagtttttttgggtttttttgtatttttaggatgatttaaattttttattttggtaaagtatatttttttttatttagttttaatttttttttttatgtttattttttgttacgtttttttatgtatattggttttagtttttttttattttttaggtatataattttttttttttacggtttattttattgtttttgatgttttttttttttttttttttttttttaaatagtttaaatgttgtttttttttatattttttttaattttttgaggtagaggtaggtattttattttattttgtttttttttttgtgttgttatagtatttagtatgttagtttataattttttttgtttggttttatttgattgtgagttttttgagggtaggattggatttattttagttttaggtatataataggatattaatatatgggtgttgaatgaatgaataaatgaatgagtgggtttagtaattttttattttaagtatagtttttaattatgataaagagttggtggtagggggtgcgaagttggtaattttaatatagattttaagttgtagtggttttttgagaatggtggttagatattaaaaggttagaaatttttgaaattagggtttagggaattttattaaagttatttaaatatgtttaggatggagagaagattaaaatattttttttttttttaatatattttgaaaaaaataagtacggttttaaattttttgagagaggggtgttattataatgattttagttattatttattttttatttgtttgattttaaaattgggttttttataaaattgtttggggaagtaagtatatagaattaaaatattaattatattatataaaatatattatagtagtaattaaagtagtttaaattaatgtgtgaaggaataaatgttagttttcgggttgttttatggggcgaagattagataagataaagggaagatattttagtatatatatattttgaggaggtatgtgttggtgggtataggtttagagaaggtttagaattttgttgagttgagaagagtgtgttggaggaggaaagcgagaagatgatttaagggaaagtggtaatattcggaggttaattaaaaagggaataatgaagggttttgtaataggaatggggtaaaggatatttaaaagagtagggagttaggattttggaaatttagagatgaaatggtttttgtagggaggtgggtttatagtgttaggtgaatgggtgaggagtatgtttagaggtttagtgtttatagcgttgttagaatttggtatttagagtgttttgtttaatatgtaaatttaattgtgttgttttaaggtttaaagtggttttttagggtttttattttttaagtttgtagagttgtaaggttatgggttttttggtgtatatttttaagtattttttttgtttttttttttatgttttagttttattttttagatgtttcgtgttgttatttttgtttggagagttttttttttattgttattttttttttatttggttaatttttttttattttttaaggtttattttaggtaatttttttttggaaatttttttttaataattaatttatttttttgtgtttttttagaatttggggtagttttatttaagtaagattttagttcgattatattgtattttaatttttttgtttatttgtggagttagtgtattgaggcgatttaattttgtggggtataatgatgaagatttttttttttaatttttgtttttagttatgttgtgttgaattttttttttttattttttaatgatattttgggtagattgtattatttttggattattttttgttgttaaatttttattttttagatttttatttttaaatttaatttaaattttattttatttttttttttatttatttaagagttaatttgagttaggattttgtttgttaggaggaaaaggatttggtggaggtggggcggatggtttgattgggagatatattttattatttttattttaatttcgtgtttatatatggttttttatgggtaaatgagtaagttttttagcggtttttttattgtataatttttttatagggttatttagtttaggtttgatttcgtttattttattttattatttagggtttattagtgttttgatttttttgtttagtagttaatttgtttgagtaggttattagaaaagtgttttagttaggttgattattgtaacgtttatttgatttagagaagtttacgtatttagttagttatattataatgtttttttttttattttttttttattttgtttagataggtatagtttattgtttatagtttattatttattagggaatagtattttagtattttatgtttgtagttattttttagtttttatgagggattttttttgaatttttattattttatttttaacggggagggaggaaatggtttttttttatgaatatttgattatttagtaaaattaaggattttttttttttttaagattgttgtatgggtaaggaagaggaaattggaattttgggttgtgggtgtaaagcgagttttgttttttttagtaaatttggagggaaattatttggttttttaaaatatagggtatagaggatttgttggttttggttgtgggttagttatgtggttgattttta

SEQ ID NO: 311 - DNA, 5429 bp, Artificial Sequence
  chemically treated genomic DNA (Homo sapiens)
atgtagttaaagtagatttttaagggaagtttatagttttaaatgtatatattagaaaataagaaatttttaaattaattaagtatttaatatattagaaaaagaatggtaaagtatgtcgggtgtagtggtttatatttgtaattttagtattttgagaggttaaggtaggtggattatttgagtttaagagttcgagataagtttgattaatatggtgaaattacgtttttattaataatataaaaattagttaggtgtggtggcgtatatttgtaattttagttattaaggaggttgaggtaggagaattatttgattttaggaggaggaggttgtagtgagttaagattatgttattgtattttagtttgggtaatagagtaagatagtttaaaaaaaataataataataatagtgaaatagttatatataagtaaattaagttttattaggtttttaaggaatagattatttttattgtatataatttgtatataaaaaaataaaaaatagtatttaaaaaataagtggttaaagtaaggaaaatagaatcgtgttatagaaattaagggaagtaataatttttatgtaggtggagagttgttagattttatatatttttgttaaattttgttttttggatgaggtattttttattttttaaatttttttattaggggtatagatatttatattgtattttaatttttttttttatagtaataatgattattattaattaattttaattttgttttgttttttgggttttgtgagatgaggttttgttttattttttaggtttgagtgtattggtatgattatggtttattgtaatttcgattttttgggtttaagtgatttttttattttagtttttcgagtggttgggattataggtacgtgttattatatttagttaatttatttttattatgtgtagagacggggtgttattttgttgtttaggttggttttaaatttttaggtttaagtaattttttcgtttcggttttttaacgtgattgggattttaggtgtgagtcgttttatttggttaattttatatttgtttttgagattatatgatcgatgtttgatttttatattggtgtgttaatttcgttagggtagaaattatatatttgtttgtttgttttttatttttgtgttttattatttggttggtttttaatataaaatgaatgtgtaaaaaacgtttgttaaatgaatgaggaggtttaaggggttttgagttttttgacgtttttattttataattgtggatagagtcgttatagtataaagttgagttggattatttaatgtttagttagtgttttacgtgttaggagatattgggagttgtgttgggtttttgaggagtgggtagaggttggaaatatttatagttggttagttttttgtgttatttagattggggaggtgtagaaatgaaaattatagagttgcgaggatttagaattttattaatgagtttaatttattgttttgattaggtggttttttaaagttttgttgggaaggaggttttaaggtggtgggggtagtagtgttggtggtggttatcgaagaaagtgggagtcggggaggaagtaatggggagtaggggataaagagggttagataaatttagagttttaggtgatgagatttaggaagtttaagttaggaatagtgattgcggatatttttgttttataatagaatttttttttaaggaaaggttttgtagagattggttttgttgagcgttttaataggttattgatttataaaaattggagaaaaaagataaagtttgttatatttaatagttttttgtttagagttggtttagaggaaattttaagtaagttttgtgtttaataatttgggtttgaggtagggtataggtaagggaatagataggagatacggaggtaagaataagattttagttgaaagagaaattagagttagaggtagttataagaatatttaatttattggaatttatgtaggtggatagtttgtttaggatttgttttgagtgggaagtaaagagtattttatttagattttaaggagtagggtgtttttggttgatatttaggttatagttattgggttaggtggagggttggttaggtttttttaaaagttatgagaggttaggtatagtggtttacgtttgtaattttaatattttgggaggtcgaggagggtagattatttgaggttaggagtttgagattagtttggttaatatagtgaaatttcgtttttattaaaaatataaaaaattagtcgggtatggtggtcggtgtttataattttagttatttgggaggttgatgtataagaatcgtttgaatttgggaggtaaaggttgtagtgagttgagattatgttattgtattttagtttgggtaatagtgagagatttttttttaaaaaaaaaaaaaaaaaaaagaattaaaaaaagttatgagagtttttagagtttttaagaagggttgttgtgggtttgtttttggaaaggaaagaaaagtagggagttgttgagaaaatattatatgtttttatgttttagttaggtatgggggagaggttgattttaaaagagaaagtggttgtgtgagattttaaggaagatgttagcgggttgtattttagggtttttagataaaaggaagggtttagttaggtatggtggttcgtgtttgtaattttagtattttgggaggtcgaggtaggtagattatttgaggttaggtgttttggtttagtttggttaatatgataaaattttatttttattaaaaatataaaaaataagttgggcgcggtggtttttttttgtaattttagttaaggtgggcggattaatttgaggttagtttgattaacgtggtaaaattttatttttattaaaaatataaaaattagttgagcgtggtggtacgtatttgttattttagttatttaggaggttgaggcgtgagaatggtttgagtttgggagatagaggttgtagtgagttgagattgtattattgtattttagtttgggtgatagagtgaaatggagggaggaaaaaaaaaaaaaaggaaggtttcgtttagggagttagtttaggatggggaaggtttattagaagtggatgtaaagagtgttggagatgagtttattttatttgtttaggaaagaaaaacgtttagaaatttggtttttttttttttggtcgaggttttttaggaaagttaggtagattttgtttttgttttgattttttggagaagtgatatgtagaaaagaggagatgggttttggtttagaggatagtagcgttaggttagtgagtagtttttagtcggtttaaggttgttaggtttagcgaattgtaagtttttgttcgataagtttttttttaaaggtttttagttttttatgatttttttgagggttttatttatttttttagggtttgtagttagttagttattttattgttttatgtttgtagtgaagatatttattataatttggaaatggttggtgatagaaaagtttttagggttatagtattttttgcggtgggaatttaggtgttttgtttgatggtgataaggttggttttgtataaatagttttttgaattatatttagatgtggtttttgatttgagtggatttttatgaagagttgtagagggggttgggaaaagataagagaatggagaaaatgaggagaaaggaaattatagagtgagatagagaatagatttgataggtgtgattatagtagtgtgatatttatgaatagtgtggaaataacggtaaagtttttgaattaaaaattttttggggaaataagttattttatatatcggttgttgaggaaagagtggaggaggttgttgattcgtgtgtgtttttatgatttaaagagggaaaagtttagttgtttttaatatttcgaaattagttttgttgggagaattgggaaaataaaaaagagatgattttcgtaggaagttatttttaattttaagtgtttaaggttaggagagaagatgttttaggcgatttaggatattagtgattgatatagttagaggtgggaaaggggaggataaagatggtataaaagtgaggagtgagtaagggtttgagagggaaggttatgtgggtagtaggtggtatttatattagagattgatatgaggattaaaggagagtataggtgatcggttagagtgtgatagaagagaggtagttttatattttttgtttgtaattttgagtattttgtagtaaattcgtttggttattaaattagattttaattgagataaggttatttaagtttttttttagttggtgtaaatatttaatagttttgttgtagaaatgttgcgtttgattatgagattattttaattttttaagggtgttttgtggtgttggtttttgtataaatttgaaaaattttgaattttaaaatttatttgatttttaaagttttagataagagtttgtggatttgtgtttaattttggtttttttttttttttttaattgttgtttgtgaaaggagggatgtaggtatgggagataggagttttgcgaattcgtttgtaaattgtggacgggggggtgggtggggggggtaacgtgggtatttttgtgtataagtgtatgaataggaggggtgagtaattgtgtgtttattatttttttgttaaagaagtaggagttagtgggttacgtgttttatgagtaggagaggcggaaattaaggaaggtttatgtgttggaggaagtatgtttgaagagtagtaggttttatagagtttgttttttaatattttttttagtatacggaaggggaagggggtggaggttgttgttatgagagagaaaaaaaaaatagttataatagagattttgtttttaaaggttggtttgttatttgaagtagttattgtttagggggtgtaaagaagagatagtagcgtttagtttggaggtgttaattttagaggttagtattagtaattgggtatagaaaggagtcgtttgggtagggattatggtacggttatatttttggtggttgtgcgttttggggattttggtggggtttttagttattttagtttttaagagttgtttagagaggtattattgggtttagggaaagttgtgttgttagatgtgtgagttaggtaagagggggttttggtaagggttaggtgattggcgaaagagagaggattggggttaatatagtaaataggcgtagggtgagattgagtttaagtaaggagggaaattttgtagttgtggggaggtattattttgaagagggtagagaattagttttttttaggttttgattttttattttttttttttagg

SEQ ID NO: 312 - DNA, 5429 bp, Artificial Sequence
  chemically treated genomic DNA (Homo sapiens)
tttgggaggagagggtaagggattaaggtttgagaagggttggttttttgttttttttaaggtggtgtttttttatagttgtaggatttttttttttgtttgagtttagttttattttgcgtttatttattgtattaattttagttttttttttttcgttagttatttggtttttattaaggtttttttttatttggtttatatatttggtagtatagttttttttgagtttagtagtgtttttttgggtagtttttgggggttggagtagttgagagttttattagggtttttagaacgtatagttattagggatgtggtcgtgttatggtttttgtttaggcggtttttttttgtgtttagttgttgatgttggtttttggagttagtatttttaagttgggcgttgttgttttttttttgtattttttgggtagtggttgttttaggtggtaagttaatttttgaaggtagaatttttattgtggttgtttttttttttttttttatagtagtaatttttattttttttttttttcgtgtgttggggagagtattaaagagtaaattttgtgagatttgttgttttttaaatatgttttttttaatatatgagttttttttagttttcgttttttttgtttatgaagtacgtagtttattgatttttgtttttttgataaaaaggtgatggatatatagttgtttattttttttatttatgtatttgtgtataaaggtgtttacgttattttttttatttattttttcgtttatagtttatagacgaattcgtaggatttttgttttttatatttgtatttttttttttatagataatagttgaaagaaggaaggagaattagaattgagtataggtttataagtttttatttgaaattttgggggttagataagttttggaatttagaattttttaggtttatatagaaattagtattataaaatatttttggggagttggggtagttttataattaaacgtaatatttttgtagtaaaattattgaatatttatattaattgggaggaagtttaaatagttttgttttaattgaggtttggtttgatggttaaacgagtttgttatagaatgtttagaattgtaagtaaggggtgtagagttgttttttttttgttatattttgatcgattatttatgtttttttttaatttttatgttagtttttgatgtgggtgttatttattgtttatatggtttttttttttagatttttgtttattttttatttttgtgttatttttattttttttttttttatttttggttgtgttagttattggtgttttggatcgtttggagtatttttttttttagttttgggtatttgggattaaaggtagttttttacgggggttattttttttttatttttttagtttttttagtaagattgatttcgggatattggaaatagttagatttttttttttttgagttatggggatatatacgggttaatagttttttttattttttttttagtaatcgatatgtggagtggtttatttttttaggaagtttttaatttaggggttttgtcgttgtttttatattgtttataaatgttatattgttgtggttatatttgttagatttgttttttattttattttgtagttttttttttttttattttttttatttttttgtttttttttagttttttttgtagttttttatgggggtttatttaagttagaagttatatttgggtgtgatttagagagttgtttatgtaaaattagttttgttattattaggtaaggtatttgaatttttatcgtagagagtgttgtggttttgaggatttttttgttattagttatttttaggttgtggtaaatgtttttattgtaggtatggggtagtggggtggttagttgattgtaggttttgggagggtggatgagatttttagaagaattatgaggaattggggatttttaggaagaaatttgtcgaatagggatttgtagttcgttgagtttagtaattttgaatcgattgggaattgtttattagtttaacgttgttgttttttgggttaaagtttatttttttttttttatatattatttttttagggggttagagtaggagtagggtttgtttggtttttttggagggtttcggttaagaggaggaaggttaggtttttggacgttttttttttttaggtaaatagaatgagtttatttttagtattttttgtatttatttttggtgagttttttttattttaggttggttttttggacgggatttttttttttttttttttttttttttttattttattttgttatttaggttagagtgtaatgatgtaattttagtttattgtaatttttgttttttaggtttaagttatttttacgttttagttttttgagtaattgggatgataggtgcgtgttattacgtttagttaatttttgtatttttagtagagatggagttttgttacgttggttaggttggttttaagttgattcgtttattttggttgggattataggggagagttatcgcgtttagtttattttttgtatttttagtagagatggggttttgttatgttggttaggttggattagaatatttagttttaggtgatttgtttgtttcggttttttaaagtgttgggattataggtacgagttattatgtttggttgggtttttttttttgtttagaggttttgggatgtagttcgttgatattttttttgaaattttatataattatttttttttttggggttagttttttttttatgtttggttggggtataaaaatatatggtatttttttaatagttttttgttttttttttttttttagaaataggtttatagtagttttttttgagaattttgaggatttttatgattttttttggtttttttttttttttttttttttgaaaaagggttttttattgttgtttaggttggagtgtagtggtatgattttagtttattgtaatttttgttttttaggtttaagcgatttttatatattagttttttaagtagttgggattataggtatcggttattatattcggttaattttttgtatttttagtagagacggggttttattatgttggttaggttggttttaaatttttggttttaagtgatttgtttttttcggttttttaaagtgttgggattataagcgtgagttattgtgtttggttttttatgatttttgagagggtttgattaattttttatttggtttagtgattgtagtttagatgttagttaggggtattttgttttttaaaatttagataagatgttttttgttttttatttagggtaagttttgggtaggttgtttatttgtatgagttttagtaggttgggtgtttttgtggttgtttttggttttgattttttttttagttaaagttttgtttttgttttcgtgttttttgtttgtttttttatttgtattttgttttaggtttaaattgttggatataagatttgtttaaagttttttttaaattagttttaaatagaaggttgttaggtgtggtagattttgttttttttttttaatttttatgaattaataatttgttaaagcgtttagtaggattagtttttgtaagatttttttttaggaggaagttttgttatgggataaagatgttcgtaattattgtttttgatttaggttttttgagttttattatttgaagttttgagtttgtttggttttttttgttttttgttttttattgtttttttttcgatttttatttttttcgatgattattattagtattgttgtttttattattttaaagttttttttttagtaaggttttgagaggttatttggttaggatagtgagttaagtttattaatgaggttttgggttttcgtagttttgtaatttttatttttgtatttttttagtttgggtgatataggagattgattaattatgggtatttttagtttttgtttattttttagaagtttagtatagtttttagtgttttttagtacgtaaggtattggttaaatattggatggtttagtttagttttgtgttgtagcggttttgtttataattataaaatggaaacgttagagggtttaaggttttttagatttttttatttatttgataagcgttttttgtatatttattttgtgttaggaattagttaagtaatggggtataaagatgaaaaataaatagataaatatgtggtttttgttttgacggagttgatatattagtgtgagagttagatatcgattatataattttaaagataaatgtaaaattggttaggtgaggcggtttatatttggaattttagttacgttgggaggtcgaggcggaaggattgtttgagtttaggagtttaagattagtttgggtaatagagtgatatttcgtttttatatataataaaaataaattaattgggtgtggtggtacgtgtttgtggttttagttattcggaaggttgaggtgggaggattatttgagtttagggggtcgaggttgtagtgagttatgattatgttagtgtatttaagtttgggagatagagtaagattttattttataaaatttaaaaaataaaataaaattaaaattagttagtaatggttattattgttatgaaggagagagttggggtgtaatataggtgtttatatttttaatagggggatttaaggggtagggagtgttttatttaggaagtaaagtttaatagagatatgtgggatttggtagttttttatttatatgagaattattattttttttggtttttgtgatacgattttattttttttgttttgattatttgttttttaagtgttattttttatttttttatatatagattatatataatagggataatttgttttttgaaagtttggtagaatttgatttgtttgtgtgtagttgttttattgttattattattattttttttaggttgttttgttttgttgtttaggttggagtgtagtggtatgattttggtttattgtaattttttttttttgaggttaagtgatttttttgttttagtttttttagtagttgggattataggtgtgcgttattatatttggttaatttttgtattgttagtagagacgtggttttattatgttggttaggtttgtttcgaatttttgagtttaagtgatttatttattttggttttttaaagtgttgggattatagatgtgagttattgtattcggtatattttgttattttttttttaatgtattggatgtttaattaatttagaaattttttattttttaatatatgtatttaaggttataaattttttttgaagatttattttagttatat

SEQ ID NO: 313 - DNA, 6286 bp, Artificial Sequence
  chemically treated genomic DNA (Homo sapiens)
gagttagatagggttggagtaaattttagttttgttatttttatgttgtgtgattttaggtaagtgatttaattattttgagttttagtttatttataaagtggggatagtaatattgatttgaaattttgatgttaggattaaatgtttgattaagggtttggtatatagtaggagtttaatgaatgatattgttaatgttattatgtagaatttttaagagtattttcgagggttttatagtttttttttttgtttatgggaaggggtataataaatttagttttggagagttagtgtttttttgtttagtttttaattaggtttggtttaggggtgttatgtttgtgggtgtgtattgttggggtttatttaggtagttgagaatttttaatgttggtgttttaaaagggtagggagatttggggatgtgagttggagggagtttgatatgggttttgtcgattaggattggtggaggttaagggtgatttagagaagtttaatggagagttttattgttattaaggtttttaagaaagttgtttagaaaaggtgtatttgcggttgggcgcggtggtttttgtttgtaattttagtattttgggagattaaggtatgtagattatttgaggttaggagtttaagattagtttggttaatatggtgaaattttgtttttattaaaaatataaaaattagttgagtgtagtgatgttcgtttgtaattttagttattcgggaggttaagtatgagaatcgtttgaatttggggagggggaggttgtagtgagtcgagattgtattattgttttttagtttgggtaatagagtgagattttattttaaaaaaaaaaaaaaagaaagaaagaaaaggtgtatttggatttattgaagaagaaaggttttagttttttttttttgatttttagttttttatttgttagttgttgtttgggttagaaagaattttttatttgttaagggtattttggggttatttgggattcgggtttttagttgttggaggaagtttttgaattttttgaattaagttgggattttgtgttttgtttagtattattttggggatatagatttttaattttttttggatggttttttattgtatttattttttttattttttttttaagaagtttatcgagttgagattgtgtgagtaagcgtttttcgttttttagttttttgtagtttttcgggtttggtttttttttatagtttgttttggagggttttacgattttataataaggattgttgttgtgttttgtatagagtttagggatttttttttttattttttatagtatttttatattatttgaaatttgtcgagggtattcgggggttttatttattgtttgtttttaagagttttatgaatggttgttttttttggttgttattagtttatttttttttgggatttagttggttttttggttataaaatgtgttttttttttatttaagttatgtgttagttatttttttgggcgttttgggggaattttggtttttaggagtatatagttttttggggtagagggatgtatgaattagttattatggttatgatatgatgagattagatttagaattgcggtataaaaaatgatagaaattattttttgattgggaagagggttgggggataggagatattgttaggaaagtaataaggaggaggtggtattggaataggttaggaagatgattaggagtttgtgtgcgttttaggtggaggttagcgtgggtaaaggttggtaggggtgagaaggttgtatatttggttggagtataggtttaggagaagtaaaaaggtataagggaggagttagtttttgttaggttgtgagtagatttgtgtatttttgtatttgggtgattttgatttaggggagttattgtaggggttttttttttgtagaatgggtataaaagtaggattttgtttatggggtttttatgaggatataagaaattaatgtttgaaaatttttagtataaaataagtatttaaaggtagttgttattgttattattaaatgaataatataattttttacgtggttttttgttaaaatatatattatattttcgtaagggttttttataggggagtgttttggtgagatgtgtgtgttagaaaggtttttttggaaatttatggagggaaggatatgagggagagataagtttttataatatttatagatttattttttttaatggatgtgtaatattttattaaatggatgtattataattttcgtaattattttttgttgtgaattttagagtattttaaaaatttataaataatatataaggaaatgttattgtatagtttttttttttttttttttagttttttagttaaattatttttttagtttttttttattgaggtgaaattattgagttatttataagtagtatatatttttttttttttttggtttttgttaaaaattgttatattgttttttgaaaagggttgtaatatttattagtagagtatgaatgagtattttggttttattataattttggggttggatttattaaaattgtttttataaagtaaaaaaaaaaaaatgatgattgtatagatttaaaaggttattaaaggttgtttgaatttgtatttttttaattattaaaaaggttaaatttataaaatttgtaattgatttttatttgtatttttttttgtgtaagttattttgatgttgttgtttatttatttatttaaaatattagttttttttttttttttttttttaattaaataaaaaatagagatgaggttttgttacgttattcgggttggttttaaattgggtttaagtgattttttaatttcggttttttaaagtgttgggattatagatatgagttatgttatttagttgttagtttttttatttttgtagtagaaagttttggattgggaagtaggtgttttgcgttttttttgtttttgtttggttttgttattattataggtaggttatttttataattgtttattttattgtttaatatagttttagtttaaatagtttaagatattgggtttggtatatttagaggagagtttggaagtgggttttttgggaaggggtatgatggagtagtttttttaagtggagtttagtagttttaggagggttgagtatggagtggttagttgtggagattttgttgggaagtttttggtgggaggttattatttttattttatagggtttttatttgatggaggtttggtatttcgtaggatagattaaggtagatatagaagttagagtatttttaggttattttgggtttagggaaaataattggtttatttttaattagagtatttaggattgtttgtttatttttgagttttggtttttatatttgaaaattaaataaaattagttaaaagaatttttgatttgtggtttatttagtagatgtttaatatagatatacggaatgtggaataaaaggagtaaagagaaaatttaggggatggggaagtattggaagggaaaattatttattagtaaatgagaatatagtacgaggaggtttgaattatttttgttaggagagagtgttagtcgttttttttaggaagaaaattttaaagggttaggttttagggaaataaaatgatttatattatttattagtttttttaatatttagtttatttatttattaatttatttatttatttatttatttatttgttgtttatttatttatttatttatttatttatgtatttatgcgtttatttatttatgtatttatttatttatttatttatttatttatttatttatttatttgttgtttatttatttatttatttatttatttatttatttatttatttatttatttatgtatttatttatttatttatgtatttatttatttatttatttatttatttatttatttatttatttatgtatttatttatttatttatttatttatttatttatttatttatttatttatttatgtatttatttatttatttatttatttatttatttatttatgtatttatttatttatttatttatttatttatttatttatttatttatttatttatgtatttatttatttatttatttatttatttatttatttatgtatttatttatttatttatttatgtatttatttatttatttatttatttatttatttatttatttatttgttgtttatttatttatttatttatttatttatttatttatgtatttatttatttatttatttatttatttatttatgtatttatttatttatttatttatttatttatttatttatttatttatttatgtatttatttatttatttatttatttatttatttatttatttatttatttatgtatttatttatttatttatttatttatttatttatttatttatttatttatgtatttatttatttatttatttatttattaatttattatttatttattgatttattttatagtaaatgtttatgaatggggatgggtgggtgatggttgttttttttgtagtttttttaggttagttgttttttttaaagaattttaagggtatgggagaaggttttggttgatcgtgttagggataggaaattatttatattttatcgttttttggggtaggagtggaggtgggggtattggaatttttttggggttttttaatattttgtgagtttttatttttagggttagaagttgtttgttttcgtttttcgtagtttaggtgcggcgggtagtatattttttagagttaggattattagtttcgttaaattcggggcgggttatttaaatagttaagggaggcgttttttagtgtgtttttttttgagttatttttgtacgtgtttgttttttttttttttcgttgtttgtagttaagtgtttttggaattaatttgatacgggagaattaaggttgaaatttcggaggaataattatttttgaagtgatttcgcggcgtgcgttgggtgcggattaggtggtcgcggcgggagtgtgttggagtttgaagtttacgcgcgcggttgagaatcgtcgggatcgtacgtgggcgtcgcgcgtttttttcgttttttaggtgggcgtcggtcgttaggttattttacgttcggtttcggggatgcgcgtttttttcgtcgcgttgggattgttgtttttgggggcgttacgagtttttttataggtaagcgggtgacgggcgtttggggaggtgtcggcggtttagagttcggatagtgtggggtgcgtgggacgtaagggaggatattttttatttcgttttttgtttagttggagtgagggggcgcgggtgataagtaggaatatcggaatatgttagtatttataggtgggaggttggttgaagggttagtggtggggggcgttttttttttatttcgcgatggttgggattgatttatttatttagtgtgaattggattgagagtattgttatacgcgggaggcgttttttagttcgtttatttgcgggttcgtcggggttttgggtagattaggtgaggtcgtgggagtagtgggtaggttagatggggttttttttagttatgggaggttggtcgttcgcgttttattttgttgtgtgcgcggtttcgtttgttttttttttaagttggttattggttggagggttaaggaaaggagggagagttggttgtgggtgagagtggggtgagggtgtaggattatcgggattagtttttttaattcgcgttcggtaaagtaacgttgtggattgaattcgttggagtacgtggtgggtatttgtttttggaagaaggttagtggtggggttgaagtttatggtgggttgttttagaattgagtttggggattgttttaggaaaattgagtatttattagtggttagcgttaaattaattattgtggggagaatgtaaagtaattaggcgtgttttacggagtttaggggttgttggagagagaggtttttagttgatttaggatttcggtggatttttgtatagaattatagtaggtgcgagtggatgtttgttgaatgatatagagggaaaggaaggagtaggttgttagtttagcggtgggttacggtgggggagagggaagatttagtttttttttaattttataggaagagaggattttatgttatggattaattttagttatttgaattttaggtag

SEQ ID NO: 314 - DNA, 6286 bp, Artificial Sequence
  chemically treated genomic DNA (Homo sapiens)
ttgtttaaggtttagatgattagaattgatttatagtatggagttttttttttttgtaggattaaaggggaattgggtttttttttttttttatcgtgatttatcgttggattaatagtttgtttttttttttttttttgtattatttagtaggtatttattcgtatttattatggttttatgtaggggtttatcggggttttgggttagttgagggtttttttttttagtagtttttgggtttcgtgaaatacgtttggttattttgtattttttttatagtgattaatttggcgttggttattggtaagtgtttagtttttttaaagtagtttttaaatttaattttgaggtaatttattatagattttagttttattattgatttttttttaggggtaaatgtttattacgtgttttagcgaatttaatttatagcgttgttttgtcggacgcggattggggaagttaatttcggtggttttgtatttttattttatttttatttatagttaatttttttttttttttttgattttttagttagtggttagtttaggaagggggtaaacgggatcgcgtatataatagggtagagcgcggacgattaattttttatggttaagggaggttttatttggtttgtttattatttttacggttttatttgatttgtttaggatttcgacgggttcgtaggtaggcgggttaaagagcgtttttcgcgtatggtagtgtttttagtttaatttatattgaatgaatgaattagttttagttatcgcggggtgagaaggaggcgttttttattattagttttttagttagttttttatttgtgggtgttagtatatttcggtgtttttgtttgttattcgcgtttttttattttagttgggtagggaacggggtgaggagtgtttttttttgcgttttacgtattttatattgttcgggttttggatcgtcggtatttttttaggcgttcgttattcgtttatttgtgggaaggttcgtagcgtttttaggaatagtagttttagcgcggcgaggaggacgcgtattttcggggtcggacgtgaggtggtttggcggtcggcgtttatttgggaagcgggggaagcgcgcggcgtttacgtgcggtttcggcggtttttagtcgcgcgcgtggattttaggttttagtatattttcgtcgcggttatttagttcgtatttaacgtacgtcgcgaagttattttaaaagtggttgttttttcgaggttttagttttagttttttcgtattaaattggttttaggaatatttagttataagtagcgaagaaaaaagggggtaaatacgtgtagagatgatttaggaaaaggtatattaggagacgttttttttagttgtttgaatggttcgtttcggatttgacggaattagtggttttggttttagggagtgtgttgttcgtcgtatttgggttgcggggagcggaggtaggtagtttttggttttggaggtggggatttataggatattaggaggttttaagggggttttaatgtttttatttttatttttgttttaagaaacggtgaaatgtgagtagttttttgtttttgatacgattagttaggatttttttttatgtttttgagattttttggaagggataattggtttagggagattgtagaaaaagtaattattatttatttatttttatttataagtatttgttgtaaaatgaattagtgagtggatgataaattggtggatggatggatggatggatggatgtataggtggatggatggatggatggatggatggatggatggatggatggatgtataagtggatggatggatggatggatggatggatggatggatggatggatgtataggtggatggatggatggatggatggatggatggatggatggatggatgtataagtggatggatggatggatggatggatggatgtataagtggatggatggatggatggatggatgggtgagtagtaggtgagtgggtaaatgggtgggtggatgggtggatggatggatgtatagatggatggatggatggatgtataggtggatggatggatggatggatggatggatggatgtataagtggatggatggatggatggatggatggatggatggatggatggatggatgtatagatggatggatggatggatggatggatggatggatgtataaatggatggatggatggatggatggatggatggatggatggatggatggatgtataggtggatggatggatggatggatggatggatggatggatggatgtataagtggatggatggatgtataagtggatggatggatggatggatggatggatggatggatggatgggtgagtagtaggtgagtgggtaaatgggtgggtggatgggtggatggatggatgtatagatggatggacgtatggatgtataggtggatggatggatggatggatgagtagtaggtgagtgggtaaatgggtgggtggattggtagatggatggattgaatgttggaggaattgatggatggtatagattattttatttttttgaggtttgattttttagagttttttttttggaggaggcggttggtatttttttttaatagaaatgatttaagttttttcgtattatgtttttatttgttggtgaatgatttttttttttagtgtttttttattttttgggttttttttttgttttttttattttatatttcgtgtgtttgtgttgagtatttgttgggtgggttataggttaagggtttttttgattgattttgtttggtttttagatgtgaaagttaaggtttagaaataggtaggtagttttaggtgttttaattaagggtgggttagttattttttttgagtttagaatagtttaaggatattttggtttttgtgtttattttgatttgttttgcgaggtattaggtttttattaggtgaaggttttatagggtaggagtgataattttttattaggaattttttagtaaggtttttataattgattattttatgtttaatttttttggggttgttggattttatttgggaaaattgttttattatgtttttttttaagagatttatttttagatttttttttggatgtattaggtttagtattttaggttgtttgagttgggattatgttaaataatgaggtaagtaattatggaagtgatttgtttgtgataatgatagaattagatagggataggaggaacgtaagatatttgttttttagtttagagttttttattataaaagtagaaaagttggtagttgggtgatatggtttatatttgtaattttaatattttgggaggtcgaggttggaggattatttgagtttagtttgagattagttcgggtaacgtagtaagattttatttttattttttgtttaattaaaaaagagagagagagaagggttggtgttttgaataaataaatgaataatagtattaaaatagtttgtataaggagaaatataaataaaaattaattataagttttataagtttaatttttttagtaattaaagaaatgtaaatttaagtaatttttgataattttttagatttatataattattatttttttttttttgttttataaaaataattttggtaaatttaattttaaagttgtggtgagattagaatatttatttatattttgttggtaaatgttataattttttttagaaagtagtatggtaatttttagtaaaagttaaaaaaaaaaaaaaatgtgtattatttgtgagtggtttagtaattttattttagtgaagaaaaattaaggaaataatttaattggaaaattagaaaaagaaaaaagaaaattatatagtaatatttttttatatattatttataaatttttgaaatattttgagatttataataagaaatgattacggaaattgtggtatatttatttaatggaatattgtatatttattaaaaaggataaatttatagatgttgtggaaatttgttttttttttatatttttttttttatggatttttaaagagatttttttagtatatatattttattaagatatttttttgtagagaatttttgcggaagtatggtgtgtgttttggtagaggattacgtagaaaattatattatttatttaatgataataataatagttatttttgagtgtttattttgtgttaagagtttttaggtattggttttttgtatttttatgaaaattttatgaataaggttttatttttatgtttattttgtaggaaaggaatttttgtagtggtttttttgggttagagttatttaaatgtaagggtgtataagtttgtttatagtttggtaggggttgattttttttttgtgtttttttattttttttggatttatattttagttaaatgtgtagtttttttatttttgttagtttttgtttacgttggtttttatttgggacgtatatagatttttgattatttttttaatttgttttaatgttattttttttttgttgtttttttggtagtgttttttgttttttagttttttttttagttaaaaagtggtttttgttattttttgtgtcgtaattttagatttgattttattatgttataattataatgattggtttatgtatttttttgttttaggaaattgtgtatttttgagaattagaatttttttagggcgtttaggaaagtagttgatatatggtttaagtggagggaaggtatattttgtggttagggagttagttggattttagggggagatgggttggtagtaattaaggaaaatagttatttatgggatttttaaaagtaggtagtggatagagttttcgggtgttttcggtaggttttaggtggtatgaaagtgttgtgaagagtagaaggggaagtttttaggttttgtgtaaggtatagtagtagtttttgttgtggggtcgtggggttttttagagtaagttgtggaaggaagttaagttcgaggggttataggagattggggagcgaggagcgtttgtttatatagttttagttcggtgggttttttggaggaaaggtgaggaaggtgaatgtagtaggaagttatttaaggggaattgggaatttgtgtttttaaagtgatgttgagtaagatataaggttttaatttggtttaggaaatttagggattttttttaatagttgggaattcgagttttaaatggttttaaaatatttttagtagataaagggttttttttggtttaggtagtagttggtaggtaggaggttggaaattagagaggggaggttggggttttttttttttaataggtttaggtgtattttttttttttttttttttttttttttttgagatggagttttattttgttgtttaggttggagagtagtggtgtaatttcggtttattataatttttttttttttaggtttaagcgatttttatgtttagtttttcgagtagttgggattataggcgagtattattgtatttagttgatttttgtatttttagtagagatagggttttattatgttggttagattggttttgaatttttgattttaagtgatttgtatgttttggttttttaaagtgttgggattataggtaagagttatcgcgtttagtcgtaggtgtattttttttgagtaatttttttgggagttttggtagtagtaggattttttattaggtttttttgggttatttttggtttttattagttttaatcggtaggatttatgttaggttttttttaatttatatttttagatttttttgtttttttgaggtattaatattaggggtttttagttgtttgggtgaattttagtaatgtatatttataagtatgatatttttagattaagtttggttggaaattaagtaaaggggtattggttttttagaattaggtttgttgtgtttttttttatgggtaggagggaaggttgtgaggttttcggggatgtttttaaagattttgtatagtaatattaatagtgttatttattgagtttttgttgtgtattaggtttttggttagatatttaattttggtattaagattttaagttagtattgttatttttattttataaatgaattgaggtttagagtagttaagttatttgtttgaggttatatagtatgagggtggtagggttaggatttattttaattttgtttgattt

SEQ ID NO: 315 - DNA, 13469 bp, Artificial Sequence
  chemically treated genomic DNA (Homo sapiens)
agtttagttattttatgattttattattgtttgattataaaaataataggatttggttgggcgtggtggtttatgtttgtaattttaatacgttgggaggtcgagacgggtagattatttgaggttaggagttcgagattagtttggttaatatggtaaaatttcgtttttattaaaaatataaaaattagttgggtgtggtggtacgtgtttatagttttagttatttgggaggttgaggcgggagaattgtttgaatttaggaggcggaggttgaagtgagtagagattatgttattgtattttagtttggtgataaagcgatattttattttaaaaaaaaatttaaaaaataataataatagaatttatttttttatttaaagatagtgtgtttaagatttgataagattttatttttatttttattttattttttatttttttgagtttacgtgttttgtttttgtttaggttgaggtgtagtgtatgattttagtttattgtaattttttttttcgagtttgaagtgatttttttgttttagttttcggagtagttggaattataggtacgtattattatgttcgtgagttatcgtacgcgtttagtttaatagtttttataattaaatttttattttagaagaaaagttttaaaatttttaaaaatttttaaaaatttttatagggtattagtggtagtaatagtttttgtttttttttttatgttaaaagtaaataaggattaattattggtaaaattaagtgttggaagtatagattttttagagaaatatttagttttatagtttcgaaatttttttttgtatttttgtttgaggaatgtatagttttttttttattttttttgttttttggtttgattaggaaaataatttaagttttttagtgtggttatttaaatttattttaatatttatattttaattaatatttttatttatagaatgaaatatttggtatttagtttagggatgttatgtattaggaaataagtaatagattttttgtaaggtttggtggggaagatttaataattttgtgtttgtgattattttgtagaatatattgttgtttttgaggtaaagagttttaagattttggagattatgaaatgtttatttatttaattagtatagatcgtgtttatagtgtgtaaggtattggtagtaatgtatgtggtaaagttttatttttatgtaatttatatttttataaatggggtagttataaaataaataaataagtatagaaataaataagaggttgggcgtggtggtttacgtcggtaattttagtattttgggaggtcgaggtgggtagattacgaggttagaatattgaggttattttggttaataaggtaaaagtttatttttagtaaaaatataaaaaattatttgggtgtggtggtatgtatttgtaattttagttatttaggaggttgaggtaggagaatcgtttgaatttaggaggtggaggttgtagtgagcggatacggcgttattgtattttagtttgggggatagagtgagattttgttttaaaaaaaaaaaaaaaaaaaggaaataagatatattggaagttttttaatttttagttagtatgttttatatagggaatgaagaatttaggttatttttttgtttttatttatatatttaataagaattaaattatttttagaattgattatgttagttgtaattatatagtttatataaatattatggaagttaataaaatatgagttgttttttggaatgttgaatttaatgttttgtaaggattttattaaaaattatttaaaaattataaaataggtcgggtgtagtgtgtaattaagtttgtaattttagtattttgggaggttgaggagggtggattatttgaggttaggagtttaagattagtttgattaatatggtgaaatttcgtttttattaaaattataaaatattagttaggtatggtggtgtatagttgtaattttagttatttaggaggttgagatacgagaattttttgaatttgggaggcggaagttgtagtaagtcgagattttattattgtattttagtttgggtaataaagtgagattttgttttaaaaaaaaaaaaaagtatttttaaaaggtttttagtcgggtatggtggtttacgtttgtaattttagtattttgggaggttaaggtaggtggattatttgaggttaggagtttgagattagtttggttaatatggtgaaattttgattttattaaaaatataaaaaaaaaaaaattagttaggtgtggtggcgggtatttgtagttttagttattcgggaggttaaggtaggaggattatttgaatttaggaggtggaggttgtagtgagttgagattgtattattgtattttagtttgggtaatagagtgagattttgttttaaaataaataaataaaataaaataataaatttttattttagtttaaagaaattgaattgttgattaaaggttatggttaatgtatggatgttagttagtagatttatgttagtaataataataataatggttttagttttatattatttaaatattgttataataaaaagattaagatttttttatattaaatatgtatatataatatttttatatttaatacgttaggaggtttaaagatagaggtagttagattttttgatttttttttttttttttttgagttggagttttgttttgttatttaggttggagtttagtggtacgatttttggttattgtaagttttgtttttcgggtttatattatttttttgttttagttttttaagtagttgggattataggtatttattattatgttttaataattttttgtatttttagtagagatggagttttatcgcgttagttaggatggtttcgattttttgattttatgattcgttcgtttcggttttttaaagtgttgagaatataggcgtgagttatcgcgtttagtcgatttttgtaattttttaaattattttattttttgatttgatttcgagataagtttttttatttttatattttagatttttttacgtgtttataagatagagatgttgattttttgtacgttttttattttttcgttttatgttttttacgtatattatagtcgtaatgtttttatttttggattataataaaggtgttaagttggttttttttggtttttttttttgtgtttttttgttatttttcgttttttgtttttgttttgttcggttgtgtgttttgtgtattacggttattttatttattttttatttgatttaaaaaatttatttagtttaggatttagagtgtaagtgtgtttaaatagtgttaggtttatataatgtttaaaatttttagtaggaaaaatgttattttgttaatttgtttgtgtttgaaaggaatttgtatttaaaaatttggtaatttgatagaggtaaatttaaaatttgaaaatatttttttaaatgtagatttatttatagatagaaggtaagggtaggaagtgatggtgattagcggtgtttgaatgaatttaggaatgtaattgtagatttagggttttaaattttaggttttaaaggattttttggagtatttgttgaaaaatgtaggtttttaagtttattgttagaaattttgatttagtgggttaagaatggaataattaaataatggttttatgtagtggtttatgtttgtaattttagtacgttgggaggttgaagtaagaggattatttgaggttaggagttcgagattagtttggtttatatggtaaaattttatttttattaaaaatgtaaaaaaattagttgggtatggtggtatgtatttgtaattttagttatttgggaggttgaggtaggagaattgtttgaatttgggaggtggaggttgtagtgggtcgagattgtgttattgtattattgtattttagtttgggcgataaagtgagattttgttaaaaaaataaataaatatatgaaagagagaaagaaagaaagaaagaaagaaagaaggaaagaaggaaagaatagaaaagaaaagaaagaaagaaagaaaggaagaaaaggaaagaaagaaatgttgaataagatatagagataatatatagttgggttagtttatgatatttgatagtggggagatttggggttgggttttgaatttgagggtaattaattttttgtaatttttttttttaatttgtaaaaggatagtgatagcgagatattgtgatggggttaatattttggaaaatatttatatgttttttttttttgtttttttgagtgtgttaattattttttatttgtttagtttaatatataggtatattgttttggtagggatggagatttgagaaggagattagaatttgtgtttgaaggtttgtaaagaggaagaagtcgttaatatttagattttgatatttaagatggaattatgtagtaagattattgttatgagatagtatttttatttttttttatttatttttattttgttttttttttatttttatagtagtatgagaaaaattatatatggaagttttaggttataaaaattattttataatttagaaaataggttttgtgtttatgatagttaggttatgaggtttagagttttgtggtagaatgaggatatgttagggaaaagtaaagaaaattttttttttttttggttgaggatattattaaaaggagagtaagaaagagaagagagaaatgggtttgaggtgagtgtagataaggggtgtatggattttgagggtaaggagaggagttttttttagttttttttttttttaacgattattttgagataagagttgtttttgggtagtaggaaaggggagggatagttgtaggtttaatagatgtgggtggggttaaggttatagaatttagaaaaataatttattcgtttttatttttttattgattataaaagaatagagaaggaagggttttagtgatcggttgtttggttgatttatagtagttagattttgataggattatggttatgatggaggtttaggggggatttagtttgggatagatttgcgtgttgatcgtgatttttatagtgtttttgtagtttttttgtgtggttgtaatttacgtgtattttattaacgagttgaagtaggttagtgtagtgtagtgtatttagttttcgaggcgtttagtaaatgtttggttatttgtttttttgtatgttagtttgtttttttttgaagatttttttgttttttttttttgtgggtatattttaattgttaaattatataataattgaggtttttgtaaaattgtaagtttaagaaattgtgtaaattaagtgtagttatataattggttttattagttattagtagatgtgggtaataaaatttttgagggattttttgtttttaaaagtatgtgtattttataatattagttattgtaattttttatgaaagttttttgttaaatgttttgtagtttttttgttttttttttttaaatttttatttgtgtatatttaattgaaaaagataatttttataggttttttggtgtttatttttagtatataaaaatgtaaaagattatttatagataaaatatattagtttaaaatggaaaaaaataataatgataataataaaataatttaaggtagtgtatattgtgatagttttgtttatggggatatgagaatttttgcgaaaataaatagaatgtttttttgtaaaagtagtaatgatatgttttgtaaatttttttttttatattataataaggtttggaataaaatttaaagggattggagtttatattgtagttatgaataaataaaagagtttatttttttaattatcgttggtttagttttttttttgagtttaatgtgtagtaggttttaaaaggtgtatagtaagagattttaattaattaagtggtgaatgataaaattttttttttgtttttaaatataaatgggtaaatttgttttatagtagtagtaatagtttttaaatagggttttgttattgtgatattttttgtcgaaaaaatttgtaatgtagtttttagagtttttatttaatagtatatagtaggatgaagtttagatttataatttatatgaggtttattgttttttgtgaattttggtaaatagatttttttatttttaaatttttttattttattttaagttttgggatacgtgtatagaacgtgtaggtttgttatataggtatatatgtgttatggtggtttgttgtatttattaatttattatttaggttgtaagttttataggtattaggtatttgttttaatgtttttttttttttagttttttattttcgataggttttagtgtgtgtgttgttttttttgtgtttatgtgtttttattgtttaatttttatttatgagtgagaatatgtagtgtttggttttttgtttttgtgttagtttgttgagaatgatggtttttagttttatttatgtttttgtaaaggatatgaatttattttttttaatggttgtatagtattttatggtgtatatgtgttatattttttttatttagtttattattgatgagtatttgggttggttttaagtttttgttattgtaaatggtgttggaataaatatatgtgtgtatgtgtttttatagtagaatgatttataattttttgggtatatatttagtaatgggattgttgagttaaatggtatttttggttttttgaggaattgttatattgttttttatattggttgaattaatttatatttttattaatagtgtaaaagtatttttatttttttatatttttttagtatttgttgttttttgattttttaatgattattattttaattggagtgagatggtattttattatggttttgatttgtatttttttaatgattagtgatgatgagtttttttttatgtttgttggttatataaatgtttttttttgagaagtatttgtttatattttttgtttattttttgatgtggttttttttttgttaatttgttttataagaaataaattttttgtagattttgtatattagatttttgttagatgggtagattgtaaaaatttttttttattttgtaggttttttgtttattttgatgatagttttttttgttgtgtagaagttttttagtttaattagattttatttgttaattttgatttttgttgtaattgtttttggtgttttagttatgaagtttttgtttatgttattttgaatggtatgtttaggtttttttttggggtttttatgtttttaggttttacgtttaagtttttaatttattttgagttaatttttgtagaagttgtaaggaaggggtttagtttttgttttttgtatatggttagttagtttttttagtattatttattaaatagggaattttttttttattgtttgtttttgttaggtttgttaaagattaggtggttgtagatgtgtggtgttatttttgaggtttttgttttgttttattggtttatatatttgtttttatattagtaatatgttgttttggtaattgtagttattttttttgttttgttgttgtaggttggagttatagtttttgatttatgaatttttgagggtgagggtagttgtattagagttgtgtttgtttttgtttattagtatatttttgggtttagtatgtggtttttaagtagttattaatattaatatttgtggtttattatatatttattgcgtgaatgaatagtttttatagatgtggtaggtattacgaatatgtaggcgataagggtagagttaggtttaatttaaagttaggttttaagttattgaatattttcgttttgtattttagatgtagttagttttggtgaatttttatatttttgaaatgttttgtttttagttatgtggtatttttgtgttgataataagtgagaatataaaggattggtattttgtttatttttggggtacgggtatgttatgggtaaaatttgtaataaagaagttattagatagatatagttgtttatgataaaataattgaaaagtaaattgttaatttttgtttgtggatggtttatgtataaattgaggtatttttgatagataaaataaataaatagtgttattttaatttatgattttttcgatgaaaatttttggaattatgattgtaaaattgttgaaaataaattaatttagtttttgatttttaatatatattttaatttattgtatattaaatagtagagaattatgagttataaggaacgttagattttttttttattattataattattttttatagacgaggagataagaaataatgtatttaagtttagataaggttttggaggttggtcgtggggcggttagtatttaggtttgtaggtttttttttttatagtgggatgtttatagggttaatttatttatattttgtgatgtatattgtgtatgtatagcgtattttgtagtattaattttgttagttgattaggaaatgaaaggttaaggattttagaaaagtataaattgtgtaaaagatatagagtagtaattatttgttagggaaatgtagtttgtatattttgtggaatgtaagtttggttattttaattagtcggaaattttttttttggaaatggatgaggtagatttttgttttatttgtaattaattatgaaaattatggttattattagatgattagtaaagttaggtttattgtaggatatatttagaaaagatttttttttgtaagaaaaaaatattaatgaaattgtaattatatttttagttttaagtttatacgagagattggaatattgttatgtttattaatttggagttagaattttttaattttttttaattttgtagtataaatagagtaaagttgttattttatatataagtagttttattaatttgtttatattataagttggattaattttaagattgaattaattagtttttaattgatttatgtaattgtttgtatatataattaaattttttttttaattttattataaaaatggaaattttatataaggtttaagatttttttatttgtatatattttttttaattgtatattgatatatgaatatatgtatattaggtatgtagaagaatttattgagagtgttagaaagttaggagaattatagatattgagtaattattgtgtattagtaattttgaaaagtattgtttggttttaatttttataataattttattatgtaagtataattattttatattatagatgaataaattaaagtttaggcgaagttaagagatttgtttaagattataaaattagtaaaaggtaaaatttgattttgaatttaggtatgaaggaggtatttaataaattgaagtatttatttttttttataatatatttttttaatataatataatgttatttttatagtagcgttttaattattgttgaaaagttttttgaaggtgttattttttttattagaaattttttaaagggaaaataagtttgaattttttgtgtagattttggaaaagtatatttaatataagtattaattttttaaaattgaatataggttttattttgtttggtgaatatttgtagaagatatattttgtaaggattatagggtgtaagggttaaggaaggttttataatattggattggatttttattaatagtttgtagattagtaaatatgaataataaatatgggtttagtttttgaaatttgtgtttttttgagaaagttttatgataaaggaatggtttgttattgtgatattatagatggggaggaaaaaggagaagggttttttttttacggatttttataaatgattttttatgttatttgtagtttgtagaaaatgattgttagagattaatgtttgggtagtagatagggttattgttgttattttgaagtttattttgttgagtttattttgttgattttaagttttattaaggattggttgattttggtttagataattatcgtgtttgtaatagtattaagagtagttattatggaaatttattttttagaattaagggtttttggagttgaagaataggtatttagtgtaagagttttttttttagaggtacgtaaatgaaaataatttttatacgttattttttgtttttaatgtttaagtgtggttagttagagaatatagttttagtttatgatatgttgtaggaaatttatattttgaagtggaaaggatgggaggaggcgggggagacgtatcgtattaattattatttttggaataattatagtattttacgttaattcgttatgtgtttagttattagtattggttaagttttataggagaaattattaaaatttatgatgtaagaaatatgtgagggtggagagagtgattggggttttttttttggatttttattgtttagaaattaatatttatgtataaaaaggtttagaaagagaaatattaaaatgataatgtgatttttagatggtatgattatgggtatttttttttttttttatttttttatattttataaattttttatagggaatgttataaaaatatttatgttatttatgtataatttttatatagatttaaagaatatagtatttttatatagttttatgagaaaataattatatttaaaattatgtatatatatagtttgattttatttttgtaaataagagatattatttaaaggttaagtaggaggtgagaatatagttgttattagtggttgttttgttttgtttttgtgatttatttatttagtttttggagggtttttttttttttttagaaaagtgttttttattttttatgtttttttgtttgtttgtgtattttgaatgtatttaggttttataaatttttgggtaataatgtagttatattaatttgttaattttttatttatttatatttaggattttatttaattttttaggttttttttatttttttttgaaagtatttttggaaaatatttagaagggattataggttttagttagtaattggtgttaatttgggttagtttttgtggtataagttttattattattatttatgttaaattttattttagttgataagttgttgtttgttgttattattgtttgattataggtagtttttaattttgtattttgttttttatagttgaagttttttatatttagttattttttgttgagatagtttatagttgatgtgaagtgaaaaggtatatcgtttttttttttttgtgttatgtatatttttttgttttaataagttatagagatttgtgagtttgtttgtttagtgtaattaaatcgaagtttggttagagttaatttatattgagtgaattgggatagtgtttagggaaagtttgttttttttggaattattttcgggttttgtggttgattttagtttttcgtttttttttttttgatttttttttatagtttgttagatatgtttttatatttttgaattatatgtgattgagtgttttttttggaaaggttttgtattttttaagttaattcgaggtgtaattggatgtttataggtggggtaggtaggggtaaggaaatgtatttaagtttatggttagttatattttaatttaggaggttttagttttatttttaattatatatattacgggaatgttttttttttgtaatttaaaagaggaagaaagaaaataaatatttgtttaaaagtaaatgaatgatttatgttagggtgtgtggaagaaatttattaatttaagtttgtatttttgtatttgagggattttggttaaatgtttaagggttatatggttgagtatagaattgtgtgattttagttgggattttttataaatagttaagatattttgatttaaaatgatattgtttttttataggaaggagtgaattatcgtttaatttgattttttttttaatttttgtagtattttagtttaaataatagattaaaattgttatttttttatttatttttttaggtagttaatttagtagattttttttttttttttgagatggagtttcgttttgttgtttaggttagagtgtaatggtacgattttagtttattgtaagtttcgtttttcgggtttatattattattttgttttagttttttaaatagttgggattataggcgttcgttattacgtttagttaattttttgtatttttttagtagagatggggttttattgggttagttaggatggtttcgattttttgattttgtgatttattcgtttcggttttttagagtgttgggattataggtatgagttatcgcgtttggttaatttagtagatttttttagggaaataacgttttttttattttatttgttaaaataaaataaaacggaagagaagaaatgagtaaagtaaataaataaataaataaaatttttttggttttgtttggattttttgttttttgttttttttaattaaataattattagtttaaagagttttgggtggtttgggatggggtgtgtgtgggtgtgtgtgtgtgtttataatattaagtaaggatttgttgatgagggtgaggagttcgttgataatgatttgattattgttattgtttatttttaattagaatagggagaaaatttttaaagagtgtttaaggtttttattaataaatttttagttagtgtaaatatttaatgagatagtatttagatttttagtggtaatatggtttagattttgttagttagaggagtagaaattagattagtaattagaatttatttagttagttatagttagaaatagaatatgatttttttttaaatgatttggttgttttttatttaggattttaaaatgtaaattgattttattatcgattttgtatttaggtaggtttttagttttaaaatgggatatatattatggtagaattggaagagattttagaattattatagtgaatcggtttaaaattataaatagatataggagaatggaagtaatttgttaagaaaagtatagttgtttagtaagggaggtagggaaggatattgtgattttagatgtttgaagtatatttgtattttttttattatatttagttgtttatttttattttttttttttttttttaaggataaaggagagtatgtttatttttattttaaataggaatttatttaatatgttaaaatttttttaagtttgttattagtttttgttgttttaatttttaaatgaataaaaataaaaagtatttatgtaaaatattgtgttatattttattttaatttaga

SEQ ID NO: 316 - DNA, 13469 bp, Artificial Sequence
  chemically treated genomic DNA (Homo sapiens)
tttgggttgagatggaatataatataatattttgtataagtgttttttatttttgtttatttggaagttaagataatagaaattgatagtagatttaaagaagttttggtatattgagtaagtttttgtttgaaataaaagtaagtatgtttttttttgtttttaaaaaaaaaaaaaaagaataaaagtaagtagttggatatggtggaaaggatgtaggtgtgttttaggtatttggagttatagtgtttttttttgttttttttattaaatagttgtgttttttttgataagttgtttttatttttttgtgtttgtttatagttttgagtcggtttattatggtgattttgaggttttttttagttttgttatggtatgtattttattttgaagttggaaatttatttagatataaggtcggtagtggagttagtttatattttaggattttaaataaaaaatagttaagttatttgggagggggttatgttttgtttttagttgtggttagttaaatagattttagttattgatttgatttttatttttttggttggtaaaatttggattatgttgttattagaaatttgaatgttgttttattaaatgtttatattaattagggatttattggtagagattttaaatattttttgaaggttttttttttgttttgattgaaagtaaataatggtaatagttagattattattaacgagttttttatttttattaataaatttttgtttgatgttataaatatatatatatatttatatatattttattttaaattatttagaattttttaggttgataattgtttaattgagaaaaataggaaatagaaggtttaaataaagttagaagggttttgtttgtttgtttgtttgttttgtttattttttttttttcgttttgttttgttttaataagtgggatggaagagacgttatttttttgaaaaaatttgttgaattggttaggcgcggtggtttatgtttataattttagtattttgggaggtcgaggcgggtgaattataaagttaggagatcgagattattttggttaatttagtgaaattttatttttattaaaaaaatataaaaaattagttgggcgtggtggcgggcgtttgtagttttagttatttgggaggttgaggtaggataatggtgtgaattcgggaggcggagtttgtagtgagttgagatcgtgttattgtattttagtttgggtaatagagcgagattttattttaaaaaaaaaaaaaaaatttgttgaattgattatttagggaaataaatgagaaaatgataattttaatttgttatttgaattaaggtattgtaaaggttgaagggaggattaaattgaacgatgatttatttttttttatagaaagataatattattttaaattaaaatattttaattgtttatgagaggttttagttagaattatatagttttgtatttagttatgtaatttttggatatttggttaaggttttttaaatgtaaaggtgtaaatttgagttaataaattttttttatatattttgatatagattatttatttatttttaaataaatgtttatttttttttttttttttttaaattataagagaaaaatattttcgtagtatatgtagttggaggtgaagttggggttttttgagttgagatatgattggttatggatttaggtatatttttttgtttttgtttgttttatttgtaaatatttagttgtatttcgaattgatttgggagatgtaaaatttttttaaggaaggtatttagttatatatgatttagaaatatgagagtatgtttagtaaattgtgggaaaggattaagaaggaagagacgagaaattgggattagttataaggttcgagggtggttttaggaagagtaaattttttttggatattgttttagtttatttagtatgagttggttttggttaagtttcggtttgattatattgaataagtaggtttataagtttttgtaatttgttggggtaagaaggtgtgtatgatatagaaaggagggagcggtatgtttttttattttatattagttgtaagttattttagtaggaaatggttgaatatgggaggttttagttgtgagaggtaaggtgtagagttgaaagttgtttgtgattaggtagtaatggtagtaggtaataatttattaattgaggtggagtttgatatggatggtggtggtggagtttgtgttatagggattagtttaggttagtattaattgttggttagagtttgtgattttttttgagtattttttagaaatatttttaggaggaggtggaaggaatttggaaaattgagtaaggttttgggtataagtggatgggaggttaataagttaatgtagttatattattatttaggagtttataaagtttggatatatttaggatatataggtaagtagggaagtatggaaagtaaagaatatttttttaaaagaaaaaaaaaattttttaaaaattaaataagtaaattataaaaataaaataaaataattattaatagtagttatatttttattttttatttaatttttggatgatattttttgtttataggggtgagattagattgtgtgtgtgtataattttgagtatggttgtttttttataagattatataaaaatgttgtgttttttaaatttgtatgaaaattatatatggatagtatggatatttttataatattttttgtagaaaatttgtaaaatatagaaaaataaaaaggaaaaaaagtatttataattatattatttagagattatattgttattttggtgtttttttttttagatttttttatgtataaatattgatttttgaataatagaaatttagagaggaagttttagttattttttttatttttatatgttttttgtattatgaattttggtagttttttttatagaatttggttaatgttggtgattagatatatggcgggttgacgtgaggtgttgtggttattttaagaatgataattaatacgatacgtttttttcgtttttttttattttttttattttaaaatatgagttttttgtagtatattataggttgaggttatattttttaattaattatatttgggtattgggggtagaaggtagcgtgtggggattatttttatttgcgtgtttttgaaaagaaagtttttgtattgggtgtttgttttttagttttagaagtttttggttttgaaaagtggatttttatggtgattgtttttggtgttgttataaatacggtggttgtttaggttagggttaattagtttttgatggggtttgaggttagtagggtagatttagtaaggtagattttaagatggtagtaatgattttgtttgttgtttagatattagtttttggtaattattttttgtaaattgtaaatagtataaaggattatttatggagattcgtggagaggaagtttttttttttttttttttttatttatgatgttatagtgataggttatttttttattataaaatttttttagagggatatagattttaggggttaagtttatatttgttgtttatgtttgttggtttataggttattggtgaaggtttaatttaatgttatgaagttttttttaatttttatattttataatttttgtagagtgtattttttgtaaatgtttattagataaagtggagtttgtatttaattttaagaaattaatatttatgttgaatatatttttttaaagtttatatagaagatttaaatttattttttttttggaaaatttttgatgaagaaagtgatatttttaggagattttttagtagtaattagaacgttattataaaaatagtattgtattgtattgaaaaaatgtattgtaaaaaaaagtaggtgttttaatttattgagtattttttttatgtttgggtttaaaattaggttttattttttattagttttgtaattttgaataaattttttaatttcgtttgagttttagtttgtttatttgtaatatggggtaattatatttatataatagaattgttatgagaattgaaattaggtaatattttttaaagttgttggtatatagtaattgtttaatatttgtaatttttttagttttttagtatttttaatgaatttttttgtatgtttaatgtatatgtgtttatatgttaatatgtaattaggaaaaatgtatgtaagtgggaagattttaagttttatatgaaatttttatttttatagtagaattgaaaaagaaatttgattatatatatagataattgtatgagttagttaagaattggttgatttaattttaaaattagtttaatttgtaatgtaagtaaattgatggagttatttgtgtgtggagtaatagttttattttgtttatgttgtaaagttaagaaaggttaggaaattttggttttaaattggtgaatatagtagtattttagtttttcgtgtagatttaaagttaaaggtatgattatagttttattaatattttttttttataaaagaaaattttttttaaatgtgttttataataaatttgattttattggttatttaatagtagttataatttttataattagttgtaaataaaataagagtttgttttatttatttttaaaagaaaaattttcgattgattgggataattaaatttatattttataggatatgtaaattatatttttttagtaaatagttattattttatgttttttgtataatttatatttttttgagatttttagttttttattttttagttagttggtagagttggtgttgtaggatgcgttgtgtatgtatagtgtatattataaggtgtagataggttaattttgtggatattttattgtggagggaagagtttatagatttgggtgttagtcgttttacggttagtttttaaagttttgtttgaatttgagtatattattttttgttttttcgtttgtaaaaagtggttgtggtggtggggggaggatttgacgttttttgtagtttataattttttattatttaatatataatgaattaaaatatatattagaagttaaaaattgagttggtttatttttagtaattttgtagttatagttttaggggtttttatcgagaaaattataaattaaaatagtattgtttgtttgttttgtttgttaaagatattttaatttgtatatggattatttataggtagagattggtagtttgttttttaattgttttattatgaatagttgtgtttatttgataatttttttattatagattttatttatgatatgttcgtgttttaggaataggtagaatgttagttttttgtatttttatttattgttaatataggaatgttatataattaaaagtaaaatattttaaagatgtgaaagtttattaggattagttatatttggaatataaaacgggagtgtttagtgatttagggtttggttttgggttgagtttgattttatttttgtcgtttgtatattcgtggtgtttattatatttgtgaaggttgtttatttacgtaataagtatgtagtgaattataagtattagtattagtggttatttgggaattatatgttagatttagaggtatattgatgagtagaagtagatatagttttgatatagttatttttatttttaagaatttatgagttaagaattgtaattttaatttgtaataataaagtagggaagatggttatagttattaaaatagtatgttattggtatggaaatagatatatagattaatggaatagaatagaggttttagaaataatattatatatttataattatttgatttttgataaatttgataaaaataagtaatggggaaaggattttttatttaataaatggtgttgggaaaattggttagttatatgtagaaaatagaaattgggttttttttttatagtttttataaaaattaatttaagatggattaaagatttaaacgtaaaatttaaaagtataaaaattttagaagaaaatttaggtatattatttaagatggtatgggtaaagattttatgattaaaatattaaaagtaattgtaataaaagttaaaattgataaatgggatttaattaaattaaagagtttttgtatagtagaagaaattattattagagtgaatagggaatttatagaatgggagaaaatttttgtaatttatttatttgataaaggtttaatatgtagaatttataaggaatttgttttttgtaaaataaattgataagaaaaaaattatattaaaaagtgggtaaaagatatgaatagatattttttaaaagaagatatttatgtggttaataaatatgaaaaaaagtttattattattggttattagagaaatgtaaattaaaattataatgagatattattttattttagttagaatggtggttattaaaaagttaggaaataatagatgttggaaggatgtggagaaataggaatgtttttatattgttggtgggagtataaattagtttaattagtgtggaagatagtgtggtaattttttaaggaattagaaatattatttgatttagtaattttattattgggtatatatttaaaggattataaattattttattataaagatatatgtatatatatgtttattttagtattatttataatagtaaagatttggaattaatttaaatgtttattagtgatagattggataaagaaaatgtggtatatatatattatggaatattatgtagttattaaaaagaatgaatttatgttttttgtagagatatggatgaagttggaagttattatttttagtaaattaatataggaatagaaaattaaatattgtatgtttttatttataagtgggagttgaatagtgagagtatatggatatagggagggtaatatatatattggggtttgtcgggggtgggaggttaggggagggagagtattagaataaatatttaatgtttgtggggtttataatttagatgatgggttgatgggtgtagtaaattattatggtatatgtatatttatgtaataaatttgtacgttttgtatacgtattttagaatttaaagtaaaataaaaaaatttaaaaataaagaaatttgtttgttagaatttataaagagtaatagattttatgtgagttatgaatttgaattttattttgttgtgtgttattggataaagattttaagagttatattatagattttttcgataggaagtattatagtaataaggttttatttaaaggttgttgttattgttgtggaatagatttatttatttgtgtttgaaagtaggaaagaaattttattatttattatttaattggttagaattttttattgtgtattttttaaaatttgttgtatattggatttaaaaggaaaattgaattaacggtaattgaggaaatagatttttttatttatttatggttatagtgtaagttttagtttttttggattttattttaaattttgttataatataaaaaaggaagtttataagatatgttattgttgtttttataaaaggatattttatttattttcgtaggaatttttatgtttttataagtagagttgttatagtgtgtattattttaggttgttttattgttgttattgttatttttttttattttgagttaatgtgttttatttgtgaatagttttttatatttttgtatgttgaaaatgggtattaaagaatttgtaaaaattattttttttaattgaatgtgtataaataaaagtttggaaaaggaaaataaaagaattataaagtatttagtagaaagtttttatgaagagttgtaatggttgatattataaaatatatatatttttaaaaataaaaaattttttaggagttttgttgtttatatttgttagtaattagtgaagttagttgtgtaattgtatttagtttatataattttttgaatttatagttttgtaaagattttagttgttatgtgatttagtagttagagtgtatttatagagaaaggaagtaggaaagtttttagagaggggtaagttgatatgtaaagaagtaggtaattagatatttgttaagcgtttcgaagattgagtgtattgtattgtattgatttgttttagttcgttggtaaagtatacgtaagttatagttatatagagagattgtaggagtattgtgaagattacgattagtacgtaggtttgttttaggttgggttttttttggatttttattatagttatgattttgttagagtttgattgttgtaagttagttaggtagtcggttattgaagtttttttttttttatttttttatagttagtgaggaaatgaaagcgaatgagttgtttttttgggttttgtggttttggttttatttatatttattgaatttgtaattgtttttttttttttttattgtttagggatagtttttgttttaaagtagtcgttggaaaggagggaaattgaaagaagtttttttttttgtttttaggatttatgtattttttatttgtatttattttaagtttatttttttttttttttttttgttttttttttgataatgtttttagttaaagaggggagggattttttttgtttttttttaatatatttttattttattatagagttttaagttttatggtttggttgttataggtataaggtttgttttttaaattataagataatttttatgatttgaaatttttatatgtggttttttttatgttattgtgagggtgggaagagggtagggtgggagtggataaaggaaaatagaaatattgttttatagtaatggttttgttatataattttattttgaatgttagaatttaaatattgacgatttttttttttttgtaaatttttagatataaattttaattttttttttagatttttatttttattaagataatatgtttgtgtgttaggttggataggtaggaagtagttgatatatttagaaaggtaaaggaaaaaaatatgtggatgttttttaaaatattaattttattataatgtttcgttgttattatttttttatagattaggaaaagaagttatagggagttaattatttttagatttaggatttagttttaaatttttttattattagatgttataagttggtttagttgtatgttgtttttatattttatttagtatttttttttttttttttttttttttttttttttttttttttttttttttatttttttttttttttttttttttttttttttttttttttttttttttttttatgtatttatttatttttttgatagaattttattttatcgtttaggttggagtgtagtggtgtaatggtataatttcggtttattataatttttattttttagatttaagtaatttttttgttttagttttttaagtagttgggattataggtgtatgttattatgtttagttaatttttttgtatttttagtagagatggggttttattatgtaggttaggttggtttcgaatttttgattttaagtgatttttttgttttaattttttaacgtgttgggattataggtatgaattattgtatggggttattgtttagttattttatttttgatttattgagttagagtttttggtagtggatttaggaatttatattttttagtaagtattttaagagattttttgaaatttaaagtttgggattttagatttatagttatatttttgagtttatttaggtatcgttggttattattattttttgtttttgttttttgtttgtaaatgagtttatatttaagaaaatatttttaaattttaaatttgtttttgttaaattgttaaatttttaaatgtaaattttttttagatatagataaattggtaaggtagtattttttttattaaaagttttagatattatgtgaatttaatattatttgaatatatttatattttaagttttagattgaatgagttttttaaattaggtgaaagatgagtaggataatcgtaatgtataagatatatagtcgggtagggtagaaataagaaacgagagatggtagagaaatataggggagaagattaaagaaaattaatttaatatttttgttataatttagaaatagaaatattacggttatgatgtacgtgaaaggtatgaaacgaaggaatgggaaacgtgtaggaagttaatatttttattttataagtacgtaagaaagtttagagtgtggaaataaggaggtttatttcggggttaggttaagagatggggtgatttgaggagttataagagtcggttgggcgcggtggtttacgtttgtatttttagtattttaggaggtcgaggcgggcggattatgaggttaagagatcgagattattttggttaacgcggtgaaattttatttttattaaaaatataaaaaattattagggtatggtggtgggtgtttgtagttttagttatttgggaggttgaggtaggagaatggtgtgaattcgggaggtagagtttgtagtgattagagatcgtgttattgaattttagtttgggtgatagagtaagattttagtttaaaaaaaaaaaaaaaaaagttaagaggtttggttatttttatttttgagttttttaacgtattaaatatgaagatattatatatatatatttgatatagagaaattttaatttttttgttataataatgtttaaataatatagagttaaagttattattattattattattagtatggatttgttgattgatatttatatattaattataatttttaattagtaatttagtttttttaaattggagtgagaatttgttattttattttatttatttattttgagatagagttttattttgttatttaggttggagtgtagtggtataattttagtttattgtaatttttattttttgggtttaagtggtttttttgttttagtttttcgagtagttgggattataggtgttcgttattatatttggttaatttttttttttttgtatttttagtagagttagggttttattatgttggttaggttggttttaaatttttgattttaggtgatttatttgttttggttttttaaaatgttgggattataggcgtgagttattatattcggttgagaattttttaaaaatatttttttttttttttgagatagagttttattttgttgtttaggttggagtgtagtggtgggatttcggtttattgtaattttcgttttttaggtttaagagattttcgtgttttagttttttgagtagttgggattatagttgtgtattattatgtttggttaatgttttgtagttttagtagagacggggttttattatgttggttaggttggttttgaatttttgattttaagtgatttattttttttagttttttaaagtgttgagattataggtttgattatatattgtattcggtttgttttataatttttaagtaatttttaatgaagtttttataaagtattaaatttagtattttaagaaataatttatattttattggtttttatgatatttatatgaattatgtaattataattggtataattagttttgagaataatttaatttttgttagatatatagatggaaatagaagaatagtttaagttttttattttttgtgtggaatatattgattgaaggttagagaatttttagtgtattttgttttttttttttttttttttttttgagatagaattttattttgttttttaggttggagtgtagtggcgtcgtattcgtttattgtaatttttattttttgggtttaagcgatttttttgttttagttttttgagtagttgggattataggtgtatgttattatatttagataattttttgtatttttattagagatgggtttttattttgttagttaggatggttttaatattttgatttcgtgatttgtttatttcggttttttaaagtgttgggattatcggcgtgagttattacgtttagttttttgtttgtttttatatttatttgtttattttatggttattttatttataagaatgtaggttgtatgagagtgaaattttgttatatgtattgttattaatgttttgtatattgtgagtacgatttatgttggttggatgaatgagtattttatagtttttagaattttaaggttttttattttaggagtagtagtgtgttttgtagaatggttatagatatagaattgttaagttttttttattaagttttataagaaatttattatttgttttttagtgtatgatatttttagattaagtgttaaatattttattttgtgaataaagatgttagttaaaatgtaaatgttaaagtaagtttaagtaattatattgggaggtttggattgtttttttaattagattaagggataaaggaggtgaagagaagattgtatattttttaagtagagatgtaggaaaaggtttcgggattataaggttgggtatttttttaaaagatttatatttttagtatttaattttgttaatagttgatttttgtttgtttttaatatgaagggaaaaatagaagttgttgttgttattggtgttttgtgaagatttttgaagatttttaaagattttaaaattttttttttgaagtaaggatttaattataagagttgttaggttgggcgcgtgcggtggtttacggatatggtggtgcgtgtttgtaattttagttatttcggaggttgaggtaggagaattattttaggttcggaggaggaggttgtagtgagttgagattatgtattgtattttagtttgggtaagagtaggatacgtagatttaaaaaaataaaaagtaaaataaaaataaaaatgaagttttgttaggttttggatatattgtttttgagtgaagaaatgaattttattattattgttttttaaatttttttttgagatggaatgtcgttttgttattaggttggagtgtagtggtatgatttttgtttattttaattttcgttttttgggtttaagtaattttttcgttttagttttttaagtagttgggattataggtacgtgttattatatttagttaatttttgtatttttagtagagacggggttttgttatgttggttaggttggtttcgaatttttgattttagatgatttattcgtttcggttttttaacgtgttgagattataggtatgagttattacgtttagttaaattttattatttttataattagataatggtagaattataaaatgattggatt

SEQ ID NO: 317 - DNA, 5445 bp, Artificial Sequence
  chemically treated genomic DNA (Homo sapiens)
ttgttagtgagaatgttaatgagtatagttattatggaaaatagtatggaggttttttaaaaaattgaaaatagaattattatatttaagtaattttattattaggtttatatttaaaagaaagtaattaatgtatttaagaaatggatttaagaaatggatttatttatttaattaatgaattatgttgatttagtattatttataatagttaaaatatggatttaatttaagtgtttattaatagatgaatgaattttaaaaatgtggtataatatagtggtttattatttagttataaaaagtaaaattttgttatttgtagttatttggatgagtttggacgatattatattaagtgaaataagttaggtatagagagataaatattgtgtaattttatttatatatgtaattttataaagttgattttattgaagtagagagtaggagagtggttatcggaggtattggggtggaggtttgttatttggtataaagttagggttagataggaagaacgatttttagtgttttattgtatagtagggcggttatagttaataataatatattatatattttaatagagttagaagataggatttttaaagtttttattagatagaaatgataaatgtttaaggtgatggatatgttaatttttttaatttgattattatatattgtatatatatattaaaatatgatattgtattttataaatatatatgtgttaattaaaaattttttaaattaaaaattatatatagtgattaatatttagttttttaaattaaatttaattatataataatttaatatatatattttttttttttttattatatataatatatatataaaatatataatatataaatattttatatatatataatatttttattggaaaatagtatatttttttgaaatgtaatatttaatttatattataaattttttatattttgagtgttttaggatattaattttatttagatgtaattttaggtatatttatagatcgagtatatttatagatttagaagagttgttgtcgttatgtttgattggtttaaatttttttttttaaaggattttgaggaaaatacgtttttttttaaagaaaaagggtaaaggagagattttttaaatttgtaattttttatagtattatttagttagaaatttataatttatttttaaaaatatttttgaggttgttaatgtaagaatatagttagagagtgaatgtttattttttgttgtttttgattttcggataaatttataagttatatttttttgaattttatttgtttatttttgagtggatagaatagtttcgttagttataaagttttagtattttagtttgtttattgaatgatagaagaatgttttatatttatattgagaaaaagatgtgtgtaaaaagtagttaaatattgttaataaatattgaatgtataataagatcgttgtataatttgtggtttagatatagtggttttttgtttttgaataaatttgtgatgtggtgtattatttaatgaacgtgaatatgttttttgtttaatagaatttttgttaaattattgttaaattattttttttttcggaaatagatttttgatttatggagtaatgatttttttttgtttatttaataagagatttaagagttatgaatgttatttcgttttttatttgtttttagagaaaatgtagttgttagatttttgtggaggatgtgtatattgttatttttgtttgttgtttttttagttagagggatatgatggttgttttttgtggaagaagaatttgtttattttatgtatggtacggtttattgtcgtaataaatatcggtattggtttaaaaatggttgcgtgtaggttggttagtgatttttttttgagatgtttaggtatgaaagtttttgtttaatatagtgacgaaggtagagggaattttttaaagtagttaaattattttttgtttttagaattttttttgagggatatagaggggaacgatttattagaagagggagaatgtttatggatggagagaagtagtggttataggaaattttgagtgaaacgtagagagaaattgttttttagtattgcgttgtatttttttatttttgtatgtatttaaattataagaatatataaatatattatttaaaggattttaatgatttttagtaagaaggtttttatataatttttatacgaattttattttttatggtaaggttatttcgtatgatttattttaattgttttggaataagaattgatagaaaagaattggattgttatttttgatgtaaaagggtttataaatatttttttaaaagaagatttttatttgagaaggttgatggaggattttttgtttacgtatttgttagattggggtacggttattttattgtgggagttataggtaagaaaaattagagagtagtttattttgggggttaggataataataagttatttttaaaaggttttggaaatttgtagatgtaaagggaaaaaaataaaaaataaaaaataattttaatggtaaaaataagtaagtttgattgcgttattttgtagtaagataatgaggaaatgggaattcgttagagggtaattgggtggtgtttgtaaaagtgaagatgtgttttttttttagtaggtatttgttgggaaatttttgtagacgttataagtatagttgtagaaaatatttattagagtattgtttgtaattgaaaaatgttttatttatattttgaatgtaaagaataaaagtgaatgaaaaaatggaagtattgtatcgtgtttttgatttatatttttttgattatttagtataattattatggaaaatagtgtggagattttttaaagaattaaaagtagaattattatttgatttagtaattttattattgggtatttatttagaggaaaagaagttgttatacgaaaaatatatttgtatatatatgtttatggtagtataatttataattgtaaaaatatagaattagtttaaatgttcgttaattaatgagtggataaagaaattatgatatatatatatgatggaatattatttatttataaaaaggaatgaattaatgatgttcgtattagtttggatgggattggagataattattttaagtgaagtaatttaggaatggaaaattaaatattgtatgttttaatttatagtgggagttaaattataaagatgtaaagatataggaatgatttaatggattttagggatttaggggaaagggtgggaggggggtgaggaataaaagattaaaaaatgggtttaatgtgtatattgttcgggtgatgggtgtattaaaattttataaattattattaaataatttaattatgtaattaaatattatttattttttaaaaatttgtggaaataatttttttttaaatggaagtatttaaaatgtaatttgtttttatatttttgtaagttttattatgtattttagggatagttaatatcgttatacgaatttataggtgaggaaatggaattatagagagattatgtattttgtataaggagagcgagggtgaggtaggatttgtagtttagaagtttgggtttggagttttttattttgtattatattatttttgtaaattttttatttaagattgtgtggaaatgtagagtgagatagaattaaagtttattatttttagtttataggggagtagtgattatttagggtttggtaagtgtttagtaacgtttgttgaaagatgaattaatattttaatgttggggtaaagtagtgaaaaattggggaatgtttaggaattagttattaggataaggtaggattagaatgaatgtaatagtttttataggtttattaagttaataatagaaaaatttaaagttaaggtggtttttgtgtgattaaggattttttgtatatcgatttgttaggttgtggtatagttaatatgggagttgtagataagttatttgagagtggttaatggtagtagttaggtatttggagttggaggtaaggttgattttttttaattagtattatattgagcggggatttaaagttttagaagtttgagtagaaaagttgagattaggttttttgggataggttgtttatatgtatgattgagttttagtgatgagttttagaaggaaaaagtttatgtatgttttttttaaaaatatatttatttatatttagagaattttttagatatttaatttaaatacgtttgtaatatttatttttattttttttatgatattattagtataataatatgaataatttttagtggatttatttttatattttttttaaggattttttattttattttataattgaagattgttaataaattattttttagttaagaataatttaatgttaaaatatttagtttatttgatttttatattaattatttttatgatagtagtaggaatttttagttgttttttttttttttttatgaagttatgtggttttaagtagatagagtttttttgttatatttaagggtgggttttttagatttgagtatattttaaaagtttttttttgattgtgttaatttaaattttaagtttttttagtagatttaaggggttttaaatttatttgagtatgagtgttatgagaagattttgaaatttttataaaaattgaaagtgaaatgaggaagatagattgagtaatttaatcggagggtaaatgttagtaaatttattgtatagtaggggtagagatgtagaaaggtagaaaggagaaaatttaggataatttttttgaggggtgagttaagttttgttatgtagtgtacgtaggatattaataaatatagataataggaaatgatttattttttgtggttatttattttaaaggttttaatttttaaagtttaagtagtgatatggatgattttatagaaagggagtagttacgttttattttttgttttaagaaaagagaagaaatgaaattgaaggagtgtgtttttatttttttacggaaggaaagtttttttgttcgattttttaaagacggaaagttgttggttgtaattttgttgttggtattgttgttttgttgttttacggtggtgtttttttattaggtggtcgttttgtaaggggatttggttagttttcgggtagagttgtagggttattacgcggagaagttgttagtaggagtaggagtttttaaggtcggtttggaggaagttttagttgttatcgcgggattgaaagtgagtttgtagtagttgtaagacgtaggtaagattttgtttatattgttgtttttttttcgttttagttgtttttttaataatttgaagtttttttgtttataga

SEQ ID NO: 318 - DNA, 5445 bp, Artificial Sequence
  chemically treated genomic DNA (Homo sapiens)
tttatgaatagaaaaattttaagttattagaaagatagttgaggcgagggagaggtagtagtgtaggtaggattttgtttgcgttttgtagttgttgtaaatttatttttagtttcgcggtgatagttggagttttttttaggtcggttttgggggtttttgtttttgttggtagttttttcgcgtggtggttttgtagttttgttcggaggttggttaggtttttttgtagggcggttatttggtagaaagatattatcgtgaggtagtaagatagtagtgttagtagtaaggttgtagttagtagtttttcgtttttggaggatcggatagaggggtttttttttcgtgggaggatggaaatatatttttttagttttattttttttttttttttaaggtaagaagtaaggcgtgattgttttttttttgtggagttatttatattattatttgaattttgaaggttggggtttttagaataagtgattatagggaatggattattttttgttatttgtgtttgttgatgttttgcgtgtattatatggtagggtttggtttattttttaggagagttattttgaatttttttttttttgtttttttgtatttttatttttattgtatagtaggtttgttggtatttatttttcgattggattgtttaatttgttttttttattttatttttagtttttgtaagaattttaaagtttttttataatatttatgtttaagtagatttaaaattttttaaatttgttgaggaaatttggagtttggattggtatagttaagggaaagtttttaagatatgtttaggtttgagaagtttatttttaagtgtagtaagggaattttgtttgtttgggattatatggttttataaggaagggggaaaagtagttgaaagtttttgttgttgttataaaaataattaatgtgaaggttagataagttaagtgttttagtattgaattgtttttagttagagagtgatttattaatagtttttaattatgaaataaaatggagaatttttgaaggaagtgtggaagtaagtttattgggaattatttatattattatattaataatgttataaaaagaatgagagtaaatgttatagacgtatttaggttagatatttgaaggattttttaaatataagtgaatatatttttaaggaaaatatgtataaattttttttttttgggatttattattgaaatttaattatgtatatgaatagtttgttttaaggagtttggttttagtttttttgtttagatttttgaggttttaagttttcgtttaatatgatattagttgaggagaattagttttgtttttagttttaaatgtttgattgttattattaattatttttaagtagtttgtttataatttttatgttgattgtgttatagtttaataggtcggtgtataagaggtttttgattatataagagttattttagttttggatttttttgttgttgatttggtggatttgtgaggattgttgtatttattttagttttgttttattttgatggttggtttttggatattttttagttttttattgttttgttttagtattgaaatattgatttattttttaataaacgttattgagtatttattaagttttgggtagttattatttttttgtggattaagaatagtgagttttagttttgttttattttatatttttatatagttttaagtaagaagtttatagaaatgatatagtgtaaagtggagaattttagatttaggtttttagattgtaaattttgttttattttcgttttttttatgtaaagtatataatttttttgtgattttatttttttatttgtgaattcgtatgacgatattaattgtttttgggatatataatgaggtttataagaatgtggaaataaattatattttggatgtttttatttaaaaaaaaattatttttataggtttttggggaataggtggtatttgattatatggttaagttatttagtggtgatttgtgagattttggtgtatttattattcgagtagtgtatatattgaatttattttttagttttttattttttattttttttttatttttttttttgagtttttaaagtttattagattatttttatgtttttgtatttttgtaatttagtttttattgtgagttagaatatataatgtttggttttttatttttgagttattttatttagaataattgtttttaattttatttaggttgatgcgaatattattaatttatttttttttatgggtgagtagtattttattatatatatgtattatagtttttttatttatttattgattgacgggtatttgggttggttttatatttttgtagttgtgaattgtgttgttataaatatgtgtgtgtaagtatgtttttcgtataataatttttttttttttgggtagatatttagtagtgggattgttggattaaatggtagttttatttttagttttttaaggaatttttatattgttttttatggtggttgtattaaatgattagggaaatgtaaattaaaagtacggtgtaatgtttttatttttttatttatttttattttttatatttaaagtatgaatgaaatattttttagttataaatagtgttttaatagatattttttataattgtgtttgtaacgtttgtaagggttttttagtaaatgtttgttgagggagaagtatatttttatttttataggtattatttagttattttttgacgagtttttatttttttattgttttattataaaatgacgtagttagatttatttgtttttattattaggattgttttttgttttttgtttttttttttttgtatttgtaagtttttaagattttttaaaaataatttgttattattttggtttttaaaataagttgttttttaattttttttatttataatttttataataaggtgatcgtgttttagtttaataggtacgtagataagaggttttttattaatttttttaggtggaagtttttttttagaaggatgtttgtaaatttttttgtattaggaatgatagtttaatttttttttgttagtttttgttttagaataattagggtgagttatacggagtaattttgttataaaaaatggaattcgtatgggaattgtatgaaggtttttttattgaaagttattgagattttttagatgatgtgtttgtgtatttttatgatttaaatatatgtagaaatgaaaggatgtaacgtagtgttagaaagtaatttttttttgcgttttatttagggttttttgtagttattgtttttttttatttatggatatttttttttttttggtgagtcgtttttttttatattttttagagaaaattttgaagatagggaatgatttgattgttttagggaattttttttgttttcgttattgtgttgggtagagatttttatgtttgaatattttaaaagagagttattggttagtttgtacgtagttatttttaaattagtgtcgatgtttgttgcggtagtgagtcgtgttatgtataaaatgggtaagttttttttttataaagggtagttattatgtttttttggttagagggatagtaagtagggatggtaatgtgtatattttttatagggatttgatagttgtattttttttaaagataggtagaaaacgaagtgatatttatgatttttgaattttttattagatgaataaaaggaagttattattttataaattaagaatttgttttcggaagaggaaatggtttggtaataatttaatagaaattttgttaaataagaagtatgtttacgtttattgaataatatattatattataagtttatttagggataaaaggttattgtatttgagttatagattgtgtagcgattttattatatatttagtgtttattgatagtatttagttgttttttatatatattttttttttaatgtaagtgtaaagtatttttttgttatttaataaataaattgagatattaggattttgtgattgacgaaattgttttatttatttagaaataggtagataggatttaaaagaatataatttgtgagtttgttcgggagttagaaatagtagaaaataaatatttattttttgattatgtttttatattgataattttaaaaatatttttaaaaatgaattataaatttttggttaaatagtgttataaagaattataggtttgaggaattttttttttgttttttttttttgaggaaaagcgtgttttttttaaaattttttgaggaaaaggatttagattagttaagtatggcgataatagtttttttagatttgtgaatgtattcgatttgtaaatgtatttaaaattatatttagataaaattggtattttaaagtatttagaatatggaagatttatgatataggttaagtattgtattttaggaaaatatgttgttttttagtagaaatattatatatatataaaatatttatatattatatattttatatatatattatatataatggagagagagagagtatgtgtgttaagttattatatagttaaatttgatttgaaaggttaaatgttaattattgtatataatttttaatttaaaaaatttttaattgatatatatatatttatgagatatagtgttatgttttgatatatgtatataatgtgtaatgattaaattaggaaaattagtatatttattattttagatatttattatttttatttggtgagaattttgaaaattttgttttttagttttattgaaatatataatatattattgttaattatagtcgttttattgtataatggaatattggaaatcgttttttttatttaattttgattttgtattaggtgataaatttttattttaatattttcggtaattatttttttattttttattttaataaaattaattttgtaagattgtatatataagtgagattatatagtatttgtttttttgtgtttagtttattttatttaatataatgtcgtttaggtttatttaggtggttataaatgataggattttattttttatggttgaatagtaggttattgtattatattatatttttaaaatttatttatttattgatgggtatttaggttgagtttatattttggttattgtgaatagtgttgaattaatatgatttattgattggatgaatgaatttattttttggatttattttttggatatattgattgtttttttttggatatagatttagtgatagaattgtttaagtatggtagttttgtttttagttttttgaggaatttttatattgttttttatagtggttgtatttattgatatttttattaatag

SEQ ID NO: 319 - DNA, 7669 bp, Artificial Sequence
  chemically treated genomic DNA (Homo sapiens)
gtagtaggggttggtaggtagggtagtgttttcggttggagttttagggaggggaagatatgagttagtagttagggagggagtgcgggggttttgtggttacggtatataaagtgttttttggtgatagcgttgtttggggagtagtagttttgggtttggagagtaggggcgttgttgttaaaggggattggggttttgagtatttttttttattgtatttttggttttttggggattgggaaggtgtttgtatggagggtgggatgtagttttttagttttgtattatattattacgaaatatttattgaggttgaaagttacgtttttatagtttttttttttaagatattttataattttaggggtatgggcgaaatagatttatagtttattttattttatttagtttttaaatgataaagttttttgttaaatgttttgtaatttattggttatttcggttgatatttgttaagattattattttattttatatttttttttttattttttttttttttttttatttattttttttttttttttttttttttttttttttttttgttttttaggttatagtgtagtggtataatttcggtttattgtaattttcgttttttagttttaagtaatttttttgttttagttttttaagtagttgagattataggtgtttattattacgtttagttaatttttgtatttttagtagaggtggggttttattatgttggttaggttggtttcgaatttttgattttaggtgatttatttatttcggttttttaaagtgttgggattacgggtatgagttattgtatttggtttttatttttttttttttttgtttgggatttatttgatttatttttttaatatatgggggtgtttggtgtttttgtttgtgtttgtttttattttgagttaaaatttattatttgaggttgtgaacggtgtagataggattttatgaaatttatattttaaaagggggagtaggataggatttatgaaaatagtatggggttaggcgtggtggtttacgtttgtaagtttagtattttgggaggtcgaggtgggtagattatttgaggttaggagtttgagattagtttggttaatatggagaaattttatttttattaaaaatataaaaaagtagttaggcgtggtggcgggtatttttaattttagttattcgggaggttgaggtaggagaatcgtatgaatttgggaggcggagggttgtagtgagttgagatcgggttattgtattatagtttggataataaagcgagattttattttttatatcggtttttttaaaaagaagatagtgtggaatggattttggatggtgaggatgtttaaaaagaaaagtttatttatgtagtgggtttagcggttaagaagattatttagattgagtggtatgagggttaatttatgtgataataaagttaggttatatgaagttatttggtaaaatattagtttaaatgttgttagaaaggtattttagtcgggtatagtggtttacgtttgtaattttagtattttgggaggttgaggtgggtggattatttgaggttaggagttcgagattagtttgattaatatggagaaattttatttttattaaaaatataaaattagttaggtttggtggcgtatgtttgtaattttagttattcgggagggtgaggtaggagaatcgtttgaatttgggaggttgaggttgtaatgagttaagatcgtattattgtattttagtttggttaataatagtaaaattttgttttaaaaaagaaagaaagaaagaaagaaaagtattttatatttttttatttttttgtttttttttttttttttttttttgttgagaacggggttttattatattgtttaggtaggttttaaatttatgggtttaagtaattttttcgtttttgtttttttaagtgttgggattataggtgtgagttattgtatttggttagaaaggtaatttttagattatgttaataattatagttgatttttaggataggagatgagtttaggtaatgtgagtgggtcgtatttgattagttgaaggtttgaggagtaaatatcgaagttttttgaagaaggaattttgttttaaggttgtaatttagtaattttgtttgagtttttaggttttaggttttaagacggtagtgttattttttatttgagtttttagtttaattggtttgttttgtggattttagatttgttaatttttatgattgtgtgagttaattttttaaaataaatgtgttatatattttttttgattttatatattttttttttttttttttttcgtttgtttttgtatttttgtgtttttgtttttttagttttttatgtttgttttttttttgattttgtatttttgtttgtttttatagatttttttttttttttttttttttgagatagttttatgttattgtttagtttggagtgtagtggtataattttagtttattgtaatttgtgtttttcgggtttaagtgatttttgagttttagttttttaagtagttgggattatagaagtgtgttattatatttagttaattttttattttttatttttgtatttttgatagagatagggtttttttatattggttaggttggtttcgaattcgcgattttaggtgatttatatgttttagttttttaaagtgttgggattataggcgtgagttatcgtatttagtttatagattttatttttatttttttgtgtattttttattggttttgtttttcgggagatatttgattaatttagggagggtttttgtgagaagttttttgagttaagacgtagatgagtagggggagtttgttttggagatttagggaagatggtttttagtagtaggaagaggaagtgtaaagatttaggatatttgtttggggtagagtgagtaaaagtacgagggtttaattatagaggttttagtgaagggtatttcgtgttttagtttaagtttaggggtaagttggtagtaaattgtatttataaagggttatataagtgtttttggtttttagggttaagaggtaaaattaaggatattataaagatatttatgaaataagatagaagttaagtgtagtggtttacgtttgtaattttagtattttgggaggttgaggtgggtagattatttgaggttaggagttcgagattagtttggttaatatatagataatatatatgttataatatatataatggttaatatataatataaaaattagttatgtatggtggtgggcgtttgtaattttagttatttaggaggttgaggtaggaaaattgtttgaattcgggaggtagaggttgtagtgagttaaaatggtattattgtattttagtttgggtgataaagtgagattttgttttaaaaaaaaaaagaaagaaaaaggttgggtgcggtggtttatgtttgtaattttagtattttgggaggttaaggtaggcggattacgaggttaggagattgagattattttggttaatacggtgaaatttcgtttttattaaaaatataaaaaattagttgggtgcggtggtgggcgtttgtagttttagttatttaggaggttgaggtaggagaatggcgtgaatttgggaggcggagtttgtagtgagtcgagatcgtattattgtattttagtttgggcgatagagcgagatttcgtttcgaaaaaaaaaaaaatttacgtttgaatgtatgtatatttatatatggatttttttatatatatgaatatattcgtgtaagtgcgtatatatatatatacgtattaatgtataggtatatatatatgtatatatttgtatatagtatatatatgtatatttatttgtatatgtgatgtatgtttatatatatatatacgtgtatatgtatgtatgtatatggattatatgtatatgtatatagatgattatatatatatgtatgtatttgtttatatatgtacgtatatttatatgttagtatatgtatgatatataggtatgcgtttgtatatgtgtatatgatatatatttgtatgtatataattgaatatatatatttatatgtatatattgtatatatatatgtatgtagataagtatatatatagagtatatatttatttttttattttatttttgtgttttttattgtatttgttatattaaaatataatagaaggtcgggtatggtgcggtttacgtttgtaattttagtattttgggaggttgaggtgggtggatcgtttgaggttaggagttcgagattagtttgatcgatatggtgaaaatttatttttattaaaaatataaaaagtagttaggcgtggtggtacgcgtttgtaattttcgttatttgggaggttgaggtaggagaattgtttgaatttaggaggtggaggttgtagtaagttgagatcgcgttattgtattttagtttgggtaatagagcgagattttattttaaaaataaaataaataaacgaataaaaaaatttataacgtattatttttttgtttacgaggttttttgtttttttggttttattagaagaggagtagggattttttttgttgttgtttattgttgtattttttatatcgagagtagagtttggtatgggtagaaagtttttagtcgatatttggtggttttaagcgaatgaagtatttaagaagggaaagttgggggttttttattgtatttgttatttgagttatatttttagaagtttttggaaagtgtgagagtttgtatgagtgagagtgagatagggttaagatcgggggcggcgggtatcggaagaagaggagggtgagtgggggaaggggtggggttgaattttagttttaaaggcggtttacgggtgtttgttcgtagcgtgtatagtttaggagtgttgagtaatttcggttttttttgaggttgaaggatttaggcgtgttagttttgttttagatattttgggtatggaggagagtgtcgtacggtttttagtgtttgtggtggatggatagatcgatattttatttacgaggttgggacgaagttatcggagatagtcgtgtagtgtggttcgggtgggtttgggttttttgttgttgttgatgggggtcgggttggtcgtttaaggttggttttttttgtagttgtattggcgtttaggagagatggttattcgtttgtttgtgagtgggatcggggggttgagagtaggtggaggtgaggggggtttttttgtgttattgtgggttattgtgtgtttgtgtgtgtgtgtgtgtgtgtgtgtgtgtgtgtgtgtaggatagggtataggttgagagtagttggtttgattggttgttgtttttagttttgggtaagtgaatttatttttttgaattttagtgtttttatttataaaataagggtagtttttttataggggacgaagtatgttatggtatgtgtagtattagacgatgttagttttattcgtcggaattgatattttaatattgttatgtatatttttgtgtatatacgtatgtattttttttgtatttttttatttttgagacggagttttattttcgttgtttaggttggagtgtaatggtatgatttttgtttatcgtaatttttgtttttcgggtttaagtgatttttttgttttagtttttcgagtagttgggattataggtatgcgttattacgtttggttaattttgtatttttagtagagatggggtttttttatgtttgttaggttggttttaaattttcgattttaggagatttattcgttttagttttttaaagtgttgggattataggtgtgagttattgcgtttggttttttttggtatttttattattgttattgcgattgttattaattttttgattatttttatttgtggaaatttttcggtttgtttttagttggttgtggatgtgttcgtttgtttgtgtgttttatttgggggtttatgtgtgtttaatattatatttttgtgggtttggttttttttgtgttttgggtttggattcggtggttatatattcgtgtttatatatttatgtggacgtatgtgcgtgtatttatatgtttatatattcgtttagttgtagtcggtgtatttacgttgtttgtttttgtttttgggtttttgtgtttgtagacgtatatggatttataaattataaattatatgtttacgtatttgagtttatatgtgtttttttagcgttatgatgatgttgaggtttgtgttttgtggtaggtgttatattttaagggtggtgtttatgtgtttagttatttcgttgtttgtatttttttttttttgagataaggttttttttttatagtttaggttgtagtgtagtggtgtagttttggtttattataattttattttttaggtttaagtgatttttttgttttagttttttgagtagtagttgggattataggtattcgttatcgtgtttggttaatttgtgtatttttagtatagacggggttttattatgttggttagatttgtttcgaatttttgattttaagtgatttatttgttttagttttttaaagtgttgggattataggtgtgagttattacgtttggttttgtttttgtatttttaaatattatttatttatttaattaattatatatttatttattttagagattgtgttttattttgttttttaggttagagtggagtggtacgattatagtttattgtagttttgaatttttgggtttaagtaagttttttgttttagttttatgagtagttgggattataggtatgtattattatgtttggttaattttaaaaattttttgtagagatgaggttttgttgtgttgtttaggttggttttaaatttttggttttaagttgtttttttattttggttttttaaagtgttgggattataggtgtaagttattgttttgggtaatgttatttatttattaaatttttttatttatttatttattttttgagatagaattttattttgttatttaggttagagtgtagtggtataatttgggtttattgtaattttttaggtttaagcgatttttttgttttagtttttagagtagttgggattataggtatttattattaggtttagttaatttttgtagttttagtagatatagggttttattgtgttggttaggttggtttcgaatttttgattttaggtaatttgtttatttcggtttttcgaagtgttgggattagaggtgtgagttaatgtattcgatttattaaatttttttttagtgtatattatgtgttaagtattgtaataatgttttatatatgtgaatttattaaacgttaagtagatacgattcgtaattttatttatatagagggaaattgaggtattaagtggttgtgaggtttttggatagggggtgtgtgtttgtaagtgagagtatgtggttttgtgtacgtgtttgagggtggtgtcggtggttatggtttttatgttttatagttatgtgtgagtaatgcgagggcgtggttttcgttgtaggtttttatcgtaggttttttttgtatttttagg

SEQ ID NO: 320 - DNA, 7669 bp, Artificial Sequence
  chemically treated genomic DNA (Homo sapiens)
tttgaaaatgtagaaggggtttgcggtaagaatttgtagcgggggttacgttttcgtattgtttatatatggttatgagatatgaggattatagttatcgatattatttttagatacgtatatagggttatatatttttatttgtagatatatattttttgtttagaggttttataattatttggtgttttagtttttttttatgtaaatggagttacgaatcgtgtttgtttggcgtttaatgaatttatatatgtaaggtattattatagtgtttggtatatagtatgtattagagaaaggtttaataggtcgggtgtattggtttatatttttaattttagtatttcgggaggtcgaggtgggtagattatttgaggttaggagttcgagattagtttggttaatatagtaaaattttgtatttattaaaattataaaaattagttgggtttggtggtgggtgtttgtaattttagttgttttggaggttgaggtaggaggatcgtttgaatttgggaggttgtagtgggtttagattgtgttattgtattttagtttaggtgatagagtgagattttattttaaaaaataaataaataaataaaagggtttaataaataaataatattgtttagagtagtggtttatatttgtaattttagtattttgggaggttaaagtgggaggatagtttgaggttaggagtttaagattagtttgggtaatataataagattttatttttataaaaaatttttaagattagttaggtatggtggtgtatgtttgtagttttagttatttatgaagttgggataggaggtttgtttgagtttaggagtttaaggttgtagtgagttatgatcgtgttattttattttagtttgggaagtagagtgagatatagtttttaagataaataaatatgtaattaattaaataaataagtaatatttaaaaatatagggataaggttaggcgtggtggtttatatttgtaattttagtattttgggaggttgaggtaggtggattatttgaggttaggagttcgagataagtttggttaatatggtgaaatttcgtttgtattaaaaatatataaattagttaggtacggtggcggatgtttgtgattttagttattgtttaggaggttgagataagggaattatttgaatttgggaggtggggttgtagtgagttaagattgtattattatattatagtttgggttatgggagagaaattttgttttaaaaaaaaaaaaatgtagatagcgagatggttggatatatggatattatttttgggatatagtatttgttatagggtatagattttaatattattatgacgttgagaagatatatgtgggtttagatgcgtggatatgtggtttgtggtttatggatttatgtgcgtttatagatatagagatttagagataaagatagataacgtgaatatatcggttgtagttaggcgggtgtgtggatatgtgggtatacgtatatacgtttatatgggtatatggatacgaatgtgtggttatcggatttagatttaggatataaaaggggttaagtttataggggtatggtgttgggtatatatagatttttaggtgaggtatatagataggcggatatatttatagttagttggaagtagatcgagaaatttttatagatggaaatggttagagaattaatgataatcgtagtaatagtaataagagtattagagaaggttaggcgtagtggtttatatttgtaattttagtattttgggaggttgaggcgggtggattttttgaggtcgggagtttgagattagtttgataaatatagagaagttttatttttattaaaaatataaaattggttaggcgtggtggcgtatgtttgtaattttagttattcgggaggttgaggtaggagaattatttgaattcgggaggtagaggttgcggtgagtagagattatgttattgtattttagtttgggtaacgagagtgaaatttcgttttaaaaataaaaaagtatagagaaaatgtatgcgtgtgtgtataggggtgtgtatggtagtgttggggtgttagtttcgacgggtggagttggtatcgtttggtattatatatgttatagtatatttcgttttttatgaagagattgtttttattttgtagatgaagatattgaggtttagagaggtgaatttatttgtttaaggttgggagtagtaattagttaagttagttgtttttagtttgtgttttgttttatatatatatatatatatatatatatatatatatatagatatatagtgatttataatgatataggggagttttttttatttttatttgtttttagtttttcggttttatttataggtaggcgggtgattattttttttagacgttagtgtagttgtaggaggaattagttttggacggttagttcggtttttattagtaatagtaagagatttagatttattcgggttatattgtacgattgttttcggtggtttcgttttagtttcgtgaatgggatgtcggtttgtttatttattataaatattgagggtcgtacgatatttttttttatgtttaaggtgtttggagtagggttgatacgtttgggttttttaattttagaggaaatcgaaattgtttaatatttttgggttgtgtacgttgcggataggtattcgtgggtcgtttttagagttggggtttagttttatttttttttttatttattttttttttttttcggtattcgtcgttttcggttttggttttgttttatttttatttatatagatttttatattttttagaggtttttgaaaatgtgatttaggtggtaagtgtagtggggagtttttagttttttttttttggatgttttattcgtttggggttattaaatatcgattgaggattttttgtttatgttaggttttgttttcggtgtgggggatgtagtaatgaataatagtaagaagggtttttgttttttttttggtggagttagagagataagaaatttcgtaaataagaaaataatacgttgtgggtttttttgttcgtttatttgttttgtttttgagatggagtttcgttttgttgtttaggttggagtgtagtggcgcgattttagtttattataatttttattttttgggtttaagtaatttttttgttttagttttttaagtagcggggattataggcgcgtgttattacgtttggttgttttttgtatttttagtagagatgggtttttattatgtcggttaggttggtttcgaatttttgattttaagcgatttatttattttagttttttaaagtgttgggattataaacgtgagtcgtattatgttcggttttttgttgtgttttgatgtgataagtgtagtgaaaaatataagagtggaataaaggagtggatgtgtgttttgtgtgtgtgtttgtttgtatgtatatatgtgtgtagtgtgtgtatgtgaatgtgtgtatttagttgtgtgtatgtaagtgtgtattatgtatatatgtgtaggcgtatgtttgtgtattatatatgtgttggtatgtaaatgtgcgtgtatatgtgggtaggtgtatgtatatgtgtatggttatttgtgtgtatgtgtatgtggtttatgtatatgtatgtatgtgtacgtgtgtgtatgtgtgaatatgtattatatgtgtaagtgggtgtgtatatatgtgttgtgtgtaggtgtgtgtatgtgtgtgtgtttgtgtattggtgcgtgtatgtgtgtgtgcgtatttgtacgggtgtgtttatgtgtgtggggaggtttatgtatgagtgtgtatgtatttaagcgtggatttttttttttttcgagacggagtttcgttttgtcgtttaggttggagtgtagtggtgcgatttcggtttattgtaagtttcgttttttaggtttacgttatttttttgttttagttttttgagtagttgggattataggcgtttattatcgtatttagttaattttttgtatttttagtagagacggggttttatcgtgttagttaggatggttttaattttttgatttcgtgattcgtttgttttggttttttaaagtgttgggattataggtataagttatcgtatttagtttttttttttttttttttttttgaggtagagttttattttgttatttaggttggagtgtagtggtgttattttggtttattgtaatttttgtttttcggatttaagtaatttttttgttttagttttttgagtagttgggattataggcgtttattattatgtatagttaatttttgtattatatgttggttattatatatgttgtaatatatatgttgtttatatgttggttaggttggtttcgaatttttgattttaggtgatttgtttattttagttttttaaaatgttagaattataggcgtgagttattgtatttggtttttgttttgttttataagtatttttgtaatatttttgattttattttttggttttgaaagttaaaaatatttatgtggttttttatagatatagtttgttgttagtttgtttttgagtttaggttaagatacgaagtgttttttattggggtttttgtggttggattttcgtgtttttgtttattttgttttagatagatattttgggtttttgtattttttttttttgttgttgggaattattttttttagatttttaaagtaggttttttttgtttatttgcgttttgatttaagaaattttttataggagttttttttgaattggttaggtgtttttcgagagatagaattaatagaagatatatagagagatagagatgggatttataggttgggtgcggtggtttacgtttgtaattttagtattttgggaggttgaggtatgtggattatttgaggtcgcgagttcgaggttagtttggttaatatggggaaattttgtttttattaaaaatataaaaataaaaaataaaaaattagttaggtgtggtggtatatttttgtaattttagttatttgggaggttgaggtttaagaattatttgaattcgggaggtataagttgtaatgaattgagattgtgttattgtattttaggttgggtaatggtatgagattgttttaaaaaaaaaaaaaaaaaaagagatttgtagagatagataaagatatagagttagagaagagatagatatggaaaattagagagatagggatatagagatataaagatagacggagagagagagagagagagatgtatagagttagagagagtgtgtaatatatttattttaagaaattagtttatataattatgggagttggtaagtttgaagtttataggataagttagttaggttggaggtttaggtaagaggtgatattatcgttttaaagtttaaagtttggaaatttaggtagaattattaagttgtaattttgaggtagaattttttttttaggaaatttcggtgtttattttttagatttttaattgattaggtgcggtttatttatattatttaggtttattttttgttttgaaagttaattgtggttgttgatatgatttgaaaattatttttttagttaggtgtagtggtttatatttgtaattttagtatttaggggggtagaggcgggaggattgtttgagtttatgagtttgagatttgtttgggtaatatagtgagatttcgtttttaataaagaggaaaaaaagaaaaaagataaaaaagtaaagaaatataaaatattttttttttttttttttttttttttttgagatagagttttgttgttgttggttaagttagaatgtaatggtgcgattttggtttattgtaattttagttttttaggtttaagcgatttttttgttttattttttcgagtagttgggattataggtatgcgttattaggtttggttaattttgtatttttagtagagatggggtttttttatgttggttaggttggtttcgaatttttgattttaagtaatttatttattttagttttttaaagtgttgggattataggcgtgagttattgtgttcggttaaaatatttttttagtaatatttagattagtgttttattaaatgattttatatagtttagttttgttattatataagttagtttttatgttatttaatttaagtgatttttttaatcgttggatttattgtatgggtgaatttttttttttggatatttttattatttaaaatttattttatattgttttttttttgggggagtcggtgtgggggatggagtttcgttttgttgtttaggttgtagtgtagtggttcgattttagtttattgtaatttttcgttttttaggtttatgcgatttttttgttttagtttttcgaatagttgggattagaggtgttcgttattacgtttggttatttttttgtatttttagtagagatgaggtttttttatgttggttaggttggttttaaatttttgattttaaatgatttgtttatttcggttttttaaagtgttgggtttataggcgtgagttattacgtttggttttatgttgtttttatgagttttattttgtttttttttttagaatgtaagttttataagattttatttgtatcgtttatagttttaagtgataggttttagtttaaaataaaagtaaatataaataaaagtattaaatatttttatatgttgaagaaatgaattaaatgaattttaaataggagaaagggggagtgaaggttaggtgtagtggtttatgttcgtaattttagtattttgggaggtcgaggtaggtggattatttgaggttaggagttcgagattaatttggttaatatggtgaaattttatttttattaaaaatataaaaattaattgggcgtggtggtgggtatttgtaattttagttatttgggaggttgaggtaggagaattgtttgaagttgggaggcggaggttgtagtgagtcgagattgtgttattgtattgtagtttgggggatagaaaaaaaaaaaagagaaagaaaagaaaggaggaatgaataagaaaagaaaaaagaaatgagaagaaggatgtgaagtagagtggtggttttggtagatattagtcgggatagttagtgagttgtaaggtatttgataggaggttttgttatttaggagttggatggagtagggtagattgtgaatttatttcgtttatatttttggagttgtggggtgttttaggaaaagaggttgtggaggcgtgatttttagttttagtgggtgtttcgtgatgatgtggtgtagagttgggaggttgtattttattttttatatagatatttttttagtttttaaaggattagaggtgtagtgagaggaggtgtttagggttttagttttttttagtaatagcgtttttgttttttaaatttaaggttgttgttttttaagtagcgttgttattagaaagtattttgtgtgtcgtgattataaagttttcgtattttttttttaattgttgatttatgtttttttttttttggggttttagtcggaaatattgttttgtttgttagtttttattgt

SEQ ID NO: 321 - DNA, 6189 bp, Artificial Sequence
  chemically treated genomic DNA (Homo sapiens)
tttatgaatagattaatgttttttttttggggtgagtgagtttttattgtatttgtttttgtaagagttggttgttaaagagagtttggtattttttttttgtattttgtttttttttttattatgtgatatttttatattttagtttttttttattttttattatgagtagaagtattatgaggtttttataagatgtaaatgtttaattttgaatgttgtagtcgttagaattgtgagttaaataaatttttttttttttataagttatttagttttgtgtatttttttatagtaatataaaatagattaagatatttaaggaattagaatttttagagtgaaggtattaggagttagaattattaaaaagtttttttagtgatttagatgataaattaggttttgggagttattgattttattaataatttatttaatgttagaattttttgaatagaatttttttaaggttttgtttagtatttttagaatatagtaagtttattattttataggatagttttttatggggaatgtgtaacgtgtagggttttgatagttagaggtggagggtaagggtgtttgaggtagagtgaatattagaaataattagaaaatagagggagataagtttggaaggaaaatttggaatttttgtaggaggaaatttgtgttaggatgaagggtttggagagttgattgtaggagtttaagtgaggagtaataagagtttggattagaagtaataggaatggtaaagaggaggaaagaaaaaattgtattgtagggttagtttataaagtttgatgattgggaacgaggatgatttaaagttgatttttggattttgaggttttggagtataaaaatattaattaggatagtgatattaggattaggaataggttgaaaaggtagattataaattagattttgatatttgaaaatgtatttgtttttgttattttcgatattattttattatttgttttagggtagagtttatttatgattttttgtgtatgtttagagattggtattgagtatatttttagaatgtttggtgaatgaagagttattgtaagtgttttttttatttgtgttttttttgttttagtttaggattttattttttatttgaattattgtagatttaaggtttttagtttatattattgtttttgtgtgttttagaataaggtattttttgcgggtttataaattagaaaaagagtttgtatttaaatgagtatagttttttgtttagggtttaggaagtaaagtttatttttgtgggatgataaatatatttttttttgtaggaggaaattttttgtattaggatggagggtttagagagttgattgtagaggtggaattttagattttatttatttttttagttggtatagagtattttggaaatgttttttagttggttaatttgattttgttttgttatatttgtttttttttttttttttagaattattttttgaagtatttgttatttttattttttttagttagagtgattttttttgtaattttaaaatgtaattatattatattatattatattttgttttaaatttttttatgtttttttagtagttgtagtatgaagtttaaagtttttaatttgtaataaaagtttatttacgatagatttttttgagttttttttttagtagttatttttttttattatttttttttttagttgtagttttttgaattgatattgtataaataggttttattgtttttatttttggtttaataggtattgtttttttttagtgttttagatggttagattgtttttcgttttttttagattaaggaagttgtttttgttttaattttagtgtagattagtatttgtttttttgtattttttttttttgtattgatatttaggatttagaattttttaggttgtggagatttcgtttttttgtttgtgatttttttgaggattaaaaatgtgttttgtttgtgtttttttttttagtatttggtttagttttgttgaatggataaatgaaaatttgatttagagataaatgaaaaatgtagattttttttattattaaaaaattttaaaattaaaatttagatattaaaaaatttaaataataataaaatttttaaattaaagaaaaaaaaaaaatttaaatgttttttgtttttttttgaatatgaggtattttgtgagtggttaaagttttttttttttttatattttttgtagttttgaaatggttatttatttaggaggttaatagtttatgggaagataattattttggtttattttatattttgtggttttattttaaggttgatttgttttggtgtgtttatgtatttaatatttgtgagatattttaagaaaaattgttattaggtttggtggttgatgtttataaatttagtgttttgggaggttaaggtaggaggattgtttgaggttaggtatttgtgattagtttgggaaatatagggagtttttataagaaattttaaaagaaattagttagatttggtgttgcgtgtttatagttttagttatttgggaggttgaggtaggaggatcgtttaagtttaggagtttcggattatagtgagttatgattgtgttattttattttagtttgggtaatagagtgagattttgtttttaaaataaataaataaatgtaaatgaaaaaaattgtttatagatttagtaacgtatttgatttttttaaaaataattaagttttattttttgaaaaacgttttgaagatggaggattttgtttatgtgtttgagattgaaaggttagtaatgataattttaatagtgattttatttgtttaaatgttagattagtttagtgatgaattttggaatgtttagatagtttattagaaatttgtgtttgaaatttttagtttggtgtgtgtgtatttttttttataaagaatgtgaagagttgtgaaaacgtgtttaataaaaaaagagataattaagtgtaaaatattatttaaatattaataaaaattataattaggtaaaatatggtagtaggacgataagataataaaaatgagaggtgtgttatttaagtgttagtttaaatgtgggtagagatgattttgtgtaaagatttttttttttcggagttatgatattaatattgagaagaaatgttgtttaaggtataagtatgtgtatggtaaatgtttattttttttatttttttgatagtaatttaaaaatgttatttacgatttttagtatgaatagtttttattatttttttagtttatttttagtttttaatagtatttatggttttttttttttttgttgtgatttttagttattttttgaaaattgacgagtaaatagttattgattttaatatttttttatgaagaattattatataagaattgggttttatatattgattttttttttagtttttttttttatattttgtatgtaatataagttttgtttaagggaataattatgataaatatgtttggatataatttgatttttagttttggtttggagtttatgatattgtgttttagttattttattttttagataaaatttaaattttttaatattagtatgtttttttaatgtaaggtataattattgtagtgaaggtattaatttatattttaattgattaatattgtagttataaatgtattttatattttttataaatttttttttttaagtatgttttatttttattttttttgtgaagtggtataataatttatattgttaatatttaaaatattttttttttttttttttatatatttgttgggtgttttatggggagttgagagagatatatttggttataaagagagataatttcgttttaaatagtttttttttagtatttttatgttgtttagtatagtgttaggtttatgtgatgtatttagtaaatatttgtttatttgaattttatattataagtaattttattatttattttattttattgtttattttagtggtaaagggtatttggtgtttattgatagaatatttttattttttaagttttgaggttagttacgattttaaagaaagaaataatttttaaagtttatttatatttatttatttgtttatttatggaaaaattatgtacgggaaaaatgtgaagtggaaggaaaggagataaggatatttttttgttttttttttggtatgtagaaaattaattatataattgtttattgaatttgttttaaagggttaaatgagagaaagattgtaagtttatttaatatagtgtttgatatatagtaaatgtttttaaaaggtagtttatttttatgtaatagattataattaaggattttttttttatttttgtatgatttagtgttttatttttttgttttgttttttttatttaagaatgatttgtgtgtgttttttttttgaatttgtgagaggggtttaatgtttagttatatagtaaagtgtagataagaattttgggttagtattttttttaaattttttttatgatttaagatattttggggaagggatatatgagttgttatattaacggatgatgatttttatttttattaagtgatttataatttgttattggtgtaataagttaagaaaatagtatatttttatgattgttattttatagttatttaaattagaattggaatgttataaaaataattttttgttagtttagaggaaaaaaaaaaagaaagaaagtaaaggggaaatttagattagttataaagaagttttttcgtttgtttgtaaaagttgtagcgttaaaattgagagagttcgttttgtttttttaatcgttttttatttttggttttgggatttttgtttattttttgattgataggttttgttttgtttttatttttttttttttggggaaaattttagttttatcgtacgttttttttttttatatttttattttttttttatttagattgtgaagatggaaagggtttaatttttggaagagaatgtgggaaatgtagttaggttaagattcgagaggaataagttattgttggtggtttttgtaatttagggattggggttgtttttgtgttttatttatatttgtttgtatttttttgttttttaggtaagatgtattattgggcgttgtttttttattagtttatgttgatggtagttgtaatagttgtaaatagtcgtttggaaataattttatgttaaaagtgttgagttttttttttttttttttatagtaatcgtaaagtgtggttaaacgtttttttgttttttttttttttttttttttttagtagtggtagtggtagggtagagtggaggtagggtagaggtatagtttttagatttttttttttttttttgtaatgtaagattttttgtatttttttataagttgttattttgaagttttgagttattgatatatttggtttatttattgtgatagtaatgtgtttgattaggtaattaatattaaaaggaaataggaaagagattagttttatttttttataatatttatatattttatagatttgtaaggtgattttttttgtaaagaatgttgaaggtattaatattaatagcggagtaatgtgtgcgtgtatgtgtgtgtgtttatgtgtttatttatttattttaatgatttaattagatattgttttttataatttattttttttagttataatttaaagatattattttattttttttttattttattaaatatattatgtagtaggagattatttttttagtattttttttatatagttaaaatatttttattttttttttattttatttttgttttatattttttttttttgtattatttttttttatttagtagtttagatatataaatattattaggtatttaaggatgttttttattgtagaagatgttattggagaaaaataaatttatatttttttcgtgtttttttgttgagttagtttgataattttgttttttaggtggttgttttgggttagaaatgtttttttttgataaagtttaggtaatataaattgatttttgatggttttgtttgagattaagtatttttaatgaaattagaatgagatgagtagttttggta

SEQ ID NO: 322 - DNA, 6189 bp, Artificial Sequence
  chemically treated genomic DNA (Homo sapiens)
tgttaagattgtttattttattttggttttattggaggtgtttaattttagataagattattagaaattagtttgtattatttgaattttattagggagaaatatttttaatttaaagtaattatttagaaaataagattattagattagtttaataaaggaatacgaagagagtatagatttatttttttttagtggtattttttgtagtgaagaatatttttaaatatttaataatgtttgtatatttgaattattgaataagaaaaaataatgtaaaagagagaagtgtggaataagaataaagtgaaagaaaaatggaaatattttaattatatggggaaaatattagaaggataattttttattatatgatgtatttaataaggtagggaaaaggtgaaatgatgtttttaaattatgattggaagagatagattgtgagaaataatatttgattaaattattggggtgaatgagtgagtatataggtatatatatatgtacgtatatattgtttcgttattaatattgatatttttagtattttttataaagaaaattattttgtaggtttatagggtatatgaatattatgggaaagtggaattggttttttttttatttttttttaatattaattgtttgattaaatatattattattataatgggtagattaggtatattagtgatttaaagttttaaagtgatagtttataaagggatataaggaattttgtattgtaaagaaaaagaaaaagatttagaagttgtgtttttgttttatttttattttgttttattattgttattgttgaaaagaaggaaggaaaggagagatagaagggcgtttaattatattttacgattgttgtggggagagggaaaaaaaatttaatatttttggtataagattatttttaagcgattgtttgtagttgttgtagttgttattagtatgagttggtgggaaaatagcgtttagtggtgtattttatttgaagagtagagaagtgtaggtagatgtaggtgaagtataggagtagttttagtttttgaattatagaggttattagtaatagtttgtttttttcgaattttggtttggttgtattttttatatttttttttaggggttggattttttttatttttataatttgggtagagggaagatgaagatatggaaaaggggaacgtgcgataaaattgaagttttttttagaaagaaggaggtaaagataaaataaagtttattaattagaaaataggtaaaggttttagggttagagataaaaggcgattgaaagagtaaagcggatttttttagttttaacgttgtaatttttgtaggtaggcgggggaatttttttgtgattaatttgaattttttttttatttttttttttttttttttttttttgggttaatagggagttgtttttgtgatattttagttttgatttgagtgattgtgaaatgatagttataaaagtatgttatttttttaatttattgtattagtaataaattgtgggttatttggtaaagataaaaattattattcgttaatgtagtagtttatatattttttttttaaggtgttttaaattatagaaaagatttaggggaaatgttggtttaaggtttttatttgtattttattatgtaattaaatattgaattttttttatagatttagaaagaaagtatatatagattatttttgaatgaaaaagataaaataagaaaataggatattgggttatgtagaagtaaaggagagatttttggttgtagtttattgtataaaaataaattattttttggaagtatttattatgtgttagatattgtgttagatggatttgtaattttttttttatttaattttttgaggtaaatttaataaataattatatgattaattttttgtatattagaaaagaagtagaagggtatttttgttttttttttttttattttatatttttttcgtatataatttttttatgaatgaataaatgaatagatgtaaataagttttgaagattatttttttttttgaggtcgtggttggttttagaatttggaaagtaagagtattttattaatagatattaggtattttttattattaaaataaataatgaaatgaaataaatgataaaattatttataatgtaaagtttaaatgggtaaatatttattgagtatattatatgagtttggtattgtattggataatataaggatgttggggaaaagttgtttaagacggaattgtttttttttgtggttaagtatgttttttttagttttttatgaggtatttagtagatatgtaaagaaaggagggagaaatattttggatattgatagtatgagttgttatattattttatagaaaaaatggaaatgaggtatatttaaaagagaaagtttgtgggaaatgtaaagtatatttatgattatagtattaattaattaaaatatgaattaatatttttattataataattatgttttgtattaggagaatatattggtgttgagaaatttaagttttatttgaaagataaggtaattaaggtataatattatagattttaagttaaaattagaaattaaattgtatttaaatatatttgttatagttatttttttgaataaagtttgtgttatatatagggtgtggagaaaaaagttgaaggaaaaattagtgtgtaaagtttaatttttgtgtaatagttttttataaaagagtattaaaattagtaattatttattcgttaatttttaaaaaatgattaagagttatagtaaaaaaaaaaaaagttataaatattattggaaattagaaataagttgaaaaagtagtaaaaattatttatgttgaaaatcgtagataatatttttaaattattgttaaaagaatgaaaaaaataaatatttattatgtatatatttgtattttaagtagtatttttttttagtgttaatattatggtttcgagaaagaaaaatttttgtatagagttatttttatttatatttaggttaatatttggatgatatattttttatttttattgttttgtcgttttattattatattttgtttagttgtaatttttgttgatgtttaagtgatattttatatttaattgtttttttttttattgaatacgtttttatagttttttatattttttgtgggaagagatatatatatattaggttggaagttttaggtatagatttttgatagattatttaggtattttaaagtttattattgggttagtttagtatttgaataaatgaaattattattagagttattattgttgattttttagttttaggtatataagtagagttttttatttttaaaacgttttttaaaaaataaagtttaattgtttttaaaggggttaaatacgttattaaatttatgggtaattttttttatttgtatttatttatttattttagagatagggttttattttgttgtttaggttggagtagagtagtataattatagtttattgtaattcggaatttttgggtttgagcgatttttttgttttagttttttaagtagttaggattatagatacgtaatattaggtttggttaattttttttaaaattttttgtagagattttttatgttttttaggttggttataaatgtttagttttaagtaatttttttgttttggttttttaaagtattgggtttataggtattagttattaagtttggtggtaattttttttaaagtattttataaatattaaatatataagtatattagagtaaattagttttaaaataaagttataggatgtaaaataaattaaagtaattatttttttatagattattaattttttaaatgaatagttattttaagattatagaaaatatggaaaagaaaagggttttgattatttataagatattttatgtttagaaagaagtaaaaaatatttgggttttttttttttttttggtttgagggttttgttgttgtttggattttttggtgtttgggttttggttttggggttttttggtgataaaaaaaatttatattttttatttatttttaagttagatttttatttgtttatttaataagattgagttaaatattagaggaaaagatataaataaaatatatttttagtttttagggaggttatagataggaaagcggaatttttataatttggaaagttttgggttttaggtattagtgtagaagggaagggtgtagggggataggtgttaatttatattggaattaggataggaatagtttttttgatttgggagaaacgagaagtagtttggttatttggggtattggggaggggtagtgtttgttgggttaggagtgagggtagtggagtttgtttgtgtagtgttagtttagggaattatagttgaagaggaagatggtgaaggagagtggttgttggagaagaggtttagaagaatttgtcgtaaatggatttttgttataagttaaggattttggattttatgttgtagttattggagaaatatggagaggtttgaagtagaatgtgatatgatatgatatgattatattttagaattataaaaaaaattattttgattgagggaaatagaaatggtaggtattttaggaaataattttaggggggggaaaagagatagatatggtaaggtaggattaagttggttaattgggagatatttttagggtgttttgtgttagttgagggaatgagtgagatttaaaattttatttttgtagttagttttttaagttttttattttggtataggaagtttttttttgtaggaagggatatgtttattattttataaaggtgaattttgttttttaagttttgaataaagggttgtatttatttaaatgtaggttttttttttaatttataaattcgtagggggtgttttgttttaaaatatataaagatagtggtataagttagggattttgagtttgtaatgatttaagtgagaaataaggttttaaattaaagtagggaggatataaatggagaagatatttatagtggttttttatttattagatattttgagagtgtatttagtgttaatttttgagtatatatagggagttatagataaattttgttttgggataagtgatagagtgatgtcggaggtgatagaaataaatgtatttttaaatgttaaaatttgatttgtaatttgtttttttaatttatttttgattttaatgttattgttttggttaatgtttttgtattttaggattttaaaatttaagaattaattttgaattattttcgtttttagttattaagttttgtaggttagttttgtaatgtagttttttttttttttttttttgttatttttattgtttttaatttaaatttttattattttttatttgagtttttgtagttagttttttaagttttttattttggtataggtttttttttgtaggagttttaagttttttttttaaatttatttttttttattttttgattatttttaatatttattttgttttaaatatttttattttttatttttgattattaaaattttatacgttatatattttttatgaagggttgttttgtgaggtagtgagtttgttgtgttttagaagtattaaataaaattttgaagaaattttgtttagagaattttagtattgagtagattgttgataggattagtggtttttaaagtttagtttattatttgaattattaggagaattttttaatgattttgatttttaatatttttattttagaaattttgattttttgggtgttttagtttattttgtgttgttgtaaaggaatatataaggttgggtaatttgtaaggaaaaaaaggtttatttggtttataattttgacggttgtaatatttaaggttgaatatttgtattttgtgagggttttatggtgtttttatttatagtggaaggtaaaagagagttagagtgtggagatattatatggtaagagagaaagtaagatataagagagaggtgttaggttttttttaataattagtttttgtaggaataaatatagtgagaatttatttattttaaaaggagggtattaatttatttatgag

SEQ ID NO: 323 - DNA, 7057 bp, Artificial Sequence
  chemically treated genomic DNA (Homo sapiens)
ttgaagagcggtagcggaaatagttgggaaaagtggttttttttttttttttttttttttttagtggattatttgttagtagtagtatttggttttggtttttagtttaaagttatttagagagggttttaggaagggtgttgagatttttataatagataggaggataaaattaaaaggaaaattaatattagttaagagtgaaattttttataaggttttatttttagagaaaagttttttttattttattagttgtgggggtttttggtttttttgtttttttatttatataatttaaagggaagtttgattgttgatattttttatttatttaaatagaatttatagttagtttttttatttcggagagaggtttgtggggaaaatagatagattaatataattgtagaggaaatttatgttatttatttataataattaatacgggtttttatttataaataaataaatggttaagtatttgagaaaaattagtaatataatgaaaaggattaaaataaataaatggaattgatttagaggaaagagggagaattaagggaattgaagaaaatgtaaatatattttgatatgtattgttagaaaagttagttaagcgttatttttttaggttagaatattttataatttttttttttatttttttaaaataatatttagtaatttggtaaatatttattaattttttataatgtgttaggaattaaaatttttgggtttttttgtttgtttgtttgttttaattattttttttttttaatagttaatggtagaaaaattagataagtttattatgatatgatgtggtaaatgttatgatagattaagtatagaagaggtagggtatagtggtttacgtttgtgtaattttagtattttgggaggttaaggtatgtggattatttgaggttaggagtttaagattagtttggttaatttggtgaaatttcgtttttattaaatttataaatattagttaggtagagtggtgtacgtttgtaattttagttatttaagaggttgaggttggagaattatttgaattcgggaggtggaggttgtagtgagttaagattatgatattgtattttagtttgggtgataaagttagatttttttttaataataataataataaaaagattaagtatagaagagagtattttgttagttggaatagaatattttatttaaatattaatagatagtcgggcgttgtggtttatatttgtaattttagtattttgggatatcgaggttggtagattatgaggttaggagtttgagattagtttagttaatatggtgaaatttcgtttttattaaaaaaattttgtaaaaattatttaggcgcggttgcgtaagtttgtagttttagttatttgggaggttgaggtaggagaatcgtttgaatttgggagatggaggttttagtgagttgagatcgtgttattgtattttagtttgggcgatagagtgagattttgttttaaataaataaataaataaataaaaaatattaatagataagataggagagaattagttttggtatataaataatatgaataagtatagtatattttaggaaataaaattagtttaaaatgtttgagatttaatgagtcgtagacgatgaggagagaaatgtgggtaggggttaatttatttgttatgttaagaatcgagatttttttttttagtttagagttttttaggtatatttagggaaaagaatttttaggaggttttttatataataaataaaatattgttatatttaatttttttatatgtattggaaatgattttttaagtagaaattatgattgtgttttgggttattaatataaaattataattataggtatatttatattaaaaataaattgttgaagtatgatttattgttttttttattttttttttgatatttgttataaattaattattagttagtagaaaagtagtagtagaaaagggtgattaatatttaagaaaattttgtgtaaaaataattgaaaaatgagattttaatttattaatttaattttttttgtaaatttagaaaaagatggttaatatttgattttggttatagatatttgtatgtatttttatatatgtatatattttttggaaattaagtttgataattatttttggacgtgttaggtagttgaagatattaaaacggagttaattttttgttagggagagataggtatgagaggttttgagataaagaatttttgatgtagaattagaaattaaaaaaatagtttaaatgaggaagttggaaaggtagttaattgtggtattatggtagaggattaggtagaaggatgagagaaagagaaggttttaataattgaggtataagtagggtattttggagttagttgttgttagtgtgaaagatggatggggtgggatagaaagagaaatagggagataagttaggatggtataatttagtaatttataaaggagaggatatatgggtttggaataggatgatggtaggggttatggagagaagtggtggtaattaaggtttttggaggaagaagttattgggattggggtaatttggggtaagagagagtgaaaaattatgaatggattttagatttttgatttgggtaattaagtgggtggtgggattatttatagagatacggagaattttaagggagaataggtttggattggaattagagtggtgagataaattaattttagagtatattaaatgtaagatggttttgggatatttaagtagagatttttagaggtagttgtgtttataattttgaagtttaggattttagttatagatttgagatttattataatgaaggtgagattgaaatttatgaaagtttatgaaatttatgaattatttaatgaaattatggagaataagaagagaggggaggagaggagaagggagaaggaaaggaaatagagagaaggaatattaaagttttaagggatataaagaggaaagaagataatatgaagaaggattttgagaggtagaagtttttaagaatagggtgatatagaatttaagtggggagagtatttaggaagatgataataggataataggttaatagagtaatagagaggtcgttaaaaataaattttaagaagtatttagttaaaattattattgagttaataatggtgggattaattttaggggaatattgtgggtagaagttagattgtaggaggttggggattaagaagttgaggtaaggaggttggataataattgtttttttaagttggttacgtgaataaatttgtgatttttagttttttttttttcgggttttggttgagttgattgtagggtttttgtagttttggtatttttaagttgtataaaattgatagtgtagaagtttttgagtttattttggtttttatgataatttttttttagtggaattaaggttatttgtttaagaattaaagtttttgatttgattgattaaagtttattacgtgtatcgaagttatttatttggtagatgtagtgaaaagttatatagatttgggtttaggataggatgttggggcgtgggaggggaagaaagtaggtgttaattatatagatagtatgtttattagagtagtttttacgttttttatttgttttttaaaataattttataggaattattaaagtaattttattatggtttttagattaggtttggatgtgaggtagggatttttatagttgtttttagtttgaaggaaatttgataagatgatgtaaaagttttttagaaatgtgtaattttatatattttagtgatttaatttattgttaaaatttaaggtgtttttaatattgttattgtttatttggtttttattaatatgtaaggagttggtaattatttgttaaatttatgttttaggttaaataaattttaaaaaatttaggatgagaattgtttattgtttaacgtgttttaaattttttttatgtatatttttattagatttttatagtaatttataggataagtaagataggtgtaagtgttttttttgggtatgaggaaattgaggtttaaagagatgaagtgatttgtttaaggtttatagtaatttattggtagagtaaagattagaatttagattttttaattgtagtttattttttttattttgaattgttatattagtattaataattatttaatggattggaatagtgtatataggtagtttagttacgttaagttacgatttttattttaattttaattttagagttttggtttgattttttttaagattttatttatttttgtttttgtaaaatttattttttttgtattatttttttagttaaattttatttaataattattagtatgttttttttgttttatgttatgtagatttgatttgaaaatttgttaggtttttattgagtttagtgattaaagaagtaaagttttgagaagtaattagttgatgggatattagttataaaattaatttaaatttttgttgatatgtgtttttttttttatatattaggttttcgtttcgtattagtaagattgaaattgaaataagtttattgttggtggatgaatttgttattttttttgaaattggtgaatttaaaaagttagatagtgataggaaaatattgttattgtttgttaagaagtttatgatattttaaggtaagaatgaatatatggaagaagaaatttgttttttttttatttataaaaaggaaagtttggaagtgaatgatatgggtataattaaaaaaaaaaaaaaaaataaaaaatttttacgtaacgtttttgttgggagagaagattacgaagtatattttttaggaagtgtgggttgtaacgattgtgcgtttttaattaattttgagtaaggtggttattttgatagtttttttatgttgtttttgttattttttttgttagaagatattattttaattttaatatagtatgatcgaaatatataattaaattttttttcgatttgcggttattggattgtttattagtatgaaaatttttatgtatttatttattgttttttttattatttagatgattgggttagtattttttgttgtgtatttttatagaaggttggataaggtaagatgaattataagtttttattaattaaatttggggtttttattaatttataggttggttttatttaaatgatggatgatggtagaaattaaatagaagaatggttttgtggtataatgtttgttgtttagttaatgaagttttatatttttgtttttggttaggattttgggatttggagttagattgtttgggtttaaattttggttttgtttatattatttttgttattttggggtaagtgttttagtttttatatttgagaaatggggatggtattggtgtttattttatagattaagtgagtttagttttgtaaaaagtttaggagggggtttgatatatagtaagtattatgtacgtattagttataattatttgttaaagttttgttttaaaagtaagttatttttttatggagatagttttttttttttaaatttttagttaggtaagaagagcgttaatttgatttaaaattttataatgttttagattaatatagatatggataagttttagaatttgtagttttttagtaaaagtagtattttttgtgtaattttttataagtattgattgtagttgtaggatgtttagtttttttttgagatgttttatatttttaaatggttagatttgtaggaataaaagagtagagtaatttagtaggttgttttgtatttttaggaaaagaaaattattaggatttattttgtttttatgtatttttttatttttattgaggagtataattggttggtgttgataaaatattaattatagatgtaaaggagaaagttgattagttttttggttgtttttaaaattttggatgtaggaattgtggttagaaagtatttggatgattgtattttattagggatatttgagtgtttttttttaggatttggatttagaattaatgttatgagatttttttaataggataaggtgaggtagtgagggttgaagttatttattgggttatttaaatattaggttttattgttgataaaagagggggtttttggtttggttggttatttgtgtttggtttgatgtgttttgttaattaaatgtatggatataggtttagtttttaaaggggtaatagtgattttagtggattgatatttatcgtattatttatatgtgtttttaattatagtagaagttgttagttaattgaattttgttttgaatttaaaaaatttatttttaaagtaagaaaatggtataaaattagttgataatgtaagtgaattttgtatatttaattattttaagatattggaaaataaaatattttgttattttgaggataaaagatgatttttttaaaaatgtaaatgttttttataaatattaaagttaaaagggagagagatgtaattagaattcgttaattgatatattgtaaattaatttttttttataaagtattgtattataaatattaaaatgaagtgggtaaattagttttgtagaaaattattttttaggttgatgtttataatgattaattattattgaagtaatgagaaatgtgataattatagaatattgttgttatagtatgttgaaaaaatatgtattttgtagtgaatatttagtagaatagttttgatttttatttggagtttttgataatatgatattttaattgttgttttttatagatttttaaattgtaaatataaaatagtaattagttaatataataatttattattttttatttatgtttgaaagttttttttttgttgatgtcgtggaaatgaatgtagaggtagatattattagttgtatttttttttcgaatgatatttattatatttttgttattttaaaataga

SEQ ID NO: 324 - DNA, 7057 bp, Artificial Sequence
  chemically treated genomic DNA (Homo sapiens)
tttattttggaataataaggatatgataaatgttattcggaaggagaatatagttaatgatatttgtttttatatttatttttacggtattaataagaggaggatttttaggtataaatggagaataataagttattatattggttgattgttattttgtatttgtagtttaaaaatttataaaagatagtaattaagatgttatgttattagaaattttaggtagaaattagagttattttattaaatgtttattataaaatgtatatttttttaatatattatagtagtaatattttgtaattgttatattttttattgttttagtaatgattggttattataaatattagtttagaaaatagttttttgtagagttaatttgtttattttattttagtgtttgtgatgtagtgttttataaaaagaagttaatttgtaatgtgttagttaacgagttttaattatattttttttttttttaattttagtatttgtagaaaatatttgtatttttaaagaaattattttttatttttaaagtaataagatattttattttttaatgttttagaataattaaatgtatagaatttatttgtattattaattaattttatattatttttttgttttaagagtagattttttagatttaaaataagatttagttagttggtagtttttgttgtaattaagagtatatgtaaatagtacggtaaatattagtttattgaggttattattgtttttttagaagttaggtttatgtttatatatttgattgatagagtatattaggttaaatataaataattaattagattagaagtttttttttttgttagtagtgaaatttaatatttggataatttagtggatgattttagtttttattattttattttattttgttagaaaaattttatgatattaattttaggtttagattttaagagaggatatttaagtatttttgataaagtgtaattatttagatgttttttagttatagtttttgtatttagaattttaggaatagttagaaaattaattaatttttttttttatatttatgattggtattttgttaatattagttaattatattttttagtggaagtgaaaaaatatatgaaaataaaataagttttgatggttttttttttttaagaatgtaaaatagtttattaagttattttgtttttttgtttttgtaagtttaattatttaaaaatgtaaaatattttagagggagattgagtattttgtaattataattagtgtttgtgaagaattatatagaaaatgttatttttattaaaagattgtaaattttgggatttatttatgtttatgttaatttgaagtattatgaaattttagattaaattgacgttttttttgtttagttggaaatttaaaagaaaaaagttgtttttataaaaaaatagtttatttttaaagtagaattttagtaaataattatagttagtgcgtatatagtgtttattatgtattagatttttttttaagttttttataaggttaaatttatttaatttatgaaatggatattaatattatttttattttttagatgtggaaattgaggtatttgttttaggataatagagatggtatgggtagagttaagatttgaatttaggtagtttgattttagattttaagattttaattagagataagaatatgagattttattgattaggtaataaatattatgttataagattatttttttatttggtttttattattatttattatttgggtagaattaatttatgaattagtaaggattttaaatttagttaataaaggtttgtggtttattttattttgtttaattttttatgaagatatatagtaaaaagtgttgatttaattatttgggtgataagaaaaatagtaagtaaatatataaaaatttttatgttgatgggtagtttagtggtcgtagatcggggagaagtttggttgtatgtttcgattatgttgtgttaaagttgaaatggtattttttggtagagaaggtggtagaggtagtatgagaagattgttaaagtggttattttatttaggattagttaagagcgtataatcgttgtagtttatattttttggaaaatgtgtttcgtagtttttttttttagtaaaaacgttacgtaaaggttttttgtttttttttttttttttaattatatttatattatttatttttaggtttttttttttgtaagtaaagaagaaataagtttttttttttatatatttatttttgttttgaaatgttatagattttttaatagataatggtagtatttttttattattgtttaattttttgggtttattagttttaaggaaagtgataaatttatttattagtaatagatttattttaattttaattttattaatacgaagcgggaatttggtatatggagaaagaaatatatgttaataaaagtttggattgattttatgattggtgttttattaattaattgttttttagaattttatttttttaattattaaatttaatgaaagtttggtaggtttttaggttaagtttatatggtataaagtaaaaaaagtatgttgatggttattaaataaaatttagttggaaagataatgtaagaaaaataaattttgtaaaggtaaagataagtagggttttgagggaaattaggttaagattttggaattgaagttaaagtaaaaatcgtgatttgacgtagttaagttgtttgtgtatattgttttaatttattagataattgttgatgttgatgtaatagtttagaatagggaaaataggttgtagttaagagatttgaattttagtttttgttttattaataaattgttatgagttttgggtaaattattttatttttttagattttagtttttttatatttaaaggaggtatttgtatttgttttgtttattttgtaggttgttgtgaagatttaataaagatgtgtatggaagaaatttgaaatacgttaagtaataaataatttttattttgaattttttggaatttatttagtttaagatatgagtttaataaataattgttaattttttatatgttggtaaaaattaaatgaataataataatattaaaaatattttaagttttgataatgaattgaattattgaagtgtgtaggattatatatttttgaagggtttttgtattattttattagattttttttaaattaaaagtagttgtggaaatttttattttatatttaaatttggtttagaaattatgataaaattgttttgatgatttttataaaattgttttgagagataaataggaaacgtaaaaattgttttgataggtatgttatttatatagttagtatttgtttttttttttttttacgttttagtattttgttttgggtttagatttatgtagttttttattatatttgttaagtaggtggtttcgatgtacgtgatgaattttgattagttaagttagaggttttggtttttagataagtaattttagttttattgaaggaaaattattatgagagttaaaatgggtttaaggatttttgtattgttagttttatataatttgagagtgttagagttgtaggggttttgtaattagtttagttaagattcgagggaggggaggttgaaggttatagatttgtttacgtgattaatttgaaaaaatagttgttgtttaatttttttgttttaattttttgatttttagttttttatagtttgatttttgtttataatatttttttgaaattgattttattattattagtttaataatagttttggttgaatattttttagagtttatttttagcgatttttttattattttgttgatttattattttgttgttatttttttgaatgttttttttatttgaattttatattattttatttttaagggtttttgttttttagaatttttttttatgttatttttttttttttttgtattttttaaaattttggtattttttttttttattttttttttttttttttttttttttttttttttttttttttgttttttatggttttattgggtgatttatgggttttatgaatttttatgggttttaattttatttttattgtgataaattttaaatttataattgaagttttgaattttagagttgtaagtatagttatttttgaaaatttttatttggatattttaaagttattttatatttggtatgttttaaaattaatttattttattattttaattttaatttagatttgtttttttttaagatttttcgtatttttgtgaatggttttattatttatttaattgtttaagttagagatttgggatttatttatgattttttatttttttttgttttagattgttttaattttagtggtttttttttttaaaaattttggttgttattatttttttttatggtttttgttattattttattttaggtttatatatttttttttttgtagattattgaattgtattattttaatttatttttttgtttttttttttgttttattttatttattttttatattgatagtaattgattttagaatgttttgtttgtattttaattgttgaagtttttttttttttttatttttttgtttggttttttattataatgttataattggttatttttttagtttttttatttgggttgtttttttgatttttgattttgtattagaagttttttgttttagaattttttatgtttgtttttttttaatagggagttggtttcgttttaatatttttagttgtttaatacgtttaaaaatgattattaaatttagtttttaagaaatgtatatatgtataggagtgtatgtaagtgtttatagttaaaattaaatattgattatttttttttaagtttatagaaagaattaagttaatggattgaagttttattttttagttatttttatatagaatttttttaaatattggttatttttttttattattatttttttgttagttagtgattgatttgtagtaaatattaagggaaaaataagaaaaataatggattatattttaatagtttgtttttgatgtgaatatgtttgtggttgtgattttatattgataatttagaatatagttataatttttgtttggaaaattatttttagtatatatgaaagagttaaatataatagtattttgtttgttgtatgaagggttttttaagggtttttttttttgaatatatttgaaaagttttagattagaggaaagggtttcgatttttaatatggtagatgagttgatttttgtttatatttttttttttatcgtttacgatttattaggttttaaatattttaagttagttttattttttgaaatgtgttgtgtttatttatgttatttgtgtgttaaggttaatttttttttgttttatttattaatgttttttgtttgtttgtttgtttgtttgagataaagttttattttgtcgtttagattggagtgtaatggtacgattttagtttattgaaatttttattttttaggtttaaacgatttttttgttttagttttttaagtagttgggattataggtttgcgtaatcgcgtttggataatttttataaaatttttttagtagagacggggttttattatattggttaggttggttttaaatttttgattttatgatttgttagtttcggtgttttaaagtgttgggattatagatgtgaattatagcgttcggttatttattaatgtttaagtgaaatattttgttttagttgataaggtgtttttttttgtatttaatttttttgttgttgttgttgttgagaaggagtttggttttgttatttaggttggagtgtagtgttataattttggtttattataatttttatttttcgggtttaagtgattttttagttttagttttttgagtagttgggattataggcgtgtattattttgtttggttaatatttgtaaatttagtagagacggggttttattaagttggttaggttggttttgaatttttgattttaggtgatttatatgttttggttttttaaagtgttgggattatataggcgtgagttattgtgttttattttttttgtgtttaatttattatagtatttgttatattatattataatggatttgtttgatttttttattattagttattagaggaaaaagataattaaaataaataaataaataaaaaaatttagaaattttggtttttgatatattgtaaggagttagtaaatgtttgttaaattattaaatattattttaaagagatagaaggggaagttgtaaaatattttaatttgggagaatagcgtttggttagtttttttagtaatatatgttagaatatatttatattttttttaatttttttaatttttttttttttttttgggttagttttatttgtttattttggttttttttattatgttgttagttttttttaaatgtttggttatttatttatttatgaatgaaaattcgtgttggttattatgggtagatggtatgagttttttttgtaattgtgttgatttatttgttttttttataaattttttttcggaatgggagggttgattgtgggttttgtttaagtgggtaggaaatgttaatagttaggtttttttttaggttatgtgggtggagaggtaggaagattagggatttttataattgatgaagtaaggagggtttttttttgggggtggagttttgtagaaggttttatttttgattaatattggttttttttttggttttgtttttttatttgttgtggaggttttagtattttttttagagttttttttaggtaattttagattgagggttaaggttaaatgttgttgttaataaatggtttattgggggaaaggagagagagggagagggttattttttttagttgttttcgttgtcgttttttaa

SEQ ID NO: 325 - DNA, 6051 bp, Artificial Sequence
  chemically treated genomic DNA (Homo sapiens)
tgtgataaatatgttaatttagtggaagaaaagatgggatgtgtggaaaaattagattatatatggagaaaaatagatttttgttttattttataaaggtggattttagatggattaaagtttaaatataaaatttgtgtaattatggattatatttataatattaagtataaggagattttgtaaattagtataaaaaaaggtaagaaatttagtttaaaaatgggtatggtatgtgaataggaaatatatataaaaaggaaaatttgaatgttaataagtatatgattagatgtttaattttataagagattagaaaaaggaagattaatagataatgatatataattttatagttataatgtttggtaaaaattaaaagatggataatattaagtagagttgaggatatgggataaaatagttttttataattggtggtggtgttaaggtatttagttatttagatgagtatttagaaattatttagtgaaattaaatatataggtgtatgtttgtgaataaataagttttagttaggagtgtattggggtttttgtttatttttggggaaaattagatttggtttttttattaatttggtagatgtttttggaagttttttttaggtttgtgaaggtttatagtagttattttttttatgtattattttttgcgattgttgagttatttttggagttttgagttataatttattgagtttatttttttggtagaatattggatggaagaaagaaataggaattttgttttttttatgtttttgtttttttaatttttatgtgattaatattttaggtgtagtagtatatttaaattttttttttagatggttaagataatttttgaaggaaattataatgtcggagggattataattgaagataatttgaatttttatttaatgagaagatattttaaaaaattataataattagtataaggtggttttttttattttgttttttatataaatttgtttttaagtgttatttaggtttttttgaatttttatggttcgtaagttttttttttttttttaaagagattgttagttttgaatattttttttttgtttatttttaaggaatttttggttttagaattagagattttgtaggtgtaattggggagggtagagtaagatttagtaaagtttttttatttaaatttttagtttgtgggagttattagtttttgatttatttattaagtttattttttaaaggtaaatattattttttttagtatttatagaattaagatttatttgtaataattatttttttttattaataaggtttggaaatattttaaaatataatgggtttttgttattgtatatagggttgttttatttttttatgattttgttaatttgtgatgtttggtggtattattgaagattaatatgagtgtttaaagatgttttttttgattttattttagtttagattttttttatgtttggaggatagtaggagagttgggggtaggtatggttttttaattttttttgttgtagaatgaattaatagaagtagtagggaagaaggagatgtaaaaatatagtataatttttattggatagtgttggaagtttttgtgggagtttgagatagaaaaatcgagaggtattagtttgaaatggagaggtttattagtttagggtaggattttagagagatattggatgttaaacgtggattttgtatttttttttgtaatttttttttttttttttattttgtttgtttttaatggaagaaggtcgattatattaagtttatagatgaattatttggggaaagatttattaaatttataatattttttgagtgtttattttggtgttagggattattttaagtgtattaaatgttttgatttatttaatttttttaattttcgtaaagtaagtattattatgattatgtttatttttataaatgagaaaattgtggtatcgaggagggaaggtgatttgtttagtttatatagttaatgagtagaagagttgggattggaagttatatagtttaattttagaattatttatttttaattattatgtaatattatttttttatttaggatatggtgtattttttttatttatttgaatttttgatatttttagtagaatttttataatttaaaagatatgggttatgtacggtggtttacgtttgtaattttagtattttgggaggttgaggcgggtagattacgaggttaagagatcgagattattttggttaatatggtgaaattttatttttattaaaaatataaaaattagttgtgtgtggtggtatgtgtttgtagttttagttattcgggaggttaaggtaggagaattatttgaatttaggaggtagatgttgtagtgagttgagattacgttattgcgtgttagtttggcgatagagtaagatttaattttaaaaaaataaaaaatatatatatatggttttggataattttttttatagttattttgggatttttaaatagtttttttgttgtttatatggtagaatttttaaaattataatttttgattatgaaatttaaagttagttgaatttataacgatgaataaagttatatgtgagtttaaaagttcgttaattcgtgtattgttttgttagttttattttttgtattgtttaagagtggagagtgggatgtgagtaggagtgtttggtaaggaggtagtaggagttgacgttaaagagttttgggtaacggtaagaagtttgttttgtttttgaattaaattttttaatagaaggtagggaagtgagattattaggtttgttttttaaaaagtattttttttatagtattttattgggtgatttgggtttgggaaaggtcggtggtagggtatttgttagggtattattgtagtattttaagtgagagataaagtttgattttaggtaatagtagtaagaaaaatgggagtagcgaggatggggtaggggggtagtatattgaggggagggtaaggaataggttttaggtaaaagcgatagttttgggtgattagttaaacgttgggggagaggaaaagaaaggagatgaagttgttattagaaagagtggttttaggagaaaggggttgtatagggttggggatggggtgggatgggtagaatgtattagagaaatagtatttttggggttggtgtggtataggtgagtgggtttgaatgatagtaatggaaattttaaagtatgatataaaaattaacgaaatttgaaaagtaataaatatgaaaaaaatgaaaaattttgatttatgggggatttatttggtttttattggagaatgattaggattgaagttaattatttggaagttattggtatataaatggtatgtgaggttagaggaaatggtgagatgagtttaagtagagaggttagttttaaataataataataattattaaaaaaaaaaaaaaaaaaaaaaaagtaaaataaagaaataggatatagagttagatttgaatgttagatatatgatgaataattgtttagtatattttatgtttggatatgtttaagatttatttgttttaaaaataatgtattatttatttgaaatttaaatttaattgggtattatgtattttatttggtaattataataggggtagtatatagaaatgttggtagggattaggtaggttttttagatagtgaggtggtgtgtgagatataggttagtggtggaggttgggtgatttagaatttttgttttttatttttaggggtagttgttatatattttttattgattgggtttgtagagatggtttcgagggtgtttgatattttgatattttaaaatagaatagaaatatgtattttaatgtgtatttaatatatatattttaaaatatttttaatgttgatattaaaagtggttagttgggtttagtgtagtggtttatgtttgtaattttagtattttgggaaattgaggtaggaggatgttttgaagttaggagtttgagataagtttgggtaatatagtaagtttttatttgtataaaaaaaaaaaagaataaattagttaggtgtagtgatttatgtttataattttagttatttaggaggttaaggtaagaggattgtttgagtttaggagtttgaggttgtagttaattacgatagtattattgtattttagtttgggtgatagagtgagattttgtttttatttaaataaataagtaaataaataaattgggtaaataatgaaaatgaaaatattgcgaaatataaagtagttttgtgggttttattggtttgtagtttttgatttaatttttaaagtgggtgtagtaggtttttaatttgtaaattatggtgatcggtaggttagggtaaatggtagttgtgtgtggggaagagatgatggtaatagatgttttttttttgtaaaaattaaaatgtgggagtgatttttttggttatgattttatggtttttttttttagagttatttttagtaaaatttttatagtttaaaaaatacggttttgaataatttttgttagagttattttgggatttttaaatagttttttggttgtgtatatggtagaatttttaaaattatataattataatgtataaaaaagtatgtaattataatttataaaattatagttttattgattatttttttgtagttgggagtagtttatattaatagggttatatttttatgttgatttgttttgtaggattttaggaaggtgagtatagtttattaatttgtttgggtagtatagcgatagtaattgaggttttgaaggttgttattagaaaattgtgggcggaaatttttaggggtttgttttgagttttttgaggttttttagttttagttgtaaagtgagtgggtgtttttttgagaagtagaattagagagagagagatagagaaagagaaagatagaggtgttttttttagttatggaaattttataagagagatttagtttgtttttttttgagtagttagtaatagggtttcgtttttgatattttagtttttataggattgagaagaagtaaaatcgtttgttggggttggtttgatttattagttgttatgtagtagttttttaattatttatatttttagatttattgggtggatagtagtgttagttttttttgggtttttttaggtatagtttttttttgtttaatttttgtgtttagaaggtttggttaaaggaggttattattattatcgttatcgttattattattattttcgtcgtcgtcgttattattgtttttattatcgttgttatttttgaagaagagagggaattatagtataggtttgtgtttttttgtgatgttttttatggttttggttgttttggtaggattgggtttggggatgttttagtttttttatttatagaaggagttggtagaatttcgagaggtaagtttgtcggtagattgttgtgttttggaggtattaggtataaggggatggagggtttattgtttggtttgtaaagtgttttttaatttttttttttttttttttagaaatgggttgttttagttattttattttatagatagagaaatggaggtttataggggtgaagggaatattttttattttgtaaagaattagagtttaatagtttgtttttttttagttgttaatttagtttgttgaattatttattgttttatatttattgatttaaggagtaaaaaataaataaataaaatttttaagttttgtttggaagtaaatttgtttagatgattaaattaaattttgaaaattggtacgattttaaattataaaattgagggatagtgaggtaaaattgtttggttaaagtttaagttagtagaatttttgaggtatttggattttttttttagggtttggtttatttgacgattttgttttttttgtttaaagaattttatttttattatatattttttttttttttgttttattagt

SEQ ID NO: 326 - DNA, 6051 bp, Artificial Sequence
  chemically treated genomic DNA (Homo sapiens)
attagtaaaatagaaagagaaaagatgtataataaaaataaaattttttaagtaaaagaggtagaatcgttaaataaattaagttttggaaagagaatttaaatattttagaagttttgttaatttgggttttggttaagtaattttgttttattgttttttagttttgtgatttggaatcgtattaatttttaagatttagtttggttatttgaataaatttatttttaagtaaaatttaaaagttttgtttgtttgttttttattttttaaattaataggtatgaggtagtaagtggtttaatagattgagttgataattgaggaaagataaattgttgggttttgattttttataaagtaaaaaatattttttttatttttatgagtttttatttttttgtttatagaatagaataattagaataatttatttttaagaaaaaaaaaaaaaggattgaaaagtattttgtaagttaggtagtgggttttttatttttttatgtttggtgtttttagggtatagtagtttgtcggtaggtttatttttcggagttttgttagttttttttgtaggtggaagagttgaaatatttttaggtttaattttattaaggtaattagaattatgaaaaatattataaggagatataggtttgtgttgtggtttttttttttttttaggggtggtagcggtagtggaggtagtggtggcggcggcggcggaggtggtagtggtggcggtggcggtggtggtggtggttttttttgattaggttttttgggtatagaggttggatagggaagaattgtgtttggaggggtttagggagagttggtattgttgtttatttagtagatttggggatatgggtaattgaagggttgttgtatggtagttggtgagttaggttagttttagtaaacggttttatttttttttagttttgtagaggttgaggtgttaaggacgggattttgttgttgattgtttaagaggaggtaagttggattttttttatagagtttttatagttaagggaaatatttttgtttttttttttttttatttttttttttttgattttgttttttaaagaaatatttatttattttgtagttgaagttgagaagttttaagaagtttagagtaaatttttggaagttttcgtttataattttttgataatagtttttaaggttttagttgttgtcgttgtgttatttaaataggttagtaggttatgtttatttttttgggattttgtagagtaggttagtatgggggtatagttttgttagtgtgaattgtttttagttataggagaatggttagtggggttataattttatgaattataattgtatgtttttttatatattataattgtataattttaagaattttattatatatataattaaaaaattatttaaaaattttaaaataattttaataaaaattgtttagaatcgtattttttaaattataaaaattttattgaaaatggttttgaggggagagattatggagttatggttagagaagttatttttatattttagtttttgtaggaggaaaatatttgttgttattattttttttttatatataattattatttattttgatttgtcgattattataatttataggttaaaaatttgttatatttattttagaaattagattagaggttgtaaattagtggaatttatagagttgttttgtatttcgtaatgtttttatttttattgtttgtttagtttatttatttatttatttatttaaatagagatagagttttattttgttatttaggttggagtgtagtggtgttatcgtagttaattgtagttttaaatttttgggtttaagtaatttttttgttttggttttttgagtagttgggattataggtataagttattatatttgattaatttatttttttttttttttgtatagatggggatttgttatgttgtttaggtttgttttaaatttttagttttaagatatttttttgttttagttttttaaagtgttggaattataggtatgagttattgtattgagtttaattgattatttttaatattaatattaaaaatattttaaaatatatatattaaatatatattaaaatatatatttttattttgttttgaaatattagaatattagatattttcgaggttatttttgtaaatttaattagtgggaagtatgtagtagttgtttttgagaatgagagataggagttttgggttatttagtttttattattggtttgtgttttatatattattttattatttgaaaggtttgtttggtttttgttaatatttttgtgtgttgtttttgttatggttgttagatgaaatatatggtgtttagttaaatttgaattttagataaataatatattatttttaggataagtaggttttaaatatgtttaaatatggaatatattaaataattatttattatatatttgatatttaaatttaattttgtgttttatttttttgttttgtttttttttttttttttttttttttggtagttgttgttgttgtttaaagttggtttttttatttgggtttattttattattttttttggttttatatattatttatatgttaataatttttaagtagttagttttagttttaattattttttaatagaagttaaataaattttttataaattaaaattttttattttttttatgtttattattttttaaatttcgttagtttttatattatgttttgggatttttattattattatttaggtttatttatttgtattatattaattttaagggtattatttttttgatatattttgtttattttattttatttttaattttgtataattttttttttttgaggttattttttttggtggtaattttatttttttttttttttttttttttaacgtttaattggttatttaggattgtcgtttttatttgagatttgttttttattttttttttagtgtattgtttttttgttttattttcgttatttttattttttttattgttgttgtttggggttagattttattttttatttgaaatattgtaataatgttttaataggtgttttgttatcgattttttttaagtttaaattatttagtaaaatgttataagaaaaatgttttttaaaaaataaatttaatgattttatttttttgttttttgttggaaggtttgatttaggagtaaggtaagttttttatcgttatttaaggttttttagcgttagtttttattgtttttttattaggtatttttgtttatattttattttttatttttaaatagtgtaagggatgagattagtaagatagtgtacgagttaacgagtttttgaatttatatgtgattttatttatcgttatgaatttaattaattttaaattttataattagaaattgtaattttaagaattttattatatagataataaaaaaattatttgaaaattttaaaataattgtaagaaaaattgtttagaattatatatatgtattttttatttttttgagattgagttttattttgtcgttaggttggtacgtaatggcgtgattttagtttattgtaatatttgttttttgggtttaagtgatttttttgttttagtttttcgagtagttgggattataggtatatgttattatatatagttaatttttgtatttttagtagagatggggttttattatgttggttaggatggtttcgattttttgatttcgtgatttgttcgttttagttttttaaagtgttgggattataggcgtgagttatcgtgtatggtttatattttttaaattataaaaattttattgaaaatgttaaagatttaaataagtgggaaaaatatattatattttggatggggaggtggtgttgtatgatggttgggagtgggtggttttggagttaaattatgtgatttttaattttagtttttttgtttattaattgtgtgaattggataggttatttttttttttcggtgttatagtttttttatttataaaaataagtatgattataatagtatttgttttacgggggttgggaggattaaatgagttaaagtatttgatatatttagaatagtttttagtattaaggtaggtatttaaaagatgttgtaaatttagtgaatttttttttaaataatttatttgtagatttaatataatcgatttttttttattaaggataaataaagtggagagagggagagaggttgtaggggaaagtgtaaagtttacgtttgatatttagtatttttttgagattttattttgaattgatgagtttttttattttagattagtatttttcgatttttttattttaaatttttataggaatttttagtattgtttaataagaattatgttgtatttttatattttttttttttttgttgtttttgttgatttattttgtaatagaagaaattagaagattatatttgtttttaatttttttgttattttttaggtatagagagaatttgaattgaaatagagttaaagagagtatttttaaatatttatattgatttttagtaatgttattaaatattataggttggtaaagttatggaaaaataaaataattttatgtataataatagggatttattatgttttggggtatttttaaattttattaataaggagaaataattgttataagtagattttagttttgtgaatgttaaagaaaataatatttgtttttgagagatgaatttaataaataaattaaaggttggtggtttttataggttgggaatttaaatggaagagttttgttaagttttgttttattttttttaattatatttgtagaatttttgattttggaattagaggttttttgaggatagataaaggagaaatatttagagttgataatttttttgaggaggaggggggggtttacgagttatagagatttaaagggatttgggtgatatttgggagtaaatttatatggaggataaaataggagaaattattttatattagttgttatgattttttaaagtatttttttattagatgaaaatttaagttatttttaattgtggttttttcggtattgtaattttttttagaaattgttttaattatttagaaaaaggatttaagtatgttgttatatttaggatgttagttatatggaggttaaaaggataggggtataaagagaataaagtttttattttttttttttatttagtgttttattagggaagtggatttagtggattgtaatttagagttttagaggtgatttagtagtcgtagagagtgatgtataaggaaagtagttgttatgaatttttataaatttagaggagatttttaagggtatttgttaagttagtaagaaaattaaatttgattttttttagaggtgagtaaagattttagtatatttttggttgaaatttgtttatttatagatatgtatttatatatttaattttattaagtgatttttggatgtttatttgagtggttgaatgttttgatattattattaattatgaagaattattttattttatgtttttagttttatttggtattatttattttttaatttttgttaagtattatgattataaagttatatattattgtttattgatttttttttttttgattttttgtgaggttaaatatttgattatatgtttgttggtatttaagtttttttttttgtatatattttttgtttatatgttatgtttatttttaaattgggttttttatttttttttgtgttgatttgtaggatttttttgtatttaatattatagatataatttatagttgtataggttttgtatttagattttaatttatttggagtttatttttgtgagatgagataggagtttatttttttttatgtatgatttaatttttttatatattttatttttttttttattgaattggtatatttattata

SEQ ID NO: 327 - DNA, 6004 bp, Artificial Sequence
  chemically treated genomic DNA (Homo sapiens)
gtgtaaatgatttttagtagaattgtatagattggaaagtggttagaggttaggttaagttattaagtgatttaggtgggaaggtttaggttttttaggtatacgatatggatttatatttaaatttaggtatttttttttttaagttttttgttaggtggattaagttggtggtttttttttttgagtttgtttatagggaaaatagaaataatagtatgatttattttatagggtttttgggaaggttagaaaaggtgaaatttgataagtgtttagtataggattaaatttttaattgcgtatgggttttttggttggttgtgtttcggtattatttaaattatattacgttgagtttgtgtgcgtacgttcgcgtttgtgacgcgtgtaagtgtgtttacgaaagaatatttttgaagtaaaatttttggattaaagggaaggtgtattttggtgtattgatagattttaataagttgtttttttagaaagttggatttattttagtttttagtttttaggtttgaggtttttttttatttacgtatttgttgagtagtgaattattaaatattttgattttttattaaattataggtgataagataaagtgtggttgggtatagtggtttatatttgtaattttagtattttgggaggtttaggtgggtagattattggaggttaggagtttaagattagtttggttaatatggtgaaattttatttttattaaaaatataaaaattagttaggcgtggtggtgggtatttgtaattttagttatttaggaggatgaggtaggagaattgtttgaatttgggaggcggagattgtagtgagtcgagatggcgttattgtattttaagttgggcgatagagggagatacgattttaaaaaaaaaaagagagagagagagagaaagaaaaattgtgttttacggagtttttaatttttaatttttttgtggtgaacgagatttagttttataagtagttgtattttttttatttatttatttttttaagatagattttttttttgttttttaggttggagtgtagtggttagattttagtttacgataattttcgtttttcgggtttaggcgatttttttgatttagtttttcgagatagttgggattataggtgttcgttattacgtttagttaatttttgtatttttagtagagacggggttttattatattggttaggttgggtttgaatttttgattttgtgattcgttcgtttcggttttttaaagtgttgagattataggtgtgagttattgcgttcggttaagtagttgtatttatttttatgagttggttgtttttgttttattttgggatttttttaagatatttcggttttttaaagtgttgagattatatgtatgagttattttattttattttttttttttttattttttagaaggtattagttattttttaatgatatgaatttaaattatttatattttaagttgataaaaagattagttaagtaaatattaaataaattaaggtaggagattgttttgaaggtgttgtttattcgttttttttagatttggagttttagggttttcgtgaaggaaatttttttagtatttggggattttagggaggatattttgatttttggatattttaaaattttggatttttttgattattttttttatttatttagtaaatgttataggtttaggttttgaaattttttatttttatttttttttaattttttgttttttgttggtaattttgttgttttaaatagtttttaaatagtgttgaagttttgtttaatgttttttaagagtaaggaggtcgtgatgagttttatagaggaggaaatttacgtgttagagaagttatttttaggtacgagttttagcgttgttggttgtgagtttgttgttgatgatattgattttttgatgatttatagttagaggtttttgggattttaattgtatgtatatatagatatatttttttttttatttgagagtaggtaatgtttattgaatagtttagaaaaataattatagtatatattatagtttatttttttaataagtttgttgatttggttttttttgttgttagtatttttattttttacgaaatgggtggtttgtttttttattttgttttatggagaagatattttgaaggattataggaagttatgtgtttttttgaagcgttttttaatagtatggattttatgaattatattttttatatagatgatgttatattttttaagagatcgtgtaaagcgttatttgttaaagtaattcgttttttattgattttgttataattacgtttgtagattagtttatttattgattttagatttaggtattcgtatgtaatgtatggttttataatttttagtatgttaattggtttttataaaggttttattgaagatttgataaaggtaaagaagttgtaatatatttcggatttttgggtttatattatcgatatttttgattttgatgataaacgttagtttggattttgtaggtttatagaagttgttagttttttttgatattttttttattcgaattttagttttgtatttttgtttatattttttgtgatagtgttttaattttttatagataagttttttttttgtttttcgaagtattttttgggtaaattttttttttaggcgtttggtttttagttttgtgaaattttttcgtttttttttaggggtttttggtatagcgggaattttttttttttttttttttatattttttatggttttagtcggaaaaagaggttggattttttttttaaaaaatatatatatttttaagatagagtttcgttttgttatttaggttggagtgtaatggtgtgatttcggtttattgtaatttttgtttttcgggtttgagcgatttttttgttttagttttttgagtagttgggattaaaggtgtttattattatatttagttattttttgaatttttagtagagatggggttttattatgttggttaggttggtttttaatttttttttttttttttttgagacggagttttattttgttatttaggttggagtttagtggcgtgatttcggtttattgtaagttttatttttcgggtttacgttatttttttgttttagttttttgagtagttgggattataggcgttcgttattatgttcggttaattttttgtatttttagtagagacgggggttttatcgtgttagttaggagggttttaaatttttgatattaagtgattcgtttgttttagttttttaaagtgttgggattataggcgtgagttattgcgtttggtttttttttggtgttttttgatttttatttgttttatttagtttttgtttttgtttttatacggttttttttttatgagttttttttttttttatttgagggtttattttaatttagtatgattttatttaagtttaattatatttgtaaaaaaaatttcgtaattttaaaatgaggttatattttgtagttttaggaggttatgaattttgggaggatatcgttaatttattatagttatcgagaatagtagtaggaggttggatgcggtggtttatatttgttatttcggtattttgggggatttacgtagtaggatcgtttgagtttagatgtttgagattagtttggtaatatagtaatattttattttttattttttttaaaaaaaaaattagtcgggtatggtagcgtgtgttggtagatttaattatgtaaaaggttgagatgggagggttattgaagtttaggagtttgaggttgttgtgagttgtgtggcgttattgtatttagtttgggtaatagagtaatattttgtttttaaaaatattaatttaggtcgggcgcggcggtttacgtttgtaattttagtattttgggaggttaaggcgggtagattacgaggttaggagatggagattattttcgttaatatggtgaaaatttatttttattaaaaatataaaaagttagtcgggcgtggtggcgggcgtttgtagttttagttatttgagaggttgaggtaggagaatggcgtgaattcgggaggcggagtttgtagtgagtcgagatggcgttattgtattttagtttgggcgatagagcgagattttgttttaaaaaaaaaaaaaataaataataaaataaaataaaaataaaaaataaaaatattaatttaatttaattttaaataaaaaagtaggtggtttttaagaatgtaggagataattgatcgggtgtagtgttttatgtttttaattttagtattttggaaggttaaggcgggtggattatttaaggttaggagtttaagtttagtttggttaatatggtgaaattttatttttattaaaaatataaaaaattagttaggtatggtggcgcgcgtatgttatttttagttattcgcgaggtttagataggagaatcgtttgaatttaggagatcgaggttgcggcgagtttgagatggcgttattgtattttagtttgggtgatagagggagattttcgttttaaaaataaaataaattaaaaaaatgtaggagaggggtatacgaatatttggggagtatttttaatttttggatgtttgttgtatttttagtgtatagtataatttaatttttaataaatgtgtagtggaggtttgttgaataaatgaatgggttttagaagaatgaggtggagaggggaataggaagattgaatgttttttgtttgaaggtcgggcggggaggggttgggggtaggtaattttgaggtttattcggggttattgtttgtattttggtaattgtttttatttattttaggatttttagattggtagcggttggagggaattttttttcgttaattgtttaagttttttttttcgatcggtcggatatttttagagaggggtaggttggttttttgataggttgaagtaagtagacgtttaggagtttcgggagggggttgtagtttttttttttttttttcggtagcgtttcgcgtttttatcgttttttttgcgttagcggaggtgatcgtcgcggcgatgtcggaggagggttcgggttgttcggtgcggcgtaggttttatgggtgcgttttgcgggttgttttggttttattggtcgcgggtttggtgatttgtttcgtggtgtgtatttagcgtttcgtataggtttagtagtagttgtcgttcgagttatttggggtgagttgagatggaaaagttgggaagaaaatatagagaggcgcgtgatcgaaaagatagaatgagatgggtataaagaggttagagaggaagatttggtagggtagagatagagattagaatagggaggcgaggcggggattaggttgttcggtgtaggggttacgagataggtagttttgttaggaggtatagggagatttcgggatgggaaaggtaggtatatatggaaatggaagatgattcggttttggtgttttttcggtaggttgatttagaggttgttgggggttttataaggttgggcgtgggggttttttggggttttttaggacgggatggttttagttattcgtttcgggtgggggaggggtttttttggggatcgcgtcgggcgtttttgtagcgtagagagttcgttgcgcgcggtgttttcgcgtttagtgatatttaggaaaacgattcgggaaacgaagaagtttttttgaaggtttcgattttacgtttttcgttggtttagatttgttttttttttaagaagttttaagagtaaaaaaaaataaaatgaaataaaattattagtgcgcgtcgtgggatgagaggtggaaaggaggatggatagagaaaagagagtttttggtataggggatatatagaatttttttgtttacgttcgtgttttgttttttggtttttttttttagt

SEQ ID NO: 328 - DNA, 6004 bp, Artificial Sequence
  chemically treated genomic DNA (Homo sapiens)
attggaagaaaagattagaaaatagggtacggacgtaagtagagaggttttatgtgttttttgtgttaggagtttttttttttttgtttatttttttttttattttttattttacggcgcgtattggtgattttattttattttatttttttttatttttaagattttttaaagaggaagtaggtttgaattagcggggaacgtgaagtcgagatttttaaaagaattttttcgtttttcgaatcgtttttttggatgttattgggcgcgagagtatcgcgcgtagcggattttttacgttgtaaaggcgttcggcgcggtttttaaagggattttttttttattcggagcgagtggttggggttatttcgttttaggaggttttaggaagtttttacgtttagttttgtgaagtttttagtagtttttgagttagtttgtcgggggaatattagagtcgagttattttttatttttatgtgtgtttattttttttatttcgggatttttttgtattttttggtagggttgtttgtttcgtagtttttatatcgggtagtttggttttcgtttcgtttttttgttttggtttttgtttttgttttattagatttttttttttggtttttttgtatttattttattttgttttttcggttacgcgtttttttatgttttttttttaatttttttattttaatttattttaagtgattcgagcggtagttgttgttgagtttgtgcgaagcgttggatgtatattacgaggtagattattaagttcgcgattaatgggattaaagtagttcgtaggacgtatttatagggtttgcgtcgtatcgagtagttcgaattttttttcggtatcgtcgcggcgattattttcgttagcgtaggaggggcgatgggggcgcggagcgttgtcgagaaggaaggaaggaaattgtagttttttttcggggtttttgggcgtttatttgttttaatttgttaggggattagtttgtttttttttggggatgttcggtcggtcgaggggagggatttgagtaattggcgaggggaaattttttttaatcgttgttagtttgaagattttaaagtgggtggaggtagttgttaggatgtaggtagtggtttcgggtgagttttagagttgtttgtttttaattttttttcgttcgatttttaggtaggagatatttaatttttttatttttttttttattttatttttttggggtttatttatttatttaataaatttttattgtatatttattagggattagattgtgttgtgtattggggatatagtagatatttaagaattgggggtgttttttaaatattcgtgtattttttttttgtatttttttgatttgttttgtttttgagacggaggtttttttttgttatttaggttggagtgtagtggcgttattttaggttcgtcgtaatttcgattttttgggtttaagcgatttttttgtttgagtttcgcgagtagttgggagtaatatgcgcgcgttattatgtttggttaattttttgtatttttagtagagatggggttttattatgttggttaggttggatttgaatttttgattttgggtgatttattcgttttggttttttaaagtgttgggattaaaggtatgagatattgtattcggttagttattttttgtatttttggagattatttgtttttttgtttaaagttaaattaagttaatatttttattttttatttttattttattttattatttattttttttttttttgagatagagtttcgttttgtcgtttaggttggagtgtagtggcgttatttcggtttattgtaagtttcgtttttcgggtttacgttatttttttgttttagttttttaagtagttgggattataggcgttcgttattacgttcggttaattttttgtatttttagtagagatgggtttttattatgttagcgaggatggtttttattttttgatttcgtgatttgttcgttttggttttttaaagtgttgggattataggcgtgagtcgtcgcgttcggtttaaattaatatttttagagatagagtgttgttttgttgtttaggttggatgtagtggcgttatatagtttatagtagttttaaatttttgggttttagtgatttttttattttagttttttgtatagttgggtttattagtatacgttattatgttcggttaattttttttttggggggggtagaggatagggtgttattatgttattaggttggttttaaatatttgggtttaagcgattttgttgcgtaggttttttaaagtgtcgggatgataggtgtgagttatcgtatttagttttttgttgttgttttcgatggttgtagtgggttaacggtgtttttttagaatttatggttttttggaattgtagaatatgattttattttgaaattacggggttttttttgtagatataattaggtttaaatgaggttatattggattagagtgggtttttaggtggagagaaaagaggtttatagagaaggagtcgtgtgaaaatagaaatagaaattgaatgaggtagatgaaagttaagaaatattaagaaggagttaggcgtagtggtttacgtttgtaattttagtattttgggaggttgaggtaggcggattatttgatattaggagtttgagatttttttggttaatacggtgaaattttcgtttttattaaaaatataaaaaattagtcgggtatggtggcgggcgtttgtagttttagttatttaggaggttgaggtaggagaatggcgtgaattcgggaggtggagtttgtagtgagtcgagattacgttattgaattttagtttgggtgatagagtgagatttcgttttaaaaaaaaaaaaaaaagagttggagattagtttggttaatatggtggaattttatttttattaaaaatttaaaaaatagttgggtgtggtggtgggtatttttaattttagttatttaggaagttgaggtaggagaatcgtttaaattcgggaggtagaggttgtagtgagtcgagattatattattgtattttagtttgggtgatagagcgagattttgttttaaaaatatatatattttttaaaaagaggatttagttttttttttcggttggaattatggagggtgtagaagagaagaagaaggaagttttcgttgtgttagaaatttttaagaaaaagcgaaggaattttatagagttgaagattaagcgtttgagaaagaagtttgtttaaaagatgtttcgaaaggtaaggaggaagtttatttatgaaaaattgaagtattattataaggaatataggtagaggtatagaattgaaattcgaatggaaaagatgttaagaaaagttggtaatttttatgaatttgtagaatttagattggcgtttgttattaggattagaggtatcgatggtgtgagtttaaaggttcgaaatgtgttgtagtttttttgtttttgttaaatttttaatggaatttttgtgaaggttaattaatatgttgaggattgtagagttatatattgtatgcgggtatttaaatttgaagttagtaaataaattaatttataagcgtggttatggtaaaattaataagaaacgaattgttttgatagataacgttttgtacgattttttggaaaatatggtattatttgtatggaggatgtgatttatgaggtttatattgttggaaaacgttttaaagaagtatataattttttgtggttttttaaagtattttttttatgaggtagaatgaagaaatagattatttatttcgtggaaggtggagatgttggtaatagggaggattagattaataggtttgttagaagaatgaattatggtgtgtattataattatttttttaagttgtttaataaatattatttgtttttaaatggaaagaaaaatatgtttgtatatatatatagttagggttttaagggtttttggttatgaattattaagaagttagtgttattagtagtaaatttatagttaatagcgttagaattcgtgtttggggatagtttttttaatacgtggatttttttttttgtgaggtttattacggtttttttgtttttgggggatattagatagggttttagtattatttgggggttgtttgaaatagtaaaattattaataaaaagtaaaaaattgaaaggagataaaaatgggagattttagagtttgagtttatagtatttgttgggtgggtgaagagggtggttaaagaggtttagaattttgaggtatttagaaattaaaatattttttttgagatttttaagtattaaagggattttttttacggaagttttaggattttaggtttgggggaagcgggtagatagtatttttaagataattttttattttaatttatttaatatttatttagttgatttttttattagtttaagatataaatagtttagatttatattattaagaaataattaatattttttaaaagatgggggaaagagagatggggtggggtggtttatatatgtaattttagtattttgggaggtcgaggtgttttaggaaaattttaaaatgagataggagtagttaatttataaaaataaatataattgtttggtcgggcgtagtggtttatatttgtaattttagtattttgggaggtcgaggcgggcggattataaggttaggagtttaagtttagtttggttaatatggtgaaatttcgtttttattaaaaatataaaaattagttgggcgtggtggcggatatttgtagttttagttatttcgggaggttgagttaggagaatcgtttgaattcgggaggcggaggttgtcgtgagttgagatttggttattgtattttagtttgagagatagagagagagtttgttttaaaaaaataaataaataaaaaaaatataattgtttatgaaattgaatttcgtttattataagaaaattggaaattgaaagtttcgtgaaatataatttttttttttttttttttttttttttttttttttaagatcgtgtttttttttgtcgtttagtttggagtgtagtggcgttatttcggtttattgtaattttcgttttttaggtttaagtaatttttttgttttatttttttgagtagttgggattataggtgtttattattacgtttggttaatttttgtatttttagtagagatggggttttattatgttggttaggttggttttgaatttttgatttttagtgatttgtttatttgggttttttaaagtgttgggattataggtgtgagttattgtgtttagttatattttattttgttatttgtgatttggtaaaagattagagtgtttgatgatttattgtttagtaagtgcgtgggtgagaaggagttttaaatttggaggttaggagttgaaatggatttaattttttggaaggatagtttgttgaaatttattaatgtattaaaatgtattttttttttggtttagaaattttattttaaggatattttttcgtaagtatatttgtacgcgttatagacgcggacgtacgtatataaatttaacgtggtgtggtttgaatgatatcggaatataattaattagaagatttatgcgtaattgagggtttagttttgtgttaagtatttgttaggttttattttttttgatttttttaagaattttatgaagtgaattatgttgttatttttattttttttgtgagtaggtttagagaggaaggttattagtttaatttatttagtaaggagtttgggagaggaagtgtttagatttgaatgtggatttatatcgtgtatttgaagaatttggatttttttatttgagttatttagtgatttgatttggtttttgattattttttagtttgtgtagttttgttggaggttatttgtat

SEQ ID NO: 329 - DNA, 6767 bp, Artificial Sequence
  chemically treated genomic DNA (Homo sapiens)
tattttattttcgttttttaaagtggtgggatgataggtgtgagttttcgcgtttagttcgtttttttttttgttttttttttttttttttttttggaaacggagttttgttttgtcgttaggttggagtgtagtggggtgatttcggtttattgtaattttcgttttttgggttttagcgatttttttgttttagtttttcgagtggttgggattatagtgcgtattattacgtttatgtaattttttgtatttttagtagagacgggttttattatgttggttaggatggtttcgattttttgattttgtgatttatttgttttggttttttaaagtgttgggattataggtttgagttatcgtttcggttattttttttttttaaggaaaaaaaaaaaaaaaaaaaaaaaggttgtacgtcgtggtttatatttgtaattttagtattttcggaggttagggtaggaggatttatttagtttaggagttagagattagttagggtaatatggagagatttcgttttaattaatatataaaataaaatattttgtgtgtatttatttaggaaaaaatgtattaaaataaaataaaaaataagaatgaaaaaggatttggcgatttagtagtttatcgaggtagtttacgtttataattttagtattttgtgaggtcgagatgagcggattatttgagttaaggaggtggattgggtaatatggtgaaattttatttttttaaataatattaaattagttgagtatcgtggtgcgtatttatagttttagttattggggaagttgaggtgagaggattgtttgagtttggcggttgaggttgttgtaagttgttattatttattgtattttagtttcggtgatagtgtgaaattttgttttaaaaaataaaaattatttagaagggttaggtgaggtggtttatatttgtagttttagtattttggggagtttgaggtgggagagttatttaagtttaggagtttgaggttgtaatgaattacgatgatattattgtattttagtttgggtaatagagtgagatgttgtttattttttttttttttgagacggagttttgttttgttatttaggttggagtgtagtggtataattttggtttattgtgatttttattttttagatttaagtgattttttcgttttagttttttaagtagttggaattataagttagtgttattatgtttagttaatttttgtagttttttttttttagtagagatagggttttattatgttgtttaggttggttttgaatttttgaatttaagtgatttattcgttttagttttttaaagtgttgggattatagacgtgagttattatgttgggttgagaatttattttaaaataaaaaattgtttttttgatttttttttatggaaagtggagaggagttggtgttttttttgtaatttttttttttttttgagatagagttttattttgttatttaggttggagtgtagtggtacgatttcggtttattgtaattttcgtttttcgggtttaaggatttttttgttttaatttttcgagtaattgggattataggtatttgttattacgtttggttaattttagtatttttagtagagatggggtttattatgttagttaggttggttttgaatttttgattttaggtgatttatttgttttagttttttagagtgttgggattataggcgtgagttattgcgttcggtttttttttgtaaatttatttatggtaaatttttgtattttagtcgttatttattatattatttatagttgaggggatttattaacgagtaggttttaggggtggtggaaatttaaggaaatttattttttcgttttgttggtttgtaattttttttttttggtttacgaataattgtttaagtgtgattatagtgaagttttaggagatagtgaaaatagaggttggtttagtttgttattttgattcggaagggatggtgtaaagggagatatgagtggtgagaaagtgtttggtagttgcggttttggggaaagaatgttttaggtcgaggaatagtagatgcgaaggaaaaacgtgggtataagtggtatttttaaatttgcggggtcgtcggaattttttggaggatattttttttgagagttttcggaggtttaggcggggtgttagaatttgtatagttaattgatagtggttttgttgttgggtcgggttttatacgtggagtatttaaatcgtatataggaagtgtttagtatttggtaatgtttttttaatattagttagtaatattattgttttttttgtaattttttagggaggtttaatataggattagatatagtgttgatttggaagatatttgttttgttgaatgagaagtttattttatgattgggtacggtaacgtatgattggtattatagtgttgagaggttaagataggagtattgtttgagtttaggagtttgagattagttgagtaatatagtaagattttgtttttataaaaagtaaaaaattaaaaaaaaaaattggtaggtatggtggtatgtgtttgtagttttagttatttaggagtttaagataggaggatggtttgaatttaggattggaggttgtagtgggttatgatcgtgttattgtattttagtttgggcgatagagtaagattttgtatttgaaagtaaaataaaagtttttttattttatgggttgttgatttttgttagtagagggatgaaaggcggcgtggtttatttttttattttttatggggttgggagatgggaagggagttggttattgtggatttatattggtttgggtagattaggattttaatattagttaagggtttttttcgggttacgtttttttttatttgggagtgtttttttttttggggttaagtttttatcgttttttggtttatttttttagtttcggattggtcgtttttagtaggttagagtagatgggaaatgtgttttttttaattcgtttaatattgttttttttttgtaaggggaatttttttatttggatttttcgagtttttgtttgtagggtttcgaggggtttttgtcgggaattatttagtgggtgggtgggggtaggttagggaaggtttaggggtttcggggaaggtggttaggagggttgagtatgatatttagggttttattggggggttggggattagggggtagatgttttaggagtgagggtggttgaggtttggttgaagtttgattttttttaggaagtgttggatgtgggggaattcgggggagttttagtgatggggggttagggggtgttgagaggaggggaaggagataaagagagattaaagaaggaaaaggagagagatagggagagatagagagttagagagagatagagggaattagagatagagagaaatagggagagagatagaaagagtgagagttagagatatatagagatagggagagatatagagatgtataaagagagggagttagagatggagagagatagagataacggagttagagatagggagagttagagatagagagaaagaaatatatagattgatatagataaaagagttagagatagggagaggtagagataaagagagatatagagatagagataatagagttagagatagagagatagagatagagataatagagttagagatagggagagagtgttagagatagagatagatatagagataatagagttagagatagggagagttagagatagagagaaagagatataagatagatatagataaaagagttagagatagggagaggtagagataaagagagatatagagatagagatagtagagttagagatagggagagagtgttagagatagagagatagatatagagataatagagttagagatagggagagttagagatagagagaaagagatagatagatatagataaaagagttagagatagggagagagatatagagatagagatatagagatagagataatagagttagagatagagttagagatagagatagagagagttagatatagagatagagagagagagttatagttagagatagcgatagagataatagaagtagagagagggagaaagataatagagttagagatagttagagatagagatagagagatagagataatagagttagagatagatatagagatagagataacggagttagagatagggagagagagttagagatagagagagatatatagatagagataatagagttagatatggggagagagagttagaggtagagagagagaagatagatagagagatagagttagtgataatagagttagagatagggagagagagttagagagagatataatgagagatagagataatagttagagatagagttagatagagagatatagagatagagataatagagttagagatagggagagagaattagagatagagatagagagagatagagatagagataatataggtatagaggtacgtatagatataaattggtagagagagagaaagatttttttttatttattgtagaggtaattaatagagatagagaaagacgttaacggggagatatagagagtaaaggagattgagttagtaagagatttatagagatatcgggaaagagcggtagagagggagaattagggcgatggagagatagtagggagaaaggaatttggagtcgagtttggaaggtcggaaacggaaaggagagcgaaaagcggagagagattcgagtggagaaaatttcgtagagttacggggacgaggggaaaggttttgggttgggaaggggcgtggtcgcgggcggaggggcgtggtcgcgggcggaggggcgtggtttttttttgtagttaagtagttataaaaagcggcgcgttgtgttttttcgtagtttttcgttatggaatacgtttttgacgttttattggatttcgaagtttcgtggtttttcgcgtttcgcgttcgcgtttgtcgcgtattgttttgggttttggtcgcggggttgttgttgttgttgttgttcgttgtcgtttgcgtcgtttttttcgtttgtttttgggtcgtgttcggggttcgcgtttcgttcggtttcgcggttagttcgagatttcgcgagggtttcgagttttcgttcgacgatttcgtcggttttttggatttgcggtaggtgagacgtgtttcgattttcggtagttggtttcgcgggagatttttatcgtttttttgggatttttttttttttttcgtatttttagggatatttgttttatattttcggtcggggagaggagatttatcggggtttttattttttatttagtatcgaggtcgggggggtatattttttatttcgtatttttacgatattttatttgtattttaggtcgggggcggggaggagatcgtttaatagttttttttggattttttaagggttttttttttttagttcggggggtattttttttattttgcgttcgttacgagattttatttgtatttcgggagggggagaggagatttttataagttttttttggatttttaagggtttttttttttcgttttgtatgggagggtattttttttatttcgtatttcgagattttattagtattttaggttaggaggaggagatttttatagtttttaattttttagggatacgttttttgtatttcgggtcggagaaaggttggtttttttttatgtggtagtgggtgggggtatttttttttatttcgtatttttaaggtattttatttgtattttggacgggggatttttcgcggttttttaattttcgacggttttttttttttatgtaggatttaggatattgagggtatttttttttatttcgtatttttataagttttgtatttttggggggaattttttttttattttcgattcgaggggggtattttttttttatttgggatcgttaaggagatttttagtttttttgttaatttttaaagagttttatttttaatatttgaggtattttttttttttttaagatttttaggggaatatttttaagggggttggaaagaagagggatcgttttttttttttgaatttttggagatttgtttttggggtaggttgagttattagtttcgtgtgtgtgtgtgtgtgtgtgtgtgtgtgtgtgtgtgtgttcgttcgtgtttgtgtgggtgtttgtgttcgtgtgtgtgtgttcgtgtgggggtgcgtatgtgtgtgtgttcgtgggtgtgtttgtgttcgtgtgggtgtgtgttcgtgtgggtgtttgtttgttcgttcgtgtgggtgtttgtgtgtgtttatgtgggtgtgtttggatatttgtgttcgtgtgtgtttgtgtgtgttcgtgtgggtgtttgtgtgtgtttgtgtttgcgttcgtgtgtgtgttcgtgtttgttcgtgtgtttgtgtgttaatgtgggtgttcgtgtgtgtgttcgtttgtgtttgtgttcgtgtgtttgtgtgtttgtgtgtgtgtgtgtgtagtttttgttttttagttgggagggaagggaagcgtaggttttaggtcggtatagattttggggattttgatagttgaagtgagtggggatagaatttttattttttaggggaatttttatttattttttttttttttatttttaatagg

SEQ ID NO: 330 - DNA, 6767 bp, Artificial Sequence
  chemically treated genomic DNA (Homo sapiens)
tttgttaaaagtagaaaggaggaaagtggatgggggtttttttagaaaatggaggttttgtttttatttattttagttgttagggtttttagagtttgtgtcgatttgaagtttacgtttttttttttttttaattaaagaatagagattgtatatatatatatataaatatataaatatacgaatataaatataaacgaatatatatacgaatatttatattaatatatagatatacgaataaatacgaatatatatacgaacgtaaatataaatatatataaatatttatacgaatatatatagatatatacgaatataaatatttaaatatatttatatgaatatatataaatatttatacgaacgaataaataaatatttatacgaatatatatttatacgaatataaatatatttacgaatatatatatatacgtatttttatacgaatatatatatacgaatataaatatttatataaatacgaacgaatatatatatatatatatatatatatatatatatatatacgaagttggtggtttaatttgttttaaggatagatttttaagaatttaggagggaaaagcgattttttttttttttagtttttttgggggtatttttttgggggttttgaaagggagaggggtattttagatgttggggataaggttttttgggagttagtaaaggaattgggggtttttttggcggttttagataaagaggaagtgtttttttcggatcggggatggaaaaaaggttttttttagagatgtagagtttgtgggggtgcggggtaaaaagaggtgtttttaatgttttaagttttatatagagaaaggaagtcgtcgagggttggagaatcgcggagggtttttcgtttagggtgtagatggggtgttttgggaatgcggaatgaagaggggtgtttttatttattgttatatggagggaagttagttttttttcgattcggggtgtagaagacgtatttttgaggggttgaggattgtgggggttttttttttttggtttggggtgttgatggggtttcgggatgcggaatgaaaggggtgtttttttatgtaagacggagaaggagagtttttggaggtttaaaaagaatttgtgggggttttttttttttttttcgggatatagatagggtttcgtagcgggcgtaggatgaaaggggtgtttttcggattagaagaaggagatttttggggggtttaaaaagaattgttgggcggtttttttttcgttttcggtttggggtatagatgaggtgtcgtaggggtgcgggatgaaaggtgtgttttttcggtttcggtgttagatggagaatgggagtttcggtgggtttttttttttcggtcgggagtgtagaataggtgtttttgggggtgcgggagggagaagggagttttagaggggcggtaggggtttttcgcgagattagttatcgagggtcggggtacgttttatttgtcgtaggtttaagaggtcggcgggatcgtcgggcgaaagttcgggattttcgcggagtttcgggttggtcgcggagtcgggcgaggcgcgagtttcggatacggtttaggggtaggcgaggaagacggcgtaggcggtagcgagtagtagtagtagtagtagtttcgcgattagggtttaaggtagtacgcggtaggcgcgagcgcggggcgcgggaggttacggggtttcggggtttagtgaagcgttagaggcgtattttatgacgagagattgcgggaagatatagcgcgtcgttttttatagttgtttggttataaaaggaggttacgttttttcgttcgcggttacgttttttcgttcgcggttacgtttttttttagtttagagttttttttttcgttttcgtgattttgcggaattttttttattcggattttttttcgtttttcgttttttttttcgttttcggttttttaagttcggttttaggtttttttttttttgttgtttttttatcgttttggttttttttttttgtcgttttttttcggtatttttgtgggttttttgttgatttagttttttttgttttttgtgttttttcgttaacgtttttttttgtttttgttgattgtttttgtagtgggtggaaggagatttttttttttttttgttaatttatgtttatgcgtgtttttgtgtttgtattatttttgtttttgtttttttttatttttgtttttaattttttttttttgtttttggttttgttatttttgtttttgtatttttttgtttaattttgtttttggttgttatttttgttttttattgtatttttttttgattttttttttttgtttttggttttgttattattggttttgtttttttatttgttttttttttttttgtttttgattttttttttttatgtttggttttgttatttttgtttatatatttttttttgtttttgattttttttttttatttttggtttcgttatttttgtttttgtatttgtttttggttttgttatttttgtttttttatttttgtttttgattgtttttggttttgttatttttttttttttttttgtttttgttatttttgtcgttgtttttggttgtgattttttttttttgtttttgtgtttggttttttttgtttttgtttttgattttgtttttggttttgttatttttgtttttatgtttttgtttttgtgtttttttttttgtttttggtttttttatttatgtttgtttgtttttttttttttgtttttgattttttttatttttggttttgttatttttgtgtttgtttttttgtttttgatattttttttttgtttttggttttgttatttttgtttttgtatttttttttgtttttgtttttttttgtttttggtttttttatttatgtttgttttgtgtttttttttttttgtttttgattttttttatttttggttttgttatttttgtgtttgtttttgtttttgatattttttttttgtttttggttttgttatttttgtttttgtttttttgtttttggttttgttatttttgtttttgtatttttttttgtttttgtttttttttgtttttggtttttttatttgtgttagtttgtgtgtttttttttttttgtttttgattttttttatttttggtttcgttatttttgtttttttttatttttgattttttttttttatgtatttttgtgtttttttttgtttttgtatgtttttggtttttattttttttgtttttttttttgtttttttttgtttttgattttttttgtttttttttgattttttgtttttttttgtttttttttttttttttttttagtttttttttgttttttttttttttttttagtattttttagttttttattattaggattttttcgggtttttttatatttagtattttttaagaagggttaggttttagttaagttttaattatttttatttttggagtatttgttttttgatttttaattttttagtggaattttgagtgttatgtttagtttttttggttatttttttcgggatttttgggttttttttggtttgtttttatttatttattggatggttttcggtaggagtttttcgggattttataagtagaagttcggagagtttaggtggagaaattttttttgtaagaaagggatagtgttgagcgagttggaggaaatatattttttatttgttttggtttgttggaggcggttaattcggggttgggaggatgggttaagaagcggtgaaaatttggttttaaaagaggaagtatttttagatggagagggacgtgattcggggaaagtttttggttggtgttgaagttttggtttgtttagattagtgtgggtttataatggttaattttttttttattttttagttttatgggagatgggagggtagattacgtcgttttttatttttttgttagtagaagttaatagtttataaaataaagggatttttgttttgtttttagatataaggttttgttttgtcgtttaagttggagtgtagtggtacgattatagtttattgtagtttttaattttgggtttaagttatttttttgttttagatttttgaatagttggaattataggtatatattattatgtttattaatttttttttttaattttttattttttatagagatagggttttgttatgttgtttagttggttttaaatttttggatttaagtaatgtttttgttttggttttttagtattgtgatgttagttatgcgttatcgtgtttagttataaggtagattttttatttaatagaataagtattttttaggttagtattgtgtttgattttgtattgggtttttttgggggattgtagagaaaatagtaatgttattggttagtgttgaaggagtattattaaatgttaaatattttttatatacggtttgggtattttacgtgtgaggttcgatttagtaatagggttattattaattagttatgtaaattttagtatttcgtttaaattttcggaaatttttagagggggtgttttttagaagatttcgacggtttcgtaagtttgagaatgttatttgtgtttacgtttttttttcgtatttgttatttttcggtttggaatattttttttttagaatcgtaattgttagatatttttttattatttatgtttttttttatattatttttttcgggttaagatgataaattgaattagtttttgtttttattgttttttgaaattttattgtagttatatttgagtaattgttcgtaaattaaaaaaaaaaaattataagttagtagaacggaaaggtgagtttttttagatttttattatttttaagatttattcgttggtgaatttttttaattatgaataatgtggtggatggcggttaaaatatagaagtttgttatagataaatttgtagaagaaggtcgggcgtagtggtttacgtttgtaattttagtattttgggaggttgaggtaggtggattatttgaggttaggagtttaagattagtttgattaatatggtgaattttatttttattaaaaatattaaaattagttaggcgtgatggtagatgtttataattttagttattcgggaggttgaggtaagagaatttttgaattcgggaggcggaggttgtagtgagtcgagatcgtgttattgtattttagtttgggtgataaagtgagattttattttaaaaaaaaaaaaaaattgtagaagggatattaatttttttttattttttataagagagaattagagaagtaattttttgttttaagataggtttttagtttagtatggtggtttacgtttgtaattttagtattttgggaggttgaggcgggtggattatttaagtttaggagtttaaaattagtttgggtaatatggtgaagttttgtttttattaaaaaaaaaaaattataaaaattagttgggtatggtggtattagtttgtagttttagttatttgggaggttgaggcgggaggattatttgaatttgggaggtggaggttatagtgagttaagattgtattattgtattttagtttgggtgatagagtaagatttcgttttaaaaaaaaaaaaaatagatagtattttattttgttgtttaggttggagtgtagtggtgttatcgtggtttattgtaattttaaatttttgggtttaagtgatttttttattttagattttttaaagtgttgggattataggtatgagttattttatttggtttttttaagtaatttttattttttgaggtaggattttatattgttatcgaggttggagtgtagtgggtaatgatagtttatagtaattttaatcgttaggtttaagtaatttttttattttagtttttttagtagttaggattataggtgcgtattacgatgtttagttaatttagtattatttgaagagatggggttttattatattgtttagtttatttttttggtttaagtgattcgtttatttcgattttataaagtgttgggattataggcgtgagttatttcggtgggttgttgagtcgttaggtttttttttatttttattttttattttattttaatgtatttttttttaagtgaatgtatataggatattttattttatatgttaattgagacggagtttttttatgttgttttggttggtttttaatttttgggttgaatgggtttttttgttttggttttcgaaagtattgggattataggtgtgagttacggcgtgtagtttttttttttttttttttttttttttttaagagaaaggaatggtcggggcggtggtttaaatttgtaattttagtattttgggaggttaaggtaggtggattataaggttaagagatcgagattattttggttaatatggtgaaattcgtttttattaaaaatataaaaaattatatgggcgtggtggtgcgtattgtagttttagttattcgggaggttgaagtaggagaatcgttggaatttaggaggcggagattgtagtaagtcgaaattattttattgtattttagtttggcgatagagtaagatttcgtttttaaaaaaaaaaaaaaaaaaaaagtaaaaaggaaaacgggttgggcgcgggggtttatatttgttattttattattttgggaggcggaggtagagtg

SEQ ID NO: 331 - DNA, 8865 bp, Artificial Sequence
  chemically treated genomic DNA (Homo sapiens)
gaggttatttaggtgattaaggaaattataaattaggattttagattagattaattttggagtatttttagtttttaggtaaatttagaattaaagatgtttgtagtatgagatttgaagttttatttatgtttttgtttttttattttagatagtaatgtagatttcggttttaggggttaatgagttgttgtattaatttagggtaattgttgtattggtagaagtaatagagttattattttttaagttcgttagtggaaatggagagttagatcgaaggtttttagattggttttttagtttgtatttttatttatttatttattgagatggagtttagttttgtcgtttaggttggattgtaatgttatgattttagtttattgtaatttttgttttttgggtttaagtaatttttttgtttttcgagtagttgggattataggtgtgtattattattttcggttaatttttgtatttttagtagaagagggttttaatatgttgtttaggttggttttaaatttttaattttaagtgatttatttatttcggttttttaaagtgttgggattataggtataagttattatgttcggttttgtgttttttagagttttagaatattagttatgaattataagtttttttttattttttataggtatttaatagtaaaagaattagagagttattgaaatttagttttttattgttttaattgtttttgaatttgtattagaatgttcggaagatttagattttttgtaggggttagaaagttattattggagagattatttggtgtaaaaattatttttgaaagtttttattagatttgattattagaaggagttgggttattgattttttattagagggtttttttttttttgtgtgtgggtatgttaatgtggagggggtagtgtttaggaataagtgtattttttttgttattgtaggatatatttttgtttgtttttttagtattttggtttagggtttgaggataggtgataggaatggtggtttagtttgtggggtagttaagttataaggtattagtatatttttttgagtttattttagttgtttggttttttttgcgtttttattaatagaaggttggagggaggggtagtgtttgtagttgttttgggttgattgttgtttgtggggatagttgaaagaggagttagtaggggtggggttgtggttgttttgagttgtgtgggtttttttaggaaattttttattatttttttgtgatatagatagattatgataaaaatgtttaaatttaaaaatatgtagtatgttaaagtaagttttgatttagggtatatggttttaagttttttgaggatattatagataaattttttgatggaaagggtttagtaggtgtttatatattaatgtttatttttaagaagtgtttgagaataattatgttttttttgtaagtgtttttttaagtatcgttgtattttaatttgaagaatggttaagtattttggtttaatttttttttattttttatattattttagaaagtagtttatttttaagtttttgtagttaaaaggataaggttagagtatttagtgtgaattattaatattagtagataatttttaaatttttgtttagttattaattttattttttgttatttttgtatttggttttttattaaagtttttaggagtattaagtggtaaaattgtcgatttttattattagggataaatggaggaagttatgatatgagtaattttaaatagaaatatttttaaaagagtgagtagtttgttttataggaagttagttatattaggaagatgttagttttatatatattaatataaaattgttgtatatatttttaggttaatggagttttagttatattagttttattttttttaattttttagtagtatttataagtattagtgattaggaagtgattaaagatttggtagttaggagtagtggaaaaggaggagagataattaaggaaaggtgattattatattgagtaattgagaattatttgtataagatatgaatttaattatttagttgtagtggttgttgatttggatggattttatattttattaagttgatggattggtgtgttaatattttttagtaatatgattagatgtttagttttttttttttttttttttttttttgagatggagttttatttttgttgtttaggttggagtgtaatggtacgattttggtttattgtaatttttgtttttcgggtttaagcgatttttttgttttagttttttgagtagttgggattataggtatgtattattacgtttagttagttttgtattttttagtagaggcggggttttttcgttggttaggttggttttcgaattttcgattttaggtgattttttcgttttagttttttaaagtgttgggattataggtgtgagtattgtgttcggttttagtttttttataatagtatgtagagtttttcgtagttattttatagatatttgttatggaatggtagtgtttaatattttatttttttaaatttttaatttatttattttttttatttagtagaatgggaaattgtattatgtgagttttgatttgggttaaattttagagtataatttgattttgtagtagtaaatttaggagtttttttttttattttggatttgatggtgtttattattatgtaagtattaagattttgttttgttttggagatttgttggttaagtcgaagtaggaattagaaattttgaaatttgtgtagtttaaataaaaatgttaaataagggttaaggaagatgaatgggggattttggggtgtttgtaaagggaagtagggagattcggggtatgtagaaaggggaatataaatgaagagagtgaatttttgcgtgagagatgattgattattaagaggagttttttatttttttagtgtatgttaatagttatttataaataattttttttttaaggagaagttatgttttttagtttttttttagtattaaattatgtttgtaaagtatatttggtatgtggggatagttatggaattttatgattttttttttttataaagtttttttttttttttttatttaaatttttcgtaaggttattttttttagggagattggatttttgtgattagtttttatttaaaggattgaaataaaatattagttttaatttttgatttttgaggagaagtgagttaggtgtcgggtaatgaagagttttaattgttggtttaagttaaaggatgataggttaatgttttaggagagaatttttgtgggagaaaaataaagaaggttttggataaggttgtaggttgtagggtggtgagattgtaggaatatttttaagtttatagaataggtaaggagagggagggtatatggatagttgttatgattagttttagtgatgttttaaagaaaggtggttagtaatggtgttttttttttagtttatagtttttttaggttttgtttgagttagagggagaaggatagagtttagattaaattcggttattaatgagtttataggtaggaatttttttgtaaggttttttagttgtggtggaagtgatatttaagggtttatttttagatattgagggttattttttttatatttatagttaagtaggattttaggttcgttttttgtgtttttttttttgtttttagttttttatagtttgtttttattcgtaggtggtttcgtagtattgtattatagttataggtatagtattggggaaggaggtgaggatttaggagttggtagttacgaaggttatttagtggttggttattggtatttagagatttgagatttgtacggggcgtttagaaagtttttcgtgttggtttagggattataaagaagatatagtaagatagggacgtggattttttagggatggtgaggatttttaggatatttggtttaaaatattgcggtggagggtgtgattagaggggttttaggggttgtatagagtttcgttgttttagggagattgcggaacgttatggagtgtgtagtaaggatgggtaagcgagatgttagtagagcgagaggatacggatatatggtatggaagatgtaggtgataagggcgtagattttaggaagtgtatattagggatggagatgtagacgtatgtattggtagttgaatgtagaaggcggagaagtatagggtagagatgtttgaagtatagttagaatagtggtttattttgtttaaggtgggttcgtacggtttttagttgattttttgtatcgatatcgtcgattataattagtaaagagtgtttttgtaggttttagcgtgtagtcgttatcgcggtttcggtttcgtatagtagtttcgcggggttttgagttagcggtgcgtcgggatttcggagttttagtttcggagttgtttttatggtaacgtcgtgaggtcgcgtaggttcggtttcggtttttatggaaatattcgcggagtgttagttcggtagttttcgttgtaggtagagtgcgcgcggtttttaaaggtcggcggtaggtgtagtttattggttgttgtttgttagggggcgtggtataggcgtcgtaggggcgggtcggagttggaagttcgtgttttgcggtttcgttaggttagagggtggtggtcgtttttttttttttattacgttttttttagtattagcgggagtttttatttagatttgagcgggggtggggtttttgggggatttattggtggggcgaggcggttgtttcggcgtcggaagaagtttttagttaagatgtatttttgataagtattgtttggtaatttcgtagtttcgttcgaattgaggggagttattttgtttttttttgttttcgagtttgtatcgttgtttttatttgtgtttgtgtgtttgtattatcgttgtttggcgtgtttttttttttttttgttttttgttattgtttgtttgggttttgttcgaggtttttattttcggtttttttgtttttgtttcgggttttgggagtgttttggaaggttgcgtagtattggaggggatagaatgatttttcggttttgagtttttggtgagttgttattttgaagatagtagttggttggttagtttttatttttgttgagtgtaggattcgagtgtaatgagtttagattgtagtaagggggatttgagtaaaatttaggaaagatttttttatttttaagtgatgtgatagtgagatgggttttttttaggagattgttgtattattttttttttttttatttttcgggagtttttaaaatagaaggagtagtgtttgtattaaagaaggggttgatagttttaagattaaaattagaggttgggaaaggattgaggaggttttgtattgttttatgattgattggaatatttttgtaaaaaagtgttgttagtttagttttttttattttttagtgtgtttttatttattttatattttagagtagttttttatttaggatatcgaattattttgtatatgtatgtatgggagcgtttattttttattttagggttttagtagtatttgtttttttgtttttttgttttgttttgttttttgggtttttgggtttttttttgtttcgtttgtttttgttttggagatagtataggaaagaaaggaatatagtattagatttagtaaggttgtttgtgagttacgttttgattgggtagtgtttgtatgttaaatattttatagcggtcgggtatagtggtttacgtttgtaattttagtagtttgggaggttaaagtgggtggtttatttgaggttaggagtttaagattagtttggttaatatggagaaattttgtttttattaaaaatataaaaattagttgggcgtggtgttgggcgtttataattttagttattcgggaggttgaggtaggagaattatttgaattcgggaggcgaaggttgtagtaagttaggattgtattattgtattttagtttgagtgatagagtgagattttgttttaaaataaaataaaaaattttatagtaattttggtttttattatggagtatgtgttataggaaaatagttagtttattttgtaattaatttggatatggttttgaaaattttttttgtatagaaaggggaaaataagagtattggtagaatgttagatgttggggatgttttattttttagttttatgattatgatatatgagacggtgtttcgttgtatttttgtttttttttttttcgtttgtggatttgaatttggaaaagagtttggagagatttataggtttttttttttgtaattagtaagagtattatgtggaggtagagagttagaataggttgtggggagaaagggatagtttttatagtaattgtagagatgaggtcgttaattagtatagggttttagtataaaggttagtagtagttaattaaagattttgtttttattaagttttataaagagattagataatagatttgaatggtatagggaaggattatatattgattagatggtaggggtagaaatttagttttgtgattttaggttttgttaaaattgggttttattaattatagtgtaaatgtagattatgatagtattaaaattgtttatgtgtgttggatgagtattttgtaggtttattgttaaagtttgataatgttatagaaagattggttataggtgtttgttaattatttttttttttttttggttaatagtattttagttattttattgggtgatgattttagtatgattatattgttaaaatatacgtatatatatttagagatagagttttgttgtgttagtaaggttggtatatagtggtatgattgtagtttattgtaattttaaattttgggtttaagtgatttttgtattttagtttttggagtagttaggattatttgagatagggttttatagagatagggtttttgtgtgttgtataggttggttttaaatttttggttttaagtagtttttttgttttggttttttaaaggattgggattataagcgtgagttattgtttttagtttagaaattttttttttgagacggagttttgtttttttgtttaggttggagtgtagtggcgtgattttggtttattgtaatttttgtttttcgggtttaagcgatttttttgttttagttttttgagtagttgggattataggcgtgcgttattatgtttagttaatttttgtatttttagtagagacggggttttattatgttgattaggttggttttaaattttcgattttaggtgatttattcgttttaggtttttaaagtgtgttgggattatatatacgagttacgatatttagtttttagtagtaaaattttttttttttttttttttttttttttttggagatagaattttattttgttgtttaggttggagtgtagtggtatgattttagtttattgtaattttcgtttttcgggtttaagagattttgttgttttagtttttcgagtagttgggattataggtatttgttattatgttcggttaatttttatatttttagtagagatggggttttattattttggttaggttggtttcgaatttttgattttaggtgatttatttattttagttttttaaagtgttgggattataggtatgagttattatattcggttagtagtaatatttttaaatgaaaattaaatttttgaatttaaatttatttttgtttatataagaagttaaaaaagtatgtaataatataaaattaaaaattaaaaattttttaaaatttatattatattaaaaataaattaaaaataaaagaatttaataaaataagtagaaaatattttaggttgataaataaattttaaatagtttttagagtatttataaatagaaggtatttaagttttttttaaagtgttttaggatagatattttaaaaataaagggtggttaggtacggtggtttatttatgtaattttaaattttagaggttaagtagaggatcgatgagtttaggagtttaatattagtcggtagtgattatgtttttggtcgggtgggtggggggttaatgtcggggtgtttagggtttttttttggaggtttttggtaagtttttttaaaatttttaggtttaggcgtgacgggttttttttttgggaagttttgttgttttttgtagggtaatgggagtgtagtgggttttgaaggtttggatttcgggtttgaagggatggttgatcggagggggcggggtggtaagtatggcggcggtttcggggaaggggttggagggttttaaggagggggtggggaaacgttagttaagaaggtttggtggtcgtgaggaaatttgaaaggttgtggggtttttggcgaatagattttagaaaaatatttttttggggggaggtagaggcgttagaaggacgtggcgggggggatggaaaaaggggcggggagagaagaggttaggaaggaggggaaggggtgtttacgagaaggtgatgaaaaatagggagggatagttaggtttattgtaaataacgacgaatggtgatttggtaggtatgataggaaagtgtttgtagtaattataaatataatattttaattggaggagttttgaagtggtttcgttttttagtttttgtattttcgttttattatttaggtttagattgcgtgagtaaggttagtaggttatacggaattgattttttgttattttattttagg

SEQ ID NO: 332 - DNA, 8865 bp, Artificial Sequence
  chemically treated genomic DNA (Homo sapiens)
tttggaatggaataataaaagattagtttcgtgtaatttattagttttgtttacgtagtttaaatttaaataatggggcggaagtataagagttgggaaacgggattattttaggatttttttaattagaatattatatttataattgttgtaagtatttttttattatgtttattaagttattattcgtcgttatttataataagtttgattatttttttttattttttattattttttcgtagatattttttttttttttttttaatttttttttttttcgtttttttttttatttttttcgttacgtttttttggcgtttttatttttttttaaaagaatgtttttttaaaatttgttcgttagaggttttatagttttttaggtttttttacgattattaagtttttttagttaacgtttttttattttttttttagggttttttaatttttttttcgggatcgtcgttatgtttgttatttcgtttttttcggttagttatttttttagattcgaaatttaggtttttaaagtttattgtatttttattattttataaaaaataataaagttttttaggggggaggttcgttacgtttaaatttaaaggttttagaaaagtttattaagaatttttaaaagaaagttttaagtatttcgatattaattttttatttattcggttaggaatatggttattatcggttggtgttgaatttttgggtttatcgattttttgtttggtttttaaagtttgggattatatgagtgagttatcgtgtttggttattttttgtttttgaagtgtttgttttaaagtattttgggaagaatttgggtattttttatttgtgggtgttttaaaaattatttaaaatttgtttattaatttaaaatattttttatttattttattaagtttttttatttttaatttgtttttaatatgatataaattttaaaaagtttttggtttttaattttgtattattatatatttttttaattttttatatgggtagagatgaatttggatttagaagtttaatttttatttaagaatgttattgttggtcgggtgtggtggtttatgtttgtaattttagtattttgggaggttgaggtgggtggattatttgaggttaggagttcgagattagtttggttaagatggtgaaattttatttttattaaaaatataaaaattagtcggatatggtggtaggtatttgtaattttagttattcgggaggttaaggtagtagaattttttgaattcgagaggcggaggttgtagtgagttgagattatgttattgtattttagtttgagtaatagagtgagattttgtttttaaaaaaaaaaaaaaaaaaaaaaaaaaggaattttattgttaagggttaggtgtcgtagttcgtatgtgtaattttagtatattttgggaatttgaggcgggtgaattatttgaggtcggaagtttgagattagtttggttaatatggtgaaatttcgtttttattaaaaatataaaaattagttgggtatggtggcgtacgtttgtagttttagttatttaggaggttaaggtagaagaatcgtttgaattcgggaggtagaggttgtagtgaattaagattacgttattgtattttaatttgggtaagagagtaagatttcgttttaaaaaaaaaatttttgggttgggaatagtggtttacgtttgtaattttagttttttgggaggttaaggtaagaggattgtttgaggttaggagtttgggattaatttgtgtaatatataaagattttgtttttgtgagattttgttttaaataattttagttattttagaggttgaggtgtaaggattatttgagtttagagtttgaggttatagtgagttataattatgttattatatattagttttgttgatatagtaagattttgtttttaaatatatatacgtatattttgataatataattatattggaattattatttagtggaatggttggaatattgttaattaaggaaagaggaggataattaatagatatttatagttaatttttttgtgatattgttagattttggtagtgagtttgtaaaatatttatttagtatatataagtaattttagtattattataatttatatttgtattgtaattaataaaatttaattttagtagggtttgagattataaggttgagtttttgtttttattatttaattagtgtgtgatttttttttatattatttagatttattgtttagtttttttgtgagatttgatgaaagtagaatttttggttaattattgttgatttttatattgagattttgtgttagttagcggttttatttttgtagttgttatggaaattgtttttttttttttataatttattttggttttttgtttttatatggtatttttattgattgtagaagaggaggtttgtaaatttttttaagtttttttttagatttagatttataaacggggggggggggggtagaggtatagcggaatatcgttttatgtgttatagttatgagattagagggtgaggtatttttagtatttgatattttgttagtatttttatttttttttttttgtgtaaaaaggatttttagggttatgtttaaattggttgtagagtggattggttgtttttttgtaatatatgttttatggtagggattaggattgttgtaaagttttttgttttgttttgaaatagagttttattttgttatttaggttggagtgtagtggtgtaattttggtttattgtaattttcgtttttcgggtttaagtggtttttttgttttagtttttcgagtagttgggattataggcgtttaatattacgtttagttaatttttgtatttttaatagaggtagggtttttttatgttggttaggttggttttgaatttttgattttaagtgaattatttattttggttttttaaattgttgggattataggcgtgggttattgtgttcggtcgttgtgaagtatttaatatgtagatattgtttaattagaacgtggtttataggtagttttgttgaatttgatattgtgttttttttttttttgtattatttttaaagtaaaggtaaacgggataaaaaaaaatttaaaaatttaaaaaataaaataaaataaaaaaataaaaaaataagtgttgttggagttttagggtgaaagataggcgtttttatatatatatgtatagaatgattcggtattttgggtaaaagattattttggagtgtggagtaggtggagatatattgaggaatgggggaggttagattaatagtatttttttataaagatgttttagttagttataaaatagtgtaaggtttttttagtttttttttaatttttggttttgattttagaattgttaattttttttttggtgtaaatattgttttttttgttttaagaattttcggggggtgggagggggggaagtaatataatagttttttgagggagatttattttattgttatattatttgaagatgggaaggttttttttaggttttatttaaattttttttgttgtagtttgagtttattgtattcgagttttgtatttagtagagatggaaattagttagttaattgttatttttagaataataatttattagggatttaaggtcggaaggttattttgttttttttaatattgcgtagttttttagagtatttttagggttcggggtaaggatagggaaatcgaggatggagatttcgggtaggatttaggtaggtagtgataaaaaataaaaaaaaaaaaaaatacgttaaataacgataatatagatatatagatatagatggaggtaacgatataaattcggaggtagagagggataagatggttttttttagttcgggcgaggttgcggaattgttagatagtatttattagggatatattttaattagaagtttttttcggcgtcgaggtaatcgtttcgttttattaatgggttttttagagattttattttcgtttaagtttaagtggaagttttcgttggtattggggagggcgtggtgggaggaagggggcggttattattttttagtttggcgagatcgtagagtacgagtttttagtttcggttcgtttttgcggcgtttgtgttacgttttttgataggtagtagttaatgaattgtatttgtcgtcggtttttaagagtcgcgcgtattttgtttgtagcggaagttgtcggattaatatttcgcgggtgtttttatggagatcgaggtcgagtttgcgcggttttacggcgttgttatggagataatttcggggttggggtttcgaagtttcggcgtatcgttggtttagaatttcgcggagttgttgtgcgaggtcggagtcgcggtggcggttgtacgttgggatttgtagaagtattttttgttaattgtgatcggcgatatcggtatagagagttagttgagggtcgtgcgggtttattttgaataaggtgagttattgttttggttgtgttttaggtatttttattttgtgttttttcgttttttgtatttaattattaatgtatacgtttgtatttttatttttagtgtgtattttttgagatttgcgtttttgttatttgtattttttatgttatgtgttcgtattttttcgttttattaatatttcgtttgtttatttttattgtatattttatggcgtttcgtagtttttttgaggtagcggagttttatgtagtttttggggtttttttggttatattttttatcgtagtgttttggattaggtgttttgaaagtttttattatttttggagaatttacgtttttattttgttgtattttttttatggtttttgaattagtacggggagttttttgaacgtttcgtataaattttaaatttttgaatgttagtagttaattattaagtgattttcgtggttattagtttttaagtttttatttttttttttagtgttgtgtttgtggttgtggtgtagtgttgcggagttatttgcgggtggaagtaagttgtggagggttggggataaggaagggaatatagaaggcgaatttagaattttatttagttgtaaatgtggggaaggtagtttttagtatttgggaataggtttttaggtgttatttttattataattggggaattttataagaaaatttttatttatagatttattaatgatcgagtttagtttaaattttgtttttttttttttggtttaggtaaagtttagaaaagttgtaaattgggagaaagatattattattagttatttttttttgagatattattgaggttgattatggtaattatttatatattttttttttttttatttgttttgtgaatttgaaagtgtttttgtagttttattattttataatttgtaattttatttagaattttttttgttttttttttatagggatttttttttggaatattgatttgttattttttgatttgaattaatagttgagattttttattattcggtatttagtttatttttttttagaggttaaaggttaggattaatgttttattttagttttttgggtaagagttggttatagaggtttagtttttttgggagaagtggttttgcgggaggtttgagtggaggagaagggaggaattttatagaggaggaaaattatggaattttatagttgtttttatatattaaatatattttgtagatatggtttgatattggagggagattggagaatataatttttttttgagaagagggttgtttgtggatagttgttgatatgtattaaagaaatgagggattttttttagtgattaattattttttacgtaaaaatttattttttttatttgtgtttttttttttgtatatttcgggtttttttgtttttttttatagatattttagaattttttatttattttttttgatttttgtttagtatttttatttaggttgtataggttttagggtttttggtttttgtttcggtttagttaatagatttttagggtagagtagaattttggtatttatatgatgatgggtattattaaatttagagtggaaggaggggtttttgaatttattgttataagattaagttgtattttgagatttggtttagattaaagtttatataatgtagttttttattttgttgggtgggaggaatgggtgggttagagatttgagaaaataagatgttaggtattattattttatgatagatgtttgtgaggtgattacggaaagttttatatgttattataaaagaattaaggtcgggtatagtgtttatatttgtaattttaatattttgggaggttgaagcgggaggattatttgaggtcgggagttcgagggttagtttgattaacggagaaatttcgtttttattaaaaaatataaaattagttgggcgtggtggtgtatgtttgtaattttagttatttaggaggttgaggtaggagaatcgtttgaattcgggaggtagaggttgtagtgagttaagatcgtgttattgtattttagtttgggtaataaaagtgaaattttattttaggaaaaaaaaaaaaagaaaaaggagttaggtatttagttatgttattggaaaatgttgatatattaatttattagtttagtggaatataaaatttatttaggttaatagttattgtaattgaatgattgaatttatgttttatatagataatttttaattatttagtatagtagttatttttttttaattattttttttttttttttattgtttttaattgttaaatttttgattattttttgattattgatatttatagatgttgttaggaagttggagaaaataaggttaatatgattaaagttttattagtttaggaatatatatagtaattttatattaatatatgtgaggttgatatttttttgatgtgattggttttttgtaaagtaggttatttatttttttgagaatgtttttgtttagaattatttatgttatggttttttttatttatttttaatgatgaaaatcggtagttttattatttagtatttttaggagttttggtgaaaggttagatatagggatgatagaggatgaaattaatgattgaatagaagtttggggattatttgttgatgttaataatttatattgaatgttttaattttgtttttttggttatagagatttgagagtaggttgttttttggaataatgtaagaaatgaaaagaagttaaattaaagtatttagttattttttagattaagatgtagcgatatttgggaagatatttatagagagaatatagttatttttaggtattttttagaaatgagtattgatatataaatatttattaggttttttttattaaagagtttgtttgtggtgtttttaaggagtttagggttatgtattttagattagagtttattttggtatattgtatatttttaggtttggatatttttattatggtttgtttatgttataggagaatagtagagaattttttggaaaaatttatatagtttaagatagttatagttttatttttgttggttttttttttagttgtttttataaataatagttagtttagagtagttgtagatattgtttttttttttagttttttgttagtgaggacgtaaaggggattaggtagttgggatgagtttaaggggatatgttagtgttttatggtttgattattttataggttgggttattatttttattatttatttttaagttttgggttaaaatgttgagaaagtagataaaaatgtattttatagtgataaggagagtgtatttatttttaggtattgttttttttatattgatatatttatatatagaaaagaagggattttttgataaagagttagtggtttagttttttttagtggttaagtttggtaaaagtttttaaaggtgatttttgtattaggtagtttttttagtggtgattttttaatttttataaaaaatttggatttttcgagtattttaatataaatttagaaataattaggatagtggaaaattgagttttaataattttttgatttttttattattggatatttataggaaatagaagggggtttataatttataattaatattttaagattttaaaaaatatagggtcgggtatggtggtttatgtttgtaattttagtattttgggaggtcgaggtgggtggattatttgaggttaggagtttgagattagtttggataatatgttgaaatttttttttattaaaaatataaaaattagtcgagggtggtggtgtatatttgtaattttagttattcgggaggtaggagaattgtttgaatttaggagatagaggttgtagtgagttgagattatgatattgtagtttagtttgggcgatagagttagattttattttaataaataaataaataaaaatataggttgagggattagtttggaggttttcggtttgattttttatttttattgacggatttaggaagtgatagttttattatttttattaatataatagttattttgaattaatatagtagtttattaatttttggaatcggggtttgtattgttgtttgaaatgggaaagtaaggatatgaataggattttaaattttatattgtaggtatttttagttttgggtttatttgggagttaagagtattttagagttgatttggtttgagattttgatttatgatttttttgattatttagatgatttt

SEQ ID NO: 333 - DNA, 6264 bp, Artificial Sequence
  chemically treated genomic DNA (Homo sapiens)
gggtaatatagtgagatattatttttataaaatatttaaaaattagttaggtatggtgatgtatgtttgtaattatagttatttgggaggttgaggtgggaggatggtttgattttagtagtttgaggttatagtgagttataattatgttattgtattttaattttagtaatagtgtaagattttgttttttaaaaaaaaaaaaagatatttaggtatttaggtaggaatttgaaaggcgaataaaagtttattatatagggtaaggtggagggaggggaaggtttttaaagtagagggaaaagtataaatggatgtaaagaggtttgatatataagtttttgttttattttttttttagattattgttaatttgaggggaatgtaggagataattgaataaattcgtaggttaaggaaattgtaaaaatggagtatttttggttttaagagggaggataattggtggaatattaaatgattttatatgatttgggtattggttatattttttattttttttattatttttttttttgtttattttgttttgggtatattgatttttttgttatgtttttgagatgttaagtataaggttgttttaagttttttgtttttgttgtttttattgtttagagtttgattttttttttttttttattttttagaggttttttttggttagtttatttaaaataggtgttatttttttagatttatttagttgttatttttttcgtagtatttattattattttatttatgtgtttgttatttagttttttttaattagaatataagttttatgaaggtaagttttttttttgttatttttaaagtttagaatagggtttggtaaaatatagttatacgagtattagtaaaagagataaataaaaggagtggggagagggtagagaagaatttagatgagttggaggtgaagggaataggtattgtaggagtgtaattttaatagtttttgttttattggttgagtaagatgggaatttattttttgagaggagagagggatttaaagtttgggatatttgtggaagatgagaacgagtaatatagggagaaagttgggaatttaaatatttgaatttaaattaaatagataattaattgtattgtgttaaggggtggggtgagagttaaaagagaagatagttttttttcgtttagaatgtggtattttgatttattttttttggagttgagtagagaattatagggtggggagaattaaatagaggtttttgaaagaataagtaggtgagggtgggagcggagagaaattgaaatttggtagaaaataatttttttgagagttatgtttgagtggtatagaatttgagagaatgaaattaaagtatagataagggttttttggttttacgtttttatgattaaaaaaaaaaaagtttttaatatatttgttatttggtagttgggaatttttaattggttagaagtgagttttaggatatattgttaattgttgtttttttttttttttttttttttgggtagggtatttgtgtaaatagatagtaacgaaatagaattggattgttttattttaatttttttttttttgtttttatttttattgtaattattttattaataagttagggttgttagtatttatattaagtataatttattattgtgtataattagttttagggtggtaatgagatacggttttttggtgagaattggaaggttagtgattaatatttagaattttttttttggatgattgtggattataatatttttagttgttttggggatttttttgtttgtaaaaaaataaaaaaaaattttagtggaatatgaagtaggttttttggtgtaaaatagtttttttatgaattgtagtttattaaaaagaattgttgttttttagaattattatttaatttaggaatttcgttattgagtgtatatttagaggaatataaattattttattataaagatatatgtatgtgaatgtttattgtagtattatttataatagtaaagatattgagttaatttaaatatttattaataatagattggataaagaaaatgtgttatatatatattatggaatattatgtagttataaaaaatattaagattatgttttttgtgggaatatgaatggaagtggaggttattatttttagtaagttaacgtaggaatagaaaatttaatattgtatgtttttatttagaagagggagttaaatgatgagaatttatgaatgtaaagaagggaataatagatagtagggtttatttgagggtggagggtgagcggaaggagtggagtagaaaagataattattgggtattgggttttatatttgggtgatgaaataatttgtataataaatttttgtgatacgagtttgtttatgtaataaatttgtatatgtagttttaaatttaaaagttaaaagaaaaaagaattattgttttttataaacgtgttaaattttagtattagggttttttttattattaagattttgaaagttaatatgtttttaattgatttttttttttttgtaatttggtttatttatggttttttttattttggtttgtggtaatttttattttttgggataaaaatttgggttttttttttttatattttatatttaatttgttaggaaattttgtgggtttggatttgaaaatatatttaaaatttgattattatttgttatagacgttgttatcgtttttgagtaagttatttttattttttgtttggtttattataagagttttttattgttttttgttgatttttagttttttatagtagtttttaaaatatgttagttgatattatttttttgtttaaaatttttttataattttttattttatttagagtaaaggtaaagtttttagaatagtttataaggttttttttgtttggttttttatattattttattttattttttattattttttttttatcgtttgttttagttattttagtttttttgatggttttagaatttgttaggtaggtttttatattaggttttagcgttggttgttttttttgtttggaaatttttttttatatttgtggagtttatatttttattttttttaagattgtgtttatatatcgtttttttagtgaggtttattttgattattatatttaaagttgtatttgtatattttattttttttttttattttattttattttttttataataattatatttgttttttgaattttttgtttattgatgtatttttaggatttagaagaatatttattaagtggtaggtatttaataaatatttattgaatgagggatgaatttattttgtttaatttagtataatttttttaagaaaataagattataaattagattttttgagaacgttaaatttttttttttttttttagatggagttttattttcgttgtttaggttgaagtgtagtggggtgatttttgtttattgtaattttcgttttttaggtttaagagatttttttgttttagtttttcgagtagttggtattataggtatgcgttattatgttcggttaatttttatatttttagtagagataagggttttattacgtggttaggttggtttcgaatttttgattttaggtgatttgttcgtttcggttttttaaagtgttgggattataggcgtgagttattgcgttcgggcgagaacgttaaattttagttgaattaatcgtaatttagtatttttagatatagtatttgggatggtgtaatagggagttcgatggagattttggtaagggatatggtgggttaagaaagaattgtttgtttttgatattagataaatttaggggatttattttattttaggttttagaattatgtataaaggtagagaaaagtgattttgagtgaatttgtattgataatttattagaataaagttttttggagttagggttttcgtagtatgtgtttttttggaaggtggaataaaagtttgaattcgttttgttattttttggaaggtagttttgttatttttttaggttttggtttttttttttggaaaaggatggtatttatcggtttttcgtatcggaggttgtttgtagggtgtttttagtattttttagggaagttttttagaatgttgtttgatatatttttataaaatttatttttattgtggtaaaatatatataatataaaagttatttttttatttagtttgcggtgtacgtttgttaattttatagtaagtaatatatgagttttaaattagaatttggataacggtaaatgagatgaaaggcgaataattcgaaagtcggattattgaggagttttgggaacgcgtcgcgagttgaagttatacggggaattttattttgtcgggatagggtcggttttggtcgtttttagggagtcgggtagttttcgcggcgtggttcgggttttttttgaagttcgttcgttttttttcgtttggtttagcggcgcggtcgtcggaggattttgtttacgcgtttaacgtcgggcgttttgttttgaaggtaaagggttttttgtttcgtacgattcggagtcgtcgaggaggtgacggcggtagttttggggcggttcggtgttatttattattattttgtttttttgaggcgcggttttttaattgtttcggtttcgttaggaggcgcgcgttttagtcgtttcgtcgcgcggtttcgatcgtattttagttcggggcgaagaaagaaaaggcggtcggttttcgtcgtttttcgtttatttagtcgggttcgcgtaggcgcgcgtagttttcgttttcgcggtcgttttttttttaggtcgtcgggcgcgtcgcgggcggggtcggcgcggggggcgggagtcggtacgggttcggttggggttcgattcgggattagttggtttcggagcggaggagggagtttcgatcgttacgagcgtcgaagagataaagtcgcgttagggggttcggtcggggcgggggagttcggggtttgttggtgttttagttcgcgcggagggtttttcggattcgcgcgtcgtcgttgtcgtcgtcgtcgtttcgtaataggttcgggcggtttcgtttttcgtttttttttttcgtattcgcgatttttcggggtattttagttcggtcggggtcgtagtttggttattcgtttttatgcggttcgggtttaagatgatgtcggtaagtgggcgagcggttagggcgtcgggttcggaagtgtgcggggtcgcgtgtcgggggttggttcgcgttttcgggcgcgtcggggaaggagtttgggggtcgtagttcgcgcggaggggtcggggtttttcgagtttcgagcgggttttaggaaggggaggttttattttttgggttttgcgtttatagtcgtcgtgggggcgcggcgagattttaatttcgaggcgggtttttttagttgtttcggagttaggcgagtcgttcgcgagtttagtagttatttaaatttttcgttttttattgggttttgatttttttgtagtttttgaaggttaagaatacgggaatcggggattttgttttttgttgtgtttttttattttttattggagtgaaatatacgttattggaacgggtatttttgttttgtttttaattgaatttcgattttgatatttatagtagtagttaagttatttttatttttttgtggaaaggggttttggtaaatgtaatttcggaagttttagattgtaggaaagcgtacgtgtttggtttttttcgttttttatagtttttagtaagattttcggagaggattagtgttttttttaggagtttcgtaggtttttgatacggttattaggttatagatgaatagtaggtttgagatattttagaaatgtttttgttatttagcgatcgcggaatggaggtttgcggtgtgttgcggtggtttttgtagattttagtagcgagttttttcgtggaagttgtatttgtattttttttattgaagtggggatattttgtaggtattttatgtttgtggttttatttgtttagataaagaaataaaaagtttttatttttatgaagtttgtggaatggagtgatgataaagtttgtagttatatatatagagtataatatgttgttttttggttttttgtttgtgttatggagggcgttttaaatttttattgggtcgatttaa

SEQ ID NO: 334 - DNA, 6264 bp, Artificial Sequence
  chemically treated genomic DNA (Homo sapiens)
ttaagtcgatttagtgagagtttgggacgttttttatgatataagtagggggttagggaatagtatattatattttgtatgtatgattgtaaattttgttattattttattttatagattttataaaagtaaaagttttttgtttttttgtttgaataaatggagttataagtataggatgtttgtaagatgtttttattttagtgggagaggtgtaaatataatttttacgaagaaattcgttattgaagtttgtagaagttatcgtaatatatcgtaaatttttatttcgcgatcgttgaatgatagagatatttttgaaatgttttaaatttgttgtttatttgtggtttggtggtcgtgttaaaagtttgcggagtttttaaagaaggtattaatttttttcggaggttttgttaaaagttgtgggaaacgaagggagttaggtacgtacgtttttttgtaatttaaaattttcgagattgtatttattaaaatttttttttataaagaggtaagggtgatttagttgttattgtggatattaagatcgaaatttaattaaaaataaagtaaaggtattcgttttagtaacgtatgttttattttagtaaaaagtaaaaagatatagtaaagaataaggttttcggttttcgtatttttgatttttaagaattgtaaaaaagttaagatttagtgaaagacgaaaagtttgagtggttgttgggttcgcgggcggttcgtttgatttcggagtagttggaggaattcgtttcgaggttagggtttcgtcgcgtttttacgacggttgtgggcgtagagtttagaggatggagttttttttttttgaaattcgttcgaagttcggaaagtttcggttttttcgcgcgggttgcggtttttaggtttttttttcgacgcgttcgagggcgcggattagttttcggtacgcgatttcgtatattttcgggttcgacgttttggtcgttcgtttatttatcggtattattttggattcgaatcgtatggaagcgggtggttagattgcggtttcggtcgagttgaggtgtttcggagggtcgcggatgcgggggaggggagcggagagcgaggtcgttcggatttgttgcgaggcggcggcggcggtagcggcggcgcgcgggttcgaagggtttttcgcgcgggttggggtattaataagtttcgggttttttcgtttcggtcgggttttttgacgcggttttgttttttcgacgttcgtgacggtcggggttttttttttcgtttcgaaattaattaatttcgggtcgggttttagtcgagttcgtgtcggttttcgtttttcgcgtcgatttcgttcgcggcgcgttcggcggtttgggggaggggcggtcgcgggaacgggagttgcgcgcgtttgcgcgggttcggttgggtagacggggagcggcgggagtcggtcgtttttttttttttcgtttcggattgaagtgcggtcggggtcgcgcggcggagcggttggagcgcgcgttttttagcggagtcggggtaattggaaggtcgcgttttaggaaaataggatggtagtgaatggtatcgagtcgttttagggttgtcgtcgttattttttcggcggtttcgagtcgtgcgaggtaggggattttttgtttttagaatagggcgttcgacgttgggcgcgtggatagagtttttcggcggtcgcgtcgttgggttaggcggagagaggcggacggattttaggggaggttcgggttacgtcgcggaaattattcgattttttggaggcggttaggatcgattttgtttcgataaaatggagtttttcgtgtggttttagttcgcggcgcgtttttagagttttttagtgattcggttttcggattgttcgttttttattttatttgtcgttgtttaaattttaatttaaaatttatgtgttatttgttgtaaggttaataaacgtatatcgtaaattggataaagggataatttttatgttgtgtatgttttattataataaaaataaattttgtaaaaatgtgttaggtagtattttgaggagtttttttggggggtgttgggaatattttgtaaatagttttcgatacggggagtcggtggatattatttttttttagggagggaggttaaggtttagggaaatggtagggttgttttttaaagagtagtagagcgggtttaggtttttattttattttttagagagatatatattgcgggaattttaattttaggaagttttgttttagtaagttgttagtgtaagtttatttagaattatttttttttgtttttatatatgattttagaatttgaagtggggtaaattttttgggtttatttagtattaagaatagataatttttttttagtttattatattttttattagaatttttatcgaattttttattgtattattttagatattgtatttggaaatattaaattacggttaatttaattagaatttaacgttttcgttcgggcgtagtggtttacgtttgtaattttagtattttgggaggtcgaggcgggtagattatttgaggttaggagttcgagattagtttggttacgtggtgaaatttttgtttttattaaaaatataaaaattagtcgggtatggtggcgtatgtttgtaatgttagttattcgggaggttgaggtaggagaattttttgaatttgggaagcggaggttgtaatgagtagagattattttattgtattttagtttgggtaacgagagtgaaattttatttgaaaaaaaaaaaaagaatttaacgtttttaaaaaatttggtttatagttttgtttttttaagagggttatattgagttaagtaaaataaatttattttttatttagtaaatatttattaaatatttgttatttggtagatatttttttaagttttagggatatattaatgaataaaaagtttaaaagataagtgtagttattgtgaaaaaaatagaataaggtaagagaaggggataaggtgtataggtgtaattttaaatatggtggttaaggtaagttttattgaaaaggcggtgtgtgagtatagttttgaaggaaatgagggtgtgaattttataaatatgaaggaagatttttaggtagagggaatagttaacgttaaggtttgatatgggagtttgtttggtaaattttgggattattaaggaggttaagatagttggagtagacgatgaggggagagtagtaggagatgagatggagtgatatgaagggttagataaggagggttttgtaggttattttaaggattttatttttgttttgagtgaaatggggagttatggaaaggttttgaatagaagagtgatgttagttgatatattttaagagttgttgtggaaaattgaaagttaatagagaatagtaagaaatttttgtgataagttaagtaaaagatggaagtggtttgtttaaaggcgataatagcgtttatggtaaatagtggttaggttttggatatatttttaagtttaaatttatagaattttttgatagattagatgtggaatatgagagaaagaagtttaaatttttgttttaaaagatggaagttgttataaattaaaatggagaagattatgagtggattaagttatagaaaagaggagattaattgggaatatgttaatttttagaattttaataataaaagaaattttaatattgaaatttagtacgtttgtgggaagtaataattttttttttttttaatttttaggtttggggttatatatgtaggtttgttatataggtaaattcgtgttataggggtttgttgtatagattattttattatttaggtatgaagtttagtatttaatagttattttttttgttttatttttttcgtttattttttatttttaagtaggttttattgtttgttgtttttttttttgtatttatgagtttttattatttagtttttttttttaagtgagaatatgtagtattgggttttttgtttttacgttagtttgttaaggataatagtttttatttttatttatgtttttataaaagatatgattttgatattttttatggttgtatagtattttatggtgtatatgtagtatattttttttatttagtttgttattgatggatatttaggttgatttaatgtttttgttattgtgaatagtgttataatgaatatttatatgtatgtgtttttatggtagaatgatttatatttttttgggtatgtatttaataacgggatttttgggttgaatggtagttttgggaagtaataattttttttggtaaattgtagtttataaagggattattttatattaaaaaatttattttatattttattggggtttttttttatttttttgtagataaagaagtttttaaaatagttgaagatattatgatttatagttatttaggaaaagaattttggatattggttattaattttttagtttttattaaaaaatcgtgttttattattattttaaaattggttgtatataatagtaaattatatttagtatgagtgttggtagttttagtttattaataaaataattataatagaaatggaagtaaggagagaagaattggaataagatagtttagttttatttcgttattgtttgtttatataaatgttttgtttaagggaagggaggagaaaagggatagtaattggtaatatgttttgaaatttatttttagttaattgagaatttttagttgttaaatagtaggtatgttgaggatttttttttttttaattatagaagcgtgaaattaaagaatttttgtttgtgttttggttttatttttttagattttgtattatttaaatatggtttttagaagggttgttttttattaagttttaattttttttcgtttttatttttatttgtttatttttttaagagtttttgtttggttttttttattttataattttttatttaattttaagaaagataagttaaaatgttatattttgagcggggaggagttatttttttttttggtttttattttattttttggtatagtataattaattatttatttggtttgaatttaaatgtttaagtttttaattttttttttgtgttattcgtttttattttttatagatgttttaaattttgagtttttttttttttttagaagatgaatttttattttatttagttaatgaaatagagattattgagattgtatttttgtaatatttattttttttatttttaatttatttgggtttttttttattttttttttattttttttgtttattttttttattaatattcgtgtggttgtattttgttaggttttgttttagattttagaggtaatagagaagagatttgtttttatggagtttatattttagttgggaggagttagataataaatatatgaataaggtaataataaatgttacgaaaaaaatagtaattaggtaaatttaagagaatagtatttgttttagataggttggttagagaaagtttttgaggaatgaggggagggagggaattagattttgggtagtgggaatagtaaggataaagagtttgaggtagttttgtgtttggtattttaaagatatggtaaaaagattagtgtgtttagggtagagtgaataaggaggggagtggtaagagaggtggaagatgtagttagtgtttaggttatgtagaattatttaatattttattaattatttttttttttgaaattagagatattttatttttatagtttttttaatttacggatttatttagttattttttatattttttttaagttagtagtaatttgaaagaaaaatggggtagaagtttgtgtattaagtttttttgtatttatttatatttttttttttgttttaaaaatttttttttttttttattttattttatatggtaaatttttattcgttttttaagtttttatttaaatgtttaaatgtttttttttttttttaagaaataaggttttatattgttattgaggttggagtgtagtggtatgattatagtttattgtaattttaaattgttgagattaagttatttttttattttagttttttaagtagttgtgattataagtatgtattattatgtttggttaatttttaaatgttttgtagagatggtgttttattgtgttgttt

SEQ ID NO: 335 - DNA, 6048 bp, Artificial Sequence
  chemically treated genomic DNA (Homo sapiens)
ttttggtttttggttttgtttagggggtttgttttttttattatttatttagattatatttaaatggtattgggaagtatgttttttttagggggttgtatgggttttagaatttgttatttgtttgtaggaggttgaatgttagaggttgttttaattttaaatattttggtaggattttgtaaattatatgtttggtttgtttatttatttgttttaatatttagaagtatgaaaagaaaaatatttggtagatatttaatgtgtttatttttagttagtgttttatgttagtatttgttttttttatatatagttattagtttgttttatttttttgtttttatgtatttgttttttttatttttgtggtagttatgtggaggttatttgaggtagattggtttaaaggttatttttattttaaattgatttttgttatagggttgtgtttttttgtttgagttttattgggtttttgttgtttagattttttgtgttaatttattgtttaggaattttgaagtagtgtgattttttaatattataaggttttgattttttatttattttttagatatagggttttatttttgtttaggttggttttgaattttgggttttaagtaatttttttgttttggatttttaaagtgttgggattataggtatgagttattatgattggtttaaatttttagattttattaattttttttttttttggttaggaatagaaagtttttagcgtgtattaaagtgttttttcgttttttttatttttatgtcgttttttaaattagttattttttgtttgagtttatgttttttaaagtatatttttaaggtatttaaggattttaaggatttaaatatatattataatttttttttttagttatttttttttagaattttaagtttattaggtagttagtttttaagttataggagatattttgttaaatagtttgttattgttttttgtttttatttttatttttgttattagattgttaagttagtgttttatagtttgatttttattatagtagtattagtgttattttaaggtaatgatttttattgggataatgttagttgtattaataaattgttgtttaaatgtataatggtataaatatatttatttttttattggattataattttgagtagtattaggttagggaatggtagggattggggtgggtatggggataattttattttttttagttatttagggattggtaggttaatagaatttattttaaatatatggttgaaattgaaattgaataatttgttttaaaattatatagtttgttagtggaggttttaagatttttattatttggttttggttttaatgtttatgtttttttgtttatatttatattaagaattgaaaagatatttggattagttgtttagttaaagtttgtattttgtatttagtatgtaagttaattagaaaattggtgattgcgtaatatatttagttgttgggggtatattatttttttatttggaattgtagatgtttttttgtaatttttttttggggtttttatttattggggttatataaaataaaagattatttttttattatttagagaatataattttcgtgttttttttgattattttgtttttgagtgaaaatttttttattattttattatattttaaaattttgaatattgattgtttagatttagttagtttttattttgtttagggtttttttaaagggaatgttagaatttaagtatattttttatgtgagatttgatgaatatagaatagaatagaattattatttttgtagatttaagatttttgtattaattgtatttttgtttttttagggtgatataattttggagattggagaagtaattttattaatgaaagaattttttgattaatattattaaagattatgtaaaaagttaaaaggtttatgagtttaagtttgtttttatattattatatttattgaattttttggaaaagtaattttaataaagtttaattttagaaattgttatatttgtttttaagtattgtataatttgagattgagtaatttaataataagtaaaaagtggatatgttaaataaatatgagagattatttattttttttggttatttttgatttggaaaacggtatggaaaagtatttagttatatgtttgtttgttttttttttatatagtatttatattaatttggtattagggtatgtaatagtgaaatattataataaataaatgtaagaatagtaattttatgtatttttgttttaaggaaattttttcggttaggcgtagtggtttatgtttgtaattttagtattttgggaggtcgaggcgggtagattacgaagttaggagatcgagattattatggttaatatagtgaaatttcgtttttattaaaaatataaaaaaattagtcgggcgtggtggcgggtttttgtagttttagttattgcggaggttgaggtacgagattggtgtgaatttagaaggcggagtttgtagtaagtcgagatagtgttattgagtttgggcgatagagtaagatttcgttttaaaaaaaaaaaaagtttttcgaattatttttgaagaatttagaaatttgattgaaaagtttattttaattatgatttgatatttaagattgttagatttaggttgttgttaattttgttatgagaatgtaaaatattaaaatttttaagtgaaaaatttgtatattagtgtttgttataaaggataatgtaaaaataaatttgggaattttgtattatgaattttatttttatatttatataagtatgagggaaagaattgtatttttagataattaaatttagaagagttataaatttttattcgttttaaagattttgtttgggtattttttttttagttgtcgttttgtagatattatcgaagtatagatgatgtagttttaggagattaaaacgatggtaagtagtaattaaattaaaaatcgtaaaggaggtgtgaaatttatttgatattttttttcgttttcgttaggttatcgttgttattgttaaggtgggaattaaagtaataaagtcgaataaatggggttttagtggcgggtatatttagtagtttttacgtaagaagcggaagatcgtattttttaggaagaggcggagtcgaggtgagggagtgaaatgtttaatttaggaatggattttggagtttttgggtgttgaagaaatagggttttttcgtttgcgggtttagtgagtcgatacggtgggggttcgcgattttcgggatttattattgaataaatttagtttagcgtgcgacgatttattggttttatggtaaggaggcggtagtagttcgcgggagttggcgggagttgcgggttttatagtaattttttaggcggtggttgttaggcgttagtagttattttttagtcgggtacgagcgttcgtttattcgtttcgtgtagcgttgtcgttggtttttttcgttcggagttggggggcggtattacgtgatcgggggttttgttcgttttttagagaggggaataaacgagaaaatgttaaaaattgtttttttttttttttttttgttaattaaggagataggcgtatttttattggttttttttttagttgtaatgtaatattaatgtaggataaggtgttgtcgtgtttatttaaaagttaatttgaaaaataatttacgttttaaatattacgtttggttttaaagttggaagaattaacgttttttttttcgtttttttttttacgttttttcgtatttgatattatacgatttagatggacgttcgtttgtttatttttgacgtaaaaatattatttatttttttatatgtgataaatcgttgtgggaatttttgtaaatcgagttattttttagaaacgtatagcgtaatgtatatttttaagaagaaatacgtgggacgcgttattcgttataatgtattagttaagtaataagtgtttgttgagcgtgtttgatgtttttgaattgtcgcgcgtgagatattaagtttcgagtacggtagtttggtgggcgagcgtattaggtttagttttagaatgtttggggcgtttatatttgaggtttgaggagtagaatttggtaacgggtcgtttaggttttagacgttttttatatttcgtagttattttaaaagagttttagtttagattttagggagtgggaaggggaagagcggagaaaaacgtggtttgtttagggaggagtttaggttttgttttgttaggttgttttgtttttttttagtttggaggggatttttttttgaagattttataggatattggttgggttttggtttgggatttcgttggatttttggtgttgttttcgggaggcgtataataggaggtgagagattttaagtttatttaataatttttttatttagatattaaagataattttttaagttttcgtagagtttggtaaggttgaaacgatatcgaattagttttcgtgtttttcgggtaagttaggggcgaatatttagttagtgtttttagtggttgagtattagtaataagatggggagggtcgcgttgttttttttcggggtttggagcggcgggggaggggtcgtatttgggtcggtgcgttgagtttcgttttcgaggtcggcgtttatttgttgcgtatgcgtgaggaaggcgggtgttgtgttttgatgcgcgggagttggggggtgggtttcgttttttgttttgttttcgagttgttattggtgatgagttttttgcgttataggggtcgtagtcgtcgttggggttttcgttgtttcgcgaggagggtgaagcgttttcgtttgttttcgtttcggagggtaggcggagaagtcgtcgggtacgttttcgcggattttgtcgatatcgatttagttttttgggttgtcgggagttcgcggcgagcgttttagttaggtttgcgtcggtatttttcgaggtgagtgagattcggaataatgggacgcgggggtcggaagggtcgtgggagttggcgttttcgtttggagcggcgtttcgggattcgagggttgcggttatggtttgcggggttgttcgggtttcggcgggttagggttagggttttcgagcggtttttgcgcgtatttgtggattggtgcgggtaggcgagggttgcgttttttataagcgttttcgaggggcgcgagtttggtcgtgtattggaaagagtttggttttagggaaaagtaaaaaagtaatgagattgaatcgtggcgttattatttataggatatgtgattttgtttaggttttttaaatttttgagtttgtttgtaaaatgggaataataatatttaagttcgttgtggttatgtaatgtttatggtgtttattttagtttagtggtagttttgaattaaagtaaacgattattatcgtggttttgggagttgggatttgtttgtgttgtgttaaatattttgagtagaaattgttcgtgatttgtttatttatttatttattgtagttttttttatgggttgttgattgtaggttggaagggggtagtgttgagatgagttatatagtgatttaagaggaaaacggagtagattttttgataggtaatttttaagattatttaagataaattaagaaatagttgtttaagatttaagttaatagtggtgagagttttttgggttttgtttatgaaatgtaaagaaagttatataattagttaaaattaattatatttgtttggaatgagtggttttagaggcgaacggtttttagttaattttttttgttggaattggattaaatttgataggatttggataaatttgataggatttattgagattttgtgatttttgtatttttttttggagttgattaaatgtagtttagagaggtatagtgatttttttaaggtggtaagaggtaggaattagtttatttttaatatttgggtg

SEQ ID NO: 336 - DNA, 6048 bp, Artificial Sequence
  chemically treated genomic DNA (Homo sapiens)
tatttaagtattaaaaataaattggtttttattttttgttattttaaagaaattattgtatttttttgaattgtatttaattaattttaaaagaagatataaaagttataggattttagtagattttattaaatttatttagattttattaaatttaatttaattttagtaaaaagaattggttgggaatcgttcgtttttaaaattatttattttagataagtatgattgattttagttgattgtatagttttttttgtattttatggataaaatttagaaagtttttattattattaatttaaattttgggtagttgttttttaatttattttaaataattttgaaaattatttattaaaaggtttatttcgttttttttttaaattattatgtggtttattttagtattgtttttttttagtttataattagtaatttatgaggaaagttgtagtaaatggatggatgaataagttacgggtaatttttgtttagaatgtttaatataatatagataagttttaatttttaaagttacggtgatagtcgtttattttggtttagaattgttattagattaagataagtattatgagtattatataattataacgaatttaaatattgttatttttattttatagataggtttagggatttaagggatttaggtaaggttatatattttgtaagtggtgacgttacgatttagttttattgtttttttgtttttttttgagattaagttttttttagtatacggttaggttcgcgtttttcgggagcgtttgtgggaagcgtaattttcgtttgttcgtattaatttataggtgcgcgtaggagtcgttcgggggttttggttttggttcgtcgaggttcggatagtttcgtaggttatgatcgtaattttcgggtttcgaggcgtcgttttaggcgggagcgttaatttttacggttttttcgattttcgcgttttattgtttcgaattttatttatttcggaggatgtcggcgtaggtttggttggggcgttcgtcgcgagttttcggtagtttagaaagttaggtcggtgtcggtaggattcgcgaaggcgtattcggcgattttttcgtttatttttcgaagcgggagtaggcgggggcgttttatttttttcgcgagatagcggagattttagcggcggttgcgatttttgtgacgtaaagggtttattattaatggtagttcggaagtagggtagagagcgagatttattttttagttttcgcgtattaaaatataatattcgttttttttacgtatgcgtagtagatggacgtcggtttcgggggcggggtttagcgtatcggtttaaatgcggtttttttttcgtcgttttagatttcggaggagggtagcgcgattttttttattttgttattggtatttagttattggggatattgattgaatgttcgtttttaatttattcggaaaatacgagaattagttcgatgtcgttttaattttattaaattttgcggaaatttaggaaattatttttagtgtttagataggggaattgttagatggatttgaagttttttattttttgttgtacgtttttcggaagtaatattaggagtttaacgggattttaaattagagtttaattagtattttataaagtttttagagagggattttttttaggttggggagaaataggataatttaataaaatagggtttggatttttttttaaatagattacgttttttttcgttttttttttttttattttttgaaatttagattaaaatttttttaagataattgcgaggtataaagaacgtttagagtttaagcggttcgttgttagattttattttttaggttttaaatgtgagcgttttaaatattttagagttgaatttggtacgttcgtttattaaattgtcgtgttcggggtttagtattttacgcgcggtagtttaagaatattagatacgtttaataaatatttgttgtttgattgatatattatggcgggtaacgcgttttacgtatttttttttagagatatatattacgttatacgtttttgaagaatggttcgatttataggggtttttataacgatttgttatatataaaagagtgggtggtatttttacgttaaagatgaataggcgaacgtttatttaaatcgtgtggtattagatgcggggaggcgtgggggagggagcgggggagaaagcgttaatttttttagttttagagttagacgtaatatttaaaacgtggattgttttttaaattaatttttaaatggatacgatagtattttattttgtattaatattgtattgtaattagaaagaaaattagtggaggtacgtttatttttttagttggtaaaaaaaaaaaaaaaaaagtaatttttaatattttttcgtttatttttttttttaaaaggcgggtaaggttttcgattacgtgatatcgttttttaatttcgggcggaagaggttagcgatagcgttgtacgaagcgagtgggcgggcgttcgtgttcggttaaaagatggttgttggcgtttggtagttatcgtttgggaggttattgtaaggttcgtagttttcgttagttttcgcggattgttgtcgtttttttattatgaagttagtaagtcgtcgtacgttggattggatttatttagtggtaagtttcggggatcgcgggtttttatcgtgtcgatttattgggttcgtaggcggaaaggttttatttttttagtatttagaaattttaaaatttatttttgaattaagtattttatttttttatttcgatttcgtttttttttggaggatacgatttttcgttttttacgtaagggttgttgggtgtattcgttattggaattttatttattcgattttgttattttaatttttattttagtaatggtaacggtaatttgacgggggcgaggggaaatattaggtagattttatattttttttgcgatttttggtttagttgttgtttgttatcgttttaattttttggggttgtattatttatgtttcgatggtgtttgtaagacgatagttaaggaagaaatatttagataaaatttttgggacgaatgaaaatttgtaatttttttggatttaattatttgaaaatatagtttttttttttatgtttatgtagatataaaaataaaatttataatgtaaagtttttaagtttatttttgtattattttttataataagtattagtatgtaaattttttatttagagattttagtattttatatttttatgataaaattaatagtaatttaaatttgatagttttgagtgttagattatagttggaataagttttttaattaagtttttaaattttttaaaaatgattcggaaagttttttttttttttgagacggagttttgttttgtcgtttaggtttagtggtattatttcggtttattgtaagtttcgttttttgggtttatattaatttcgtgttttagttttcgtagtagttgggattataggagttcgttattacgttcggttaatttttttgtatttttagtagggacggggttttattgtgttagttatgatggtttcgattttttgatttcgtgatttgttcgtttcggttttttaaagtgttgggattataggtatgagttattgcgtttggtcggaaagatttttttaaaataaaagtgtatggaattgttgtttttatatttgtttattgtgatattttattgttgtatattttgatattaaattagtgtaagtattgtgtaagaaaaaaataaataaatatgtaattaaatatttttttatatcgttttttaagttaagaatgattagaaaaagtaggtagttttttatatttgtttagtatgtttattttttatttattgttaaattatttagttttaaattgtataatgtttgaaaatagatatgataatttttgagattaaattttattaaagttatttttttagaaaatttagtaaatatggtaatataggaataaatttaggtttataagttttttaattttttatataatttttaatgatgttgattaggaaatttttttattggtggaattatttttttagtttttagaattgtattattttaggaaaataaagatatagttagtataaaaattttaagtttatagaggtgatagttttattttgttttatgtttattagattttatatggaaaatgtatttgagttttggtattttttttaaaaggattttagataaagtagaagttgattaaatttgaataattagtatttaaaattttaaggtatagtgaaataatagggaaatttttatttagaaataaaataattaaaaagggtacgaaaattgtgttttttaagtgataaagggataattttttattttgtatgattttaataaatggaggttttagaaagaagttgtaaggaaatatttgtagttttagataaggaggtaatgtatttttagtaattgaatgtgttacgtaattattagttttttgattggtttatatattgaatatagaatataaattttggttaggtagttggtttagatgtttttttaatttttgatatagatgtgggtaaaaaggtatgggtattgaagttagaattaagtggtaagaattttggaatttttattgataagttgtatagttttaagatagattatttaattttagttttagttatgtgtttaagatagattttgttagtttgttagtttttgaatgattgggaagagtagaattgtttttatatttattttaatttttgttattttttgatttggtattgtttaggattatagtttaatgaaaaaataaatatgtttatgttattatatatttgggtaataatttgttagtatagttagtattattttaatagaaattattgttttgaagtggtattaatgttgttgtaataaaaattaagttatagggtattggtttagtagtttggtagtaaagataaagatggaaataaaaggtagtggtaaattatttagtaaaatattttttataatttggaagttgattgtttaatgaatttgaggttttagaagaaagtagttgggaaaaaaagttatagtatgtgtttggatttttgggatttttggatgttttgggaatgtattttaagaagtatgagtttaggtaaaaagtggttgatttgagaggcgatataaaaatggagaggacgagagaatattttggtgtacgttagagattttttgtttttgattaaaaaaaaaaaaagttaatagaatttaaaaatttgggttagttatggtggtttatgtttgtaattttagtattttgggagtttaaggtaggaggattgtttgaggtttagagtttaaaattagtttgagtaagagtaggattttgtatttaaaaaataaataaaaaattaggattttgtggtattgaaaaattatattattttagaatttttaaataataagttaatataagaaatttgagtaatagaagtttaataaaatttaaatagagggatatagttttatggtaaagattagtttaaaatgaaggtagtttttgaattagtttgttttagatggtttttatatagttgttatagaggtgagagaggtagatgtataaggataaagaaatgagataagttggtaattgtgtataggaaaaatagatattggtatgagatattgattagaagtaaatatattagatgtttattaaatatttttttttttatgtttttaaatgttaaggtaaatggatggataaattaaatatatagtttatagaattttgttagaatgtttgaaattaaaataatttttggtatttaattttttgtaagtaggtggtagattttgaagtttatatagttttttaaggagggtatgttttttaatattatttagatgtggtttaggtagataatgaaaagaataaattttttggatagagttaggaattagga

SEQ ID NO: 337 - DNA, 9007 bp, Artificial Sequence
  chemically treated genomic DNA (Homo sapiens)
atcgttttttttgttaattggtttttgttttttgttttttaatttttaaaggtagtagttgatttttttaattaggggcggggtttgttagggttaggtagtgtttttaatttagacgttgagtaggagagtagagagggggtgttttagtttgaaattattttttttttagaaggttggggttttaggcgggtttggtatttgggtttagaggttttggttggatttgttaaattttttgattgtagtatgtttgtttttggtttggggagttgttgagtatttggagttgtttttttttttggggttttttttggtaggcggttttcgattttgtttttaggtgggttggttttttttagggtaggagaaaagatatttttttagaaaagagggaggcgtagtttgggagtgggggttcgatttaggagcgagaaagaggaattttagttaggtaggattcgttttagaaggttattgttgttgttggtagttagtgaaaagaggatttagaaaaggagagggtttgtttttggttagtatcgaagaaggaaggtgtggagaggaggggtcgggtcgagagtaaatatcgtttttttggtgtagtagtagttttgtttttgatttcggtcgttttggggagatgaggtttaaattagtagattttgaagggaaatttgtaggatttatagtaagtttggtataggcggaggaggttttgttgtttttttttggttcgtggggttgtttattttaaatttaaggaagagggaggcggggtgtagggatttatatttgtaattttaatattgtgggaggtggaggcggggtgtagggatttatatttgtaattttaatattgtgggaggtggaggcgggaggatcgtttgagtttaggggtttaagattagtttaggtagtatagtgagattttattttaatttaataaataaataaggaagaaagagggagatagtagttgtttaaattatgggtgggaaagttgggtttgggagcgtttagttggtggggttttggcgaaggcgggggacgggtagaattttgggtttattatttttgggaattttttgtgtatttattatttagtaataggatgtagtttttttttcgttttggaaggttaggttataaaggttattagggtttgttcgggagtcggtattttttaagattgttttgtgtttttcgcggcgatttcggtttagcggttgggcgttagggttatcgtttatgtgcgttatttgtttcgtgaaggcgttggtgcgcgtgtttaagatttatttgatcgttagttatatttatttatttcgcggttggttcgtggtttttcgttgggatgacgtgcgcgtcgtgggtcggagtagtagttatcgggcgttgatttgcgcggtagtcgcggcgggcgtgtggttgttgcgggacgagacgttgggcggggatgcgttggggcggtttttacgtggggcgcgtagttaggcgtagtgttttttgtagtagtttcgcgagttgttcggttagttcgttagttacgcgttggtttattcgttgggtcgttggttcgtgtatttcggtttcgtgtttttgatgacgcgcgcgttgttgtcgttgttgtagtagggttaagagcgtttcgtggagcgttattacggtcggcgcgttaagttggtggtttgtgacggtaacgagatcgatattatgtttatggatcgtcgttagtattcgggtagttacgtgtacgggtcgcgtttcgttatttgttgcgaaggtaacgcgggtttttacgagatgggttgtttgtttgtatcgttcgaggtcggttatttcgtgttgggttggaattatttcggtttcggtagtagtattggcgtgttttttttttagtacgacgttaacgttatggacgtggtggtcgagtacgtattgtatcgtttgtatttttcgttcgcgtatttggtggtttacggttggtttgttggcggttttacggttatttgggttattatgatttattcggagttgggtgtattggtgttggacgttattttcgacgattttgtgtcgttggcgttgaaggttatgttttatagttggaaggggttggtggtgcgtatcgtgcgcgagtattttaattttaacgtggtcgagtagttgtgttgttattcggggtcggtgttgttgtttcgacgtacgtaggatgacgtggttagtatttcgggtcgtttgcgttttttgttatttggtgacgtggagggtaatcggggtaatgagttgttgttgcgtttgttggagtatcgttatttcgtcgtgatggcgcgagagggtcgcgtcgtcgttattcgttggttgcgcgttggtagtttggcgtaggaggtcgttttttatgtacgttatcgcgtggacgaggattggtgtttggcgttgttgcgtttttatcgtgtacgttgcgaagaggagttggagggcgaggaggttttggggttatacggattcgtttttttatggttggtgggttagggtttgagttcgcggcggcgtcggcgtttcgtattgtttttggttcggaagtattttaagaacgtggaggcgatttattttagttttttggagtttgaggagttttagttgttttggcggttgtaatttatatgttttagtgggggattacgtatttgaatttttggtttttttggtttatttttttatatcgttaattattgtagggggtcggcgtcgacgcggggcggggcgggggggggcgcgcggggtgtttttgatttgttgtttgggggagggtaggtagaatacggggatttggtgtttttttttttttataggggcgttttgatcgtttttttattttttttagttttgttttttttttttttttttttttttataaatatttttggttgtttttatttagtttttaagggaatgaaaggttaatttgattcggtttatggtaatattgtgtgatgggtgttttgattattataaaaggatgatgggaacggggttgtggggttttagggaggagttttttatttggtttgggttataggatggtttttgggaagataatgttagttgtgcgttgaaagtttgtgtaagttgttttcgtgaaaaggaggatattggtatggtagggttgtgggtaggttttagtggttggatatttttaggagttagtattggttattattttgtagggtttttttttatttttaaatttttggtttttatattagggtatttatagatagattgtagatttatatggtggtatgtgaggttatagatatatttgtataggttagaggatattattgcgtgttttttggagttaggtttgggttggattttgtttttggtttagggatgtaatatagaatgggataaggtttttgtttataatggtttgtaatgttatatttttgtggtttgttttgaattgtttgaagtagggattattgtttttatatgtttttagttttcgggttggtttggttgggttgagtaagaatttttggaaagaatgaaaggtagtaaatggagaaaatattattgagagtacgagagtaggttaaggtcgtggtggtaagggattcgggtttgtgtaagagtattaggaagatatttgtgggaggaggtggtcgggtgaaggaaggggtagtgggaggagtttttatgtttagggattagtattattttaggttggaagtttagagtggagttttaggatattagattttaaagggtttgaatatcgtttaaggtttttttttcgggagtaagtaggagttaaagaagggaagttgcgggatttgttttcgtggggttagttgtttggtggttacgcgttttttttttgaagttaggtattttgttttagagtattttggttgcgttttaatttgcggagtgatttggggtaagtgattttaattttagtttttttatttgtggagtggggagggcgtagcgttggtcgttttgaataggaagtgagataatttcggggtgtatacgcgtaggttcgagtcgtagggtttacgttcgaggcgaggcggtagcggcgtttgtagggcgaggggacgaatcgcgattttttttagagtaattcgcgtataataaaaagtttttatgaaaaggataaattagttaggcgtgaggggcggtggtttacgtttgtaattttagtattttaggaggtcgaggcgggtggattatttaaggttaggagttttagattagtttggttaaggtggcgaaattttcgtttttattataaatacgaaaattagtcggacgtgttggcgcgcgtttgtaattttagttattcgggaggttgaggttggagaatcgtttgaattcggagggtagagattggagtgagttgagatcgcgttatggtattttagtttgggtaataagagtgaaatttcgttttaaaaataaataaaaaaggattaattaaaaaaagaatataaatataataaataataggatttacgggggtaggttgatttttaaagtaaggggtcgggttggaaaggattttaaggggttagagtttgagtcgtcgaggcgcgcgagttttagtatttttaggtagttgtattcgtttcggaagattttttggggttttgcgttggttttttatagcgttatgttggacggtttttttattttttatttttttagttttttcgttattttgatcgttttatttgtgattttcgttggtggagttaatttggaatggattttcgtcgaattacgttttttttttttggttcgttcgtagtttcggtttattaggttgagtcgggtaaattaggacgggttaagcggtatttttattggatattattggtgggggcgggaagaaggcggagtacgtgttcgggcggaagtagtcgtcgtatcgcggattacgaaacgtcgcggagttgaggtagtttcgttggttagtgtgtacgcggcgagtttttttcggcgtcgttcgttcggtttttatagcgttcgcgatagcggttcggacgtcgttcgaatatggatttcgtcggttaaggtatttgtcgggttcggttttttcgtcgtagatgggtttaggttgttcgttgtttttcgtttttcggggtcgcgtttgcgattttttgttttttcggtttcggtttatttatttcgcggtttttttttagttttcggggttattgatttcgaagtttatgatggtcgtggtgtgttttttgttcgcggtttagatcgttttttgggttttttttagtcgtttttttggttttttttgggatcgtttcgaggtgtggttttttggcgttcgtcgttgttttcgtagtttgggttttgtcgtttttagtaggtttcgtttatgtcgtttatttcgtgttttgtttttgtttgttttgttatttttcggtttttgcgcggggttttcgggtttacgttgtttggttttggatttagttcgaggtgttgagggcggttttcgagtagagaaggggttttcgcgtttagtagagttttttttgggtagtaattttgttcggagtttagtttgtttaggggttgttttatggagagggggtggagtgagttaggggtatatttagtatattaggtttgtttttagaatagtttttttagagtagtatgagatggttattgaggggcgtggagcgagtttaggagattaaaattttgagaagatgataaaagtttgttttgtattttggggttttagagagggatgttaaatttttttttttttttttttttttttttatttttttgagacggagttttgttttgacgttaggttggagtgtagtggcgcgattttagtttattgtaatttcgatttttcgggtttaagcgattttgttgttttagttttttgagtagttgggattataggtacgcgttattaggtttagttaatttttgtatttttagtagaggtagggttttattatgttgtttaggatggtttcgattttttgattttgtgattcgttcgttttagttttttaaagtgttgggattataggcgtgagttattgtgttcggttatatattaagttttataatttttaggtgttgtattattttggagggtgttttttgtttgtttgtttttgtttttttgagatggagttttattttgtcgtttaggttggagcgtagtggttagatttcggtttattgtaagtttcgtttttcgggtttattgttatttttttgttttagttttttaattagttgggattataggcgttcgttattatgttcggttaattttttgtatttttagtagagacggggttttattgttagttatgacggttttgatattttgatttcgtgatttgtttatttcggttttttaaagtgttgggattataggcgtgagttatcgcgtttggttttttttttttttttttttaattttttttttggggatagcgtttttttttgttttttaggttggagtgtagtggtgtaattatagtttattgtaatttttaatttttgggtttaagcgatttttttgcgttagttttttaggtagttgggattataagattataggcgtattatgttaggttaattggtttttttatttttttttttttttttgagacggattttcgtttttgttgtttacgttgtagtataatggcgcgattatggtttttcgtaatttttgttttttgggtttaagcgatttttttgttttagtttttcgtgtagttggtattataggcgtgcgttattatgttcggttaattttgtatttttagtagagatggaggtttttttatgttggttaagttggtttcgaatttttgattttaggtgatttgttcgttttggtttttaaaagtgttgggattataggtgtgagttattgtgtttagttttatttgtttttttttaaatagaatagaaaggttgggttcggtggtttacgtttgtaattttaatatattgggaggtcgaggttagtggattatttgaggttaggagtttgagattagtttaattaacgtgttaaaatttcgtttttattaaaaataaaaaaattaatcgggtatggtggtgtgtttttgtagttttagttatttgggaggttgaggtaggagaatcgattgaatttaggaggtggaggttgtagtgagcggagatcgtgttattgtattttagtttgggtgatagagtaagattcgtttaaaaaaaaaaaaaagagaattagtggataaaaaagtggatacgtttcgtttagtaagcgtttgtggagcgttaaggaagtgtatacggttttagttttatgggatatttgaagggagtgagatgtagttagtttttaagaagagtatttttgttaagtgtatttaatttggtgtttttgtgttgttttttaaaaggtatagtttttttttttttttttttttttttgttttttttttttgagatagttttaaaaaaaagagacggggttttattatattggttaggttggttttgaatttttgattttaggtgattcgttcgttttagttttttaaagtgttgggattatcggtatgagttatttcgttcgattagtttttttttttttttttaaagaatttttttttggtcgcgcgtggtggtttaacgtttgtaatttttcgggtttaagtgatttttttgttttagttttttaagtagttgggaattataggcgcgtgttattacgttaattaattttgtatttttagtagagacggggttttattattttggttaagttggtttcgaatttttgattttatgtgatttatttgtttcggtttttaaaagtgttgggattataggtatgagttattgcgtttggtagtaagtttgtttttttttagaatgttttggttaatagggaaagtgttataatagttatgtgtttggatttggagagaatcgaaatagattgtttttttttatgtgaaattttgtagatttttagggtagttaggaagatgtatttgatatgaagaaaaaatagtggttgtaggaatttgaatgtgatttgggtgtagttgaggtgtgtggtggtagtatatcgttttgtatttttttgtttgttggcggttttttggtagtgggatgagaatcgggaggtaagtaaagggaattttgttttgttgtttttttgaaggagttgaatgagtagtatgtgtttttagtacgtaattttagtatgtgttttgttagatgtgttgagaggaaagtgatgtttattgtgtatattaattatattaggtttttttttttaaaaaaagtggaaatttgttagggtatggtggtttatatttgtaattttaatattttgggaggttaaggcgggcggattattcgaggtcgggaattggagattagtttggtcgatatgacgaaatttcgtttttattgaaaatataaaaatagttagcgtggtggcgtgcgtttgtaattttagttattcgaaggttgagataggagaattatttgaattcgggagacggaggttgtagtgagttgagatcgtattattgtattttagtttgggaggtagagtgagattttattaaaaaaaaaaggtggaaggtttgttagattgagttgttttttttgtagtaagggttttttgtttttgacgatagtatttttattgggaagttagaattcgggtttgtttgttttgggtcggtatttgtcgtgttttgaagtagtataagtggtattggttttttagtttaggtggtttgaggtgtggttgttttcgtttattgtttatgttgtttttatagattttttagagaagaggtgttagtttttagggttttatttatttttatttgtgtttttgttttgttagagatttttatcgtatttatttggaattaatttatttgatattttgtggttttattttgtttttggtaga

SEQ ID NO: 338 - DNA, 9007 bp, Artificial Sequence
  chemically treated genomic DNA (Homo sapiens)
tttgttagagataaaatgaggttataaagtgttaaataagttagttttaagtaaatacggtagaggtttttagtaggataaaagtataggtgggagtgggtgagattttggagattaatattttttttttgaaaggtttgtgaggatagtatgggtagtagacgagggtagttatattttagattatttgagttgaaaagttaatgttatttgtgttgttttagggtacgataaatgtcggtttaaggtaggtaaattcgaattttggttttttagtgagaatattatcgttagaggtaggaaatttttgttatagagaaagtagtttaatttaatagattttttattttttttttttgatggagttttattttgttttttaagttggagtgtaatggtgcgattttagtttattgtaattttcgtttttcgggtttaagtgatttttttgttttagttttcgagtagttgggattataggcgtacgttattacgttggttatttttgtatttttagtagagacggggtttcgttatgtcggttaggttggtttttaattttcgatttcgggtgattcgttcgttttggttttttaaagtgttgggattataggtgtgagttattatattttgataaatttttattttttttaaaaaaaggaatttaatatggttaatatatataataagtattattttttttttaatatatttgatagagtatatgttaaaattacgtattaggagtatatgttgtttatttagtttttttagggaggtagtaaaataaaattttttttatttatttttcgatttttattttattgttagaaggtcgttagtaggtagagaggtgtagagcggtgtgttgttattatatattttaattatatttagattatatttaaatttttgtagttattgttttttttttatgttaaatgtatttttttgattattttaaaagtttataagattttatataaagaaaaatagtttatttcgattttttttaaatttaagtatatgattattgtaatattttttttgttgattaaaatattttgaaaagaaataggtttattgttaggcgtagtggtttatgtttataattttagtatttttggaggtcgaggtaggtggattatatgaggttaggagttcgagattagtttgattaaaatggtgaaatttcgtttttattaaaaatataaaattagttagcgtggtggtacgcgtttgtagtttttagttatttgggaggttgaggtaggagaattatttgaattcgggagattataggcgttgagttattacgcgcggttaaaaaaaaattttttaaaaaaaaaaagaaaaattggtcgggcggggtggtttatgtcggtaattttagtattttgggaggttgaggcgggcggattatttgaggttaggagtttaagattagtttggttaatatggtgaaatttcgttttttttttttgagattgttttaaaaaaaaaaaataaaagaaaagaaaaagaaaaaaaaattatgttttttaaaagataatataaagatattagattaaatgtatttaataaagatattttttttaaaagttggttgtattttattttttttaaatgttttataggattggagtcgtgtgtatttttttggcgttttataaacgtttattaaacgaagcgtatttatttttttatttattgatttttttttttttttttttagacgagttttattttgttatttaggttggagtgtagtggtacgattttcgtttattgtaatttttattttttgggtttaatcgatttttttgttttagttttttaagtagttgggattataggagtatattattatgttcggttaatttttttatttttagtagagacggggttttggtacgttggttaggttggttttaaatttttgattttaagtgatttattggtttcggttttttaatgtgttagaattataggcgtaagttatcgagtttagtttttttgttttatttaaaaaaagataaatgaggttgggtataatggtttatatttgtaattttagtatttttggaggttaaggcgggtagattatttgaggttagaagttcgagattagtttgattaatatggagaaatttttatttttattaaaaatataaaattagtcgggtatggtggcgtacgtttgtaatgttagttatacgggaggttgaggtaggagaatcgtttgaatttagaaggtagaggttgcgggaagttatgatcgcgttattgtattgtagcgtgggtaataagagcgaaaattcgttttaaaaaaaaaaaaaaaagtagaaagattaattaatttggtatggtgcgtttgtagttttatagttttagttatttgggaggttgacgtaggaagatcgtttgagtttaggagttgaagattgtagtaagttatgattgtattattgtattttagtttgggagatagagggagacgttgtttttaaaaaaaaaattaaaaaaaaaaaaaaaaaaggttaggcgcggtggtttacgtttgtaattttagtattttgggaggtcgaggtaagtagattacgaggttagggtattaagatcgttatggttaatagtgaaatttcgtttttattaaagatataaaaaattagtcgggtatgatggcgggcgtttgtagttttagttagttgggaggttgaagtaggagaatggtagtgaattcgggaggcggagtttgtagtgagtcgagatttagttattgcgttttagtttgggcgatagagtgagattttattttaaaaaaataaaaataaataaataaaaaatattttttagaataatgtagtatttaggaattataaagtttaatatgtagtcgggtatagtggtttacgtttgtaattttagtattttgggaggttgaggcgggcggattataaggttaagagatcgagattattttgggtaatatggtgaaattttgtttttattaaaaatataaaaattagttgggtttggtggcgcgtgtttgtagttttagttatttaggaggttgaggtagtagaatcgtttgaattcgggaggtcgaggttgtaatgagttgagatcgcgttattgtattttagtttggcgttagagtaagatttcgttttaaaaaaataaagaaagaaagaaagaaagaaagaaatttagtatttttttttagagttttaaaatgtaaggtagatttttattatttttttaagattttaattttttgggttcgttttacgttttttagtggttattttatattgttttggggagattgttttggaaataggtttggtatgttgggtgtgtttttgatttattttattttttttttatgaggtaatttttaagtaggttgagtttcgagtagagttgttgtttaaggggagttttgttgaacgcgaagattttttttttgttcgggagtcgtttttaatatttcggattgggtttagggttagatagcgtgaattcgagggtttcgcgtagggatcggggggtggtagagtaagtaagagtagggtacggggtgggcggtataagcgagatttgttgggagcgatagaatttaaattacgggagtaacggcgggcgttagggaattatatttcggaacggttttaggggagattaggagggcggttggagagagtttaggaagcggtttgggtcgcgggtaaaaaatatattacgattattataagtttcgaggttagtggtttcgggagttgaagaggggtcgcggggtgggtgaatcgagatcgagaggatagagagtcgtagacgcgatttcgggagacggagaataacgggtagtttgggtttatttgcggcgaaggggtcgggttcggtaggtattttggtcggcggagtttatgttcgggcggcgttcggatcgttgtcgcgggcgttatgggagtcgagcgggcggcgtcgggagaagttcgtcgcgtatatattagttagcggaattgttttagtttcgcggcgtttcgtaattcgcgatgcgacggttattttcgttcgggtacgtgtttcgtttttttttcgtttttattagtgatatttaatgagagtgtcgtttggttcgttttggtttattcgatttaatttgataggtcgaaattgcgggcgaattaggaaagggaggcgtggttcggcgggaatttattttaggttgattttattagcgagaattataggtagaacggttagagtagcgggaggattgggaaggtgggaagtgggaggatcgtttaatatggcgttgtggaaagttagcgtagggttttaggggatttttcggggcggatgtagttgtttaggagtgttggggttcgcgcgtttcggcggtttaaattttgattttttgagattttttttagttcgattttttattttaggggttagtttgttttcgtaagttttgttatttattgtatttatattttttttttagttggtttttttttgtttgtttttgagacggagttttatttttgttgtttaggttggagtgttatggcgcgattttagtttattttaatttttgtttttcgggtttaagcgattttttagttttagtttttcgagtagttggaattataggcgcgcgttaatacgttcggttaattttcgtatttgtagtagagacgggggtttcgttattttggttaggttggtttagaatttttgattttaggtgatttattcgtttcggttttttaaagtgttgggattataggcgtgagttatcgttttttacgtttggttagtttgttttttttatggggattttttattgtacgcgggttattttgaaaaagatcgcgattcgttttttcgttttgtaggcgtcgttgtcgtttcgtttcgggcgtggattttgcggttcgggtttgcgcgtgtgtatttcgaggttgttttattttttgtttagggcgattagcgttgcgttttttttattttatagatgaggaagttgaggttaaagttatttgttttaggttatttcgtaagttgaagcgtaattaggatattttggaataggatgtttgattttagaggagaggcgcgtaattattaggtaattggttttacgaaaataagtttcgtaattttttttttttggtttttatttgttttcggaagaaaagttttaaacggtatttaagttttttaggatttgatgttttaggattttattttgggtttttagtttggggtggtattggtttttaggtatggaagttttttttattgtttttttttttattcggttatttttttttataggtgtttttttggtatttttgtataggttcgagttttttattattacggttttagtttgttttcgtgtttttagtaatgttttttttatttgttgttttttattttttttagagatttttgtttaatttaattaggttagttcggggattagggatatgtagggataatagtttttgttttaggtagtttagggtagattatagagatgtgatattatagattattgtgagtagaggttttgttttattttgtgttgtatttttaagttaggaataaagtttagtttaggtttggttttaggggatacgtagtagtattttttggtttgtgtaagtgtatttgtagttttatatgttattatgtgagtttgtaatttgtttgtgaatgttttggtgtagaagttaggagtttggaggtgggagggagttttatagaatgatagttagtgttaatttttgggaatgtttagttattaagatttgtttatagttttgttatgttaatgtttttttttttacgggagtagtttgtatagatttttagcgtatagttggtattgtttttttaggagttattttgtaatttaggttaggtgaagggtttttttttgggattttatagtttcgtttttattatttttttgtggtgattaaggtatttattatatagtattgttataaatcgggttaggttaattttttatttttttaggagttgggtgggggtagttaaaagtatttgtaggaggaagagagaaaggaggggatagagttaggaagaatgggaggacggttagaacgtttttgtgaaggaaggagagtattaagttttcgtgttttgtttatttttttttagatagtagattaggagtatttcgcgcgttttttttcgtttcgtttcgcgtcggcgtcggttttttgtaatggttggcggtatggggaggtgaattaagaaggttaggagtttaagtgcgtgattttttattggggtatataggttatagtcgttagggtaattgaaattttttaggttttagagggttgaagtgagtcgtttttacgtttttgaggtgttttcgagttaggaatagtgcgaggcgtcggcgtcgtcgcgagtttaggttttggtttattagttatgggaaggcgggttcgtgtggttttagggttttttcgttttttagttttttttcgtagcgtgtacggtaggagcgtagtagcgttaggtattagttttcgtttacgcggtagcgtgtatagaaggcggttttttgcgttaagttgttagcgcgtagttagcgggtgacgacggcgcggttttttcgcgttattacgacggggtagcggtgttttagtaggcgtagtagtagtttattgtttcggttgttttttacgttattaggtgatagggggcgtaggcggttcgaagtgttgattacgttattttgcgtgcgtcggagtagtagtatcggtttcgggtagtagtatagttgttcggttacgttgaggttgaagtgttcgcgtacggtgcgtattattagttttttttaattgtggggtatgatttttagcgttagcggtataaggtcgtcgaaggtggcgtttagtattagtgtatttagtttcgggtaggttatggtggtttaggtggtcgtgaagtcgttaatagattagtcgtagattattaggtgcgcgggcgggaagtgtaggcggtgtagtgcgtattcgattattacgtttatggcgttggcgtcgtgttgagggaagggtacgttagtgttgttgtcgaagtcggggtggttttagtttagtacggagtagtcggtttcgagcggtgtagatagatagtttatttcgtagaagttcgcgttgttttcgtagtagatgacgaggcgcggttcgtgtacgtggttgttcgggtgttggcggcggtttatgaatatagtgtcgatttcgttgtcgttataggttattagtttggcgcgtcggtcgtggtagcgttttacgaggcgtttttggttttgttgtagtagcggtagtagcgcgcgcgttattagggatacggagtcggggtatacgagttagcggtttagcgagtgggttagcgcgtagttagcgagttggtcgggtagttcgcggagttgttgtaagaggtattgcgtttggttgcgcgttttacgtggaggtcgttttagcgtattttcgtttagcgtttcgtttcgtagtaattatacgttcgtcgcggttgtcgcgtaggttagcgttcggtggttgttgtttcggtttacggcgcgtacgttattttagcggaaggttacgggttagtcgcggaatgggtaggtgtagttggcggttaggtagattttgaatacgcgtattagcgtttttacgaagtagatgacgtatatgagcggtggttttaacgtttagtcgttgggtcgggatcgtcgcgagaggtatagggtagttttaggggatatcggttttcggataagttttgatggtttttgtgatttggttttttagggcggagggaaggttgtattttgttgttaggtgatgggtgtataaagggtttttagagatgatgaatttaaggttttgttcgtttttcgttttcgttaagattttattagttaaacgtttttaggtttagtttttttatttatgatttgagtagttattgttttttttttttttttttatttatttattaaattgagatggggttttattatgttgtttaggttggttttgaatttttgggtttaagcgattttttcgtttttattttttatagtgttgggattataggtgtgagtttttgtatttcgtttttattttttatagtgttgggattataggtgtgagtttttgtatttcgttttttttttttttaaatttaagatggatagttttacgggttaaaaagggatagtaaggtttttttcgtttgtattaggtttgttgtgggttttgtaagtttttttttagggtttgttggtttaaattttatttttttaggacggtcggggttagagatagggttgttgttgtattaaaaaggcggtatttgttttcggttcggttttttttttttatatttttttttttcggtgttgattagaaataagttttttttttttttggattttttttttattggttgttagtaatagtagtgattttttggggcgggttttgtttggttggggtttttttttttcgtttttgggtcgagtttttatttttaggttgcgttttttttttttttggagaggtatttttttttttgttttggaaagggttagtttatttgagggtagggtcggaagtcgtttgttaggaggagttttagggaagagggtagttttaggtatttaatagttttttagattagaaataaatatgttataattagggagtttggtaaatttagttagagtttttgagtttaggtgttaggttcgtttgggattttagttttttggggaaggggtagttttaggttgaagtattttttttttgtttttttgtttagcgtttgggttagaggtattgtttgattttaataggtttcgtttttagttgggggagttagttgttgtttttaggggttgggggatagaagatagggattaattaataaagggagcgat

SEQ ID NO: 339 - DNA, 6863 bp, Artificial Sequence
  chemically treated genomic DNA (Homo sapiens)
tatgattattgttgttataagtttgatataagataatataaattagaataggaataaaatttttaaaagttttttttgtaaagaattggataattagatattaaaaagattagaagggaatataaaatattttggaaagataataaaatgtgaaaaatttggttaataaatattttaattttgaagtttttatattataaattacgtttatatggttaaaggggaaggtgttttgacgagtaaaattgggttaggtttgtttatttttttatgtttttttaaagatttattttaaagttattttttttatatttttttttttattttttaattttgagtttattattaaatagtattttttaattttaaattaataagtaatttttaaaataaattatagagtaattatttagttataaatgtagagtaaaagatatatatttgttttattaaaaggttagagataaaagtttttttttggagatttatgtttgaaagatattggttaatagttttttttataatgtaggttttttttatttttaggaattaaaattttttatattataagaagaaaagatatagtatttaggtaaaatattatttgtaatgtttttattatgggagtagtttagtaagagaagtgatattattttgaggttattttatgttttgtagtaaatatttattatatagtgtatttttttttgtaaagtttagatgtagttttagagttttttttaatataatgtagtaggaaataattataaattaattagagttgatatgagagattaaattttttatttatatttgggataagggagaggatattaaattagtaagtaatatattagattttttttttttttttttttttttgagacggagttttgtttttgttatttaggttggagtgtagtggcgtaatttcggtatattgtaatttttgttttttaggtttaagtgatttttttgtttcggttttttgagtagttggggttataggggtttacgattatgttcggttaatttttgtgtttttagtagagacggggttttattatgttggttaggttggtttcgaatttttgattttaggtgattcgttcgtttcggtttttaaagtgttgggattataggcgtgagttattatgtttagttaatatattagattttttattttagatttattttttagttgtattatttttgatattttattgttaagttttggtgtttttattgttaaaatcgtaaatatgaatttttgaatagtttattaggaggtagagttaaatttatttatttgataagtatatatgaaagaattatattatttgtttagaaattatgttaagtgggataatataaagatgagtaatataatttttgtttttgagtaatatatattatagtaagagttatttaagtagataaatagtaatataataataatatatagtttttattttgtataacgtattattgtaagtattttttatgtaatattaataatttataaaattttaggaagtgggtattattattataatttttattttatagatgaagaaattgaaatgagaaaagttgattaaataatttgttaaagtgataaagttgggtaagtggtaaaggagggatttaaatttagatattttggttttagaatttatgttttttaatattacgtttataatgaggaatcgtaattagttttttaattaaattattattacgggtagtttttattttgttttttttttggtttgtggatggaagttagtatatttattttttttattggtttatgtttttttgatttgtatttttatagtttaaaattaaagatattgaataaaagagttaggtaatataatgaatgattaaattaaggagtttataattagtgaggatgaaaatgtaaaagagatgatatttaaaagagttataaaataaatagagattgtaggaatatagttatagtattttgaatattgtaatttaggaattattattatttggattttgttaaaaatgtgaattttatttagtattataaagttaaggttattagagatatgttggggtggtatatttgatattagtaaattgttagttataaaacggttttgtattttaaaattaaagtttagagaatggatttaagtttgaaatgttttattggaggttgtttttttattgttttaatgagtttgtttagttttgttttaaaatatattaatttttttttggtttttttttttgtttgttttttgagatggagttttgttttgttgtttaggttggagtgtagtggcgcgatttcggtttaatgtaagttttattttttaggtttacgttatttttttgttttagttttttaagtagttgggattataggtattcgttattatattcggttaattttttgtatttttagtagagacggggttttatcgtgttagttaggatagtttcgattttttgatcgtgtgatttgtttgttttggttttttaaagtgttgggattataggtgtgagttattatgtttggtttttttagtttttttttgataataatagacgtgaattagatttgtatattattttttagagattaagtttaggaatgtttgtttaaatattattgttgtttttgtgaagttaagggtttttattttttagtaatgttttaaggtatgtaattttatgtatttatttttttttatattatattatattttttttttttttggtttaataatttttaatttttgtaataaatataagtaattttaaagttatatttaattttttaattttattttttttagggtgttatttagtagttatattaatgtgtaagaaattgaatgtaatagggagatgaaaatttatttaattatgaaatttgattgaatgttagataaatttttttttagtgtttttttaaaatttttaaatgtagttaattatattttataaaaggtagtattaaaaatgtatatagttagttttttatatttgtggtttttatttttatgtatttaattaattatagattgaaaaattatttttttaaagtatgattatatttgtattattaaagatgtttttttttgttattattttttaaataatataatataataattatagtatttatattgtattaggtattataagtaatttagagatgatttaagatatgtaaatgttatattatttaatataaggaattggagtatttatggattttatatttatggggtgggtaggtgagagggttttggaattaatgttttacggatattaagggataattgtattttgttttatagggttataattttttagaaatgttgtatattagttaaagtttttgtggtttaagtattgtgattgatataatttaatttttttgggttttggttttttaatttataaaataaagtatttgaattttagtagatttgaaaatttatttaattttaggattttgtgaatttaagtatagaaaaatttatattttttaaatgatagattaatagtatgataatattgtgggtttaggatatagtataatattttatatattagtaattttaattataatgtttatttaaaaaatatttttggggaaaaattaattttaagtttcgttgttgatttatttttttttagttattataaaatattataaaatgtttttatttatattttttagacggttttataatatgatttaaaagtaagaattagagaaaaagaataaattttatataagaattaaattattaatttatagaaggtttacgattgtgggaattgtagagagacgatattgggaatgtattatttataatgaataatttaataaatttttttataagagtaaatacgaaataatttacggattgagttttaaaattatagaattatgatttggaattatataagttttgttattgtagaaattaataatgtgtttaaaaattttagttataatagtttttaattttaaaaataatataatgttaggtaatcgtttttgtaacgaaaaatttaaaatataggttatatttaaagtgttatcggttttttttaattttttttttgaagaattaattcgggtttttaaattttcgggtattgaattatttagtgttatttttttattattaaaaattatttaggtacgtcgttttatataaggtaagttcgttagaagtgtgtgtcggagtgattgtttatatggttttaatattgttttttttttttttttttgaaaagagagtatatatatatatatatatatatatatattatatttaggttgatttatttgtttttagaatgtgtattcgtggtagataattatttcggacggttttttcgtcggagatgggggtttcgggtttaagtattagtttttaggggttagatttttttcggttttaatttattgttattgaatttattagaaagcgatttattttttatattttattttttattttaaagttagggatttgggagttaggtggcgtagattgatgacgtaaaagttttttttttttttttcgtagagttttagttaaagcgattgcggtcgttatttcgtttttttttgggcgttatagagagcgtggcggtatttcggagtttgtcgttcggttttatcgggatcgatgttttttagtggtttagtgtttagaagtcgttaacgaggacgatttatggtatttcggggttttgacggtaaggttattagttttttagggagggttaaggggtgacgagtacgtatgtggcgttatcgtgcggatagcggttacggggtcgagataggagagttaggggagcggggagaaaaacggaagttgagagggcggtgtagtattgggttttcggaaaagaatgagaaaaatattatattttttagagttttataaggtttgaagtgggtggagttggaagtcggaaaattgggtgcgtaagaggattagggatagtttttgagttcgggtttttagggttcgtagtttttaacggttgcgcgcgtatttcggtcgcgggcggtgaggtgttgttgttgaaacgttgtcgttgagggtggattcgattttttagggtttcgtcgcgggagttttcggcgggcgggcgcgcgcgagttatcgagcgaggtgatagaggcggcggtttaggcgtttgggttttgttggttttcgtttttttttttcgtttttatttcgtcggtcgttgttattggggtttttggttttatcgatatggcggcggtgttgtagtaagttttggagcgtacggagttgaataagttgtttaagtttgtttagaataaatttgaaaagttttttgttgattagtaattcgagatcgatggtttgaaggggcggtatgagaaatttaaggtggagagcggtaagtgagatgtttttttcgtttttggttttgggttcgattttcgttttttgggtttggtttttttttattaagttggtattgggtatcgttttgttaattttattttttgggttttgtggatattttgagttttcgtttttttgttttttatagtttgataagaagtttttgaaaaaaaaatttgaatttaagtttagtagtattttttttgtagttagggtaggtttatatagggacgtttattttttttcgttcggtagacgggaaatagatttgatagagtttgcgaatttatttttttaagtttagagtattttatatgttttgttgtattttaattgatagtggtttcgttttattttttaggtatttgtattttaggtttttgttaaattgattattttgtgtatttgtttttagtgtgtgcgtcgtttcgtggttttagaacgaattagatgtttataaaaatgaatattaggtgtataagagcgttggaaatatagtgaatgtgtagtatataaatttaatatattttgattttttttaaaaagttggagtttgatagaaaatattaaaatttttttgtaattatttaaagtaggtttttaagtaagaaagttattgataataatggtttgaatatttttgaaaaaaatatgaagaatatagttattattattagtaaaatataaatttttcgttaatgtgttttggtttattatttgtttggggaggtttatattgtttttgttaagttgattggaaattttgaataagtttttattttaaaaaaagtgtaattgttaagtagaattgattttgaaaattagttttttgattttagagttgagtatagtatattgtattttatttattaatttgtattataaatattgaatgttttatatgtttttgatattatgttgaatatgatatttaatttttttttttggaaagtttatatatttatttttatatatatttagtagttttatgtttttaggtaatattttgattattataaaagaagttttttaaaataaaggagtttttttttgtttaaataattttttttcgtgtaataaatattttatttattaagtagtttattgatgtttggagaaaatattaagataaatgaggttatttgttttgaagatattgatttgtaaagttttttttaggttttatttttattttttattttttgttatgtaagtcgtttggaaatgttttaagttttttttagtgtttagtttatttatttttatttagatttttttatgtggagtataattttaatattgtattttaagttttaaaattaaggttattagaaataaataatagtatttataatgtatgtatatgtgtttgattttgttttttgttttttgtttgtttgttgtaga

SEQ ID NO: 340 - DNA, 6863 bp, Artificial Sequence
  chemically treated genomic DNA (Homo sapiens)
tttatagtagataagtaaaaaataaaaaataaaattaaatatatgtatatatattgtgaatattgttatttatttttaataattttgattttaaaatttaagatatagtattagaattgtgttttatataagagaatttgagtaaagataaatagattgagtattgaaaaggatttaaagtatttttaaacgatttatatgataaaaaataaaaaataaaaataaggtttaaaaggggttttataaattaatgtttttaaggtaggtaattttatttattttagtattttttttagatattagtaaattgtttaataaataaagtatttattatacgagaaaaaattgtttagataaaaaaaaatttttttgttttaaaagattttttttatagtagttaagatattatttgaaagtataaaattattaaatatatgtaaaagtaaatgtgtaaattttttaagggaagggattgaatattatgtttagtatagtattaggaatatgtaagatatttaatatttatggtgtaaattaataaatagaatgtaatgtattatatttagttttgggattagagaattaatttttaaggttaattttgtttgatagttatattttttttgaagtaaaaatttgtttagaatttttagttaatttagtaagaatagtatgaatttttttaaataaatggtaaattaaaatatattaacgggaagtttgtattttattaatggtaatgattatattttttatattttttttaaggatgtttaagttattattgttagtaatttttttatttaaaggtttattttaggtaattataagaaaattttaatgttttttattaaattttaattttttaagagaaattaagatatattaaatttatgtattgtatatttattgtgtttttagcgtttttatgtatttaatatttatttttgtaaatatttgattcgttttggagttacgggacgacgtatatattaagaataagtgtatagagtggttaatttggtaaaggtttagaatgtaggtgtttagaaaatagggcggagttattattagttgaagtgtaataaaatatataaggtattttaggtttagagagatgggttcgtagattttattaagtttgtttttcgtttgtcggacgaaggaaaataagcgtttttgtatgagtttattttaattataaagaaaatgttattgaatttagatttagattttttttttaaaggttttttattaaattgtaaggagtaggaaagcgaaggtttaggatatttatagagtttaggaagtgaggttaatagagcggtatttagtgttaatttgatgggggaagattagatttaaagggcgggagtcgagtttaaaattaaggacggaaagagtattttatttatcgttttttattttaaattttttatgtcgtttttttaggttatcgatttcggattgttgattagtaaggaattttttaagtttgttttggatagatttgggtagtttgtttagtttcgtgcgttttaggatttgttgtaatatcgtcgttatgtcggtggggttagggattttagtggtagcggtcgacggggtagaagcggagaagaaaggcgaagattagtaggatttagacgtttgggtcgtcgtttttattatttcgttcggtggttcgcgcgcgttcgttcgtcggagattttcgcggcgggattttgggaaatcgagtttatttttagcggtagcgttttagtaatagtattttatcgttcgcgatcgaagtgcgcgcgtagtcgttggaagttacgaattttgggaattcgagtttagaggttatttttgatttttttgcgtatttaatttttcggtttttagttttatttattttaggttttgtagggttttgggaaatgtagtgttttttttattttttttcgggagtttaatgttgtatcgtttttttagttttcgttttttttttcgtttttttggtttttttatttcggtttcgtaatcgttgttcgtacggtggcgttatatacgtattcgttattttttggttttttttgaagagttggtgattttatcgttaaagtttcgggatgttatggatcgttttcgttggcggtttttggatattgagttattagagggtatcggtttcggtagggtcggacggtaggtttcgggatatcgttacgttttttatggcgtttagaagggggcggggtggcgatcgtagtcgttttggttgaggttttgcggggaagggagggggggtttttacgttattaatttgcgttatttgatttttaagtttttggttttggagtgggaagtgaggtgtgggaagtaggtcgttttttgatgaatttagtggtagtgaattgagatcggagggaatttggtttttagaggttggtatttgggttcgaaatttttattttcggcggagagatcgttcgaggtaattgtttgttacgagtgtatattttgaaaataggtaagttagtttaagtgtagtgtgtgtgtgtgtgtgtgtgtgtgtgtgttttttttttaagagaaaaaggaagggatagtgttggaattatatggatagttatttcggtatatatttttgacgaatttattttgtgtgaaacggcgtatttaaatggtttttggtggtggggaggtggtattgagtgatttagtattcgggaatttaaggattcgggttaattttttaggaggagaattaaaagaaatcggtagtattttgagtgtagtttatgttttaaatttttcgttgtagaaacggttatttaatattatattgtttttaaaattgaaaattgttgtaattgaagtttttaaatatattgttaatttttatagtaatagaatttgtatggttttagattataattttgtagttttaaagtttaattcgtagattgtttcgtgtttatttttatgaaagaatttgttaaattatttattgtaaataatgtatttttagtgtcgtttttttgtagtttttatagtcgtgggttttttgtgaattggtgatttagtttttatatgaaatttattttttttttttagtttttatttttgaattatgttgtgaagtcgtttaagaaatataaatggaagtattttatgatattttgtaataattaaggaaaaataaattaatagcggagtttaaggttgatttttttttaaaaatattttttagataagtattgtaattaaagttgttggtatatgaagtattatgttatgttttaagtttatagtattattatattgttgatttgttatttgggaaatgtagatttttttgtatttagatttatagaattttaaaattagataggtttttagatttgttaggatttaaatgttttattttatagattaggaaattagagtttagaaaggttgagttgtgttagttatagtgtttggattataaaggttttggttgatatataatatttttggaaaattatgattttataaggtaaaatatagttgttttttggtattcgtggggtattggttttaggatttttttatttgtttattttatggatatgaaatttatggatgttttagttttttatattaaatggtgtagtatttgtatattttaaattatttttaagttatttataatatttaatataatgtaaatgttatagttgttatattatattgtttagggaatagtgataagaaaaaatatttttaatgatatagatgtaattatgttttaaaaaaataattttttaatttgtggttggttgaatatatggaagtggaaattatagatgtggaaagttgattatatatatttttagtattgttttttataaagtatggttgattatatttaaaaattttgaaagagtattaaagaaaaatttatttgatatttaattagattttataattgaatagatttttatttttttattatatttagttttttatatattaatatggttattaggtgatattttagaagaaataaggttaaaaggttaaatataattttagaattatttgtatttgttgtaagaattaagaattattagattagaaggaaaaggagtataatatgatatagaggaaagtagatatatagaattgtatattttaaggtattattaaaaggtaaaagtttttaattttatagaggtaatagtgatatttagataagtatttttagatttagtttttaaaaaatgatatgtaaatttgatttacgtttattgttgttaaaaaagagttaggaaggttaggtatggtgatttatatttgtaattttagtattttgggaggttaaggtaggtagattatacggttaggagatcgagattattttggttaatacggtgaaatttcgtttttattaaaaatataaaaaattagtcgagtgtggtggcgggtgtttgtagttttagttatttgggaggttgaggtaggagaatggcgtgaatttgggaggtggagtttgtattgagtcgagatcgcgttattgtattttagtttgggtaatagagtaagattttattttaaaaaataaataaaaaaaagagttaggaagaaattaatgtattttgagataaaattgaataagtttattgaaataataaggaaatagtttttagtaggatattttagatttgaatttattttttgggttttagttttaaaatgtaaaatcgttttgtgattgatagtttattggtattagatatattattttagtatatttttggtagttttaattttgtggtattgaataagatttatatttttaatagaatttaaatgatgatgatttttaaattgtagtgtttaaaatattgtaattgtgtttttgtagtttttgtttgttttatagtttttttggatattattttttttatatttttatttttattgattatgaattttttgatttaattatttattatattgtttagtttttttatttaatatttttggttttaagttatagaaatgtaaattaaaggagtataagttaatagagggaatgaatatattgatttttatttatagattagagggaaaatagagtaagagttattcgtagtaatgatttaattgaaggattggttacgattttttattatgagcgtggtgttgaaaaatatggattttagagttagagtgtttgaatttaagttttttttttgttatttatttagttttgttattttggtaagttatttaattaattttttttattttagtttttttatttataaaatgaggattataataatggtatttattttttggggttttatgaattattaatgttatatggaaagtatttataataatgcgttgtataaagtagaagttatatgttgttattgtattgttatttatttatttaaataatttttattgtagtatgtattgtttaaggatagagattgtgttgtttatttttgtgttattttatttagtatagtttttaagtaaatagtatagtttttttatatatgtttattaagtaaatgaatttgattttattttttaatgaattatttagaaatttatgtttacgattttagtaatgagaatattaagatttagtaatagagtattaaagataatataattagggagtagatttaaaataagaaatttggtgtgttggttgggtatggtggtttacgtttgtaattttagtattttggaggtcgaggcgggcggattatttgaggttaggagttcgagattagtttggttaatatggtgaaatttcgtttttattaaaaatataaaaattagtcgggtatggtcgtgagtttttgtaattttagttatttaggaggtcgaggtaggagaattatttgaatttgggaggtagaggttatagtgtgtcgaggttgcgttattgtattttagtttgggtgataagagtaaaatttcgttttaaaaaaaaaaaaaaaaaaaagaaatttggtgtgttgtttattagtttagtatttttttttttattttaggtatgagtaaaaggtttgattttttatgttaattttggttgatttgtggttgttttttgttgtattgtattgagaagaattttggaattgtatttgaattttgtaagaaggaatatattatgtaataagtatttgttgtaaggtatgagatagttttaggatagtattattttttttgttaaattatttttatgataaagatattgtaaatgatattttatttaaatgttgtattttttttttttgtgatataggagattttagtttttaaaaatgggaagaatttatattgtagaagagattgttggttagtattttttaaatataaatttttaaggaaaggtttttgtttttggttttttaataggataggtatgtattttttattttgtatttataattaaataattattttgtaatttattttaaaaattatttgttgatttaaagttaaaagatgttatttaataataaatttaagattgggggatggaagaagaaatgtggaagaagtaattttaaagtaggtttttgaggaaatatggagaagtagataaatttagtttaattttgttcgttaggatatttttttttttgattatgtaaacgtaatttataatatggaaattttagaattagaatgtttattgattagattttttatattttgttgtttttttaaagtgttttgtatttttttttaatttttttaatatttggttgtttagttttttataaaagaagtttttgaaaattttatttttgttttaatttgtgttgttttatattagatttatggtaatagtggttata

SEQ ID NO: 341 - DNA, 5380 bp, Artificial Sequence
  chemically treated genomic DNA (Homo sapiens)
aaaattagttaggtatggtggtacgtgtttgtagttttagttattcgggaggttgaggagggaggtggaggttgtagtgagttgtgattgtgtcgttttatagtttgggtaatagaatgagatttcgttttaaaaggaaaaaaaataaaaatatagggatttttaagaggtagggattgtaattttaaatatgatggttaaggatagtttgtggagagggtgataatttgagcgaagtttatgttttttgttttttttttttgagacgggagttttgttttgtcgtttaggttggagtgtagtggcgcgattttagtttattgtaagttttgtttttcgggtttacgttatttttttgttttagttttttaaatagttgggattataggcgttcgttattacgttcggttaattttttgtattttttagtagaggcggggttttattatgttggttaggatggttttgattttttgatttcgtgatttatttatttcggttttttaaagtgttgggattataggcgtgagttattacgtcgggtcgttttttgtttttatagatagtagttttttttttagagggagagaaaattgaggtgtttttaataatttttttttttagagatggggtttcgttatgttgtttagagtggttttaaattttgttttaagtgagttttttattttggtttgtttaggttggagtataatggtattatttaggtttattgtaatttttatttttcgggtttaagtgatttttttgttttagtttttcgagtcgttgggattataggcgtttgttattacgtttaggtaatatttgtatttttaatagagatagggttttattatgttggttaggttggttttgaatttttgattttaggtgatttatttgtttcggttttttaaagtgttaggattataggtatgagttattacgtttagtcggttttttttttttttttaattagttaaggatagtagtgaaaaagggaggggagaaaaattttttgtaattttttttttttttttttgagatagagtttcgttttgttatttaagttggagtgtagtggtgtaatttcgattcgttgtaatttttattttttaggtttaagtaatttttaggttttaattattcgaatagtcggaattatagtcgtttattattatgtttggttaattttattatttttagtagagacgaggttttattatgttgggtaggttggttttaaattttttattttaagtgattcgtttaattttattttttaaagtgttgggattataggtacgagttagtttatttagtttgtttttagtaatttttttttcgttatgtagtttttttgtagttgttttaagttatttttaagatgtgattgttgagtagttttttgttaatagagggttagaatgattatattttttttagtttttatatagtaagttagatttttatttggttgttttttttttttggtaaaaattgtttaaatgagttagagttaaatataagtatttataaaatattggggttatttaaaaaaattatttgttgaaattgaagagtttatggtgttaagtaatatatttgaaaagaaaatttgtttaagttaatggattttaaaatatttgatttataattataggaagaaatatatgtgggatttagtatatttatatatatataaatttaaaatatatttgggagtggtggcgcgtgtttgtaattttagttatttagggggttgaggtaggagaatcgtttgaatttgggagttagaggttgtagtgagtcgagatggtgttattgtattttagtttggataatatagcgagatttatttttaaaaaataataaaataaaataaaataaaataaaataaaataaaataaaataaaaataaaataaaagttttataaaataatatttatttttattgtgattcgtttttatatatgattttttttttttatttttattttattttaaataaagttgtttattatttattaaattgttttttaatcgtttgtttatttttattggttgggtgtttaagattttttttttttagagttcgtaattttattaataaaatttttgttgttgtttgtagtttgagatagagtttcgttttgttgtttaggttggagtgtagtggcgtaatttcggtttattgtaattttcgttttttaggtttaagcgatttttttgttttagttttttgagtagttgggattataggtaatcgttaataggttcggttaatttttgtatttttagtagagacgaggttttattatgttggttaggttggttttaaattattgattttaagtgatttatttgtttcggttttttaaagtgttgggattataggcgtgagttatcgcgttcggttaaaggtaagattttaatttagggtgttatgattttttagtatttttttttattacgattatatttttataaaatttaaagaattgtttcgatttgaatatgagattgggtagttgagagtaatgtttgagagtattgtatgggttaatgataatatttttgaatagtttggaagtattaaaattgaagaaaataattatatttgtcgggtgtagtggtttacgttcgtaattttagtattttgggaggtcgaggcgggtagatcgtttgagtttaggagtttgagattagtttggttaatatggtgaaattttgtttttattaaaaatataaaaaaattgtttgggcgtggtggtaggtatttgtaattttagttatttaggaggttgaggtaggagaatcgtttgaattcgggagttagaggttgtagtgagtcgagattatgttattgtattttagtttgggtaatagagtaagattttatttgggcggggcggggtagaaaataattatattgtaataatttggaaaaaaaatgtttatatagtattaatgtgtgataattattttatatattttagaaatgaggtttgagagtttttattgattatgtgttatatttatttattttgggattttttttattttatttttaatttttttttagttgtttaatgttttttggagttttttatttaagatttttattttttttttttttttttttttttttttagtttttttttagttgtttaatgttttttggagttttttatttaagaattttagtttttttttttgggggtgggggaggacggggttttatttttgttgtttaggttggagtgtaatggcgcgatttcggtttattgtaattttcgtttttcgggtttaagcgatttttttgttttagtttttcgagtagtcgggattataggcgcgtgtcgggattatacgtgtgagttattacgtttagtttttttatttttttaaaggggttaattttttggtttttgtattttgatttttttattattttaattgttattttgtgttttgtttttttttaagggttgtatttttattttgttgaatgttatattattggatttatgaataattgttaatgtattataattgtttgatattttgatttattagaatgaatatttttataagtaggattggatcgaatttgtttataattggaattttggtgtaaattttagttttaagggatataaagtataaaatatttgcgaaatagaataagtttttagattttatattggtatgtatttttgttttatgttaaagatgtgacgatgtgattaaatacggaagttttgttttgttattgagttaaggttttgttttgttatttaggttggagcgtagtggtgtaattatagtttagtgtaatttttaattttcgggtttaagcgatttttttagtttagtttttttaatagttgggattataggtaggtattatcgtatttaattaatttttaatttgtgtgtgtgtgtgtgtgtgtagagatagggttttagtagttgttttttaaagttttgggattataggtatgagttattatgtaggatttgttttgttttaatatttagtaattgggtgtaaagttttttaaaaaataggtggggtaggtgggaaattttttttgtgtgattttttagtattagggataaaattttaattttattttaaagcgataatatatttttttaagattaagtgcgaaatagtaaagggaagagttagtttcgtagtcgttcgttatagaatgttataagtttttaattatgggataaaattggaatatatggaaattttgtgtagattttcgtgatatttttttttttttttaagtttttttttatagattttgcgttttatacgattattttttaggggtcgagtaggacgatttgggttttattattcggatttagcggtgtttttataaaagcgttttaaaaattttagttggggtagttttggggtagatgttgaaaagttgttagaggttttcgggtagtttcgagatttattttaggttagagggtttgattttttttaaatgcgacgtttttttattttggttgatatttacgtttttagaaaagggtggaatttaggttggacgaggcgtagggttaaagtttaatttttttaagttttatttagtttttagtatttttttaggcggtttcgtggggtagggcggagtcgggtttaacgtatttcgtttttttcgttttatttatttagggttagggagcgtttcgagagttggtttttttttacgttgcgcgcgtattttttcgtttttatttttattcgttggcgtgtttagtggaacggagttttgtgttttcgttttaagttttcggatgtttattttttcgattcgttttcgttgtggtttcgttttcgcgcggtttttcgtgttacgttatcgtttgcgtcgttttcggaggcgtagcgggcgatgacgtagagggacgtgttttttatatgaggttggggagcggttgagtcggtttttttcgttcgttttttttttttttcgagcgtcgtttcggttgtatcgcgttcgtttcgagttttaggttcgtgttaagttagcgtcgtcgtcgtttttttttagtcgttattatgattatttatcgggattttattagtcgtgagtttttattgtattatttttattgtcgtatacgggggtttggggtgcgggtgggggcggggaaggcgtagtcgtcgcgggtttaggggacgtcggcggttttagtcgagcgcggaggggtcggtgttcggggttcgcgtttagttttggtgtgttacggaggggtagatttcgcgtgcggtcgtcggcgcgggaaatgcgggaaatggcggcgttaggcgtacggtgatgggcggttttgtgtattcggtaga

SEQ ID NO: 342 - DNA, 5380 bp, Artificial Sequence
  chemically treated genomic DNA (Homo sapiens)
tttgtcggatatatagagtcgtttattatcgtgcgtttggcgtcgttatttttcgtatttttcgcgtcggcggtcgtacgcgggatttgttttttcgtagtatattagagttgggcgcgagtttcgggtatcgattttttcgcgttcggttaagatcgtcggcgttttttaggttcgcgacggttgcgtttttttcgtttttattcgtattttagattttcgtgtgcggtagtaaggatagtgtagtgaggatttacggttgatgaggtttcggtagataattatgatggcgattgaagggagacgacgacggcgttagtttagtacgagtttgaaattcggagcgagcgcggtgtagtcggagcggcgttcggggggaggggggagcgggcggaaaaggtcgatttagtcgttttttaattttatatagagggtacgtttttttacgttatcgttcgttgcgttttcggaagcgacgtaggcggtgacgtggtacgaagagtcgcgcgggggcggggttatagcgggggcgagtcggggaggtgagtattcggggatttgaggcggagatataaggtttcgttttattgggtacgttagcgggtaggggtgggggcggggaggtgcgcgcgtagcgtgggaggaggttaattttcggggcgttttttagttttgggtgggtggagcgggggaagcggagtacgttggattcggtttcgttttattttacggggtcgtttggagaggtgttgggagttgggtggagtttagaggaattaaattttggttttgcgtttcgtttagtttaggttttatttttttttgggaacgtgagtattaattaaggtaggagaacgtcgtatttagggagggttaggttttttggtttggggtagatttcgggattgttcgagggtttttgataattttttagtatttgttttagggttgttttagttggagtttttgggacgtttttgtgggggtatcgttgagttcggatagtgggatttaagtcgttttgttcggtttttggggaataatcgtgtggggcgtaaggtttgtgggaagggatttggagaggagggaagatgttacgggagtttgtatagggtttttatgtgttttaattttgttttataattgaaagtttgtggtattttgtggcggacggttacggagttagtttttttttttattatttcgtatttggttttggaaaagtatgttgtcgttttaagatgaagttgaaattttatttttggtgttagagggttatataaagggagttttttatttgttttatttgttttttgaaggattttatatttaattattaagtattaaaataaaataggttttgtatggtagtttatgtttgtaattttagaattttgggaggtaattattgaaattttgtttttatatatatatatatatatataaattaaaaattaattgggtgcggtggtgtttgtttgtaattttagttattagggaggttgagttgggaggatcgtttgagttcgggagttggaggttatattgagttatgattgtattattgcgttttagtttgaatgatagagtaagattttggtttaatagtaaaataaaattttcgtatttagttatatcgttatatttttggtataaggtaaagatatatgttagtatgaagtttgaaagtttgttttatttcgtaaatattttgtgttttgtattttttagaattaggatttgtattaagattttaattgtgaataagttcgatttagttttatttatagaagtgtttattttggtaaattaaagtattagataattataatatattaataattgtttataaatttaataatatagtatttagtagagtaagaatgtaatttttgggaaagagtaggatataggatggtaattggaatgatggaaaagttaaaatgtaagagttaagaaattaatttttttaagaagatggggggattgggcgtggtggtttatacgtgtgatttcgatacgcgtttgtaatttcggttattcgggaggttgaggtaggaggatcgtttgaattcgggaagcggaggttgtagtgagtcgagatcgcgttattgtattttagtttgagtaataagagtgaaatttcgtttttttttatttttaaaaaaagaagttggagtttttggatggaaaattttagaggatattgggtaattgggaggaagttaaaaaggggggaaagggaaaaaaaaagatgggggttttggatggaaaattttagaggatattgggtaattgggaggaagttaaaaatggggtgaaagggattttaaaataaatggatatgatatatggttagtgaaggtttttaaattttatttttggaatgtatgagatgattattatatattaatattgtgtgaatattttttttttagattattatagtataattattttttatttcgtttcgtttagatggggttttgttttgttgtttaggttggagtgtagtggtatgatttcggtttattgtaatttttgattttcgggtttaagcgatttttttgttttagttttttaagtagttgggattataggtgtttgttattacgtttaggtaatttttttgtatttttagtagagatagggttttattatgttggttaggttggttttaaatttttgagtttaggcgatttgttcgtttcggttttttaaagtgttgggattacgggcgtgagttattgtattcggtaagtataattattttttttagttttaatatttttaaattatttagaaatattattattgatttatgtagtatttttaaatattatttttaattgtttaattttatatttaggtcgaaatagttttttaagttttataaaaatatagtcgtggtgaaaaaaagtattgaagagttatggtattttagattaaaattttgtttttggtcgggcgcggtggtttacgtttgtaattttagtattttgggaggtcgaggtaggtggattatttgaggttagtagtttgagattagtttggttaatatggtgaaatttcgtttttattaaaaatataaaaattagtcgagtttgttggcggttgtttgtaattttagttatttaggaggttaaggtaagagaatcgtttgaatttgggagacggaggttgtagtgagtcgagattgcgttattgtattttagtttgggtagtagagcgagattttgttttaaattataaataataataaaaattttattgataaaattgcgggttttgaaaagaaaagattttgaatatttaattaatgagaataaatagacggttgagaaataatttagtgaatagtgaataattttatttaaaatgaaataagaatagaaaagaaaaattatatataaaggcgaattatagtaaaggtgagtattattttgtgaagtttttattttatttttattttattttattttattttattttattttattttattttattattttttgagaatgaatttcgttgtgttgtttaggttggagtgtagtggtattatttcggtttattgtaatttttggtttttaggtttaagcgatttttttgttttagttttttgagtagttgggattataggtacgcgttattatttttaggtatgttttagatttatgtatgtatgaatgtattagattttatatatatttttttttgtggttataagttaagtgttttgaaatttattgatttgggtaaattttttttttaaatatattatttggtattataaattttttaattttagtaaatgatttttttaaatgattttagtgttttgtgaatatttatatttgattttagtttatttgaataatttttgttagaaagagaaaatagttaaatggagatttggtttgttgtgtaggggttgagagaagtgtgattattttgattttttattagtaggaaattgtttaatagttatattttgaaagtaatttgaggtaattgtaggagggttgtatggcgggaaagaaattgttgaaaataggttgggtgagttggttcgtatttgtgattttaatattttgggaagtgaagttgggcggattatttgaggtgaggagtttgagattagtttgtttaatatggtgaaatttcgtttttattaaaaataataaaattagttaggtatggtggtaggcggttgtagtttcggttattcgggtggttgaggtttgagaattgtttgaatttgggaggtggaggttgtagcgagtcgagattgtattattgtattttagtttgggtgatagagcgagattttgttttaaaaaaaaaaaaaagaaattgtagaaaatttttttttttttttttttttattattgtttttgattagttaaaaaaaaaaaaaaagtcggttgggcgtggtggtttatgtttgtaattttagtattttgggaggtcgaggtaggtggattatttgaggttaggagtttaagattagtttggttaatatggtgagattttgtttttattaaaaatataaatattatttggacgtgatggtaggcgtttgtaattttagcgattcgggaggttgaggtaggagaattatttgaattcgggaggtggaggttgtagtgagtttagatagtgttattgtattttagtttaggtaggttaaggtgggaggtttatttgaggtagagtttgagattattttgggtaatatagcgagattttatttttgaaaaaaaaaattgttgaaaatattttagttttttttttttttgaaaaagaagttattgtttatagaaataaaaggcggttcggcgtggtggtttacgtttgtaattttagtattttaggaggtcgaggtgggtggattacgaggttagaagattaagattattttggttaatatggtgaaatttcgtttttattaaaaaatataaaaaattagtcgggcgtggtggcgggcgtttgtagttttagttatttgggaggttgaggtaggaaaatggcgtgaattcgggaagtagagtttgtagtgagttgagatcgcgttattgtattttagtttgggcgatagagtaagattttcgttttaaaaaaaaaaaataaaaggtatagatttcgtttaaattgttattttttttataggttatttttgattattatgtttaaaattataatttttgttttttggaaatttttgtgtttttgttttttttttttttgagacgggattttattttgttgtttaggttgtgaagcggtataattatagtttattgtagtttttatttttttttttagtttttcgagtagttgggattatagatacgtgttattatgtttggttaatttt

SEQ ID NO: 343 - DNA, 6031 bp, Artificial Sequence
  chemically treated genomic DNA (Homo sapiens)
aagtattgtattttttttttttaaattaattatttattaaaaaatggaaaagaattttatatgtattttaaaatagtaaaatggaaagtgaatttttaaaatatatgtattaaaagtttattttaatttttagtgggattttttttatgaaattttttataatttttttttggagtattataagatttttaatattttataaattaattgtgatattagtggaattataagtaaatatatatttttagtggaaatagattatgaatgaaagttaagtattttattttaaagttaaaatatgagatttttattaaaaatattggttataatagggagaggttttttatttgttttgagtaaattttttaattttttttgatgatatagtttagagtatatatattttggtgatggattaagagtaatatttttttatgtgaaagatagtttattattattattgtgatatataattaatagtaatagttaatattaatattttatatatattaggtagtatgataagtattttattattttattgaatttttataatagattattgaggtagggattattgttattattattttataaaaggaaattgaggtttagtttttaagaagttttggttattaaggggtatttatttatataatttttattttttttaggtattaaaagggggaaaaggtttaatagttaaaatagttattaaaagattttaaagttggggttttgtatattatgaaaggattatttttatttttatgtaagggtatgtttttataaaaaataaatatgggttaggcgtagtgatttacgtttgtaattttagtattttgggaggttgaggcgggtagattacgaggttaggagattgagattattttggttaatatggtgaaattttgtttttattaaaaatataaaaagttagttaggcgtggtggtaggtgtttgtagttttagttattcggaaggttgaggtaagagaatggcgtgaattcggtaggtggagtttgtagtgagtagagatcgcgttattgtattttagtttgggcgatagagtaagatttcgttttaaaaaaaaaaaaaaaaagtttaaaaattagttaggtgtggtgatgtgtatttgtagttttagttatttaggagggtgaggtaggaggattatttgagtttagaagtttaagattgtaatgagttatgattatgttattgtattttagtttaggtaatagagtgagattttgtttttaaaaaaataaaaataaagtaagtatataataggttaatttagatggagttaggagggtttataagggtagatatattttagtaaagaggaaataggtaaattaatgttgttttagtgtaataaggaatgtttataatgatgaattttagttataaagaaaaggtgaaattatatttagtaatttatgttaggaaagtagaaaattatttaatatgtttggaaagattttaattagagttaattgaataaaaattttggatatttgaagagaaaagtatttagttttatttaattttaatatgtacgtgaattagtttatgttattttaataatgtatttttattgtttttttttatgaaataggaaagtaaaattgaaagaattattttttgtgtttttaaaattagttttttttaatatttgatatttaattaaagttagataatatgtaatatgtttttgaataataatttaattagaaaatattgtataataaattattaagaaattattatattaattataaaaggaatatgttaatataataaatgtttatttaatatttattgttattttaaatattgtgttagaatttgattattcgaagatgaataatagtttttgttttttggaaggttataatgtagaagtaattttttgtattagatatttttttgagtgttaagtgtattagtaattatgttgtaaattttagtgtaagttaagaagtaatattattattattatttttttatgattttgtgataatttggtatttttaatgtttgttaatttttatgtttttatttttatgaaattatgtagagtttgttataatttttagtggggtttggattaaaatgtttttttgatgtagtagaagatatatttttttttattttatattgttttttttaaatattaagaataatgagtaaaataaattgattttaaaattattaggagatgttttatttattaagtgaaatatttagattaaggaattttttttatataatttatatagtatttaggatatttagttattttgtgtaaaatgaagagattagattttattatttttaaatttttaaaaattatttttagtaagaaaattttttaaatttttttgtttttgagttaggtttttattatattgtttaggttggatttaaatttttgggtttaagtaatttttttgttttagttaatggagtagttgggattgtaggtgtattattagtttatttgtgtttttatttgtgataatcggaggatttaaaattttttattaatatacgtgaggatagaaattaaaatgtttaatgagtggaaaaaaatttatttttattgttgaaatggtaagtaattttttaaaagtattttaattattattatttttatattaaaaaattaattgattttgtatatttttaaaattataaagatattttttttatatatatttaattttttatggttttaatgaaatagataagaagttaatattttatattgaggtatagtgttgattttaaaagattgtaaaagattgatagtaaatatgtagtaagaaagtttttttaaataatatattgttgggtatagtgatttatatttgtaattttagtattttgggaggttaaggtgggaggattatttgagtttaggagttttgaggttagtttgggtaataaagtaagattttatttttataaagaaattaaaaattagttgggtatggtggtatacgtatgtggttttaatatatatgggaggttgaggtaggaggattatttgagttagggaggtcgaggttgtagtgggttatgtttatattattgtattatgatttgggtaataaaaatatataaatgggttgggcgtagtggtttacgtttgtaattttaatattttggtaggttgaggcgggtggattatttgaggttaagagttttagattagtttggttaatatagtgaaattttgtttttattaaaaatataaaaaattagttgggtgtggtggtgggtatttgtaattttagttattcgggaggtttaggtaggagaatcgtttgaattcgggaggtagaggttgtagtgagttaagattatattatcgtattttagtttgggaagtaagagtaaaattttgttttataaaaaaaatatatatatatatatatatatatatatatatgtaaaatttattttaatatttataaatgttgtatttataaaatatataaataatatatattatttggtatttttttaatttataaaggtatagttgttttaattaaagggatttttggttaagtcgtggttttaagaatagtttgaaaatttttttgtttttaaaagatataaaatagtaagtaaaatggaaggatagatagatttttagtttggtttgattggagttgtatgtttaattaaggagttgaaaaatagaggcggaggttgtagtgagtcgagatggggttattgtattttagtttgggcgatggagtgagagtgatttaaaaaaaaaaaaaaaagaaaaagaaaaagaaaaataatatttattaatagtttttatttgtgcgtgttagtaatagtttataatgatgtttttatatgtttttagttaggttttttttgtgaatgtgatttttatttagacgttaattttgaagggaattaatattacggttttgtttttattagggttgtattaaaataattgaaattgttatatattattaaatttaaaattttataatattttgaatgatattgtgtttataaaattgacggtgatgtgtaatgatgattaatgtaagttattatgaagaatttttatgggaagtaaaaatttaattaagatggaagtatttatttttgtattgtgtaaggtaatgaagatttgaaggaagtttgtttttaagggtttggattttgatagcggataggtatataaatatagtattaggtaaaatacggtttgtattattatttatgggtgggtatagaggagaaattttgatttacggaatgattttttggagaagaaattattatttggttttttgtgaaataaaggttttatattttatttttgttaacgtatagtatgaaggtttttaagtttaaaaaaaattattaattagaggattattgggtattatttaaggtaagtgtatgattttagagtcgggagaaatttgcgtttgagttagaaatgtattagtttattattattataagagtaagttagtgatagaatagttttttgatcgttagtgtagtgtttttttatttgattaattagttattaaggtttattggtaagtttttcgtatttttttttttttcggtattagtttttttaagtcgattttgtgaaatatttgttaattttattttgaattagagtttcgattttcggaatagttttgtttatatttttgggattcgattcgttttgttgatttcggtattcgaggggcgggttggttggaatttattttattaggttttttttaattttatacggtgtttatttttgttcgtaggacggcggttcggaagtgacgtagtggaagcggaagtggtgtagtggtgtcgattttttgttgtttgaggtcgggttgggggtgtgcgattgtgtgggacggtttggggtagtttagtagcggttgattttttgtttgcggggaagggagtcgttaggcggtcgttatggcggtgtcggagagttagtttaagaaaatggtgtttaaggtgaggttgcgacgcgttcgttttttagggcgcgtttatcgttttttttcgcgttttgtcgagttcgtttcggtttagttaagtaagttttttagacgggtcggaagtttcggtgtagtttttagcgatttttttagaatttcgtttcgaggcgtttgtcgtttggtgcgggaattttcgtacgggagttgggagggtgggggacggcgatagttaataaaggcgtggagcggaggttatttgatatttgtcgtttattcgttttttttttttttattgagtttggagttgtttgtggggtagtgtagtttttcgtttgtttttataaatataaataagggattatatttagttgtagatttgaggtaattttttatttttgttttaatttagggattttttagttttagttttttttttgtcgattcgtagagagtgtggtttttttagttttgtattttttagaaaagaagcgaaaatattagttttttattgttttaggtgaaatatatattattattattttagggattttttaagagtaattatttttaagtgtatgttttttataacgcgtatttatttgttttgagtttaatttatgatttttacggtttaagattagtgtttttttttttaatttttaaaaaagtagttaagtattttgtattttaaagttatgatttatttatataattattttaaacgtggtattttatattagagtggaatggtttttgttatgttttgttgtaattttttaaaattatgtaaaatgattgagagttgagttttgattagtttaacgtgttagtttgggatagttttgttaaagtaagaatggtagtaattagcggtttaagcggttttaatttttaataaaatatattattatgtgtaaaatttttttaaaaatagattttttttagttaaatcgtttttatagtttttgattgaagattaaataatttttaaggagaaaatgatagtttttaaaata

SEQ ID NO: 344 - DNA, 6031 bp, Artificial Sequence
  chemically treated genomic DNA (Homo sapiens)
tattttgaaagttgttattttttttttagagattatttggtttttaattaagaattatgggggcgatttaattggaaaaagtttgtttttaaaaaagttttatatataatagtgtgttttattaaaaattgaaatcgtttaaatcgttgattgttattatttttgttttgataaaattattttaagttaatacgttgaattggttaagatttaatttttaattattttatatagttttggaaaattataataaaatataataaaagttattttattttggtgtgaggtgttacgtttgaagtaattatataaataaattatggttttaaaatataaaatgtttaattgtttttttaaaaattgaaaaaaaaaatattagttttgagtcgtgaagattataaattaagtttaaagtaaataaatacgcgttataagaagtatatatttaaaagtagttatttttagaaaatttttgaaatggtaatggtatgtattttatttggggtagtaagggattggtattttcgttttttttttggagaatataaaattgaaaaggttatattttttgcgggtcggtaaaagaaaggttaagattggaggatttttagattgggataggagtagaggattgttttagatttataattaagtatgattttttgtttgtgtttataaaaataaacgaaaaattatattgttttatagatagttttaaatttagtggaagagaggagggcgggtgggcggtaggtgttaggtagttttcgttttacgtttttgttgattgtcgtcgttttttatttttttagttttcgtacggggattttcgtattaggcgataggcgtttcggggcggggttttgaggaggtcgttaaggattgtatcggggttttcggttcgtttgggaagtttgtttggttgggtcgggacggattcgatagggcgcggaagggagcggtgggcgcgttttgggaggcgagcgcgtcgtagttttattttggatattatttttttgagttggtttttcgatatcgttatgacggtcgtttggcgattttttttttcgtaggtagagggttagtcgttgttgggttgttttagatcgttttatataatcgtatatttttaattcggttttaaataataggaagtcggtattattatattattttcgtttttattacgttattttcgggtcgtcgttttgcgggtaagggtggatatcgtgtgggattgagaggggtttggtggggtgggttttaattaattcgtttttcgagtgtcggaattagtaggacgaatcgggttttaaagatgtgggtaagattgtttcgagggtcgaaattttggtttaggataagattagtaggtattttatagagtcgatttaaggaagttagtgtcggagagggaagaagtacgaagggtttgttagtgagttttaatgattgattgattaagtgggagggtattgtattggcggttagagaattgttttgttattgatttgtttttgtgataatggtaggttagtgtatttttagtttaggcgtaaatttttttcgattttaaagttatatatttgttttagatgatgtttagtggttttttaattaatgattttttttaagtttaaagatttttatattatacgttggtaagggtaaagtgtagagtttttgttttataagaagttagatagtaattttttttttaggaaattatttcgtaagttagaattttttttttgtatttatttataaatgataatataggtcgtattttatttggtgttgtatttgtgtatttgttcgttgttaaaatttaagtttttgaaggtaggttttttttagatttttattgttttgtataatgtaagggtaggtatttttattttaattgaatttttattttttataaaaattttttatggtgatttatattagttattattatatattatcgttagttttgtaagtatagtgttatttaaggtattgtaaaattttgagtttgatgatgtgtgatagttttaattattttagtatagttttaatgagaataaggtcgtagtattgattttttttaaagttggcgtttaagtgaaggttatatttataaggagggtttaattgaaagtatgtggaagtattattataaattgttgttaatacgtataaataaaggttattaataggtattgttttttttttttttttttttttttttttttttttgagttatttttattttatcgtttaggttggagtgtagtagttttatttcggtttattgtaattttcgtttttgttttttagttttttagttaagtatatagttttagttaaattaaattagaggtttgtttgtttttttattttatttgttgttttatgttttttaaaagtaaaaaggtttttaaattgtttttaaagttacggtttaattaggagtttttttaattaaagtaattgtatttttgtgagttggaggaatgttaggtaatatatattatttatatattttataaatgtaatatttataaatattaaaataaattttatatatatatatatatatatatatatatatatattttttttatgagatagagttttgtttttgttttttaggttggagtgcgatagtgtgattttggtttattgtaatttttgtttttcgggtttaagcgatttttttgtttaagtttttcgagtagttgggattataggtgtttattattatatttagttaattttttgtatttttagtagagataggattttattatgttggttaggttggtttggaatttttgattttaggtgatttattcgttttagtttgttagaatgttgggattataggcgtaagttattgcgtttagtttatttatatatttttgttgtttaggttatggtgtagtgatgtgaatatggtttattgtagtttcgatttttttggtttaagtgatttttttgttttagttttttatgtatattgggattatatgcgtgtgttattatgtttagttaatttttaatttttttgtaaagatgaggttttattttgttgtttaggttggttttagaatttttgggtttaggtgatttttttattttagttttttaaagtgttgggattataggtgtgagttattgtgtttagtaatatattgtttaaaaaagtttttttgttgtatgtttattattagttttttgtaattttttagggttaatattatattttaatataaagtgttaattttttatttattttattggaattatggaggattgaatgtgtgtggggaaaatgtttttgtggttttagaaatatgtaaaattagttaattttttaatgtgaaggtaatagtagttgaaatgtttttgaaaagttgtttgttattttaatagtaaagatgagtttttttttatttattaggtattttgatttttatttttacgtatattagtggagaattttaaatttttcgattattatagatgaaaatataaataagttgatggtgtatttgtagttttagttattttattggttgaggtaggaggattatttgagtttaaaagtttgagtttagtttgggtaatatagtgagaatttggtttaaaaataaaaagatttaaaaagtttttttgttaaaaataatttttaaaagtttgaaaatgataaaatttagtttttttattttatataaaataattaaatattttgggtattgtgtgaattatatgaaaaaaattttttaatttgaatgttttatttaataaatgaagtattttttggtgattttaaaattagtttattttatttattatttttaatatttaaggaaaataatgtaaaatgggaaaaaatgtattttttgttatattaaaaaagtattttaatttaaattttattaaaaattataataagttttgtatgattttataaaaatgaaaatatgaaagttaataagtattgaaaatgttaaattattataaaattatagggaggtggtggtggtgatattgttttttgatttatattgggatttataatatgattattaatatatttaatatttaaggaaatatttgatatagagaattatttttatattgtggttttttagagggtaaagattattatttattttcgaatagttaaattttaatatagtatttggagtaatagtaggtgttaaataaatatttgttgtattgatatgttttttttataattaatgtaatgattttttggtaatttattatataatattttttggttagattattgtttaaaagtatattatatattatttaattttaattagatattaaatattagaaaaggttagttttaaaaatataagaaatagtttttttagttttatttttttattttataaaaaaggatagtaagaatatattgttagagtaatatgaattaatttacgtgtatattgaaattagatagaattaaatgtttttttttttaaatgtttaaggtttttatttagttaattttggttggaatttttttaagtatattaaatagttttttgtttttttaatatgggttattgaatataattttattttttttttatgattaaagtttattattataagtattttttattatattaaaatagtattagtttgtttattttttttttattaggatgtgtttgtttttataaatttttttaattttatttggattaatttattatatgtttgttttatttttatttttttagagatagggttttattttgttgtttaggttggagtgtagtagtatgattatagtttattgtaattttgaatttttgggtttaagtgatttttttgttttatttttttgagtagttggaattataggtgtatattattatatttggttaatttttaaattttttttttttttttttgagacggagttttgttttgtcgtttaggttggagtgtagtggcgcgatttttgtttattgtaagttttatttatcgggtttacgttatttttttgttttagtttttcgagtagttgggattataggtatttgttattacgtttggttaattttttgtatttttagtagagatagggttttattatgttagttaggatgattttaattttttgatttcgtgatttgttcgttttagttttttaaggtgttgggattataggcgtgagttattgcgtttagtttatgtttgttttttataaaagtatgtttttatatgagaatgaaagtaatttttttatggtgtataggattttagttttagggttttttgataattattttggttattaagtttttttttttttttagtgtttagaaaaagtagaggttgtatggataagtgttttttaatagttaagattttttgaggattaaattttaatttttttttataaaatgatgatggtaatagtttttattttagtggtttgttgtgaggatttagtaaaataataaagtgtttattatgttgtttggtatatatgaagtgttgatgttaattgttattattagttgtatgttataatagtaataataagttattttttatataagaaaatattgtttttgatttattattaaagtgtgtgtattttgaattgtattattaggagaggttaaaggatttgtttagaataaataaaaaatttttttttattatgattaatgtttttaatgaaaattttatattttggttttaaagtaaggtgtttggtttttatttataatttatttttattaaaaatatatatttgtttatggttttattaatattataattagtttatgagatgttggagattttgtaatattttaggaagaggttatggaaaattttataaaggaagttttattggaaattaaagtaaatttttaatgtatatattttaaaaatttattttttattttattattttaaagtgtatgtaaaatttttttttattttttggtaggtaattaatttgaagaagggaaatataatgttt

SEQ ID NO: 345 - DNA, 5654 bp, Artificial Sequence
  chemically treated genomic DNA (Homo sapiens)
ttgtgggaagatttattatttttgatttaatcgttttaataattatggattgtttaggttttttatttttttttgtattagttttgataagttatatattttaggaatttatatattttattttagtttttatgtttattggtatttattataattttaatgttcgtttattagtatttagttttattttttatttttaatattatttatttgtgtttttattgtttttttttttagtggttaaatttgatattatttttttgttttattaaatgtttcgtggatttttggttttgttgattttttttattgtgattttgttttgttttatttatttttgtttattttattttttttatttatttggttttaatatattgttttttttttaatttttttaaattaagaagaggataatttttaatttttaggttttttaaatttttttttcgttttaatttttttaattattgttaattttatggttttttaaatttttaaggtatgtatttaaggttataaattttttttttaaatattatttaaattatattttttatattttgatatatggtatttaattttaatttttatttattttagtatttttttaatttttattatgattttttgtttattttaggagttttgtagtaatgtggtttttgttattgttataattgtagtatagtttttttataatgttgtttttttgttagagaaagtaatttatatgatattaattttttagaatgttttgaaatatgatttacggtaaaaatgtggttaatttttgtaaatgtgttttttgtatttgaaaataaggtatattttgatattgttgggtgtagtgttatgtttatatttattggaataagtttgttagttggtttgtttaaattttttatatttttattggaatgtttttatttgtttgatttattattattgagaaggtatagggtaaatttttgtttaattttttaagaaatttttaaattgtttttaaaggatttatattattttgtttttttattagtaaagtataaaggttttattttttttatagttttgtaaatatatggttttttttattttagtttttttagtgagtatgtaatggtattttattgtggttttgatttgtatttttttaatgattaatgatgttgagttattttttatgtgtttattagttatttatagttttttttggtgaaatgtttatttaatttttttgtttattttttaattaagtagtttgttttattattgagttgtaagggttttttatattcgtatagaattagtacggggtagggttatacggatttttttgtcggtgtttggttttggtattttttcggtaggtggttttttcgtttttagtacgtgagtggtttagaattttcgtagaagtaggttttatggggtgtggtcgaatttacgtcgggttttaatttttgtgttgtgttggagaagtttttaggtttttggttattaaatggttttaggaggggtattttttaaaagatttttatgtggggtttttgtgttagtatttttttgttttaatattttttttttatattttaggaagtgagtgttatagtttttattttttagaggggatttttaggtaggtttgttttgggggatagagatagggtttttttttggaaaggtgattttgataagttattgtatttttttgagttattttttttgtatttgtagtttggggttagtgttttttttgggggtatcgtttagttttaggtgggattaggtgaggcggtgaggtttaggttttaggtaagggaggtcgagcgggggttggtagagggcgggtggtttagaggggtagacggtagtgtgagttagtggtggtggtaaagtttttcgggtggatggtggacgtagagaggatggggtagtttttgtgtgtaagtatttgttaagttggtatggtgttttttaagttttttttattttttaaggtcgtggtttatttttgtttatgtttataaagatattttgggggtttttgaagttatttgttggtttagggttggtaaggtttgggagtcggttttttttagtttttatattggtaattaggtttaggttggtttggtcgagtaggggtttagggtgtttagtagttgttggggaggttagggttattataattgagtttttggggtagggattgtgggtagagaagttgtttggggaggtttggtttttagggtttagatttgatttttagtagtttttaaagggttatttatttttatattttttaggtttttatagtgtttatgaggggaatagtagagaggggttgagtgggtaggaaattttttagggagggtagggtttttgaatttcggttgtatattttgttttttggttttttagtttttgttttatttgttagagtattatttttgggttgtaagttttgtttttaggggagtgagttttttagttttttttgagagggttattggggtataggtaaagagaggagttgggcggggttgggggagtatattttatttggttttatttggtttttaaatttttttttttttttttattttttttagttttttatttgtttttgtttgttttttgttttttttttaaggttttttttattttgaattagtttttttttttgtggaataggggttggagtgtttattttggggagttttttgggttaggtggaggttgggtatagtggtggtatacgggtattattggttttttaaggtttttttggaattttcgagggtacgttttttttatagagttttttaagttgtttttttggtttttagtattttcgatttttatttttatttttatgtatttgttgtgtttttggggtttagagggatttttttttttttttttggggttttagtattagttaggtttgtaggtatatagtaggtgtttaagtaattacgagtgtcgggggatttgtttggagtcgaagttttattggttggttttttaatggggtaggtaggttggtgggtttggaggtgttttaggtatttgtgggttggcgtagtgatagagcgttttgttttcggtcgttttttttggttttttattgtttagaggtgttttttgtttaggttttattgttcggtagtttagggttttttggaagtaaaagaagggatattagagttcgaattttttttgtagttttttcggaataatgttcgaatttttttttttcgttaaaggttgatttttttttatttatttattttatttgttgtttttttattataggattttagttttgttgtaaggataggtgttaggtagggggtagtgttgattcgtcggttttaggtaggtgttttatttttaggttagaattttggtatagtttaattttgttttttgtcggtattgtttttttatattatatttttgtttattgttaggttttttggttatatcggtgggattatcgggtagttgttatttgtatgttatttatagaatcgggtttggggcgtttttttgagtcggacgtttttttattttttatagtgattttgaagggtaggtggaggtagggttggttttaggtttgggttttacgttttgttgttattgttttgatattttaaatatattttgaattaggggattttcgtttttattttgcgtgagtttcgttattgaggttaattttgattttagagttgggattttttgttgtaattattttagggcgtagttagggggtaggggtgcgggaaggtgggagacgtggagtagtagtcggggtttttggggttttttcggtcggttttatttttatttttgggaattcgggaagagtcggttttcgttttttgtttattaaattttttaaaggaagagggtaaataaaatcgttcgtttgtttagttggaaagcgatgatttagtcgttttcgtcgattttcgtttttaggttgattttagagagcgggcgtcgcggtttagttcgaattttttagtttttgggattttttttcggttcgggtcgtgggggcgcggtcggagtagttcgtattttagttcgggatattacgagggcgtagggaggagaacgggtttttttttttttttttattttttgagttttatgggttgttggtttagttttttttacgtgttttttaatttagtaaaggttattgtttttattttatagaagcgaaaatcgaggttaagagaggtggtcgtttttggcgtagttcgtgggtggtaagataggagttcggttcgttagggtagggttattttcggagagggtttttgggcggttttgggaaaggttttcgaataggacggaacggttagggttcgggagtaaggaagggggtttcgattttttttttgtttcgggagttcgagagcggtagggttggatttggggcgtttggagggtgaaggtttggtttcggttgtttttttacggtgggtcggtttcgggttcgcgggtgtttttcggggtttttcggcgtgagttatcgcgggtagggttggttgtagcgtattttttcgcggggtcggtttgcgagacggtgcgggcgagcgttcgggcggggcgggatttcgagttattttacggggtcggatagttggggtacggggggtaagaggagcgcgggtttttgagatgggaggggacggtcggggatcgattagagcgcggacgcgacggtgcgggttcggacggttgggtttggggagggtatggttcggggcgcgcggggtttaggcgggcggggtggttcgagggtcggggcggggcggggaggggcggggcggggaggggtagttataaaggtcgcgtcggggttacgaggagtagagtcggcgtcgttatcgttcgtattgtcgtttttagtttcgcgttcggtacgatatgaaatttttcgacgaggtgttacgcgagggcgagttggagaagcgtagcgatagttttttttagttatggaagaagaagcgcggggtgtttattttcgatcgtttgagtttgtttttcgttagttttcgcgcgcgttttaaggagttgcgtttttattttatttttaaggtggattgcgtggagcgtacgggtaagtacgtgtattttattatcgttattatcgattataaggagatcgattttcgttgcgcgggcgagagttgttggaacgcggttatcgcgttggcgtttatcgatttttagaatcgtcgcgttttgtaggattttcgtagtcgttaggaacgtatcgtattcgtcgtattcgtcgaggacgtcgtggttgtcgcggtcgtcgtatttttcgagttttcggagttttttaggttattttcgtagtttaaatttcgtacgttatgagttcgtcgcggtgagtgattgttcgcgtttcggcgagttttgcgttttaatagtcgggatcggggtttttgggaaaaattattttaattttagacggcggggcgggggcgttgtatttttttgggggattcggcgtttcgtaatcgcgttggttttttcgcgttagggtttcggggttttttaggttggattcggatcggttttggtatagttttttgatttagttttttttttatagg

SEQ ID NO: 346 - DNA, 5654 bp, Artificial Sequence
  chemically treated genomic DNA (Homo sapiens)
tttgtggggaaaggattgggttagagagttgtgttagggtcggttcgggtttagtttgaggggtttcgagattttgacgcgagggggttagcgcgattgcggggcgtcgggttttttaaggaggtgtagcgttttcgtttcgtcgtttggggttgaagtggttttttttaaaggtttcggtttcggttgttagggcgtagggttcgtcgggacgcgggtagttatttatcgcggcgggtttatggcgtgcggggtttgggttgcggggatggtttggagggtttcgagggttcggagggtgcggcggtcgcggtagttacggcgttttcggcgggtgcggcgggtgcggtgcgtttttggcggttgcgaaagttttgtagggcgcggcggttttggaaatcgatgagcgttagcgcgatggtcgcgttttagtagttttcgttcgcgtagcggaagtcgatttttttgtggtcggtggtgacgatggtgaagtatacgtatttgttcgtgcgttttacgtagtttattttgaggatggagtggaagcgtagttttttggggcgcgcgcgggggttggcggggaataggtttaggcggtcggaggtgagtatttcgcgtttttttttttatagttggaagaggttgtcgttgcgtttttttaattcgttttcgcgtagtatttcgtcgggggattttatgtcgtgtcgagcgcgggattgggagcggtaatgcgggcggtgacggcgtcggttttgtttttcgtggtttcggcgcggtttttatagttgttttttttcgtttcgttttttttcgtttcgtttcggttttcgggttatttcgttcgtttgagtttcgcgcgtttcgggttatattttttttaagtttagtcgttcgggttcgtatcgtcgcgttcgcgttttggtcggttttcggtcgtttttttttattttagaagttcgcgttttttttgtttttcgtgttttagttgttcggtttcgtggggtgattcgaggtttcgtttcgttcgggcgttcgttcgtatcgtttcgtaggtcggtttcgcggaagaatgcgttgtagttagttttgttcgcgatgatttacgtcggggagtttcgggaagtattcgcgggttcggggtcggtttatcgtggggagatagtcgggattagatttttattttttaggcgttttaagtttagttttgtcgttttcgggttttcggggtagaaggagggtcgaggtttttttttttattttcgagttttggtcgtttcgttttgttcgggggttttttttagggtcgtttagagatttttttcgaaagtggttttgttttagcggatcgagtttttattttgttatttacgggttgcgttaagaacgattattttttttagtttcggttttcgtttttgtgaaatgggaatagtaatttttgttggattagggaatacgtggaaagggttagattagtaatttatagagtttagaaaatggaaggggaagaggaagttcgtttttttttttgcgttttcgtagtgtttcgaattggggtacggattgtttcgatcgcgtttttacgattcggatcggagagaggttttaggagttgaggggttcgggttgggtcgcgacgttcgttttttgggattagtttgggggcgagggtcggcgggggcggttgagttatcgttttttagttgggtagacgggcggttttatttattttttttttttaaagggtttaatagataggaagcgaaagtcggtttttttcgggtttttaggggtgggggtggagtcggtcgagaggattttagagatttcggttattattttacgttttttattttttcgtatttttgttttttagttgcgttttggggtggttatagtaggaagttttaattttggggttagaattggttttaatgacggggtttacgtaaaatgaaaacgagagttttttgatttaaaatgtatttaaaatgttaagatagtggtagtagagcgtaaaatttagatttgggattagttttatttttatttgttttttagggttattgtaaaggataaagagacgttcggtttagaggagcgttttagattcggttttgtgaatggtatgtaggtagtagttgttcggtggttttatcggtgtggttagaggatttggtagtgggtagggatgtggtgtggaggggtagtgtcggtagagggtagggttgggttgtgttagggttttggtttgggagtgagatatttgtttggggtcggcgggttaatattgttttttatttgatatttgtttttgtagtagggttgggattttgtggtgagggagtagtaggtagggtgggtgggtgaggggaggttagtttttggcggggagaggggattcgagtattgtttcggagaggttgtaggaaggattcggattttggtgtttttttttttgtttttagagggttttgggttgtcggatagtgggatttgggtaagaggtatttttgggtagtgggagattaggagaagcggtcgggggtagagcgttttgttattgcgttagtttataggtgtttggaatatttttaggtttattagtttgtttattttattgaggggttagttagtggaatttcggttttaggtaaatttttcgatattcgtggttgtttaagtatttattgtgtgtttgtaggtttggttggtgttgggattttagaggaggggagaggaatttttttaaattttaggggtatagtaggtatatgaggatggggataggggtcgggggtattggaggttaggaggatagtttggaggattttgtggggagggcgtgttttcgaagattttaaggagattttgaagggttagtggtgttcgtatgttattattgtgtttagtttttatttaatttagagaattttttaaagtgggtattttagtttttgttttatagaagaggaaattggtttaggatggagagggttttggggaagggatagagaataggtaggagtagataaggggttgagagaaatgagggggaggaagagggtttggaaattaggtgaggttaggtgaggtgtgtttttttagtttcgtttagtttttttttttgtttgtattttagtggtttttttaagggaggttgggaaatttatttttttgggggtaggatttataatttaggggtgatgttttgataggtggggtaggagttgggaggttagggggtagggtgtgtagtcgagatttagaggttttgttttttttaggggattttttgtttatttagtttttttttgttattttttttatggatattgtgaagatttggggggtatgggggtggatggttttttaggggttgttggaaattaggtttgagttttggaggttaggtttttttaggtagtttttttgtttatagtttttgttttaggggtttagttgtagtggttttggtttttttagtagttgttagatattttgggtttttgttcggttaaattagtttgaatttggttgttaatgtgggggttggagggagtcgatttttaagttttattagttttggattagtaggtgattttaggagtttttagggtgtttttatggatatgggtaaaaataaattacggttttaggaggtgagaggggtttggaggatattatgttaatttggtaggtatttgtatataggggttgttttattttttttgcgtttattatttattcgaggggttttattattattattaatttatattgtcgtttgtttttttgagttattcgttttttgttagttttcgttcggttttttttgtttgaggtttgagttttatcgttttatttggttttatttggggttgagcggtgtttttaggagaagtattggttttaagttgtagatgtagaaagggtggtttagagaggtgtagtgatttgttaaggttatttttttaaggagggattttatttttattttttagagtaggtttgtttgagggttttttttggaggatgagggttgtgatatttattttttgggatgtgggggagggatgttgaggtagaagagtgttgatatagggattttatatgagggttttttgaggaatgttttttttagagttatttgatagttaagagtttgggagtttttttagtatagtatagagattggaattcggcgtggattcggttatattttatgggatttgtttttacgagggttttggattatttacgtgttggaggcggaggaattatttgtcggagagatgttagggttaggtatcggtaggagagttcgtgtggttttgtttcgtgttagttttgtgcggatataaaaaatttttgtaatttaataatagaatagattatttaattagaaaatgggtaagagagttgaataaatattttattaaagaagattatgaatggttaataagtatatgaaaagtggtttaatattattagttattagggaaatgtaaattaaaattataatgagatattattatatatttattaaaagggttaaaatagaaaagattatgtatttgtaaggttgtggagaaagtggaatttttatattttattggtgagaaagtaaaatggtataaattttttggaaatagtttagaagttttttagaaagttaaatagaaatttgttttatgtttttttagtaataatagattaagtagataaaaatattttaatgagaatatagaagatttgaatagattaattaataagtttgttttagtggatatgaatataatattgtatttaataatgttagaatatattttgtttttaagtatagaaggtatatttataaaaattgattatatttttgtcgtaaattatattttaaaatattttaaaggattaatattatatggattgttttttttgataagagggtaatattatgagaaagttgtgttataattataataatgataaaaattatattgttatagaatttttaggataaataagagattataatggagattagaaaaatattaaagtgaatgaagattaaaattaaatgttatatattaaaatgtgggagatgtagtttggatgatatttaaaggaaaaatttataattttaaatgtatattttaaaaatttagaaagttatgagattgatagtggttagaaaaattaaaacgaaaaggaaatttaggaagtttgaaaattaagaattattttttttttaatttagagaggttagagaaagaatagtatattaaggttaagtaaatagaaggaataaaataaatagaagtgaatgaaataaaataaaattataatagagaggattagtaaagttagaagtttacgaaatatttaataagataggggaatagtgttaagtttgattattaagggggaaaatagtgaaggtataaataaataatattgagaataaaaaatgggattaaatgttaatggacggatattaaaattataataaatgttaatgaatatggaaattaaaatgaaatgtataaatttttagaatatataatttattaaaattgatataagaagaaatagaaaatttgaatagtttataattattagagcgattgaattaggaatgatgaatttttttataa

SEQ ID NO: 347 - DNA, 8044 bp, Artificial Sequence
  chemically treated genomic DNA (Homo sapiens)
ataagtttatttttaaaaaagtatttttggtttgataagtttaataaattttttatattttaatttttggataagatagagtaaaaagtattggttaaagatttttttaaggggttaggtatggttgtatgtatttgtagttttatttatttaggaggttgaggtggggggaattatttgagtttagagggttaaggttgtagtgaattgagattgtgttattttattttagtttgtgcgattttagtttgggttgttttaaaataaataaataaaaaattttttaaaaaattaatttggttaatatggtgaaattttgtttttattaaaaaatataaaaattagacgagtgtgaggcgggcggattatttgaggttaggagtttgagattagtttggttaatatggttaaattttatttttattaagaatataaaaattagttgggtatagtggtgtttttttgtaattttagttatttgggaggttgaggtaggagaattgtttgaatttgggagatcgaggttgtagaagttaagattgtgttattgtattttagtttaggtgatagagtgagattttattttaaaaatagaaataaaattagtcgtatatggtggcgtgtgtttgtagttttagttatttgggaggttgaggtgggtgattcgtttgaatttaggaggcggaggttgtagtgagttgagattgtgttattgttttttagtttgggtaatagagatagattttgttttaaaaaaaaaaaaaaattttttttttaagaaaatatagtatgggtttataaagagtaggttatgatttttattagagtattttgaattgatatgtttttgttattgtatttacgaagtaagcgggaagagtatgtatttatatataggtgtgatatatttgggcgggtattgaaataaagtttagttttagttagttatagagattaatgggtatttgttttatattagatattgattgattgggagttgagggggataaatgttagaagtttttgtttaagaaatgaggttttataggttttggttttgaaatggtgtaatttttattgttttttagagaggttgtgtatagagatattgtttatttttatttaatagttatttttaagtttttttttttggttggttggtagaatttatttttttgttgtaaagataggggtaggtgatttaattttggttatgaagagatgtagaggtttttgggaaagtttttatgattttaggaaataggattttgttttttttttttttttttattggtgggtgttgttgagggtatttaaaattttgggagtaaggtagttacgttggagttttgaaggtaaagaattagaaggttttagataaataaattgatgttttttagttttgatttttttaagaatttaattttagacgtgttatgtgaaaaaataagaattattaaataggtgggttaattgttgttggggattttgttagttgtatttagaagtattgagattgatatgatatgatagtggtgtattgggtaggggtgttaggtaatttgttggttttaattggttggtagaatatttttttagttagttttatttgttgtaaatgtaagggtaggtgatttgattttggttgtgaagagacgtagaggtttttgggagatttatttttagtgttttttataggtttagtgtaattgtggtttttaagattagtagaggagattataaagtaagtttatttgatttaaatttttagagttttagtagtatttaggaatatatgtagtttatttttagtggtgttttatagttttgaagattatttggttttatagggaagtaagtgaagggaatttaaatttttttgtagtagaatattttagttatttttgtttttagtatatgattgtgtgtgtgtgtatgtatatgtgagtgaatttaaagtttaggttttatgttaggtatagtggtttacgtttataattttagtattttgggaggtcgaggtaggtggattatttgaggtaagaagtttaagattagtttggttaatatttaatatggtaaaattagcgtggtggcgtatatttgtaattttagttatttaggaggttgaggtaggagaatcgtttgatttaaggaggtagaggttgtagtgagttgagattgttttattgtattttagtttgggggatttagtaagattttattttagaaaaaataataaaataaaataaaataaaaacgagttttaaagaatttttatagaaggggatttgttagggttggttttgtagatgtagaattattatgtggtggtggtaatttttatttataggggattaattattatgtggttatttaaggtagttttaattttatatttatttttttttattatttatttaattgttaagaggttttttttattagatggtgtgtgatggatgatttagggagtgtaaattaattttaattggttaaatttaatataaaaatagtaaatttgtttaaatgatttatcgtatttttattgggttagtttttttttttttattttcgatataaaatatagtttatttttttaataggaataggtagaaaaataagaataataaaataaaatagatatggtttttttgttttttttttttttttttatagttatttttatagtgagaggtttttaatggttttgtgtttgagttatattatcgtgggcgtgaagtatttttagttattttgtttttgttttaaaattttttataatgttttgtttgttttttaaggtaggatatatggtttgtttggttttttttttagttttagatttttttaggttgttgtagcgttgtagtgttcgttttaattggtttaatttttattttttgattttgttttgttttttttagaaattattttttggttttttgagtttttttttttgtaatatgtatttttatttttattttgttagtatttttttttaatattatatttaaatgttatttaagttaaaggttttttatgagagtaggggttgtgtttggcgttttatagtttttggtttatatttttttttttttttagagggggttttgttttgttgtttaggttggagtgtagtggcgtaatttcggtttattgtaatttttgttttttaggtttaagcgatttttttgttttagtttttcgagtagttgagattaggtgtgggttattattaacggttaatttttttttttttttttgtatttttagtagagaaggggttttattatattagttacgttggtttcgaatttttaatttcgtgatttgttcgtttcggttttttaaagttttaggattataaatatgaattatcgcgtcggacgttcggtttttttttttttttttttttaagatatttcggtttttacgttggttaggttggtttcgaatgttcgattttaggtgatttttttgtttcggttttttaaagtgttgggattataggtgtgagttatcgcgttcggtcggtttatattttttatttgtatttatttttttttttttgagatagggttttattttgtcgtttagttttaagtgtagtggcgttatttcgatttattgtaatttcgattttttgggtttaagggatttttttattttagttttttaagtatttgggattatagacgcgagttattgttcggttattttttgtatttttttgtagagacgggatttcgttatgttgtcgaggttggtttttaatttttgggttgaatttattttttcgttttagttttttaaagtgttgggacgataggtttgaattatcgcgttcggtttggtttatatattttaatggtatttattatatattgttaggtattgaggttatttttgtaatatttttttttttttattagattttatgagggtaggaattaggttttatttttttttgaggataaggattgttagataagtgtatggagacgtatttagattaattgtttgatttttttttttttttgggtttatttttttttttaagaggagggttgtgtgtgtgagcggggcgattggaaaatatagtgtttaggacgttgtattttgttttaggaattaagtatacgtttgggtaattaatgtggagtattttttttttttttgttgttatcgtttttttgtggttgtttggtaagtagtttagtatgaagagttgacggaattttgcggtgggttaggtggttttggcgtcgattgtttaaggcgattgttaatgattataatatattattgagttttggttttaaggcgttggtgtatatggtatttttcgaaatttttgtagggtcgttggagtaggagtttcgattttacgtttgggtagttgattcgtttaaggtttttagttgaaagcggaattgtaggggtgagaatgagtagatttaattatcgggtttttcgtatttggtttgtatttatttaggattacgataatttcgaaggttaggttggggtgttcgatgggtcgtgggtttgttgtttaattttttgagatcggcgggttgaatagagtttcgaagtgtagcgttattttgagtagaggaaggggcgttcgaaggtcgcgtagcgggcggtagggcgggaggaagtagtagttgttgtttttcgtttatttttttcgcgtgtgttttttcgttttattgttcgtcggtgagttaggtggcgcgagagcggaggggagaaaagatagcggttgtaggagtcgaaggtcgcggttcgaggtggggtaggggcgggtacgcgagcgtgcgtgcgtgggcgcggtttatagtacgtcgcgcgcggggcggatgttcgggtcggttgggtcggggtcgcggaggagatggcggaaggtggaggttgtcgtgagcgatcggatgcggagatttagaagttcgagtttggatttttaatgaggattatattttaacgcggggcgtagtggtgagttttcggttcgttttttttttatgtagaattaggggtcgagaaaaaggggttttttttttttcggttagagtaggggttgggcggggatggtatgtagtgattttggaagagtagtttgatatttgttttttaggagaataattttaggattagttttgggaaagcgtaggcggggtttgagtgtcgttttagtttatttggagttttagggggcgggttcggcgggggttaggaggagggatgtggagaaggggaaggttggtggggattttaagggtggggagagttttttattatgaggattcgtcgtgtgattttgggcgaaggtgttatagatttggattttttattgttaaaattaggatagtaatatttggtttatcgattttagtgggttgaggggaaaattagaagtagatattttgtaatttgtaaattgttaatagatgttaaggttagaagttgaataaatgtttgagaatttcgattattttggtagtaagtgttaaaaatatttgcggtagtagtgttttggagtgggagaggaggatagtttaggttttggagttagatagaagatgaagggtttagaatttagaagatttaggttgagttattaggtattttaatagattgtttagtagaggggataatattttgtattattggagagatttttgggtggtgtaattgtgtaggagtagaaaaattaaggttagattttgtatcgagtatgattgttatttattttgtttgttttgttttgttttgagatggagttttatttttgttgtttaagttggagtgtagtggcgtgattttggtttacggtaattttcgtttttcgggtttaagcgatttttttgttttagtttttcgagtagttgggattataggtttacgttattatatttagttaattttttgtatttttagtagagatcgggttttattatgttgggtaggttggttttaaatttttgattttatgatttattcgtttcggttttttaaagtgttgggattataggtgggagttatcgtgttcggttcgagtgttatttatttttaagaaattattgtggtgatgatttgtcgaggaattgagtaggagaatagaaaaattggggttaggaggagtatagataatagtttatgtatttattttgagttaattagtttgtgaaaggtagggtaaatagaggtattttttttgtgtttttttttttttttttttttttttttttttttttttgagaaggaatttcgtttttgttgtttatgttggagggtaatggcgcgatttcgggttacggtaattttttttttttatgtttaagcgatttttttgttttagtttttttagtagttaggattataggtatgcgttattacggtcggttaattttttttgtatttttagtagagacggggtttttttattttggttaggttggtttcgaattttagattttaggtgatcgttcgttgtggttttttaaagtgttgggattataggcggaagttattgcgttcggtttagtagaggtattttttaagttaatttttatagggtttataaagaatatttagtagaagtagaggaagtttaagatagattaaaattatatagtaaaattgtatggaaggtattgtttaagggatttggaagaaaaatagtattttagagatggatgtgtttatggatttttgtgtttagtgttgtttatgttaagtaaaatagtgtaattaaattgtttgtttggagtgggatttttgtaaagattattatgaaattaatgatttgtggtcgggtgcggtggtttacgtttgtaattatagtattttgggaggtcgaggtgggtagattatttgaggtagggagtttgagattgttttgattaatatggagaaattttgtttttattaaaaatataaaattagttaggtgtggtggtatatatttgtaattttagttacgggagattgaggtaggagaattatttgaattcgggaggcggaggttgcggagagtcgagattatattattgtattttagtttgggtaataagagcgaaattttgttttaaaaaaaaaagaagttaatgatttgtttattagtaaatatgattttatttatgaaaagattttatttagattgagtgtggtagtttatgtatgtaattatagtattttgggaggttaaggtaggaggattatttgagattaggagttcgagattagtttggttaatatggtgaaattttatttttattaaaaatataaaaaaattagttgggtttggtgatgtatgtttgtaattttagttatttgggaggttgaagtaggagaattgtttgaatttaggaggtggaggttgtagtgagttaagattatattattgtattttagtttgggtaataagagcgaaaatttcgttttaaaaaaaaaaaaaaaaaaaaaagaggttaggtgtagtggtttatgtttgtaattttagtattttgggaggtcgaagtaggcggattatttgaggttaggagtttgagattagtttgtttaatatggtgaaatttcgtttttattaaaaatataaaaattagttgggagtggtgataggtgtttgtaattttagttagttaggaggttgaggtaggagaatcgtttgaatttgggaggtagaggttgtagtgagttaagattgtgttattatattttagtttgggcgatagaataagatttcgtttaaaagaaaaaaaaagaaagattgtatttaaataagtattttgaaattatttgtttttttttttttatttattttttgaataattattttatttaatggatgtatattttgggttagattttttgtgttatgtggggtttgggttttgtttttgtttttgtgatagtgttttttagtgggtattgtatatgttttaagtggaaggattataaaaaagattaaggaagtagttgtagaaatttataattttagtttttttgttatagtaaatttttgtttttttttagg

SEQ ID NO: 348 - DNA, 8044 bp, Artificial Sequence
  chemically treated genomic DNA (Homo sapiens)
tttagagagagatagaaatttattgtagtagaaaagttgagattataaatttttgtagttgtttttttaattttttttatggtttttttatttggggtatatgtaatatttattaaaaaatattgttataagagtaagagtagggtttaggttttatatggtatagagagtttggtttagggtatgtatttattaagtgaaatgattgtttaaagagtgaataaaagaaagaaaataagtggttttaaaatgtttatttaaatgtagttttttttttttttttttttagacggagttttgttttgtcgtttaggttggagtatagtgatataattttggtttattgtaatttttgttttttaggtttaagcgatttttttgttttagttttttgattaattgggattataggtatttgttattatttttagttaatttttgtatttttagtagagacggggttttattatgttgggtaggttggttttaaatttttgattttaggtgattcgtttatttcggttttttaaagtgttgggattataggtatgagttattgtatttggttttttttttttttttttttttttttgagacggagttttcgtttttgttgtttaagttggagtgtagtggtatgattttggtttattataatttttattttttgggtttaagtaatttttttgttttagttttttaagtagttgggattataggtatgtattattaggtttagttaatttttttgtatttttagtagagatggagttttattatgttggttaggttggtttcgaatttttgattttaggtgatttttttgttttggttttttaaagtgttgtgattatatgtatgagttattatatttagtttaaatggagtttttttatgggtaaaattatgtttgttaataaataagttattaattttttttttttttgagatagagtttcgtttttgttatttaggttggagtgtaatggtgtgatttcggtttttcgtaattttcgtttttcgggtttaagtgatttttttgttttagtttttcgtagttgggattataggtgtgtgttattatatttggttaattttgtatttttagtagagatagggtttttttatgttggttaggatagttttaaattttttattttaggtaatttgtttatttcggttttttaaagtgttgtgattataggcgtgagttatcgtattcggttataagttattaattttataatgatttttatagaagttttattttaggtagatagtttggttatattgttttgtttgatatgaatagtattaaatataaggatttataaatatatttatttttaaaatgttattttttttttaaattttttgagtaatattttttatataattttattgtatgattttagtttattttaaattttttttatttttgttgagtattttttatgaattttatagaggttaatttaaaaagtatttttgttaggtcgggcgtagtagttttcgtttgtaattttagtattttgggaggttatagcgggcgattatttgagatttggaattcgagattagtttgattaaaatggagaaatttcgtttttattaaaaatataaaaaaaattagtcggtcgtggtggcgtatgtttgtaattttagttattggggaggttgaggtaggagaatcgtttgaatatgggagggggaggttgtcgtgattcgagatcgcgttattgttttttagtatgggtaataagagcgaaatttttttttaaaaaaaaaaaaaaaaagaaaagaaaagaaaagaaaatataaaaaaagtatttttgtttattttgttttttataaattggttagtttaaggtgaatatataagttgttatttgtattttttttaattttaatttttttatttttttgtttaatttttcggtagattattattataatgattttttaaagataggtaatattcgggtcgagtacggtggtttttatttgtaattttagtattttgggaggtcgaggcgggtggattataaggttaagagtttgagattagtttatttaatatggtgaaattcggtttttattaaaaatataaaaaattagttgggtgtggtggcgtgagtttgtaattttagttattcgggaggttgaggtaggagaatcgtttgaattcgggaggcggaggttgtcgtgagttaagattacgttattgtattttagtttgggtaataagagtgaaattttattttaaaataaaataaaataaataagatgggtaataattatattcgatgtaaagtttagttttagtttttttatttttatataattatattatttaggaatttttttagtagtataaagtattgttttttttattaaataatttattaagatgtttaataatttagtttgggttttttaaattttggattttttattttttatttagttttaggatttaggttattttttttttttattttaagatattgttgtcgtaaatatttttgatatttgttattaaaataatcggggtttttagatatttgtttagtttttgattttgatatttgttggtagtttataagttataaagtatttatttttgattttttttttaatttattgaggtcggtgagttaaatattgttattttggttttaatagtgaggaatttaggtttgtgatattttcgtttaaggttatacggcgagtttttatggtaaagggttttttttatttttagggtttttattaattttttttttttttatatttttttttttggttttcgtcgggttcgttttttagggttttaaatgaattgagacgatatttaggtttcgtttgcgtttttttagagttgattttggagttatttttttgaggggtaggtgttaggttatttttttagggttattatatattattttcgtttagtttttattttagtcgagaaaaaggaggtttttttttttcggtttttggttttgtatagaggaagagcgagtcgggagtttattattgcgtttcgcgttggagtgtggtttttattaagggtttaagttcggatttttgagttttcgtattcggtcgtttacggtagtttttatttttcgttatttttttcgcggtttcggtttagtcggttcggatattcgtttcgcgcgcggcgtgttatagatcgcgtttacgtacgtacgttcgcgtgttcgtttttgttttatttcgagtcgcggttttcggtttttgtagtcgttgttttttttttttttcgttttcgcgttatttagtttatcggcgaatagtggagcggaaaggtatacgcgagaggggtgggcggggagtagtagttgttattttttttcgttttgtcgttcgttacgcggttttcgggcgtttttttttttgtttaggatggcgttatatttcgaagttttgtttagttcgtcgattttagggagttaggtagtaagtttacgatttatcgggtattttagtttggttttcgaggttatcgtggttttaaataaatgtaggttaggtgcgagaagttcggtagttaggtttgtttatttttatttttgtaatttcgtttttagttggaggttttaggcgagttagttgtttaaacgtgggatcggggtttttgttttagcggttttatagggatttcgggaagtattatgtgtattagcgttttgggattaagatttaatggtgtgttgtagttattaatagtcgttttaaatagtcgacgttagagttatttggtttatcgtagaatttcgttagttttttatattgagttatttgttaagtagttatagaggggcgatagtaataggggaaggagaggtattttatattagttatttaggcgtgtatttagtttttggaataagatataacgttttgaatattatgttttttagtcgtttcgtttatatatataattttttttttggagggagaagtaaatttagaggaaagaggaagttaggtagttggtttagatgcgtttttatatatttgtttaatagtttttgtttttagagaaaaataagatttagtttttgtttttatagaatttagtagaaaagaagagatgttatagaaataattttaatgtttagtagtatgtggtaagtgttattaaagtgtgtgaattaggtcgggcgcggtggtttaagtttgtcgttttagtattttgggaggttgaggcggaaggataggtttagtttaggagttagagattaatttcggtaatatagcgaaatttcgtttttataaaaaaatataaaaaatagtcgggtagtggttcgcgtttgtggttttaggtatttgggaggttgaggtaggaagattttttgagtttaggaggtcgaggttgtagtgagtcgagatggcgttattgtatttgagattggacggtaaagtgagattttgttttaaaaaaaaaaaaataaatataaataaagggtgtgaatcggtcgggcgcggtggtttatatttgtaattttagtattttgggaggtcgaggtaggaggattatttgaggtcgggtattcgagattagtttgattaacgtggagatcgaaatgttttaaaaaaaaaaaaaaaaaaagatcgggcgttcggcgcggtggtttatgtttgtaattttaggattttgggaggtcgaggcgggtagattacgaggttaggagttcgagattagcgtggttaatatggtgaaattttttttttattaaaaatataaaaaaaaaaaaaaaaattagtcgttagtggtggtttatatttagttttagttattcgggaggttaaggtagaagaatcgtttgaatttgggaggtagaggttgtagtgagtcgagattgcgttattgtattttagtttgggtaatagagtaagattttttttaaaaaaaaaagggggtgtgaattaaaggttgtagaacgttaggtataatttttgtttttataggaagtttttgatttgagtaatatttgagtgtggtattgaaaaaaaatgttggtagaataaagatgaggatgtatgttataggaggggagatttaagggattagaagataatttttggaaaaggtaggataggattagagagtggggattaggttagttgaggcgggtattataacgttataatagtttaaggggatttaaagttagaaaggaggttagatagattatatattttgttttaaaaggtaggtagggtattataggaagttttgaagtagagataaaatggttgagggtgttttacgtttacggtggtgtaatttagatatagaattattaggaattttttattatggaggtggttgtgagggagaagaggagaaatagagaagttatgtttattttattttattatttttatttttttatttatttttgttgaaaagatgagttatgttttgtgtcgggggtgaaggaaggggaattggtttagtgaaaatacggtaggttatttgaatagatttattatttttatgttgggtttggttaattgaaattaatttgtattttttgggttatttattatatattatttgataagaaaggttttttggtaattgggtagatagtaggagaaagtaaatatggaattaaaattgttttaaataattatatagtaattaattttttgtagataagagttattattattatatgatgattttatatttgtagagttaattttaataagtttttttttatgaaagttttttgaaattcgtttttgttttgttttgttttgttgttttttttgagatggagttttgttgggttttttaggttggagtgtagtggggtaattttagtttattgtaatttttgtttttttggattaagcgatttttttgttttagttttttgagtagttagaattataggtgtgcgttattacgttggttttgttatgttggatgttggttagattggttttgaattttttattttaggtgatttatttgtttcggttttttaaagtgttgggattataggcgtgagttattgtatttggtatgagatttggattttagatttatttatatgtatatgtatatatatatagttatgtgttggggataaaggtgattggggtattttgttgtagggagatttagattttttttatttgtttttttatgaagttaggtggtttttagaattgtaggatattattgagggtaagttatatgtgtttttgaatgttgttagagttttaggaatttggattaagtgggtttgttttgtggttttttttattggttttgagggttataattatattggatttgtgaggggtattaaaagtgggttttttaggagtttttgcgtttttttatagttaagattaggttatttgtttttatatttataataggtaaggttggttaggaaaatattttgttagttagttagggttaataagttgtttagtatttttgtttagtatattattgttatgttatgttagttttaatgtttttagatgtaattaatagaatttttagtagtaattggtttatttatttggtggtttttgtttttttatatgatacgtttggagttgagtttttgggaaggttaaagttgaaagatattagtttgtttatttggggttttttagttttttgtttttaaagttttaacgtggttgttttgtttttagaattttgggtatttttaataatatttattagtgagaagggagagaggaaataagattttgttttttgggattatgggggtttttttaggagtttttgtatttttttatagttaagattaggttatttgtttttatttttatagtaggaaagtagattttgttagttagttaggaggaaggatttgggaatggttgttgagtagagataagtaatgtttttgtatatagtttttttgagaggtagtgagaattatattattttagggttaaggtttatgagattttattttttggataaggatttttgatatttgttttttttagtttttaattagttagtgtttgatgtgaggtagatatttattaatttttgtggttggttggagttgggttttattttagtgttcgtttaggtgtgttatatttgtatgtgaatgtatatttttttcgtttatttcgtgagtgtagtaataaaaatatgttaatttagagtattttgatagggattatggtttgttttttataaatttatgttgtgtttttttgggaaaaaaatttttttttttttttgagatagggtttgtttttgttgtttaggttggagggtagtggtataattttagtttattgtaattttcgttttttgggtttaagcgagttatttattttagttttttaagtagttgggattataggtatacgttattatgtgcgattaattttgtttttgtttttgagatggagttttattttgttatttagattggagtgtagtggtataattttggtttttgtaatttcgattttttaggtttaagtaatttttttattttagttttttaagtagttgggattataggagggtattattatgtttagttaatttttgtatttttagtagagatagggtttgattatgttggttaggttgattttaaatttttgattttaaatgattcgttcgttttatattcgtttaatttttgtattttttggtagagataaggttttattatgttggttaggttggttttttggggggttttttgtttgtttattttgagatagtttaggttggagtcgtataggttggagtgaagtggtataattttagtttattgtagttttgattttttgggtttaagtgattttttttattttagttttttgagtagatgggattataggtatatgtaattatgtttggttttttggggagatttttagttagtattttttattttattttatttaaaagttaaaatgtaagagatttattagatttattaggttaggaatgtttttttgaaaataaatttgt

SEQ ID NO: 349 - DNA, 6977 bp, Artificial Sequence
  chemically treated genomic DNA (Homo sapiens)
  unsure 3736, 3739, 3747, 6820: n is a or g or c or t
ggcgtggcgcggcggggttttcgtgaaggttagcgttagtgagtgttaggggcgggtaggtagggggtcggtttagttcgcgttattcggtagtaaatacgtagggtgagtgtgcgggttgtttaggtagtgtagagcggagagagttgcgtggggttatatttattcgtatttatatcgggggggtacgtcggtttgggatttcgtgtgcgtattttttggggataagcggggagttagtaggatagggattcgtagaacgtatatttatacgtttttgtaggtgttagtatatgttgggtttcgttcgtttttacgggatatacgtaggtgtgtaaggataatgtaagtgtacgtatacgtgtgtagatacgtagtggaagtatttattggtttatatttgtaggatatatatatatatataaatatgtatatatatagagttggttgaggatgttgttaatatcgtatattttttaatgtatgttcgcgcgtaagtacgtacgtgcgtatatatatatacgtatatatatatatatatacgtgattaagggtatttagggtagaattttttatatttttaataaggatttttaataagacgtataaatacgtatttatagaagtaattaggggattttattaggatacggagttatatttttaggtatgtgtggataggttgtttatttacgggtaggatatggatatgtttaattatacgaggatattgtaggtatagtttgtgtatatatatttttaggttatataaatatagtattttgtaatttcgagttagttttttatttggttagtgagtgggttgaagtatttattgggatagggtggttgagaattaggatagggtttgggaagtgagtgatgtaatgaggttgggcggtattattttttatttaattatttagtttaggttttttatataatcgggttattaaataaattttagagggtttagttttagttgttgtttggttttttagaaatagaattcggttgggaatggtagttgtttggataggtttgtttttagaaagttttgggtatggatggatttttgtttattttttggtttttattgatatatttatttattaatattttgtttaagtttttttttttgagtttttattagaattatttttaatgaagagttatagggagaagacgtttatttatatattaggagataggtttggaatagagtttttttgtatagttttagaagggatttattttggtgatattttgattttggattgatatttatgatttttagtattgtgagatagtaatattttgttgttgaaggtgtttagtttgtggtattgtaaaatagttttgggaaattaacgtagtttgttagtttatagatggtgaagggatggaatgttttacggagttttaggtttattatttatagtttttaaagtgtgttgcgggatttttgggtgggtgtaggtatgtaaggtaattttgggtggtttaaggtgaataattttaattgatataataatgtatttattttgttgggtaaatgagggatatttaattgttaggaattaggtaatatagtaggaggtgagtagttagttagtgagtaaagttttatttgtagaaatagttattttttatttttcgtattatcgtatgagttttgttttttgttagatgagcggtgtcgttagatttttatagaagtatgaattttattgtgaattgcgtatgttagggatttagattgcgtgttttttatgagaatttaatgtttgatgatttgtgattgttttattattgttagatggaattacgtagttgtaggaaaataagtttagggtttttattgattttatattatggtgagttgtgtaattattttattatatattatagtaaaataataatagaaataaagtatataataaatgtaatgggtttgaattatttttatattattttttttttttttttcgggttcgtggaagagttgtttttaagaaaattggtttcgggtagtaaaaaggttgggaattattggtgtaaatgttttaaggaatagttaagtagtttaaagtttatatgttataaaaaatataggtttaaatgttaataaaaatgggtgtaaatgaaaatatttttttgttgtggtttaaggaattttaggtattttattagaaagatttatagtttggagttgtagttgtttttttatattttgtttattgtaatttttgtaatatataaatacgtatatatacgtatatgtatatatatatatatatatatatatatatatatatatatatatattgtgttttatgtttttattagggtggtttgggagggaatgcgtgggttttttttgttttttgtttttttgagatggaattttatttttgttgtttaggttggagtgtaatggcgtaatttcggttttttgtaattttcgttttttgggtttaagtaatttttttgttttagtttttcgagtagttgggattataggtatgtgttattatgtttgggtaattttgtatttttagtagggatggggtttttttatgttggttaggttggtttcgaattttcgattttaggtgattcgttcgttttagttttttaaagtgttgggattataggcgtgagttatcgcgtttagtcgggaatgtatgtttttaggagaaacgaagataatttaggatttttatttttttggtgtttgcgtaagtgtttttttcgtagattatgttttagttttttttttagtttttttttttattgaaagagagaagtagagttttagtatgtatttagttgtttagggtttaagttaagtgcgtaagttttttggggagtttagtgagtggaaggtattgtagattttttttaaaagaggcgtcggttttttatggatttttgagtttaggaaggtaatagataagatattacggtttattagaagagataataaaaatgtagtgaggaagggttgtagttaaaggttttatgttttatgagaagggatttttagggttttaagtagtaggtagaagattttattgtatgtgtggttaggtgacggtgatttatagtttttattgggaattgggattaagagtaattcgattttttatttatgtacgtttttttttgtttttttgcgttttgtgtttttttttttatttttcgttttttttatttttttagttttttttgttttttttttaattttttttttttttttttatttttttttttttatttttttttttttttttttttttagttttttttttttttttatttcgttttatgttattgtttaggtttttggggttttacgtggacggttggatataggatttttaggttaatttttacggtataagtatagggttgtaggattttggttttttattttttagtatttttaaagtgagaggtgtggggtgtgtttatgtttttttgggtgggcgttttacgttttaggaagtagaaattgtaggataaagttggcgtaagtgatatgtttacgtggttgttagtttttattttgggatttgttaaggttaaagtagaggatatttgtttacgattgatttcgtattagggtgggggggaggggtgggtttggggtgggaatggggatgggagtcgttattgtaaagtagtttttggttggttttttgttttgtatttagttatgtaaggttttttngtntttatttnttgttttttattatttttatttttaggttgtttagatttaggttttagaagttttttaggatttaagaattaagggtaattattgggtttcgtcgtttttagtttatgagttagttatttttttgtaggttgataaattttggttgttatttatttttcgttttaaattagttttagttttattttgttgtaggtttgtgtggttgttggagaggttgggtttttttttttatttcgaggttgtttaatatgttttttggattttggagaaaattgatttattatttttatattggtgtaattttttttaagattttaaaattggataacgtgaatttgttttgttttttgtttttttttgttagggttgttattgggatagtttgagatggggagtcgggggagataatggatgaatggatggatgaatggatagtagtttagggagatgtttttgtgtgttttgaattgggttttttttttagtgagaagtttttttgagtgagtttatatagttattttttggtatttatggaggattagttttagggttttcggggatgttaaaatttatggatgtttaagtcgttgatataatatgatttagtatttatatataagttatgtatattttttcgtatatattagattatttttagattatttattatgtgtaatataatgtagatgttatataaatggttgtgatattgtatttagggaatgatgataagaataacgtttgtatatgtttagtagagataattattcgatttgttttttgaatattttttatttgttgttggttgaatttatagttgtagagtttttagatacgagggttaagtgttttgagagtagggtgggtgaggttgttaatgagtataggggagtaggtgttgattagggggattttgtattgggtatttggacgttttgttttaggatttgagatttcgtttggatggtataggtagattaagtttaggttaaagttttttttttggatgtttattttattttaagttttttttggattttggaatttggtattttttaggttttgggtgggatagttgagttaggttttagataatatgtttagaaaagtgggtttttattgtgtgtttggtatttttcgtatatgattttttagttagaatatttaagggttatggagagaaatatttagttaaaatattagaaatgaaaaagtgatattattagagatattaaaaagacgattagagatattaaaaatattattaagtaatagtattagtttttgtattttgagatttaatagtagtagttatttttttttatttttatgtgtattttaggattattttgggcggggagggttgaggttagggaggtttgaagttggttttgggtttcgggggtgatagtgatgaggaattgggtgtatatatgagtggggtagtcgggtttggttagagaagtaatatatacgtgtatagatatgtttatttatatatatatgtgtacgtatgtgtataaatatattgtaggtaggtatgttgacgttttaggtagcggaggattttgattttgggttttgttgatttaggtaaggttttattgtgatgcgtgttatgattttagaatgttattggtgtttagtatttattcgttttttagattgcgtttgtgttttacggtagttatatatacgtagtggtatttataagcggttttgtggatttaaaggttttttttttgagaggtataatttaggttagttgatttattagaattaggtgagtgtgatttgtttttttttttttaggttgatttggggatagtggttatggtatgggcggtgttggtttttgggtagttatagaggagggttatttttgagtatttatcgggcgttcgttttatattgtttatgtagacgattttttttttcgtttttatggtggtttcgtagagtgggtgttgttttcgaatgtatttattcgataggtgagtcgtttggggttagagaggtagtaattggtttgggaatttagataagattttgggttttgtttttagttttgttgtgtgttatgttagattttaggttttaattttgagatttttttgttttagattttaaatttgtttagattttcgattttaatggggtagagtttggttttggtagagatattgggatggatttattgtgggtggggaggagggaagggtttttagaatatatttggggtttaagttgggttttgatggttattgtgggatttattggatatatatagttttttgtttgggagtggtatggggagttttttgtttttgggtagttgtggaaagtgaaggagttttggagagttggttgaggggagattatttttttttgtgtttaaaggggtttaggtattggggttttttttaagtattttttattttgtttggtttcgttttttttttgttttgagtatttttaggagggacggtttatttagatgttttttaggagtaaggatttattgttttttattagtgatttaggaaaatgaagtttttttttgtggggatagtttagaatggtggagtttatagtttttttttgagagatatggtttttatgagtatagtggttgttttggagatagtaattatttttatttttaaaattaaatatatttttgtttaaatggtgttattgttaaagtagttttattggttagattgaagggttatggtagtttaagtgatgagcggggtagaatggagtagttaggagagattttgtttttcgtaggaaattgggtatttttgtggttttgaatattttaggaggtcgatcgtatagagatttttggtgtttgatcgtagtttatatttatatttttggaatagattattataggttttttatttttggtaggtggatattatttaatttgtcggggtaggtgtgtgtttattttatggtatatggggataatcggattttttgtttaggttttatttttttcgagtttttgggaagatgtttatttttgtttggggttttagattgtagagatttatgganggtgtgggttatggggtttggtttttttttatcggagtgtagtggtggaatgaaggttatataattagttagtatttgggagttcggtgggagcggtttaggtgtttttcgaagttgtcgggtatagtgtaatttttagataattttgttttatagg

SEQ ID NO: 350 - DNA, 6977 bp, Artificial Sequence
  chemically treated genomic DNA (Homo sapiens)
  unsure 158, 3231, 3239, 3242: n is a or g or c or t
tttgtgagataaaattgtttaaaggttatattgtattcgatagtttcggagaatatttgaatcgtttttatcgggtttttagatgttggttggttgtataatttttattttattattgtatttcggtaaaaaggggttaaattttatggtttatattntttatgggtttttgtagtttgaagttttaagtaggggtgggtatttttttaaggattcgagaagagtgggatttggatagagaattcggttgtttttatatgttatgaaatgggtatatatttgtttcggtaggttgaatggtgtttatttgttaagggtgaagagtttgtgatggtttattttagggatgtggatgtgaattgcggttaggtattagaggtttttgtacgatcggttttttgggatgtttagggttatagagatgtttagttttttacggggaataagattttttttgattgttttattttatttcgtttattatttgggttattatggttttttagtttaattagtgaagttgttttagtaataatattatttgagtaggagtgtgtttggttttggggatgaaaatgattattgtttttaaagtagttattgtgtttatggaaattatgttttttagggagggattgtggattttattattttgagttgtttttataggagggggttttatttttttgggttattgatgaagaatagtgggtttttgtttttggaggatatttagatggatcgttttttttgagaatatttagggtaaaaggaaagcgaggttagatagaataagaaatatttggggagagttttagtgtttggatttttttgaatataagggaagatagtttttttttagttagttttttagggtttttttattttttataattgtttaagggtagaaggttttttatgttatttttagataagggattgtgtgtgtttagtgggttttatagtgattattaagatttagtttaggttttaggtgtgttttgaggattttttttttttttttatttatagtggatttattttagtgtttttgttagggttaggttttgttttattgggatcggaaatttgggtagatttgggatttagagtagggaggttttagggttgaggtttgaagtttagtatggtatatagtagggttgagagtaaaatttagggttttgtttggatttttaggttagttattgtttttttgattttagacggtttatttgtcgaatgggtatattcgggaatagtatttattttacgaagttattatgaagacgaaagagaaaatcgtttatatgggtagtgtagaacgggcgttcggtgagtgtttagggatgatttttttttgtagttgtttagaggttaatatcgtttatattatagttattgtttttaagttagtttggagggaagagagtaggttatatttatttgattttgatgaattagttggtttgggttatgttttttagggagaaaatttttgagtttataaaatcgtttgtgaatattattgcgtgtgtgtaattgtcgtagaatatagacgtagtttggagagcggataggtgttaagtattagtgatattttgaggttatggtacgtattataatggggttttgtttgggttagtagggtttagagttagggtttttcgttgtttgaggcgttaatatgtttgtttgtaatgtgtttgtgtatatgcgtgtatatgtgtatgtggataaatatgtttgtgtacgtgtgtgttgtttttttggttaggttcggttgttttatttatgtgtgtatttagttttttattattgttattttcggagtttaggattagttttagatttttttgattttagtttttttcgtttagggtggttttgggatatatataggagtggagggaagtgattgttgttgttgaattttagaatataaaagttaatattattatttaatggtatttttagtatttttaatcgtttttttagtgtttttaatggtattatttttttatttttgatattttaattgggtatttttttttatgatttttggatattttagttagaggattatgtgcggaaagtgttaggtatatagtaggggtttatttttttagatatgttatttaaaatttggtttagttgttttatttagggtttaggggatgttaaattttagggtttagaaagagtttgggataaaatgaatatttaaggggagggttttgatttgggtttagtttgtttgtgttatttaaacggagttttaagttttgagatagggcgtttagatgtttagtgtagggtttttttgattaatatttgtttttttgtatttattagtaattttatttattttatttttaaagtatttggttttcgtatttgggagttttgtaattgtggatttagttaatagtagatggaaaatatttagaaaataaatcggatggttgtttttattgaatatgtgtagacgttgtttttgttattattttttaaatatagtattataattatttatatagtatttgtattgtattatatataatgaataatttagagatggtttaatgtatacgggagaatgtgtatagtttatatgtaaatattaggttatgttatgttagcgatttgagtatttatggattttggtattttcggggattttagaattaattttttatggatattaagggatgattatataaatttatttaggaaggttttttattggaggaagggtttagtttaggatatatagggatatttttttggattgttgtttatttatttatttatttatttattgtttttttcgattttttattttagattgttttaatgatagttttagtaagaagagataagaaataagataagtttacgttgtttagttttgaggttttggaagaagttgtattagtatgagaatagtgggttagttttttttaggatttagaaagtatattaggtagtttcggggtgaggaaaggagtttagtttttttagtagttatatagatttgtagtaggatggggttggggttggtttggggcggaagataagtgatagttaaggtttgttagtttgtagaggggtggttgatttatggattaggggcggcggagtttagtggttgtttttagtttttggattttgggagatttttggagtttggatttggatagtttaggggtggaggtgatgaggggtagngggtgggnatngggaggttttgtatgattgggtgtagggtaggaagttagttagggattgttttgtagtggcggtttttatttttatttttattttaaatttattttttttttttattttggtgcggggttagtcgtgggtaggtgttttttgttttggttttagtagattttaagatggaagttggtagttacgtgggtatgttatttgcgttagttttgttttgtagtttttgttttttggagcgtggggcgtttatttaggagagtatgggtatattttatattttttattttgagggtgttgggaggtgggggattaaggttttgtagttttgtgtttgtgtcgtgaaaattagtttaggagttttgtgtttagtcgtttacgtggagttttaggagtttgaatagtggtatgaagcgagatgaggagagagagagaattggaaaaggagagagaaagagagatgaggagaagggaatgagagagaggaagagaaattgggagagagatagaggaggttgagaggataaggagggcgagagatggggagagagatataaaacgtaaagagatagagagagacgtgtatgagtaggaggtcgagttatttttgattttagtttttagtgaaaattgtaggttatcgttatttaattatatatataataaagttttttgtttgttgtttagagttttgagaatttttttttatggagtataaaatttttgattatagtttttttttattatatttttgttgttttttttggtgaatcgtgatgttttgtttattgtttttttgggtttaaggatttataaaaaatcgacgttttttttggggaggatttgtagtgttttttatttattaggttttttaggaaatttgcgtatttggtttgggttttaagtagttgggtatatgttggggttttgttttttttttttagtaagaaggagaattaagaaagagattgaagtatggtttacggagaaggtatttgcgtaaatattaggagaatgagggttttgagttgttttcgttttttttaaaagtatgtattttcggttgggcgcggtgatttacgtttgtaattttagtattttagaaggttgaggcgggcggattatttgagatcgggagttcgagattagtttgattaatatggagaaattttatttttattaaaaatatagaattatttaggtatggtggtatatgtttgtagttttagttattcgggaggttgaggtaggagaattgtttgaatttaggaggcggaagttgtagagagtcgagattgcgttattgtattttagtttaggtaataagagtgaaattttattttaaaaaaataaaaaataaaaaaaatttacgtatttttttttaggttattttagtgagggtatgaaatatagtgtgtgtgtgtgtgtgtgtgtgtgtgtgtgtgtgtgtgtgtgtgtatgtgcgtgtgtgtgcgtgtttgtgtgttgtaagggttatagtggataggatgtgggagggtagttgtaattttaagttgtaagtttttttgatagaatgtttaagattttttggattatagtaagagagtgtttttatttgtatttatttttattagtatttaaatttgtattttttgtagtatgtaaattttaagttgtttaattattttttaaagtatttatattagtggtttttaatttttttgttattcgagattagtttttttgaagataatttttttacggattcgggagaaggggaagggatgatatggagatgatttaagtttattatatttattgtgtgttttatttttattattattttattgtaatatataatgaaataattatataatttattataatgtagaattagtgggagttttgaatttgtttttttgtaattacgtggttttatttggtagtgatgagatagttatagattattaggtattaggtttttataaggagtacgtaatttagatttttggtatgcgtagtttatagtagggtttatgtttttgtgagaatttaacggtatcgtttatttgataggaggtagagtttatgcggtaatgcgagggatgggaagtggttgtttttatagatgaagttttgtttattggttggttgtttattttttgttgtgttgtttggtttttaatagttgggtattttttatttatttagtaagataaatatattattatgttaattgaaattatttattttgaattatttaaaattattttgtatatttatatttatttaagggtttcgtagtatattttgggggttgtagatagtaagtttggagtttcgtggagtattttatttttttattatttgtgggttaataggttgcgttagttttttagggttgttttatagtattatagattgggtatttttaataatagaatgttattgttttatagtattggaggttatgagtgttagtttaagattaaggtgttattagggtgggttttttttgaggttgtgtaggaaggttttgttttaggtttgttttttgatgtgtgggtggacgttttttttttgtgattttttattaagggtgattttggtgagggtttagaagaggagatttggataaaatgttggtagataaatgtgttagtggaaattagagggtagataggaatttatttatgtttagggttttttggggatagatttgtttaagtagttgttatttttaatcgagttttgtttttggaaagttaggtaatagttggggttgggttttttgggatttgtttagtgattcgattatgtgggaagtttggattgggtggttgggtggggggtggtatcgtttaattttattgtattatttattttttaggttttgttttggtttttagttattttgttttagtgggtgttttagtttatttattgattaagtgagggattgattcgaggttatagagtgttgtgtttatgtgatttgagagtatgtgtgtatagattgtgtttgtagtgttttcgtatagttgagtatgtttatgttttgttcgtgggtaggtagtttgtttatatatgtttaggagtgtgatttcgtgttttggtagggttttttgattatttttatgggtgcgtgtttgtgcgttttgttaggggtttttgttaggggtatggaagattttgttttgggtgtttttgattacgtgtgtgtgtgtgtgtgtgcgtgtgtgtgtgtgcgtacgtgcgtgtttgcgcgcgagtatgtattagggggtgtacggtgttaatagtatttttaattaattttgtatgtgtgtatgtttgtgtgtgtgtgtgtgttttataggtgtgagttagtggatgtttttattacgtgtttgtatacgtgtgcgtgtatttgtattgtttttgtatatttgcgtgtgtttcgtgagagcgaacgaagtttagtatgtgttggtatttgtaggaacgtgtgagtatgcgttttgcgggtttttgttttgttggtttttcgtttgtttttagggagtgcgtatacggggttttaggtcggcgtgttttttcggtgtgagtgcgagtgagtgtggttttacgtagtttttttcgttttgtattgtttgggtagttcgtatatttattttgcgtgtttgttgtcgggtgacgcgggttgggtcggttttttgtttgttcgtttttggtatttattggcgttggtttttacggaggtttcgtcgcgttacgtt

SEQ ID NO: 351 - DNA, 6209 bp, Artificial Sequence
  chemically treated genomic DNA (Homo sapiens)
atttagattgttttgtgttattgtttttgaaattattatttattagtagaaaataaaagtaaattttttagttggaggtataggagaaggtggatttgagttcgaatttgaattttgttagttgtataattttggttaagttatttaagttatgtgagtcgattttatttgtagtatagtacgatgatagttttcgttttttagggtgtgggtggttttggtttagggtttgggtgtaggaaggacgtgttgagtggtaggtggagtattattcgtggtgtgagtgattgggtagagaagttagaggggaagtttagttatgttgtttatataagggtagttatttgtttatttatttttttttttaaaggttttttttttgggatttcgaggatttaagagttattaggtttttaggatttttaggatgcgtggatatatttttagttgttttttttttttttaagttagtgtcggatttttcggttttcgttttttagttttgttatttttgtttgtattaagggtttatttcggtattatagtggcggggcgggggggtgtgtttgtgggttttaggtattgcgttttgttgttgatttcgtatttacgtgttttagatattagattattttttttttttcgttatttttttatttatattagtgtattaagggaaagtagaaagttttaggcgtggaaagtttttttagtagtagtttttatttaggggtgtatataggtgttaataaggtttggcgtttggatttggtttttttttgtgttgttgggtgattttgggtagtttattaatgtgtttggtgagttggtttttatgttggattatttagtataataatagtgattagaagtgatggagtggtttgtggtttaaaggaggtgattattatttaggtcggttatttagatttaagatataggattggttattgtaattatgaatgttgttaaaatataacggtttgaaagtgataatgtgcgacgtaattgtaattttacgtagtgtaacgttaatttatatagcgatagtgttaaaatatgttataagttaataaataagattatattgttttttattttttattttttttgagatggggttttattttgttatttaggttggagtgtagtggtacgatttcgattcgatgtaatttttgttttttgggtttaagtgatttttttattttagttttttaagtagttgggattataggcgtgtattattatgttaggttaatttttgtattttggtggagatagcgttttattttgttgtttaggttggttttgaatttttggatttaagggatttattcgttttagttttttaaagtgttgggattataggtatgagttattacgtttagttttcgattatattgttttttataagttgtttttggattagtttaacgtatttgtggtttttatgaaagaatatattggatttaaaaattataattatagtgatttgttagattttatttttagtgaggcgggagtttcgaggtgtttattcgcgtagaagagagatagggtgttattgagggtcgattgggtttttgttggttgcggaggataggtggaagggtggaagagggtttaaggagagggggtttggggtttggtgggggtgggttaggagggggtagatgttggatagaataggaaggtggattgttgggattcgttgtttatatggttgtcggggagaatgagataggagtttaggaggatattgcggtttattgtttaatgtttgagattatggtaatattgaatttttttgtggtttaaaaattaatttttgtttaagttttttattttttatgttatttttttttagttattgtaattatgattaatttttggttgttaatttaaattttagttttttttggaagttttgttgtttttttttcgggtgtgttttgtttggtgttttttttcgttatttgtgatttttttttatatttggggtatgtggtttatgttggtattttttgttttttggtttaatttgttcggttggattggtagttgtttattggtagtttgtgtaagtagttttttttggagtttatttttaaggtgtgatgggattttcgttttttggaggtgtgtagtaggtagttttggtagatagttttgagtttaagtggatatggatggtggtaggatttttttaaatagcgttttttttattagtttttttggtatgtgttttgagtttatagttttaatttgtttattattatatttatattaaaggttataaagggagtttttgttttattttttttattttttattttatttttgagatagggatttattgtgttgtttaggttggttttgaatttttggatttaagttatttgtttgtttgagttttttaaagtgttgggattataggtttgagttgttgtatttggttttattaaatttttgttttttgatttatatttattttgtttttagagtttttaaggattttgggaggtgtatagggtcggtgaatgttttatgtcgattaggatttgggaattagggaggtttgagtggtttagggttattgtggtgaagtttgtgttttttgagttgggtttttttaacggttaattttagattttttgtgtagttttttttgggtgtagttaggtgtttcgtggtgatagtattattagggggtagtaggtatttatggtattgttggcgggcggttgtttgggttttagatttggttggtttttttggttagagtaggtaggtttaggatcgtgaggatagaggttttttttttgttgagggagttatttggggaaagagatatttagtgtattaatgcgtcggtggtttaggcgaggggttgggagagtgggtagtttttttttttttttgagttttttttgttttagtatagtgggaagtttttgggtaatttattcgtttattttttataagtaagtttagtgggagtcgggttttttcgttttagagaggaggggatgaggttttgtaggaggagggattagtgtaggtttttagatggggttggagggtttcgtttaggttttatttttggttttttgattttttagggagatgttgatgggtttatttgttgttttattttgtttcggtgaggaaagtttttttttttgttttaaaggtgtttattgttgttttttcggggaagggtaagagatttgagttttcgttttattagttatttggtttgagtttattgttgtaggggttagtttttttttgatttttttttacgggttagattttaagttgggattttttgtttttattttagtggagaaggggtgagtttgattttgtagagattaatttttaggataggatttttatcggaggttttgggtttaggggattttttttgcgttcgtattttcgtttcggtttttgcgtagggaagttacggggtaaggggttcgggggttgtagtgtagttttagtttatataggtttaggattttatcggagtttagggtgggagtttttagatatcgtattttagttttcgggttgagttagttttagagaagggtttggatttgtttggtgttttttagtgaattagtagtgaaaattcgcggttttcggtagttgagttaggatttatataattttagttgtagaatttgtttgtttttgaagttttttttatcgttatacgttgttagttggatagatcgcgtttttattatttagggtgtggtttagaagggagattagggcggattagtatcggggtcggttgcgattttgggtcggagagtatttttttgtttttatttatgttacgtatttcgttttggacgttaggaattgttcgttgggtagttgcgagtggttaggattttggttaaaagttggggaattttggtttttatgtagggtcgggggtttttttatgggttttcggttagggcggaggataggaagagggttttgggagttttgggttcgtgtgtttttagttttagtttcgggtatttcgtcggggcggtttgatgggttaagggggtttagtaagtttcggtttagttcggtgttttttttcgagtttgtcgttatcgaacggttatgcgagggcgtttagcgcgatagggattattttttgatttttacggaggattaaaggtattcggggggacgttcggttattattttacgggcgaggtcgtttttttagggagaagggttttttaaagttcgagcgtttttggagaaagtcggtcggatttgggtttgcgtcgtaattttcgtttatcgtaattttcgcgggcggtagcggggtaggaagtgggggggcgggggcggcgtttgggatacggggaggtgttaggcgagtgtttcggtttcgtttttgtttcgttcggtcgtggtcgcgttttttgcgtttttagcgtttcggagtcgtggagtcgtcgagtcgtcgagtcgtcgagtcgtagcgtcgggcgtggggattgcgggtggggcgaataaagcggcggcgacgcgggcggtttaggttcgggacgcgcggagcgagcgatttcgtcgggtttttgtttcgggcggggtaggagtcgcggcggtcgcggggcgtttcgagcgtagaatgcggcgttcggcggcgcggattggggagcgttgcggcgattggttgcgtggagttcggttcggggttcgtaggtatttgcgtgtgtgaagcggggagattcggcgcgttgttcgttgttcgtttcgcggtcgtacgtgggcgggagcggcggttcgagaggagttcgaggagtaggaggaggaagaggaggggacgtacggcggcgtagcgggggatttggggtagttcgcgcgaagtttcgtttcggttttgagtttcgcgcgcgcgcgggcgggatgtttcgcggtcgttgtattttggttcgagtattgttttgagtcggtcgggttcgcgggcgttatggagtagtggcggtagtgcggtcgttggtttatcgattgtaaggttttgtcgtttaattatcgggtggtgtggttttcggtcgtggttttcgatttggcgtaggcgttgcgcgacggggtttttttgtgttagttgttgtataatttttttttcggttttatcgattttaaggatattaattttcggtcgtagatgttttaggtgagcgttcggcgggcgggagggtttcggggaggcggcgttcgcgttgttcgacgcgcggattgaacgcggaggtcgtagcggcggcggtttaggcgttttggttggggcggtcgggtttcgggacgcgggcgggcggttggagggtgcgtttcgggttttcgagacgcgattttaggaggcgcgaagttggttaaagtttttttagtttgggtcgcgtcgtcgtcgttcgcgggtattgttttggtgcgtcggtttcgcggtttgcgcggtttgggatgggggaggtttcggcgttgcgttcgttttgcggggttttgcgagtggttttttattttttagggagtttgtcgagtcgggtgtgcgcgtcgtgggtcgtatttttgggtttcgcgttttttggtcggacgtcggtggaagagcgggcgcggtcgttgcgtcggttcggggcgcggttggagggttcgggaggggcgcggggcgggagttttcggggtcggagggagttgggttggtttcgggtatcgttttttcgtcggttttcgttttttttcggattcggattcgggttatttggcgttagttttggttttcgggtcgagtcgtttcgaggatttttagggttatttggttttagttttggtttttatcgtttttttaatatttttatttttttttcgggcgttgagtgtggtttttgtcgcggcggaggtacgcgtgcggtcgtagggttaggtaggaaaatgtttgtttagtcgaacgaagttgttttttttggttttttaagagggaatttggttaagatttgagagaatcgaggttttcgttttgtttttcgggggtcgcggaatttttatcgggagtagtttagaagaggtcgggggaggtagagcgggtggtagtcgggtttatttagcgtcgaggaggtgcggttttttagttagtttagtagttttttatcgcgcgtagtggtaattttatgtggagagggattatttat

SEQ ID NO: 352 - DNA, 6209 bp, Artificial Sequence
  chemically treated genomic DNA (Homo sapiens)
gtgaatggtttttttttatatggagttgttattgcgcgcggtgaggggttgttgagttggttggaagatcgtattttttcggcgttgggtggattcggttgttattcgttttgtttttttcgattttttttaagttgttttcggtaaggatttcgcgattttcggagaataggacggaagtttcgatttttttaagttttagttaagtttttttttaagaggttaagaaaagtagtttcgttcggttgggtaggtatttttttgtttggttttgcggtcgtacgcgtgttttcgtcgcgataaaggttatatttagcgttcgaaggaggggtgggggtgttgggaaagcgatgggggttaggattggggttaagtggttttggggattttcgaggcggttcgattcgggagttaggattggcgttaagtggttcgggttcgggttcgggaagaggcggaggtcggcgagggggcggtgttcggggttaatttagtttttttcggtttcgagggttttcgtttcgcgtttttttcgggttttttagtcgcgtttcgggtcggcgtagcgatcgcgttcgtttttttatcggcgttcggttaggaggcgcgaggtttaaggatgcgatttacgacgcgtatattcggttcggtaggttttttgggaaatgaggggttattcgtagggtttcgtagagcgagcgtagcgtcggagttttttttattttaggtcgcgtagatcgcggaatcggcgtattagagtagtgttcgcgggcggcggcggcgcgatttaggttgaggggattttggttaatttcgcgttttttgaggtcgcgtttcggaggttcggggcgtattttttagtcgttcgttcgcgtttcggagttcggtcgttttagttagggcgtttgggtcgtcgtcgttgcgattttcgcgtttagttcgcgcgtcgggtagcgcgaacgtcgttttttcggggttttttcgttcgtcgggcgtttatttgggatatttgcggtcggaagttgatgtttttgaggtcgatggagtcgggggagaggttgtgtagtagttggtatagaaggatttcgtcgcgtagcgtttgcgttaggtcgaagattacggtcgagggttatattattcggtggttgggcggtaggattttgtaatcgatgagttagcggtcgtattgtcgttattgttttatggcgttcgcgggttcgatcggtttagggtagtgttcgagttaaagtgtagcggtcgcggggtatttcgttcgcgcgcgcgcggggtttagggtcggggcggggtttcgcgcgggttgttttaggtttttcgttgcgtcgtcgtgcgtttttttttttttttttttttatttttcgggtttttttcgggtcgtcgttttcgtttacgtgcggtcgcggggcgggtaacgggtagcgcgtcggattttttcgttttatatacgtaagtgtttgcgggtttcgggtcgggttttacgtagttagtcgtcgtagcgttttttaattcgcgtcgtcgggcgtcgtattttgcgttcggggcgtttcgcggtcgtcgcggtttttgtttcgttcgagataaaggttcggcggggtcgttcgtttcgcgcgtttcgggtttgggtcgttcgcgtcgtcgtcgttttgttcgttttattcgtagtttttacgttcggcgttgcgattcgacgattcggcggttcggcggttttacggtttcggggcgttgggggcgtagggggcgcggttacggtcgggcggggtaggggcggggtcggagtattcgtttggtattttttcgtgttttaagcgtcgttttcgtttttttattttttgtttcgttatcgttcgcgaaagttgcggtgggcgggggttgcggcgtaggtttaggttcggtcgattttttttaagggcgttcggattttggggagtttttttttttgggggagcgatttcgttcgtggagtgatggtcgggcgttttttcgggtgtttttggtttttcgtggaggttaggaggtggtttttgtcgcgttgggcgttttcgtatggtcgttcggtaacgatagattcgggagagggtatcgggttgggtcgaagtttattgagtttttttggtttattaagtcgtttcggcgggatattcgaggttgaggttgaaggtatacgggtttaggatttttagagttttttttttgtttttcgttttggtcgggggtttataggaagattttcgattttgtataaaggttaggattttttagtttttggttaaagttttggttattcgtagttgtttagcgggtagtttttggcgtttagggcggaatgcgtgatatgagtgagggtaggaaggtgtttttcggtttagggtcgtagtcggtttcggtgttgattcgttttgattttttttttaggttatattttgggtggtgggggcgcggtttgtttagttggtaacgtgtgacggtaggaggggttttaaggataaatagattttgtaattgaaattatatggattttggtttagttgtcgggaatcgcgggtttttattgttgatttattgggggatattaggtaagtttaagtttttttttgagattggtttagttcggaggttggggtgcggtgtttgagggtttttattttggatttcggtggaattttgggtttgtatgagttggggttgtattgtagttttcggattttttatttcgtggtttttttgcgtaggggtcggaacggggatgcgagcgtagagagggttttttgggtttagggttttcgatgggggttttgttttggaaattggtttttgtagagttagatttattttttttttattgaggtggaagtagggggttttagtttagggtttggttcgtagagagaggttaggaaggagttggtttttgtagtagtaaatttaggttaggtggttggtgaggcgggggtttaggttttttgttttttttcgaggaagtagtagtgggtatttttagggtaagggggagagttttttttatcgaagtaagatggggtagtaggtggatttattagtatttttttaagaaattagaaagttaggagtgaaatttgagcggggttttttagttttatttgagagtttatattgatttttttttttgtaaagttttatttttttttttttagagcggggagattcggtttttattggatttgtttgtgaagaatggacggataaattatttagaggttttttattgtgttgggatagaaagggtttagagaggaagaagagttatttatttttttaatttttcgtttggattatcggcgtattgatgtattaaatgtttttttttttaggtggtttttttagtaagaagggggtttttgtttttacggttttgggtttgtttgttttggttaagaggattagttaggtttgggatttaggtagtcgttcgttaataatgttatgggtatttgttgttttttggtggtgttgttattacggggtatttggttgtatttaggaggggttgtatagaaaatttggggttgatcgttgagaagatttaatttaggagatatagattttattatagtggttttgagttatttaggtttttttggtttttaggttttgatcggtataggatatttatcggttttgtgtattttttagaatttttggaggttttgagggtaggatggatgtgaattaaagaataaaagtttggtggggttaggtatagtagtttaagtttgtagttttagtattttgggaggtttaggtaggtagatggtttgagtttaggagtttaagattagtttgggtaatatagtgggtttttgttttaaaaataaaataaaaggtaaagaaaatggggtaggagttttttttgtaatttttagtgtgagtgtaatgatgaataggttgagattgtggatttaaggtatatgttaggaagattaatagagaggacgttgtttgggaaaattttattattatttatgtttatttggatttagggttgtttgttaggattgtttgttgtatatttttagggggcgagagttttattatattttggagatgggttttagggggagttgtttatatagattgttagtgagtagttgttagtttagtcgagtagattaaattagggagtaagaagtgttagtatgggttatatattttaagtatgggggagggttataggtggcggaggagggtattaggtagggtatattcggggagggagtagtaaggtttttaggagaaattgaggtttgagttgataattagagattgattatggttgtagtgattaggagagggtgatatggaggatggagagtttggataggagttgatttttaaattataaaggaatttagtgttgttatgattttaggtattgaataataaatcgtagtgtttttttgagtttttgttttatttttttcggtagttatgtgggtagcgagttttagtagtttatttttttgttttgtttagtatttgtttttttttggtttatttttattaagttttaggttttttttttttggatttttttttatttttttatttgtttttcgtagttagtaaggatttagtcggtttttagtgatattttgttttttttttgcgcggatgggtatttcggggttttcgttttattggaggtaaaatttagtaaattattgtaattgtaatttttaaatttaatatatttttttatggaagttatagatgcgttaaattgatttaaagatagtttataaaaggtaatgtaatcggaggttggacgtggtggtttatgtttgtaattttagtattttgggaggttgaggcgggtggattttttgagtttaggagtttaagattagtttaggtaataaggtgaaacgttgtttttattaaaatataaaaattagtttggtatggtggtgtacgtttatagttttagttatttgggaggttgaggtgggaggattatttgagtttaggaggtagaggttgtatcgagtcgagatcgtattattgtattttagtttgggtgataaagtgagattttattttaaaaaaaataaaaaataaaaggtaatataattttatttattgatttgtggtatattttaatattatcgttatgtgaattaacgttatattacgtaagattgtagttacgtcgtatattgttatttttaagtcgttatattttaatagtatttatagttgtagtaattaattttgtgttttgagtttgagtggtcggtttaggtgatggttattttttttaaattataagttattttattatttttagttattgttattgtattgagtggtttaatataaaaattagtttattaagtatattggtgagttgtttaaagttatttagtaatataggaaaaagttaagtttaaacgttaggttttattgatatttgtgtgtatttttaaatagaggttgttgttgaaagggttttttacgtttagaattttttgtttttttttaatgtattgatgtgggtggggaggtgacgagggagggaaaatgatttgatgtttagaatacgtggatacggagttagtaatagagcgtagtgtttggagtttataggtatattttttcgtttcgttattgtggtatcgaaatgagtttttagtataggtaggagtagtaaggttaagaaacgggagtcgaagggttcgatattgatttaaaggagggaagggtagttggaagtatatttacgtattttggaggttttggaaatttggtgatttttggattttcggggttttagagaggagatttttggaggaaggagtgggtagataggtggttgtttttatgtgggtagtatggttgggttttttttttggtttttttgtttagttatttatattacgagtgatgttttatttattatttagtacgttttttttgtatttaggttttgagttaggattatttatattttaggaggcgaggattgttatcgtattgtgttatagatgaggtcggtttatatagtttgagtgatttggttaaggttatgtaattggtagagtttagattcgaatttaggtttatttttttttatgtttttagttgagaggtttgtttttgttttttattgataaataatgattttaagggtagtggtataggataatttgagt

SEQ ID NO: 353 - DNA, 6412 bp, Artificial Sequence
  chemically treated genomic DNA (Homo sapiens)
gtcggttttggttttggttagtttagaaaggggtttttatagtgtagtcgtatgttggatagttttttaagcgtggttagagtggtggttaaggttaaggaggtgtcgagagtgagcgagggtcgcgagggttgttagtatattgttattttttagaagtataaattaaacgttaataagatattattatatattaattagaatggttaaaatttttttatttttaaagaataaaattttaggttaggcgcggtggtttacgtttgtaattttagtattttgggaggtcgaggtgggcggattataaggttaggagatcgagattattttggttaatacggtgaaatttcgtttttattaaagatacgaaaagttagttgggcgtggtggcgggcgtttgtagttttagttatttgggaggttgaggtaggagaatgatatgaatttcggaggtggaggttgtagtgagtcgagattgtgttattgtattttagtttgggcggtagagcgagattgttttaaaaaaaaaaaaaagaataaaattttaaatttgataatattaattgtagataagaatgtggagtaattggaatagttatatattgttggtgagaatgtaaaatgatataattgttttggggaaataggttagtaattttttatgaagttaaatatgtattttgtgtttgatttagtaattttttaggtgatttttatttaagagaaataaaatttatgtttgtaagaaatttgtatattaatgtatatagtaattttataattgttaaaaattggaaataaattaatattttgtagttggtaagtagatagtatggaatatttttggtaataaaaatgagtaagttattatatattataatttggatgaattttaaatgtattatgttaagtgaaaaaaagttaaatttataaggttatatatgatacgattttgttgtgtgatattttggaaaggtaaaattatagggatataagatagatagattagtgtttgttagggattaatagtggaagtagggtttgattatgaaggagttttgggggtgataagatattttggttttttttttttttttgagatagagtttcgttttgtcgtttaggttggagtgtagtggtacgattttagtttattgtaaaaattggaaacgaagtaaatatggtaatatgttaattatatgtgatattattagtatttgttttattattgtatttgtatattttaattggtcgatatataaataaggtaaaatatattttttttagagaaaatttggaaaagatagaaaaggagatagaataagttattagttgtttttatttatttattgaaacggagtttcgttttgtcgtttaggttggagttcggtggcgttattttcgtttattgtaagttttgtttttcgggtttatgttattttttcgttttagtttttcgagtagttgggattataggcgtttattattatgttcggttaattttgtttttgtatttttagtggagatagggttttattgggttagttaggatggttttgattttttgatttcgtgatttatttgttttggttttataaagtgttgggattataggcgtgagttattgcgttcggtttatcggttgtttttagatattgtattttttatttttttttatatgtttttttgtttaatgaaaagtgtattgtaagaaaaattttgtttgtgtattttaaatttgttttttttgtaatttttttttttttttttttttttttgagatagagtttcgttttgttatttaggttaaagtgtagtgtcgcgattatagtttattgtagttttgatttttttgagtttaggtgattttttagttttagttttttgagtagttgggattataggtgtatttacgttcggttaattttttgtattttttgtagagataggattttattatgtcgtttagtttagtgtcgagttttttagtttaagttattcgtttatttcggttttttaaagtgtcgggattataggtataagttatcgtgtttggttattttttttttttaaatgatttttgaaatattatttgtagttttaaagtttgtatttatttaaataattggttttattttagggatgtaggtatttttgtaatattaaattgttatattttatttcgttagtatgggagtaaaattgaggggatgtttgtatgaattttgtgaattatgatggttttaagttattgtaatttgattaatagaagttttattttggggtttattttatttttattatttatttattttttgagtggagttttattttgttgtttaggttggagtgtagtggtgttatttgggtttattgtaatttttgtttttggggtttaagtgatttttttgttttagtatttcgagtagttgggattataggcgtaggttattatgttggttaattttttgtatttttagtagagatgggattttattatgtcggttaggttggttataaatttttgattttaagtgatttgtttattttggttttttaaagtgttgggattataggtatgagttattgcgtttggtttattttgggatttttttttatagtgtttttatgttgttaatgtagttgggggtttagtattattgttggttatttaattttgttggaggttattaggatatattatttttgtgtagtgagttgttaaggagagttttaggtaaaattatttaggtttatggtgttagtgtttttgtggagatatttaatttttgaggtttatttatattgttatttttttttaaggtattaggtgatgagtttttttgatttagtattttgattattttttttatatttttttttttttttgagatagagtttggttttgttgtttaggttggagtgtagtggtatgattacggtttattgtagttttaattttttaggtttaagtgatttttttgttttagttttttgagtagttgggattataggtgtacgttattatgtttggttaatttttttattttttatagagataggatttcgttatgttgtttaggttggttttaatttttgaatttaagtgatttatttgttttgggtttttaaaatttcgggattataggcgtatagtgttaggtttttatatttttatatatttttttgtttttttagttgtgaaatggagataatgatatagttttaatttacgtgggatgtttagtatagtgtttggtatttgatagatttttttttttttatttgaaatttatttttgagttgggtacggtggtttatatttgtaattttagtatttgggaaaattaaggtaggtagattatttgaggtgaggagtttaagattagtttggtaaatatggtgaaatttcgtttttattaaaagtataaaaattatttgggtgtggtggtatatatttgtaattttagttattttagaggttgaggtacgataattatttgaattcggtagatggaggttgtagttgagttgagattgagttattgtattttagtttgggtgataaagcgagattgtttaaaaaaaaattatttttaatttaatataaaattttttgaatttttttttttttgagttgtttttttatttgagtttattttatattattgaatagttaattatagaattgtgtattattttttttgatttttagatttttagttttttatagtattttgtttttttttgtcgtattagttatagttgtattttttttttttttttttttgagatagagttttattttgttatttaggttgtagtgtagtagtataattttagtttattgtaattttcgtttttcgggtttaagtaatttttttgttttagttttttaagtagttgggattatatgcgcgtattattacgttaggttaatttttgtatttttagtagagacgaggttttattatgttgttaggttggtttagaatttttgattttgtgattagtttattttagttttttaaagtattgggattataggtatgagttattgtattcggttatagttgttattttatttgtgtgattgattatcgtatgacgtttttattgaagtgtagtgaaggtaggaaatatgatcggtttttataatatttttaatatttattattataggtggtatatagtagggttttaataaatatttgtaaaatgaataaagttaatgagtgtttatgtttgtagttttaattgttttgaagtaaatatttgattttttaatttttattagagtgttttgtatatagtaggtttaattatttttttttttttattaattatttatgttttgtaagaatttagttagttgattttttgtattttataagcgtgatgattgggtgttttcgtgtgagatgcgttattttcgaattttgttacgacgtcggtatattgcgcgtttgatatgaagaaaaaaaaaatttagttagtttattaggtatagtggttaaggtttgtaatttttgtattttgagaggttaaggtaggaggattatttgaatttaggagttcgagattagtttaggtaatatagcgagatttcgttttaaataataaataaaaataattagtcgggtatggtggtgcgcgtttatagtattaattattcgggaggttgaggcgagacgatcgtttgagttagggaggttaaggttgtagtgagttaagttcgcgttattgtattttagttcgggcgatagagtgagattttgttttaaaaaaaaaaaaaatattaaattttagaggggcgaaaaaaaattttatagtggaaatatagtaacgagttggtttagtttcgttttcgttataacggtttacggtgttggaggatttttttgcgtacgcgtatagttttcggtcggttattttcgcgagcgcgttttattttttatcgagcgcgcgcgaagattacggaggtcgattcgggagcgcgtacgtagtttcgtttcgcgttcgattcgcggatttcgcggcgttcggttcgggtggtttggatcgcggagggaatgtttcggagggcggagaattgggacgaggtcgaggtaggcgcggaggaggtaggcgtcgaagagtacggttttgaagaagacggcggggaggagtcgggcgtcgaggagttcggttcggaagagttcggttcggaggaattgggcgtcgaggaggagatggaggtcgggcggtcgcggttcgtgttgcgttcggtgaattcgcgcgagtttttttaggttattttttgtaatcgtagttcgcgcgtcgtgttgttcgtatggtttaatttcgacggcgagtcgtagttttatttaacgttgtcgtttggtacgggtcgtcgtatttatagttatcgaggtacgggttcggcgtttaggttcgatttagtagggacgatagtacggtttgaagtttttttatcgtttcggggtttattttgtagacggggaattgaggttttttgaggtaggatatatttagggtgacgttgttcgtaagcgttagagtatttttttttttttttttttttttttgagacggagtttcgttttgtcgtttaggttggagtgtagtggcgcgatttcgatttattgtagttttcgtttttcgggtttaagcgatttttttgttttagttttttgagtagttgggattataggcgtgcgttatcgcgttcggttgatttttatatttttagtagagacggggttttattatgttggttaggttggtttcgaattgttgatttcgtgattcgttcgtttcggttttttaaagtgttgggtttatgggtatgagttttcgcgttcggtttagagtattttttataaggtcgaatagtttgtatttgaaggtggttttttttagttttttattttacgtgtattttttttttaaagaaaagttgtatttttaatattttatttgtttagtttttatgattttagtgggttagttttgcgtagtttttgttttcgtggagaatatattttttttggggagattgatagatgtaaagataggaataagttagggttatgttggcgtcggaagagtcgatcgtgtgtggcgtgggaaattgatttatttgtttgttgggagatggaggggttgcggttgtgtggttttagttaaggagtatttttcggagaaggaagagagtaggatggagtaggaattagttaattttaggtaagaggttttagatatgcgtgcgttgagatttggagttttgggagaggatgtttaaaaggtgattttatttttaggaatatgggggtattgaaatttttttttttttttgagacgggagttttgttttgtaagttggagtgtagtggtttacgttagaatgtag

SEQ ID NO: 354 - DNA, 6412 bp, Artificial Sequence
  chemically treated genomic DNA (Homo sapiens)
ttgtattttagcgtgggttattgtattttagtttgtagagtaagattttcgttttaaaaaaaaaaaaaaattttagtgtttttatatttttaggggtaaaattattttttaagtatttttttttaagattttaggttttaacgtacgtatgtttagaattttttatttagggttggttagtttttattttattttgttttttttttttttcgggaagtgttttttaattgaaattatataatcgtaatttttttattttttagtaggtaggtaagttaattttttacgttatatacggtcggttttttcggcgttaatatgattttggtttgtttttgtttttgtatttgttagtttttttaggaggaatgtgttttttacgagggtagggattacgtagaattggtttattggagttatgaggattgaatagatggggtgttaaggatgtagtttttttttgaggggaaaatatacgtggggtgggggattggggggagttatttttaaatgtaaattattcggttttataaagaatgttttgggtcgggcgcggaggtttatgtttataagtttagtattttgggaggtcgaggcgggcggattacgaggttagtagttcgagattagtttgattaatatggtgaaatttcgtttttattaaaaatataaaaattagtcgggcgcggtggcgtacgtttgtaattttagttatttaggaggttgaggtaggagaatcgtttgaattcgggaggcggaggttgtagtgagtcgagatcgcgttattgtattttagtttgggcgatagagcgagatttcgttttagaaaaaaaaaaaaaaaaaaaagaatgttttgacgtttacgagtagcgttattttggatgtgttttgttttaaggggttttagtttttcgtttgtaaaatggatttcggggcggtagaggggttttagatcgtgttatcgtttttgttgggtcgggtttaagcgtcgggttcgtatttcggtagttgtggatgcggcggttcgtgttaggcggtagcgttgggtagggttgcggttcgtcgtcgaagttgagttatacgggtagtacgacgcgcggattgcgattgtagaagatgatttgggagggttcgcgcgagtttatcgagcgtagtacgggtcgcggtcgttcggtttttatttttttttcggcgtttagttttttcgggtcggattttttcgggtcggatttttcggcgttcgattttttttcgtcgttttttttagggtcgtatttttcgacgtttgtttttttcgcgtttatttcggtttcgttttagtttttcgtttttcggggtatttttttcgcgatttagattattcgggtcggacgtcgcgggattcgcgggtcggacgcggggcggagttgcgtgcgcgttttcgagtcgattttcgtagttttcgcgcgcgttcggtagaggatggaacgcgttcgcggaaatagtcggtcggaggttgtgcgcgtgcgtagaaggattttttagtatcgtaggtcgttgtaacggaggcgaggttaggttaattcgttattgtatttttattataaaattttttttcgtttttttaaggtttggtgttttttttttttttgagatagggttttattttgtcgttcgggttggagtgtagtggcgcgagtttggtttattgtagttttgatttttttggtttaagcgatcgtttcgttttagtttttcgagtagttggtattgtaggcgcgtattattatgttcgattaattatttttatttgttgtttgaaacggagtttcgttatgttgtttaggttggtttcgaatttttgggtttaagtgatttttttgttttggttttttaaagtgtagggattataggttttagttattgtgtttggtggattaattgaattttttttttttttatgttagacgcgtaatgtgtcgacgtcgtaataaggttcgagggtggcgtattttatacgggaatatttaattattacgtttataaagtataaaaagttaattaattgaatttttataaggtatgggtgattagtaaagagggaaaaataattagatttattatgtgtagagtattttggtggaaattggaaaattagatatttattttagagtaattaaaattataaatataaatatttattaattttgtttattttataaatatttattaaggttttattatgtattatttatggtgataagtgttgaaaatattgtaaaaatcggttatgttttttgtttttattgtattttaataaaagcgttatacggtaattaattatataaataaaatagtaattatggtcgggtgtagtggtttatgtttgtaattttagtattttgggaggttgaagtgggttgattataaggttaggagttttagattagtttgataatatggtgaaatttcgtttttattaaaaatataaaaattagtttggcgtggtggtgcgcgtatgtaattttagttatttaggaggttgaggtaggagaattgtttgaattcgggaggcggaggttgtagtgagttgagattgtgttattgtattgtagtttgggtgatagaatgagattttgttttaaaaaaaaaaaaaaaaaaagtgtaattgtgattagtacgataaaaagagatagggtattatagaaggttaaagatttgggggttaaggaagatggtatataattttgtgattaattgtttaatgatgtgggatggatttaagtggagaagtagtttagaaaaagaagggtttagagagttttatattaggttaaaaataatttttttttagatagtttcgttttattatttaggttggagtgtagtggtttagttttagtttagttgtaatttttatttgtcgagtttaagtgattatcgtgttttagtttttggagtagttgggattataggtgtgtgttattatatttaggtaatttttgtatttttagtagagacggggttttattatgtttgttaggttggttttgaattttttattttaggtaatttgtttgttttggtttttttaagtgttgggattataggtgtgagttatcgtgtttagtttaaaaataaattttaagtagaaagaaaaaaatttattaagtgttagatattgtgttaagtattttacgtgaattaaggttatgttattatttttattttatagttaaggaaatagaagggtatataagaatgtgaaggtttagtattatacgtttgtaatttcgagattttgggagtttaaggtaggtggattatttgagtttaggagttggaattagtttgggtaatatagcgaggttttgtttttataaaaaatgaaagaattagttaggtatagtggcgtgtatttgtagttttagttatttaggaggttgaagtaggaggattatttgagtttgggaggttgaggttgtagtaagtcgtgattatgttattgtattttagtttgggtaatagagttagattttgttttagaaaaaaaaaaaaatgtgaaaagggtagttaaaatgttggattagagaggtttattatttgatgttttaggagaaaatgatagtatgagtgaattttaggagttggatatttttataaaagtattgatattatgaatttaagtaattttgtttagggttttttttgatagtttattgtatagagatggtgtattttggtggtttttagtaggattaagtgattagtagtgatgttggatttttagttatattaataatatgaaaatattgtagagaaaaattttaaagtaggttagacgtagtggtttatgtttgtaattttagtattttgggaggttaaggtgagtagattatttgaggttaggagtttgtgattagtttggtcgatatggtgaaattttatttttattaaaaatataaaaaattagttagtatggtggtttgcgtttgtaattttagttattcgggatgttgaggtaggagaattatttaaattttagaggtagaggttgtagtgagtttagatagtattattgtattttagtttgggtaatagagtgagattttatttaaaaaataaataaataataaaaataagataaattttaaagtaggatttttgttaattaaattataatggtttagagttattataatttataagatttatgtaaatatttttttagttttatttttatgttagcgaggtgaaatataatagtttaatattatagaaatgtttatatttttaaaatgaaattagttgtttagataaatgtaggttttgagattgtaaataatgttttaaagattatttaagaggaaggggtggttaagtacggtggtttgtgtttgtaatttcggtattttgggaggtcgaggtgggcggataatttgagttgaggagttcgatattaggttgggcgatatgatgaaattttgtttttataaaaaatataaaaaattagtcgggcgtgggtgtatttgtagttttagttgtttaggaggttgaggttggaggattatttgagtttaggaaggttaaggttgtagtgaattgtgatcgcgatattgtattttagtttgggtaatagagcgagattttgttttaaaaaagaaaaaagaaaagaaaaagttgtaaaggaaataagtttagaatatataggtaaaattttttttatagtatattttttattaggtaaaaagatatgtagaaaagaataaaaaatataatgtttaaagataatcggtgggtcgggcgtagtggtttacgtttgtaattttagtattttgtgaggttaaagtaagtggattacgaggttaagagattaagattattttggttaatttagtgaaattttgtttttattaaaaatataaaaataaaattagtcgggtatggtggtgggcgtttgtagttttagttattcgggaggttgaggcgggagaatggtatgaattcgagaggtagagtttgtagtaagcggagatggcgttatcggattttagtttgggcgatagagcgagatttcgttttaataaataaataaagataattggtgatttgttttatttttttttttgttttttttaaattttttttaagggggatatattttgttttgtttgtatgtcgattaattaaaatatataagtataataataaagtaaatattgataatgttatatgtaattagtatgttgttatatttatttcgtttttagtttttgtaatgagttgagatcgtgttattgtattttagtttgggcgataaagcgagattttgttttaagaaaaaaaaaaaaattagagtattttgttatttttaaaatttttttatggttaaattttgtttttattgttaatttttggtaagtattggtttgtttgttttgtgtttttatagttttgtttttttagaatgttatataataaaatcgtattatatgtagttttatgagtttggtttttttttatttagtataatgtatttgagatttatttaagttgtagtatataataatttatttatttttattgttaagggtattttatattatttatttattaattgtaagatattggtttgtttttagtttttagtaattataaagttgttatatatattagtgtataggttttttgtaaatataagttttgttttttttgggtgagaattatttaggagattgttaggttaaatataaagtatatgtttaattttatgagaaattgttaatttgtttttttagagtagttgtattattttgtatttttattagtaatgtatgattgttttagttgttttatatttttgtttatagttggtattattagatttgaggttttgtttttttttttttttttgagatagtttcgttttgtcgtttaggttggagtatagtggtataatttcggtttattgtaatttttattttcggggtttatgttatttttttgttttagttttttaagtagttggggttataggcgttcgttattacgtttagttaatttttcgtatttttagtagagacggggttttatcgtgttagttaggatggtttcgattttttgattttgtgattcgtttatttcggttttttaaagtgttgggattataagcgtgagttatcgcgtttggtttggggttttgttttttaaaaataaaaaaattttagttattttaattgatgtatagtggtattttattgacgtttaatttgtatttttgagaggtgataatgtgttggtagttttcgcggttttcgtttattttcggtatttttttggttttggttattattttggttacgtttgaggagttgtttagtatgcggttgtattgtgggagtttttttttgggttggttaaggttagagtcggt

SEQ ID NO: 355 - DNA, 8144 bp, Artificial Sequence
  chemically treated genomic DNA (Homo sapiens)
atagtatatatgtagatagtgttttcggatttattgttttttagttatagatgtttagatgggttgtcgagttttatatttaaagttttaagagggtggtgggtagcgtttttgtatttatggagtataattttaagtcggatttaatttttaggttgtttattttagttgtttttttatagacggggatattgagatttagaaattttttaaaagtaatattagtttgttaaataaaggtggcgcgatttgattaaagaatataagttttagcgattagtaagttgttttaacgttttttgagtataaaatattaattttattaattaaaagtatagagtggaggtaatttttgggtttgtttgcggtttttttataggatagtgattttagattttttcgaagaaaagggcggtttcgatttttttaaggtttcgcgggggtcgggtgtttttggttaggttaaggtaggagcggtttgaagacgcgcgtttagaaggcgcgggtgaaggcgggtaataagggtagagtttttttttcgagttttgggcgaaggtattttttgtaaaagatatattttgttttttacgtattttaaaaatatttcggtttttaggttttcgagtaattttgttttaggaaaagtattcgttattgtattagtaaagcgtttattaaattatcgaattaaatcgaattggtttaggtttttaatagcgtggaaatttattgaaaataaatgaagagggtaaattataggggtttcgtaggttcgggttcgcgtcgtttaggcgaaagagaggtgggcgggtatcggcgcgggatgagaaattaatttgatatttatcgtgtgtcgagttttttttttgtattttgattaagtatagcgaataattttgtttttgttttaattttaggttttgaagaaatattgttttagttgagtttcgcgtttataagatgaagaggcgttttagatgcgttgaaagaaaggttaaagttcgtgtttttttttattgtttgcggtagaatttggtttcgtatagtttggattcggataagttaagtttttttttatttttagaatttgcgtggtcgtcgtttgagcgaagtttagtgaagatttatttttgtattattatacgcgggagttatttacggatacgacgttgttttagaaagttatttagttattggaggtgtatgtgtttattttagttttttacgatatttaatgtgtatttaagtgtgtgttaatatcgtattataagggttggaggtgtttttggatattttagcgttgcggaggtagtatagtataggcgtttattttcgcgttggttttatttcgaatttagagtttagacgtttgaaaagcgttacgtttggtgataatttggcgtttttttaattaataaaattttttttaaggtagagttagatattgcgtcggttttttggttttattttcgtggggattagtagtttcggaatttttcggattttaaggggttttagacgttttttcggtttttgcgaatagttaggtttttagttttgtttggttttggaggatgtcgggggttagtgtttgcgtgtatttttatttttcggttttttttttagtcgtcgttttcgttatttttacggtttttgggaagtagttgggtaagagttgcggttaaaaggggtaggagaggggggtgttttagagcggagagtttttggcgttattgtttcgcgcgtagggggcgtttttcggtttatttattttgattgcgaatagcgggttggttttcgaggtagttgggtaggtagggcgcgttaggaaatattttggtttggtcggatgacgtttggttgggcggaggaggatcgaagggttcgtagcgataggtttcggttgtgttagtgaattggtcggaaaagtggatagtgaaggcgtttaggtattgtttttcgtgcggtttcgcgtcgttttagttcggtttttgtttgatgaaggagtgaggcggcggcggcgggggtggcggcggagtcggtggcggcgcggggtcgtttaacgattcgtaagtcgaagcgttcgggggcgtaaagtttagtatcggcgtttattgcgtcgcgtcgtttataggtagggtatagtcgtcgtcgttatttagggaggggacggcgggtagtagcgcgtttaggtttcgtacgtcggagtttatttgttgcggtttagattcggacgtttcgcggttttttcggttttggagacgtttagcgttggtttcggcggcgtttaatttggtttagatgtcgttcgggtttcggattttttgttgttttggttgttgtaggtatttaggttcggagcggagcgtgtgttgagacgtcggtttcgggatatacgtggaagtcgggttttgtagtaagaggaagtttaggatcgcggcgaggagacggcggggttcgggcgtttgggttgtcgtttcggttttgggtgggtgggtgggtgaatgagtaggtgggagggagggcgggaagtgggggagcggataggcggtcgggttgcggagagttttcgggtgtgggcgttgttttgaattttttattttagttgtttggttgtttttagttttttaaagtttaaataagaggggtcggcggcgcggggaagaggaggagttaggaggttcggtcgttttatttatttagtagtttaagttcggttaggtagcgcgcgttgttttttgggggcgttttcgtagttggggtgagggcgggttcgagggagcgtttttttcggagatatttttttttttaatttaatacgcgtttttagttggtcggtgtggtataattttttttttattttttttttttggttttcgttagtgtgggagtttcgttttattggagagttcgtttaggtaagtagtgagttcgggtagggtcgaatgcggtgggagtagagatggggttgttaatttaaaagagtggtttggagggaggggtaggtaggttttaagagggcgggaattttaggaaagcgtagaaagaatttagttaagttttaaagaagcgtatatttttgttttgtatttttgagtttggtttttgtttttagaattgtcgggtaggggagtggttatgattttggggttattggggaaagaggtggttttttgtgggttttagaggtcgggattgaaagcgaacgttttttagttgggtggtcgggagttgtattagttataagtcgggcgtatttcgatcggttagtagttgtttatttggtgaggtttgcgttaggcggaaggcggttgtcgtttatttaaaattggagttagtagtatttagtttttttttttagtgaggaatatttaatttttttacggttaagtcgggaaaatagcggttagtttaggagggaagaaaatttttgggtaaacgtttaaagtttgcgtatatttcggtcggagtattttggcgtttagtttggggaggaggggtgaaggggagggtttggatacgaagttcggtagggagcgggtaatttttggagttatttcgtcgagtattgtttgtggttttggtcgaggatattattttggttgtttagtgattgattaggaggcggaagttagttaaggggattaaggagtggagtagggagaatttttatcggtttacgggcgcgagttagtgttcgaatttttgggagttcgaagagtttcgttaaatttgatttttttcgtttagtttttgtttggtagttttcgcgttttagagtaggtgtttggggcgggtagggggtgttttggtttggtttttggattttttaaaggagttagtatttattgggaaataatttttaggtaaggagaagaatcgggggtcggagcggagcgtgttttagaggtgcgtataaaattttaggggcgttaggaggtagtagcgacggcgtagcgtgggacggttaggcgcgacgggagggaagtaatcggttgtagttcggttttttgtatttggttggttcgggttggggttgtaagttttttagttaaatttatgtgaagtaaagtagttgtagtttgataaagaatggcgttttaataaatgatatagtaattttttacgttttggtttttagtttgtattgtataaacgttgtcgttattaaattttggttgcggattcgaagtgtgtgcgggtttaggatttattcgaagggcgtattttttgggaatgcgtatttcgtaggcgtaggagattttgagggtaaagatgcggtatttgagtttttcgtttgttttttaggttatttttgttgtttgattttgcgtcgtttttatttagaagtttttaaaattattattaagaaaagaaagattttataagatattgtttttacgttttttgtttagtttttttttatacgatttatttttaaatttttcgcggggttcgcgcgtttggttttttgagtggagaaaggattttcgagataaaatttattgttagttgttttaagaattttttagatttttgtatttttttttttttttttcgtttattatttttatttggaagtcgttttttttaattaggatttaattgtgaggggcgaggagttttttatgaaaagtcggggatttttatttttaaacgaaaagattgagattgtttttttttttattatttttggtatttttagcggggggagaggaggttatttgaagggaggttggtttgaatgtgagtcgttgtgtttgtgaaatttaggtaaggtaaagatacgtaaatttttgttaatattttttaaaaataagtttttgtttcggggtgagggatgtaggggtggataggaggaaaggagagttaagtaaatgtagaattttttttttttttgttatttatttttttagaatttttgtgggggcggggaggggaagagtatcggtgcgaatttcggggtgttttttcgttcgatttggattttttcgattaaagaggtgggaggagttttttgtagtttgcggggttaagaagaaagtgttaagttgaggagtcgtagtcggaggattttagggattcgataggaagttttcgtacgattttaacggatttatatgttcggaagtttaggcgatattaagttagcgttggggaattgacgtatttttgtagtcgtagggcgttttatgtttttttgtttttttttttgttgtgggtaacgttttttgcgggagatttgaggttttttaagggggatatgttagttatattggttttggcgttttgagttaagtattaggatttatagtttagtacgaaggtaggtagtatttttattcgtcgcggacgataggcgtttttttgtattttttttagttcgcgaggttcgtttttcgcgaggttttagagaaaagtaggttgtggaaaattgggcgttttttttttttatttatttttttatttttgttagcgtcgagatttgtagtagaggtttttggtttgaattatcgattggtaaagaaagttgtagattaaatttttcgttttatagagaaggaaattgaggtttagatagtcgaaggagaggtagtttatggagcgtagcggtaaagagtaaggggttggtggttttagaatggaattttagttttgttaggtaattaatagttgtgtgattttagacgagtttcgtagtttttttgagttttagtttttttattggttaaacgggataatgggatattagcgtttattttatagagttgttttgaggattagataggagagtagtgtgggtttttgatttaattaattttatagtttttgttattattattgtttaaggataggaaataagttagtggtaacgtcgagttgaaattcgggttttttaacgtttagttggaggttttatttattatttttttatttttttagagttaatgggatgtagaggcgaggatagtttttggaaaattatgtggcgttgatatattggtaaagcgtaggtatttcggtttcgaaggtgtataattattgtaatatgaaaaaatcgaggttgggtaggagtagggtagtgaggattttttaatttttatttttatttcggcgttgtttattgtatttgatagagcgcggagttgggttgttatagtcgtaattttagggattagtgcgtacgtttgggtcgtttttcgggagttatttagcggtcgcggataattgaataaatattttaaagcgttgcggtcggttaagggcggggatagttatattgcgcgcggggttcgtaggtcgtaataaagagtggttcgatttcgttgttgtttgtcgcgggagaggaataagttttcgattagcgttttttttcggggttcgcgtttcgagttttacgcgtaagatagtttaatagttgtttttttttttttcgtcgattttaatttttcggaatttgtttattcggggttgtagggtaagtgtttaggatggtttttagtttcgcgttggcggtgaaaattttaacgttatttttttaattaaaaaaaggggggggtaagggaggggttttgtgataattatttttagttttttttgattattttaaaattaagtcgattttttttaattagtttttatttattgttttaatttttttcgttgattttatttgggagttcggaatcgttaggtattgtcgaatgcggtgtaaaattttttttttttttttagttcgtagtgtttggagtcgttggggttattcgtttgttttgatgttatcgcgagatggttttcgagtttttcgagagtttttagtgaaaggatttcgcggtattgtttttattattatatcgtaaatttttttaaattttggaattaattatatagaggatatgttttaatttgttttgtattaatgttatagtggggatggaggttaggtcgtggttagagtagatacgtaggtttatgaaattgatgaattgagagttgtttttagttttgagcgtattatttggaattttagtttgaggttataattagaatttttgattttagatttaattttgtaaataataggggaaaaaaatggggaaaagaaaaattacgagagagggaaaaaaaattattttgtatttgtaaaaaaaaaaaaaaaaaaaaaaaaaaaaaaaaagttatataattttaaaattttttcgttttagataattttttttaagtattttttttgtgttttttaatttataaaagataatggaatgttttatagattggattttattttatttttttttttttttttaattgtttttagtttaatagttgttagttttattttagtgttgaatttaattatataggaataaaatattttttagtaaatttgtttgttaaatattttgttatatttattttttttttgagaaatggtttaattatagaaatttatttgtatttaggaattttttttttttttttttttttgatcgttattttagtttaatcgtaagtagagattttatttgtgtagtaattttatttgtgttttaaattcgtttagttaattttttttttttttttttagtaatattttgttttattttttttttattttgattttttgaagaaaacgaaggattaagtagtattggagaatttgttaaatttattagtataaatgtttagataaaacgagatataaattatttagatgtattaagttataaagtattttaatgaagttagttttttgttagggttttggtgtataaatgtttatataaaataaggtattagtattattttttaaattgaatatatgttgtaaaaatatttaaggttgagttaggaatatggggggagggtgtagtagggtaggaaggggatattttttagattagtttgttaatatagtggtggtttagaaagtatggtggaaaggaaaaattttaatcgtttatatttggagtttttttagataatatgtttttaaataacggtatgtaggatatatttgagagtaaaggaataagagaaaaaaaagatgattagagggagaaaggtattgatttttgtagaatgtatttgttttttaaagattagtttagttttataaaaatttatttagaggaggtattggt

SEQ ID NO: 356 - DNA, 8144 bp, Artificial Sequence
  chemically treated genomic DNA (Homo sapiens)
gttagtgttttttttgggtggatttttgtgaagttaaattgatttttgggggataaatgtattttatagaaattaatgtttttttttttttagttatttttttttttttttatttttttgtttttaaatatattttgtatatcgttatttaaaaatatattatttaagaagattttaaatgtaaacggttgaaattttttttttttattatattttttgagttattattatgttaataaattggtttaaagaatattttttttttgttttgttgtattttttttttatatttttaatttaattttggatatttttataatatatatttagtttgaaagataatattgatattttgttttatatgaatatttatatattaggattttggtaagggattgattttattgggatattttatggtttaatatatttgaatgatttatatttcgttttgtttaagtatttatgttaataaatttaatagattttttagtattgtttggtttttcgttttttttagggggttaaagtgagaggaaaataaagtagggtgttattaaagaaagaaggaagaaattggttaaacgaatttagaatataaataaaattattgtataaataaaatttttgtttacgattaagttggaatggcggttaaaaaagaaaagggaaaaaaaatttttagatgtaggtagatttttataattaagttattttttaaaggggaagtaaatgtgatagaatatttagtaagtaaatttattgaggaatattttgtttttatataattaaatttaatattgaggtaaaattgataattattaaattgagggtagttgggagagggaaaggggatgagataaaatttagtttataaaatattttattattttttataggttaaaaaatataaaagaaatatttggaaagaattgtttaagacggaaagattttaagattgtgtgattttttttttttttttttttttttttttttttttataggtgtagaataattttttttttttttttcgtggttttttttttttttattttttttttttgttgtttgtaaagttgaatttggggttaggagttttaattgtaattttagattggaattttagatggtgcgtttaggattggaagtaatttttagtttattaattttatgggtttacgtatttgttttggttacggtttggtttttatttttattgtggtattaatgtagaataaattgagatatattttttatataattagttttagaatttaaaaagatttacggtataataatagaggtagtgtcgcggaatttttttattgaggattttcggggagttcggggattatttcgcggtggtattagaatagacgagtaattttagcggttttaggtattgcgaattgggggagagggggaaattttgtatcgtattcggtagtatttaacggtttcgggtttttagatagggttagcgaggagagttaggatagtaagtggggattggttaaaaaaaatcgatttaattttgaaatgattagaagaagttgggagtagttattataaagttttttttttgtttttttttttttttaattgaaggaatgacgttgaaatttttatcgttagcgcggggttgggaattattttaaatatttgttttgtagtttcgagtgggtagatttcgaagagttggagtcggcggggaggggaggaatagttgttgggttgttttgcgcgtggggttcggggcgcgggtttcggggagaggcgttagtcgaaagtttgtttttttttcgcgataggtagtagcgaggtcgagttattttttattacggtttgcgggtttcgcgcgtagtgtggttgttttcgtttttgatcgatcgtagcgttttggggtgtttatttagttgttcgcggtcgttgggtgattttcggagggcggtttaggcgtgcgtattggtttttggggttgcggttgtagtagtttagtttcgcgttttgttagatgtagtggatagcgtcggggtgaaagtaagggttgagaaatttttattgttttgtttttatttagtttcgatttttttatattgtaataattatgtattttcgaggtcgggatgtttgcgttttgttagtgtattaacgttatatggttttttaggggttgttttcgtttttgtattttattagttttgaagaggtagaggggtggtgggtaaaatttttaattggacgttgagagattcgggttttagttcggcgttgttattaatttgttttttgtttttaaatagtagtagtaataaaaattgtaaagttgattgagttaaaggtttatattgtttttttatttaatttttagaataattttatgaggtgggcgttagtattttattatttcgtttgattagtaaggaaattgaggtttagagagattgcggaattcgtttagggttatatagttgttggttatttggtagagttgaggttttattttggggttattaattttttgttttttatcgttgcgttttatagattgtttttttttcggttgtttgggttttagtttttttttttgtaaaacgagaagtttaatttgtagttttttttgttaatcggtggtttagattaggaatttttgttatagatttcggcgttgataggggtaagaaggtgggtgaaagaagggggcgtttagttttttatagtttgtttttttttgggatttcgcgaagggcgggtttcgcgagttaaaggaggtataggagagcgtttatcgttcgcggcgggtgaaggtgttatttgttttcgtgttaggttgtgagttttggtgtttagtttagggcgttaaggttagtgtagttggtatgttttttttggaaaattttaggtttttcgtagagaacgttatttataataaagaagaggatagagaggtatggagcgttttgcgattgtaggagtacgttagttttttagcgttggtttagtgtcgtttgggttttcgggtatgtggattcgttggggtcgtacggagattttttgtcgggtttttggggtttttcgattgcggttttttagtttagtattttttttttggtttcgtaggttgtagggaattttttttatttttttagtcggagaagtttaagtcgggcgagggggtatttcggggttcgtatcggtgtttttttttttttcgtttttataaggattttgagaaaataaatggtagaggagagaggagttttatatttgtttggtttttttttttttttatttatttttatattttttatttcggggtaaaaatttatttttgaaaaatgttggtagagatttacgtgtttttgttttatttgggttttataaatataacgatttatatttaagttagtttttttttagataatttttttttttttcgttaaaagtgttaaggatggtaaaagaagaaataattttaattttttcgtttggaaatgaaagttttcggttttttataaagggtttttcgttttttatagttgagttttagttaagaaaaacgatttttaagtagaaataataggcggggagaaggaagggagatatagggatttggggggtttttagggtaattggtagtgaattttgtttcgagagttttttttttatttaaaaaattaaacgcgcgagtttcgcgaaaggtttagggatagatcgtgtgggagaggattgagtagagagcgtgggggtagtgttttgtagaatttttttttttttaataataattttaaaagtttttgagtggagacgacgtaaagttaagtagtaaaggtggtttgggaggtaagcggagggtttaagtgtcgtatttttatttttagggttttttgcgtttacgggatgcgtatttttaagaagtgcgtttttcgagtaagttttgggttcgtatatatttcgggttcgtagttagaatttaatggcgataacgtttatgtaatgtaagttaaaaattaaagcgtaaaaaattattatgttatttattgaaacgttattttttgttaaattgtaattattttgttttatataagtttggttggaaagtttgtagttttagttcgggttagttaggtataggaggtcggattgtaatcggttgtttttttttcgtcgcgtttggtcgttttacgttgcgtcgtcgttgttgttttttggcgtttttgggattttatacgtatttttgaaatacgtttcgtttcggttttcggtttttttttttgtttaggggttgttttttaatagatattgatttttttagaagatttaaaaattaaattaaaatattttttattcgttttaaatatttgttttggggcgcgggggttgttaaatagagattagacgaagggagttagatttagcgaagtttttcgagtttttaaagattcgaatattaattcgcgttcgtgggtcgatggaggttttttttattttattttttggtttttttaattggttttcgttttttggttaattattgagtaattagaatggtattttcgattagggttataggtagtgttcggcggagtggttttaggagttattcgttttttgtcgggtttcgtatttaaatttttttttttattttttttttttaaattgggcgttaggatgtttcggtcggaatatacgtaggttttgggcgtttgtttaagggttttttttttttttaaattagtcgttgttttttcggtttaatcgtagaagaattagatattttttattggaaagggaaattaagtgttgttgattttaattttaggtaggcggtaatcgtttttcgtttggcgtaaattttattaagtaaataattattagtcgatcgaaatacgttcggtttataattggtgtaattttcggttatttaattgagggacgttcgtttttagtttcgatttttggaatttataaagggttatttttttttttagtgattttaagattatggttatttttttattcgatagttttagaagtaagagttagatttaagggtgtaaagtaagggtatacgtttttttgaagtttgattgagttttttttgcgtttttttgaagttttcgtttttttggagtttatttgtttttttttttaaattatttttttagattaataattttatttttatttttatcgtattcgattttgttcggatttattgtttatttgaacggattttttagtgagacgaggtttttatattggcgaaggttaagaaggggaggtggggggagggttgtgttatatcggttagttgagagcgcgtgttgggttgaagaggagggtgttttcgagagggacgttttttcggattcgtttttattttagttgcgagggcgtttttaaggagtagcgcgcgttgtttggtcgggtttgggttgttgagtgaatggagcggtcgagttttttggttttttttttttttcgcgtcgtcggttttttttatttgagttttgggaagttgagggtagttaggtagttggggtaaggagtttaaggtagcgtttatattcgggggtttttcgtaattcgatcgtttgttcgtttttttatttttcgtttttttttttatttatttatttatttatttatttatttagagtcgggacggtagtttaggcgttcgggtttcgtcgttttttcgtcgcgattttggatttttttttgttgtaggattcggtttttacgtgtgtttcggagtcggcgttttagtatacgtttcgtttcgggtttgggtgtttatagtagttagagtagtagggagttcgggattcgggcggtatttgggttaagttaggcgtcgtcgaggttagcgttgaacgtttttagggtcggaggagtcgcggggcgttcgggtttgagtcgtagtaaatgggtttcgacgtgcgggatttgaacgcgttgttgttcgtcgttttttttttgggtggcggcggcggttgtgttttgtttgtgagcggcgcggcgtagtgggcgtcggtgttggattttgcgttttcgggcgtttcggtttacgggtcgttgggcggtttcgcgtcgttatcggtttcgtcgttattttcgtcgtcgtcgttttatttttttattaaataggagtcgagttggggcggcgcggagtcgtacgaggagtagtgtttgagcgtttttattgtttattttttcggttagtttattggtatagtcggagtttgtcgttacgggtttttcggttttttttcgtttagttaggcgttattcggttaggttaggatgttttttaacgcgttttatttgtttagttgtttcgagagttagttcgttattcgtaattagggtaagtaggtcggggagcgttttttacgcgcggggtagtggcgttagggatttttcgttttaggatattttttttttttattttttttgatcgtagtttttatttagttgttttttaagggtcgtgaggatagcggaagcggcggttggggaggaggtcggagagtgggagtgtacgtaggtattggttttcgatattttttaaagttaggtagagttaggagtttgattgttcgtaagagtcgggagggcgtttggggttttttagagttcgagagatttcgggattgttagtttttacgggagtggaattaggagatcggcgtagtgtttggttttgttttggggagagttttgttaattaaggaaacgttaaattgttattaagcgtagcgttttttagacgtttggattttggattcggagtgggattagcgcgggggtgagcgtttgtgttgtgttgttttcgtagcgttaaaatgtttaggagtatttttagtttttataatacggtgttggtatatatttaggtgtatattaagtatcgtagagaattagaatgagtatatgtatttttagtaattaaatggttttttggaatagcgtcgtgttcgtggatagttttcgcgtatggtaatatagaagtggatttttattgggtttcgtttaggcggcggttacgtaggttttggggatggaagagaatttgatttattcgagtttaagttatgcgggattaggttttatcgtaggtagtggaaggaggtacgagttttggttttttttttagcgtatttggggcgtttttttattttgtaaacgcggggtttagttgggatagtatttttttaagatttggggttagaataaggatagggttattcgttgtgtttagttaggatataaggagggaattcggtatacgataagtattaggttggttttttatttcgcgtcgatgttcgtttatttttttttcgtttgggcggcgcggattcgaatttgcggagtttttgtagtttgttttttttatttatttttagtggatttttacgttattgagaatttaagttagttcggtttgattcggtaatttagtaaacgttttattaatataatggcggatgttttttttggagtaaaattattcgagggtttagggatcgggatgtttttggaatgcgtgggaagtagagtgtattttttgtaggaggtattttcgtttaaggttcgggagaagggttttgtttttgttgttcgtttttattcgcgttttttaaacgcgcgtttttaggtcgtttttattttagtttaattaggagtattcggttttcgcgaagttttggagaaatcgaaatcgttttttttttcgggagaatttgggattattgttttgtggaggaatcgtaagtagatttaagggttgtttttattttatgtttttagttagtgaaattagtgttttgtatttaaggggcgttgggataatttattggtcgttgaggtttgtgttttttgattagatcgcgttatttttgtttagtaggttggtgttatttttggggagtttttaggttttagtgttttcgtttataagaggatagttgagatgggtaatttggagattgggttcggtttgaagttatattttatagatgtagaagcgttatttattatttttttggggttttaaatatggaattcggtaatttatttaaatatttgtgattgagaaataatgaattcgagagtattgtttgtatgtgtgttat

SEQ ID NO: 357 - DNA, 5818 bp, Artificial Sequence
  chemically treated genomic DNA (Homo sapiens)
tggtttgagtattgattcgtaggcggttagagggcggtgggataggcggggtttggagagggttgtgggtgtatatttattgtttaatattttaagtacgcggttagttttaagaaaggggagggacgggaattagagagattttgacgtgggttagggttaatgataggagggggaaagtggggggtttttattattgtagggagggattaggagtaagttggttttttttttttttaatgagaagagtggagggttgttttttttattttagggatggagggtgtaacgagagtaatgtgggaagaatattggggttttggagggcgggggttaaagaaaagagtgggggtttttggagattgggggatgtcgagtaattgaggcggtggttaaagttttagaagtttttttttttttttttttttatgtttgttttggttcggggtttcgggtgatttatttgttgttgagtcgttgataggggaggttagattcggggaatttaaattataggtttaggagggatggatgcgttcgtggcggtgagtttagttgcgttgtttatttttcgtttaatgcgttttttgttgtagtatcgtaggttattatttggaggtattaaagggtttgcgggtcgattgtatattggatttttaggaaggttttatttttagtagtttattttaataaatttatgggattattttagatagaattttgtttttttttgtatttaggtttaatggatgggttgtgtttttttagtttaagggggtagtgttgtttgcgggtgttttaaaggagggtaggtttttttgtttataaattttaaattttggagttttgttttttttttagattttaaagttaaggtaaagttttttttttttttaatattttatttttaattttattttaggggggtggtttgttattgatttttaattttaagtttttaaagttatttacggttaaaattgatatagagaaaaatgaagtagggtaaaggagattagtagtgggattttattttataaagggggagggaaaataaattgaaggaataaatatatggagagatttgaggaagagtattttagaagatagaaaagtaggtgtatagatttttagaaaggagtatgtttggtttaaaggattagaaaagaggttagtgaggttagtggggagaaattcgtaaggaagagagtggtaggtaatgaagttggagggttaggaaggaggtttttttattttgagtgatatggggtttcgttggaaaattttgagtagagaaatgaattaattagatttttgttttaggaaagatggttttgggttgggcgtagtggtttatgtttgtaattttagtattttgggaggtcgacgtgggtagattacgaggttaggagttcgagattagtttggttaatatggtgaaattttatttttattaaaaatataaaaattaggtgggagtgttggtgggcgtttgtaattttagttattcggtacgttgaggtaggagaatcgtttgaaatcggaaggtggaggttatagtgagtcgagattatattattgtattttagtttgtataataagagtaaaatttcgttttaaaaaaaaaaaaaaagaaagaaagaaagaaagaaattggttttagtaattaaattaatttttttgatttttgtagtaaaatggagtattgaaatggagtaattttgggtagtaatgtggggtttaatgaagtttttgggttttttagatgggtattattgtagtatgtttgtatgtttatgtgtatgttttaggagagagataagtggatgatgtaggaaagaaaagaggggatagttgatattatgattatttgatttaaatagaaaagttgggtgtttgttttggtagtatatatattaaaattggaatgatatagagattagtatggtttttgtataaggatgatatgtaaatttgtgaagtattttatattttgaaaaagaaatgttagttaggttataaatagtgtgatttagatttaggggttttatttttttgttttttatttttggtgtgtggaatgttggaataaagtatagtggttttttttttttttttttatttttgtttgataatagtcgttaaagatagggtttttatattttttagttagttttttatttttacggtgttgtattaatttattaggttaaaagatgtgatttaggttttagtgggaagaaatttataagggataaaggataggtttttcgtgatatattgtttatttatttgagttatttatgttgggtgttttttgtagggattattggtttttggatttacggagggtgttggattattatattttttttttttggggtggatttttggaagggttagatatattaggttgggtaaaagggaagaaaaaagggaaagaaggatatttttttttaaaataatttttattaggttttatttgggttaatatgtattttatttaaaatataagtgttcgggaatattaatgaaatttatttggtatttattttttagagtgatttttttgttttagaagggaattttagttatttttgggatttgagattttaggtttaggtttggggaaattttttagttagaaggtattttaaaagataagggagatgaaaaaaatgagagttagaatttaaaagggaggtagaaaggtttaaaaaattatttttatttattaattttgagaagggtttttagtttgtaattgttgtatattggtaagtagttggtaaggtcgaaagagtatgggttttgagttaaattggtttgggttttaatttggttttattattgatttatttattagacgtggattttggataagtgtttgatttatttttaattttgtaaaatggggagagagaagagattttttttttttttaggggttatgtgtgtggtggtggggtatgataattaggttggtagtgttttttattttttatatagggaaaagtagttatttttttttttttttttagatgaagttttgttttgtagtttagattggagtgtaatggcgtgatttcggtttattgtaatttttatttttcgggtttaagttatttttttgttttagttttttgagtagttggaaatataggtgtgcgttattatatttagttaatttttgtatttttattagagatgggattttattatgttggttaggatggtttcgattttttgattttatgatttatttgtttcggttttttaaagtgcggggattataggtatgagttatcgcgtttagtttgttatttttttataggaggtttaaatggttttgaagttgagtaggagtttttgggagagaagagaaaagtgtataatggatgagatggttataggtattttgggtattttagtgtggtgggaattagagttttaggggaaagatagaaatttggtagaaatatttaaagagaagtaaatatatggaggtataagtttttttatttaggtttaatgtagttagtaatttttgtttttttagttttttttattattatatatatagtggatattcgtattattttttattttttttgagtttaggttttagagatttagttattttaggttgggtttattttaatattattttggttgtaggttcggtttttttttttaatgatatgtattggttgatatatattatagtgtgatacgttataggatgttacgaggtataaagggtaatagaatgacgtatatatatatatttaatttttttatgtatatgtttatttatttattttatatatagtttagatattttgtattttttaattatgtttttgagttttttgtcgatagttgttattttttttttgatatattgttttaggcggtgattgtgataaggtgattttatgattttttttgatttgagttaaattttaaaattttttggaaagttttttaatatttttcgttagaataaggagtttttgtacgtattaatatataggaggatgtatttttagaatatagtatatttttatttttatttatatttacgttgttttattttatatatatatatatatatatatatatatatagttatttgtgcgttttttttggcgtatatgagtaaattgtttgttgttttaggtttttttttatcgttaggttttttttggttagtttatttttataatttattttcgggatttttttgattatagtcgtatttacgttttcgttttttttttttttttttttgtttagttatcgggggtttttgggcggttaagtattttttcggagtcgttgtttagaattatagtttttttttcgatatttaggatgggggagagaggggacgtcggaggggttcggggtgacgtcgaggggataattttatcgcgggcggcgaggcgggttgggtttttggcgggtttttttcgtagtatattttcgtcgcgttttttggcggatgttagttttcgacgggtttcggacgtttagttgagtgaggcgggcgcgcgtgggagggtgttttaaggggaggggttcgcggttagtgtaggttcggaggcgggggttatcgggtagggggcgggggtgagtttcgacggttaattcgttagttttcggtttagacgggcgggaattatagtttcgttcgttgtttattgtttgcgtttttaatcggtgcgttttggtgttatagtgcggttcggaggggtagttttttttcgttattttagttagcgtcgtaattataagaggcggtgtcgttcgtcgtggtcgttttagtttattagtcgggatcgcgagttatgttgttcgtcgttcgtttttagggttgttaaagttagattgcgaattttcgttattgtcgttatcgtcgcgtttcgttttatcgtcgcgggtaataattaaagtcgtcgtaattgtagtatagagcgggtaaagttaggtaggttatggggttttgggcgttgttgtttggttgggtttttgttacgttgttgttggcgttggtcgttttgttcgtagttttggttgttaatagtagtggtcgatggtggtaagtgagttggtgcggggtcgttatttgtttcgcggtatagagttaggggttaattttatttagtttttacgttttgggattcgtttgtcgataggtttttttttcgttttgattttttttcgcgatatcgaagggcgatttggtatgaaattgttttagattttagttttgtataagtggggcgaatgattcgttcgcggaggtttaagatattttaggtagggagtttatttttatttagtatcgttttttttttttgagcgttaattttagttttacggcggtggtttattataggtttttttatttcgggaagtgaagggttaggagttcgtttagaaaggaggggagaagagggtgggatttttaagtattttacgttttgggtgggtaagaattgtaggttatgattatttcgtttaggttgatcggaagaggttcggagatttaaggtagatattcggttttcgggtattttttttgtttagttttcggatttagggtttaggcgagtagttttgggattattgggtatatataagtttggacgtttagtttttttaaattagtgagtttgggagagcgggtattattaatttttcgttattttttttagttatatatttttaggaagaggatcgggtggtatagtttttatggttagggtgcggattttttttttgagtttgagttattatacgttttattagg

SEQ ID NO: 358 - DNA, 5818 bp, Artificial Sequence
  chemically treated genomic DNA (Homo sapiens)
tttggtgggacgtatgatagtttaggtttaggaaggggattcgtattttaattataaaaattgtgttattcggttttttttttgggggtatgtggttggagagaatggcgggagattaataatattcgtttttttaggtttattaatttgaaagaattgggcgtttagatttgtgtgtgtttagtagttttagggttgttcgtttgagttttaggttcggagattggatagaggaggtattcggagatcgagtgtttattttggattttcgagtttttttcggttagtttgagcgagataattatggtttgtagtttttgtttatttaaggcgtgaaatgtttaggagttttatttttttttttttttttttttaggcgaatttttggttttttatttttcgaggtggggaaatttgtggtgagttatcgtcgtgaggttggagttggcgtttaaaggggaagggcggtgttagatgagagtgggttttttgtttggggtattttaggttttcgcgggcggattattcgttttatttgtatagagttggagtttggggtagttttatgttagatcgtttttcggtgtcgcggagggaagttagagcggggagggagtttgtcggtagacggattttagagcgtgggagttgggtagggttggtttttggttttgtgtcgcgggataagtggcgatttcgtattagtttatttattattatcggttattgttgttggtagttagggttgcgggtagagcggttagcgttagtagtagcgtagtagaaatttagttaggtaatagcgtttagagttttatggtttgtttggttttgttcgttttgtgttgtagttgcggcgattttggttgttgttcgcgacggtgggacgggacgcggcggtggcggtagtggcgagagttcgtagtttggttttaataattttgggggcgggcggcggatagtatggttcgcggtttcggttggtgggttgaggcggttacggcgggcggtatcgttttttatagttgcggcgttggttgaagtgacgggaggaggttgttttttcgggtcgtattgtggtattagggcgtatcggttaggggcgtagataatgggtagcgagcggggttgtggttttcgttcgtttgagtcgagagttgacgggttggtcgtcggggtttattttcgttttttgttcggtggttttcgttttcgggtttgtattggtcgcggatttttttttttgggatatttttttacgcgcgttcgttttatttagttgagcgttcggagttcgtcgaggattagtattcgttagggggcgcggcgagagtgtgttgcggggagagttcgttaggggtttagttcgtttcgtcgttcgcggtggggttgttttttcgacgttatttcgggttttttcgacgtttttttttttttttattttgagtgtcggaaggaaagttgtggttttgggtagcgatttcggggagatgtttaatcgtttaggaattttcgatggttggatagagaaggaaaaaggggagacgggggcgtgagtgcggttgtggttagggaaatttcggggatgagttgtgggggtgagttaattaaaaggagtttagcggtggagagaaatttaaagtaataggtagtttgtttatgtgcgttagaagaagcgtataagtggttgtgtgtgtgtgtgtgtgtgtgtgtgtgtgtgaagtggaataacgtgaatatgggtgggagtgagaatgtgttgtgttttgagggtgtatttttttgtgtgttggtacgtgtagaaattttttgttttgacgaaggatgttaggaaattttttaaagaattttggaatttagtttaagttagaaaaggttatggagttattttgttatagttatcgtttggggtagtgtgttaggaaggaggtggtaattgtcgataggagatttagaagtatgattgagggatgtagagtgtttggattgtgtgtggagtgggtggatgagtatgtgtatgggaagattaaatatgtgtgtatgcgttattttgttgttttttgtatttcgtggtattttatggcgtgttatattgtggtatgtgttaattagtgtatgttattgggggagagagtcgagtttataattaagatggtattgaggtgaatttagtttggagtggttaagtttttgaggtttaggtttagaaaggatgggaaatggtgcggatgtttattgtatgtatggtgatggagaggattgggaagataagggttgttggttatattgaatttagatgaggaaatttgtgtttttatgtgtttgtttttttttggatgtttttgttaagtttttgttttttttttaaagttttagtttttattatattgggatatttagagtgtttgtgattattttatttattgtatatttttttttttttttttagggatttttatttagttttaaggttatttaggttttttatgaagaagtgataggttgggcgcggtggtttatgtttataattttcgtattttgggaggtcgaggtaggtggattatgaggttaggagatcgagattattttggttaatatagtggaattttatttttaataaaaatataaaaattagttgagtgtggtggcgtatatttgtatttttagttatttaggaggttgaggtaggagaatggtttgaattcgggaggtggagattgtagtgagtcgagattacgttattgtattttagtttgggttatagagtaagattttatttgaaaaaaaaaaaaaaagtggttgtttttttttatatggggaatagggggtattgttagtttggttattatgttttattattatatatatggtttttggaaggagggaagattttttttttttttttattttgtagaattaaaaatagattaggtatttgtttaaggtttacgtttaataaatgaattaatggtagagttagattaaaatttagattaatttgatttaaagtttatgttttttcgattttattagttgtttgttagtgtgtagtaattataggttgggaattttttttaaaattgatgggtaaaaataattttttgggtttttttgttttttttttgagttttagtttttattttttttattttttttgttttttaggatgttttttgattgagaaatttttttaggtttgaatttaaagttttaagttttagaaatgattaggatttttttttaaggtagggaaattattttaaggaataaatgttaggtaagttttattaatattttcgggtatttgtgttttaaatgagatgtatattaatttaaatgaagtttgatggaagttattttagaaagaaatgttttttttttttttttttttttttttttgtttagtttagtatatttggtttttttaaggatttattttagagggaaaaggtgtagtggtttagtatttttcgtagatttaaaagttagtagtttttgtagagagtatttagtatagatagtttaagtaaatggataatgtattacggggagtttgttttttattttttatgagtttttttttattggggtttgggttatattttttggtttggtggattgatataatatcgtgagggtgggaggttggttggaaaatatggaagttttgtttttgacgattgttgttaagtagaggtgggaagagaggaaaggagttattgtgttttgttttaatattttatatattaggagtagggggtaagagggtaaggtttttagatttgggttatattgtttatgatttggttgatattttttttttaaaatatgaaatgttttataaatttgtatgttatttttgtgtaggggttatgttaatttttatattattttaattttagtatatgtgttgttaaaataagtatttaatttttttatttagattaaataattatgatattaattgttttttttttttttttttgtattatttatttattttttttttggaatatatatataagtatgtagatatgttgtaatagtatttatttgaaaaatttaaaaattttattagattttatattattgtttaagattgttttattttagtgttttattttattgtaaaaattaaaagggttgatttaattattagagttaatttttttttttttttttttttttttttttttttttgagacggagttttgtttttgttgtgtagattggagtgtagtggtatgatttcggtttattgtaatttttatttttcggttttaagcgatttttttgttttagcgtatcgagtagttgggattataggcgtttattaatatttttatttaatttttgtatttttagtagaggtggggttttattatgttggttaggttggtttcgaatttttgatttcgtgatttgtttacgtcggttttttaaagtattgggattataggtatgagttattgcgtttagtttagagttattttttttaaaatagaagtttgattagtttatttttttgtttaaaattttttagcgagattttatgttatttaaagtaaaggggttttttttttagttttttagttttattgtttattatttttttttttgcgaatttttttttattagttttattggttttttttttaattttttgaattaagtatgtttttttttaagggtttgtgtatttgtttttttgttttttaaaatgtttttttttagatttttttatgtatttgtttttttagtttgttttttttttttttttataaaatagaattttattattaattttttttattttgttttatttttttttgtattagttttgatcgtggatgattttaaaggtttgaagttgaaaattagtagtaaattatttttttggaatagggttagaggtgagatgttagaggggagaggggttttgttttgattttgggatttggggaggaagtagggttttagggtttagagtttgtgggtagaggagtttatttttttttgaagtattcgtaggtagtattgtttttttgggttgggaaggtatagtttatttattaggtttgagtatagaagggggtaaaattttgtttaaggtaattttatggatttgttggagtggattgttgaaagtggggtttttttgagagtttagtatgtagtcggttcgtagattttttggtgtttttaggtggtggtttacggtgttgtagtagaaggcgtattaagcggagggtgggtagcgtagttgagtttatcgttacgggcgtatttattttttttgggtttataatttgggtttttcgggtttggttttttttattagcggtttagtaatagatgagttattcgggatttcgggttaaggtaaatatggggggaggaggaggaggaggtttttgaggttttagttatcgttttagttgttcgatattttttaatttttaggggtttttatttttttttttgattttcgttttttagggttttagtgttttttttatattgttttcgttatattttttatttttaggatgggaagggtagttttttattttttttattgaggggaaggggaattagtttgtttttagtttttttttgtagtgatgaaagttttttatttttttttttttgttattggttttgatttacgttaaggtttttttggttttcgtttttttttttttttggagttggtcgcgtgtttggggtattaggtaatgggtgtgtatttatagttttttttaggtttcgtttgttttatcgttttttagtcgtttgcgggttagtgtttaggtta

SEQ ID NO: 359 - DNA, 7497 bp, Artificial Sequence
  chemically treated genomic DNA (Homo sapiens)
gttgaaaatttgtggagattttgaatgatattatgtttttttaaggagggtggagttggttaggtgtggtggtttacgtcgttaattttattattttgggaggttaaggtgggtagattatttgaggttaggagttgaagattagattggttaatatggcgaaattacgtttttattaaaaaatataaaaattagttaggcgtggtggtgggtatttgttattttagttatttaggaggttgaggtagagagaattgtttgaattaaggaggtagaggttgtagtgagttgagattatgttattgtattttagtttgggtaatagagtgagattttaataaaaaaaaaggtggagtttttttttggatagtaaaaaaaagtattattgggaaatcgtgattttgtttagggttggttttagattttatttaggttgttttgtttttattttgtttttatttatgtaatgtggtttttatttttaaggttaagtgaagaataagaagtaagagaagagttttattttatttttagagagtatttttattgattatagatttttatgtggatttttttttttttttagcgtgttatagatgttattttattgttttttgatttttattgttgttgataagaagttaggtgtaatttatatttttgtttttttatatttaatgtattttttttttttggttgttttagagattttttatttatggttttaaatagtttgatgtgtgttagtgtgatatgttgagtaattatttttttggggattttttattttttttagattggtaaatttatgttttttattatttgggttaaatttggggtattatttttaaaatattttttgttttattttttttttgttttttttttggaattttattttagaaagtataaattttgtagattagataattgtattaacggggttttgaatttttattttttttttttggtttttatttttttgttgagattttttatttgtttattgtttatttgtttattttatttttttttaaatatttgaatatatttataatagttattttaaaaattttttttttgttaattttttttatatttgggttattttaggattagtttttattgattgtttttttttaagtatagattatttttgtgtgttttttatttgtttatatttgtttgttgggtttgttggttggtttgtttagaaatagagttttgttatgtttttttgggttggttttgaatttttggatttaagcgatttttttttgttagttttttaagtggttgggattatagacgtgtattatcgtgtttagtttattaaattttttattgttaattatttattgtagagaatttgtattatgttgttttttttttaatgggtgttgttttatttttataaatttttttggttttgtttgattttttattattttttgttatagtatgtgttatggagaaataatattttgatttttgttttaagatatgttttttagtttgattattgtttttaaggtaaggtttttttagtattttaattgaatttttgatatgtttagtgaggtttttttgttttgttgtgatggaattttaatgttttttaataatgtattatatgtagtaggtaatttttgttaggttttgtagagttttgttatgtttatatttagtttagttgttggtttagattggtggtgaatttttatgtagatttgcgggggagtttttgttttatagttatttatttttagaaattttagttgttttaatagtttaaaattttagtttttttttttttaattgaaattattgttttgtttgtattttatttttttatattttagaaaaatgtttttttttttagtagaaaaatttggataattgtaagatagttgtggagtaaaattaatgtgtttttttttttttaaggattatagtcgtgtggggtttattgtttaatatttgaaaaggagagttatttaggtatttgttatttttttatggttggaagtaaaaaatttcggtgtatattaatttaaaggtatattgagatttaaacgattgatattataatttattttttggttagtgagtggttattttaggagttattgtttgaggaagaagttagtttagattggaagataaatgattatttggttgagaagtaattttttatttttaaagggtggagatggtttagttgtaaatgagtttttttatattgttttgggagattagataaataatggatttaattaagaaaatagattgatttatttggttatagtgttatattgaagttaaaagtaaattaatattaagttttagaaagagaattgggttttgtatattgtaaatgaattttatagttaattttgagattttttattgaagaaattaaaaattagatgtttaaattaataaatttaaagatattttgattttttttttttttattttattatttgttatagttaggttgaagttatatgtaatttattttattatttattaatttttttttaggatggtggttttgattgtaaaagaagtaaggtttgttgtaattttttttttttttaatttttttgagtattttttaattatgtttattagcgaatattttatttttaaagcgaaggggtttatcgagagaataggtatagataaggagggagtaaaggtttttttggtaggaaaataagttatattggggttaagtaatggtttataagtgaaaggggtggagaatgggagggaaatggaattatagatttggaagagataagttattgagtttagacggtttttagataggttaggaaggggtgtttgggtggattttttttttatatttggatttagttttattcgaatatttttagttttttgttttttattaaaattaattttttttttgtgagatatgtggtattttttttttttttgttttaggatgaagttttttggcgtggatttaattagtttttggggatggtttattttttttttaggaggtttgttttaggtttaggttattttattggttttattattaattgaagggtaggttttttggttatttattaattttttgggcggagagtaagggtttgtaagttgatggttatattttatgtatttttaatattttttagttgtgaggatacgatgtgttgagatgggtggaatttgagttggagttttttaggtggttttaaattataatttttatgagagaattatataattgtttattttttttaatatatatatttatatttttattttatttacggtagaagtgaaattttggtaatgtttttggtttttcggagttaattatttttttttttttaagtgtttggatttattttaagaaaatgcgggataaagaagggtggaggtaagttttcgtttatttttttgttttacgggggaaggaggtttgtgagtataagtatgtaagtatatgagaggcgtgttgttttttggtgtttattatattttttttatggtcggcgtgtatatacggcgagtagaaacgttttttcgtttcgttgtttgtcgttttacgcgttttttttgtatttttcgttcgatcgacgtagattaagtagaatttttttgggtcgcggtttagcgatacggagcggttttggcgaggagttttgtttttttcgagtcgtgggtggcgcggtgtttgtttttttttttttttttttcggatttaaacggggatgtatttgggttagtttgggaggggtcggatttgttagggattagcgtgggggaagggggtggcgatgatagtattttttaggtttttggcgtttttgagtttcgtttcgtttagttttttatcgcgttcgttgtcggcgagggttgacgttttggttagtttaggttcgagggtgggttggagagagggagagttcgttttttcgatttgggcggtatttttttttttacgttttgcgaataattcgttttttatatatatatataggcgtatattttattttttagagtacgtttttcgggcgggtagtgagttttttcgttttaggaaaagagtaatggaatagtttacggtcgttacgagtttttggttttttttttttttcggtgataaacggcgcggttataagttagttattgtttaaaatgttttattcgcgggtttaagttttttttttttggttgggcgggggtttaggtttaggatcgagggttttttaatttttataaggcgtataggttgagcgtttaggcggtaggaggtgtaagggcgtatattttcggcgaacgtttggttgtttcggtttttttttatgtgattttttgcgtttcgtagtttcggagaggagttgggtgtgcgtaaaaattgtattttttttgggtgttttggtagatattgttgggttaggtttcgagggttatggattttttaagtttttttttttatgggttttgtatttaagtttagtattaaggaattaaagttaataggttatttcgtagaggtttggtttttttttaattttgttttgtatagacgcggtagttttaaatttataagtgttagttttttattttagttttagggagagaagcgaagtaatgagttgagaattatttttggatttttgtattttatgtatagtaatttttttattttttggttttttttttcgtttttttatattgtacgtttagggatttgtttgttagcggatggtttcggtaattcggaacgtacgtttcgagagtttacggatgttttttggtttggagtttttttaaaggtttttgtattcgcgtgtgttcgtaattatgtagcgatgttttttttttttcgttttattttatttttagatattttttgttattattttatgtattcgtgtttaaaatttcgcgtttttttttattttcgttaggcgtagtattttttttttcggttgcgttcggaggggagtagagcggacggggcgcgcgggaggcgcgtagagttttcgggttgtaggcgttcgttgcgtttggggaattgggttgtgggcgaggcggttcgggttggtttttatcgttcgttgggtttatcgtttgaaattttattagcgagtttcgttattcgtcgtagacgcgagcggggggcgggggcgcggcgaggcgtcggcggtcgtgacgaggcgttttcggagttgagcgtttttgttttgggtacgtatggcgttcgtatacggagtttgatttgatgtagacgtaagggggttaatatgaacgtttttttcggtggaatttggttttggttttttttgtttttgatttggtttattttcgaggttaattttttatggtggtaagtttacgcgtacgggcgcgggggattttggagatcggaatggggatcgtattggttatatagattttttttggttgcgttttttcgcggtcgtagtagtttcggattttggttcgaattttggttattgtttttttatcgttttatggtgagttttttttttttttttagaagattattttagttttgataattttataaaattatatttttttttaaatgagagtttcgatgtttggtttatttggatttagttgagcgatagtaaaattagttaattttttattttgttgagagacgtgttagtttggtttttagttttagtatagacgtgtgtgtgtgtgtgtgtgtgtgtgtgtgtgtgtgtaaatttattttgaaaattataatcgttttttttattttagtttttatttcgttaaaattgttttaaggtaaatcgacgggttaatttagttagttaggagttgtagaatttaaagcgtgtgattttgtattatttttcgtttttttatattttaggtttattttagtggggcggaagaatattttgttgtttttagttagagattatggttttaatgtaaagttatagatttcggggtttgtttttaagatgttattttgtttataatcgttttcgcgaagagtaattttgttgtttttttttgtacgttggtttgtaatttatttatttatttttgtatagtgatggaatgttgaattatattaggtcgttaaaagttttaaaggtagattttttttttatttagaaatcgttttttatttgtcgattttttggttttggaaagagatagagttgatagttttgtaatttttttgtatttaaaagttttagaatagatattaaaatattgatttagagatattcgttatcgtgggttaatttttaaagaatttggtaaggggttttagttaaattatagattagagtagggaaatttttaggaagatattggagttttttaaaggagtaaggtaatgcgttgatgggaagaggggtttaatttttttttaagtcggttttgaatagggaggcgtttagttttgatattgttgatataggattaaagattgatttattagattgattattttttaataaaatgattatttttgtttttatgggtgtataaatattatttattgtttaggttttttgttatattgttttttagttgttatttaaatatattttttggaagttatagttgtaacgattttatgattatataaaataatgaaaatataagaaaaagatattttttttgtttgatcgttttaaaagatatttatggtagtttgggttatataaaaggtatttttttaaatattttacgattaatagagaatatttgggtagagatgatgatgtaattttttgttaaagtttttttttaaaaagtattttatggagttatagtattgtttgatttttttaaatatttagtgtttttaataataatagaaagaattttttttaaaggatttttataaaagttaaaaagagttataaaatggaaatatttaaaaggttttttagtaaggaaagaatagtttgtttgtgaggagagtgtaatattagatattagcgggtgttgattagatagatatagatagtttttaagatattttgttaaataatgggaacgaagagtttttaaggttagttttttttaaagttaagtttagatatattgtgttattgagatttgagtttttttgagaatagttttttatatattttttttaagatacgttgttttttattcgttatttatttttttaaatgtcgattttgtttttgtgtttttgtttagagtattatttggtagatttagttttatgtttaatagatagttattatagtattttggggatgatttttgtaagattatttattacgtttgtttgttttgtcggtttttttattaaattaaaaagtaaatatttttgttttttaatattattagaaggataaggaatttatatttgaaaagtgttttgaattttttagttttttaggaatattgagttaggtttttttgtttacgttgtttttatttttgtgttggttggttttttatagg

SEQ ID NO: 360 - DNA, 7497 bp, Artificial Sequence
  chemically treated genomic DNA (Homo sapiens)
tttataagggattaattaatatagaggtgagggtaacgtgaatagggaggtttggtttagtgtttttgggagattaaggagtttaaagtattttttaaatatgaattttttatttttttggtgatattagaaagtaagggtatttattttttaatttagtggagaaatcggtaaggtaggtaggcgtagtgagtgattttgtagaagttatttttaaaatgttgtgatgattgtttgttggatatgaagttaggtttattagatgatgttttgggtaggggtatagaggtaaagtcggtatttggggaagtgaatgacgggtaagaagtaacgtgttttggggagaatgtgtggaagattgtttttaagaaggtttagattttagtgatataatgtgtttggatttggttttgggggaagttgattttagaagtttttcgtttttattatttgatagaatgttttaaaaattgtttgtatttgtttaattaatattcgttggtatttgatgttatattttttttatagataggttgttttttttttattgaagagttttttaaatatttttattttgtagttttttttggtttttataaagattttttggaaaaaattttttttattgttattaaggatattaaatgtttggaagaattaaatagtgttataattttataaagtattttttgaaaagaaattttaataaaaaattatattattatttttatttagatgttttttattagtcgtgaaatgtttagaaaggtattttttatataatttaagttgttataggtgttttttgaagcgattaaataaggagaatgttttttttttgtatttttattattttatatgattataaaatcgttatagttgtgatttttaaaaaatatatttaagtgatagttgagagataatgtgataaaaagtttgagtaataaataatgtttatatatttatggaaatagaaatagttattttattgaaaaatggttagtttgataaattaatttttgattttgtgttagtaatgttaaggttaaacgtttttttgtttaaagtcggtttaggaaggaattgaatttttttttttattagcgtattgttttgtttttttgaagagttttagtgtttttttaaaaatttttttgttttagtttgtaatttagttgagattttttattagattttttaaaaattagtttacgataacgggtgtttttgaattaatattttaatatttgttttgaaatttttaggtgtaaggaaattatagggttattaattttatttttttttaagattagaaagtcggtagatggagaacggtttttagatggggagggaatttgtttttggaatttttagcgatttggtatggtttaatattttattattatgtaaaaataaataaataaattgtagattaacgtataaaggaaagtagtaaagttatttttcgcggggacggttgtgaataaggtaatattttagagatagatttcggggtttgtagttttgtattaaagttatagtttttaattggaggtagtaaaatgttttttcgttttattggggtgaatttggaatgtggaaggacgggaaataatataaagttatacgttttaggttttataatttttgattggttgaattggttcgtcgatttattttgaggtagttttggcggggtgggggttgggatgggggaggcggttgtagtttttaaggtgaatttatatatatatatatatatatatatatatatatatacgtttgtgttagagttggagattaggttagtacgttttttaataggataagaaattggttgattttgttgtcgtttagttggatttaaataaattaaatatcggagtttttatttgagggggaatgtggttttatggagttgttaaagttgaaatgattttttgggaaaagagaaggggtttattatggggcgataagagggtagtagttagggttcgggttagaattcgagattgttgcggtcgcgggggaacgtagttaggaagggtttatgtggttaatgcggtttttatttcgatttttaaaatttttcgcgttcgtgcgcgtggatttattattatgaagagttgatttcgggggtgagttaggttaagagtagagggagttagagttagattttatcgagaggggcgtttatattaatttttttgcgtttgtattaggttagatttcgtgtgcgggcgttatgcgtgtttagagtagaagcgtttagtttcgggagcgtttcgttacggtcgtcggcgtttcgtcgcgttttcgtttttcgttcgcgtttgcgacgagtggcgagattcgttgataaagttttaaacgatgggtttagcgagcgataaaggttagttcggatcgtttcgtttatagtttaattttttaggcgtagcgagcgtttgtagttcgaaagttttgcgcgtttttcgcgcgtttcgttcgttttgttttttttcgggcgtagtcgagggagggggtgttgcgtttggcgggggtggggagaaacgcggggttttagatacgggtgtatgaaatgatggtaagagatgtttggggatgaggtgaggcggggaagggggaatatcgttgtatggttacgagtatacgcgaatataggaatttttagggaagttttaggttaaagagtattcgtgggttttcggagcgtgcgtttcggattgtcgaggttattcgttggtaaataagtttttgagcgtgtaatgtgaggaaacgaggaagggggttaggggataaggagattattatgtatgggatataagaatttagagatgatttttaatttattgtttcgtttttttttttgaagttgggatgaagagttagtatttgtaaatttggagttgtcgcgtttatgtagggtaaggttagggaggggttaggtttttgcgaaatgatttgttggttttgattttttggtgttgggtttaaatatagagtttatagggaggggaatttggagggtttatgattttcgggatttaatttagtagtatttgttaaagtatttaggaaagatgtagtttttacgtatatttagttttttttcggagttgcggagcgtaaaagattatatagagaggaatcgaggtagttaggcgttcgtcgggggtgtgcgtttttgtattttttgtcgtttgggcgtttagtttgtgcgttttgtggaggttaagggattttcggttttggatttgggttttcgtttagttaagagagaggggtttgggttcgcgggtggagtattttgagtagtagttggtttgtagtcgcgtcgtttattatcggaaaggaaggaagattaggaattcgtggcggtcgtgaattgttttattgttttttttttggggcggagggatttattgttcgttcgaggagcgtgttttggggaatagagtatgcgtttgtgtgtatgtgtgggaggcgaattgttcgtagggcgtgggggagggggtgtcgtttagatcggaaggacgggttttttttttttttagtttattttcgggtttggattggttagagcgttagttttcgtcggtagcgagcgcggtgagaggttggacgaggcgaagtttagagacgttaaaaatttgaaagatgttgttatcgttattttttttttttacgttggtttttggtaggttcggttttttttaggttgatttagatatattttcgtttgggttcggaaagggaggggagggaaataagtatcgcgttatttacgattcgggaagagtagggtttttcgttagggtcgtttcgtatcgttgggtcgcgatttagggaagttttgtttggtttgcgtcggtcgggcgggaggtgtagggagggcgcgtggggcggtaggtagcggggcgggggagcgtttttgttcgtcgtgtgtgtacgtcggttatggggagggtatgataggtattaaagagtaatacgttttttatgtatttatatgtttatgtttataaatttttttttttcgtgaagtaggggaataaacgaaagtttatttttatttttttttgtttcgtatttttttgaagtaaatttagatatttaggaaagaaaaggtggttggtttcgaggaattagaaatattgttaaaattttatttttatcgtgaataaagtaggagtgtggatgtgtatgttgggaaaggtagatagttgtatgatttttttatggagattatgatttgaaattatttaaaaaattttaatttaagttttatttattttagtatatcgtgtttttatagttaaggggtgttagaagtatatggaatgtgattattagtttataggtttttgtttttcgtttagggaattagtgagtggttaggagatttgttttttagttgatggtgaggttaatggaatgatttaaatttgaaatagattttttggaaaagaaatggattatttttaaaagttaattaaatttacgttagaggattttattttggggtaggaggaggaggagtgttatatgttttatagagaagaaattggttttggtgaaaggtaaaaggttgaaaatgttcgagtgaagttaaatttagatgtgaaaaaggggtttatttaaatatttttttttgatttgtttagaggtcgtttggatttaatgatttgttttttttagatttgtgattttattttttttttattttttattttttttatttatgaattattatttagttttagtataatttatttttttgttaagaaggtttttattttttttttgtttgtatttattttttcgatggattttttcgttttgaagataagatgttcgttagtagatatggttaggaaatgtttaagaaaattaggaggaaagaaggttatagtaaattttattttttttataattaaaattattattttaaagaagagttaataaataatgaagtaaattgtatatgattttagtttagttatagtagatgatgaggtaaggaaagaaagggttagagtgtttttagatttattaatttaaatatttgatttttgatttttttaatgagaaattttagaattgattgtaaaatttatttatagtatatagaatttaattttttttttggagtttaatgttagtttgtttttaattttagtatagtattgtagttaaatgagttagtttatttttttagttagatttattgtttgtttaattttttagggtagtgtaagagaatttatttataattgagttatttttattttttaaaaatggagagttattttttaattaaatagttatttgttttttagtttgaattgattttttttttaggtaatgatttttaagatagttatttattaattaaaggataagttatagtattaatcgtttaaattttagtgtgtttttaaattaatgtgtatcgaagttttttgtttttagttatgagagagtagtaagtatttgagtagtttttttttttaggtattggatagtaggttttatacggttgtgatttttgagagaaggaaaatatattagttttgttttataattattttataattgtttaggtttttttgttgaagagaaaaatatttttttagaatgtaggaaggtagaatataggtaaggtagtagttttagttaaggagggagagattggagttttgggttgttgaagtagttgaaatttttgaagataagtagttgtggaatagggattttttcgtaagtttatatggagatttattattagtttgggttaatagttaagttgaatatagatatgataaaattttgtagggtttaatagagattatttgttgtatgtagtgtattattgagagatattggagttttattatagtagggtagagagattttattgagtatgttagggatttaattgagatgttggaaaggttttgttttaaaagtaatagttaggttaaaaagtatgttttagagtaaaaattaaaatgttgtttttttatagtatatattgtaataaagaatggtaagaaattagataggattagggaaatttataagaatgaaataatatttattaaaaaaaaaataatatgatatagattttttataatggataattaataataaaaaatttaataggttggatacgatggtgtacgtttatagttttagttatttgggaagttaataaaggaggatcgtttgagtttaggagtttaaaattagtttagggaaatatagtaagattttgtttttaaataaattaattaataaatttaataaataaatatggataagtgaaaaatatataaaagtgatttatatttaagagaaagtagttaatagaaattgattttgagatggtttagatataggaggaattggtaggaaagaaatttttaaagtaattattataaatatgtttaggtatttaaaggaaaatagaatgaataagtggataatgaataaatagagaattttagtagaaaaatggaagttaaaagaaagaaatgaaaatttaaaatttcgttagtatagttatttaatttgtaaaatttgtattttttgaaatggaattttagaaagaaagtagaaagaaaatggggtaaaaaatattttggaaataatgttttaaatttggtttagatgatggaaaatataaatttattaatttaagaaaggtggaaaatttttaaaagaataattatttagtatattatattggtatatattaaattatttaaagttatggatgaaaaatttttaaagtagttaaaggaaaaagatatattaaatgtaggagaataagaatatgaattatatttggttttttattagtaataatggaagttagaagataatggaatgatatttataatacgttaaaagaaaaaaaaagtttatatagaaatttataattagtgaaaatattttttgaaaatgaagtggaattttttttttgttttttattttttatttaattttaggaataagaattatattgtatgaataagagtaaaatgaaaatagagtaatttgaataaagtttaaagttaattttagataggattacgattttttagtggtatttttttttgttatttaaaagaaaattttatttttttttttgttagagttttattttgttgtttaggttggagtgtagtggtatgattttagtttattataatttttgtttttttggtttaagtaattttttttgttttagttttttgagtagttgggatgataggtgtttattattacgtttggttaatttttgtattttttagtagagacgtggtttcgttatgttggttagtttggtttttaatttttgattttaggtgatttgtttattttggttttttaaagtggtgggattaacggcgtgagttattatatttggttaattttattttttttaaaggaatataatattatttaggatttttataaatttttagt

SEQ ID NO: 361 - DNA, 6800 bp, Artificial Sequence
  chemically treated genomic DNA (Homo sapiens)
gcgcgtatttcggcgcggggagcggggtcgcgttattagtattattagtcgttattgggtgagtttaggtattttgtagtagtggtgggggcggggagttgtggtggtagtggttgtaatttcgtatttcgggatagcgtttttcggttttttgagcggagttcgttttgttttttagaaaatatttgggttttcgttttgggagagtaggcgggggttagtttgcgaatttttgtttgttttaattgttagttgtatgttaaagtcgaattatatatttcgagggttattgagagtttatttttacgaaaagttaacgtttttttttgtaatataagtttttattttttaaataattttttttatttgttttttaagtttcgatttttatttttatttttttggttttttttattttaagttttttagaaaataaggttagaattgaaattaagatgttttttggaagtaaataattttttttttttttaaaaagttaaaaaaaataataataaaaaattttaagtttggagattttacggttttgtttgattttttaatttttgtttggtatcgaggtttttttttttttttcgtttttttttttttttttttttttttaaatgggtaattcgttgtttggaagtaatttgggttttgcggtgaggtcgtatttttttagtttttgttttttttttagttattttcgtatatttattgtcgaattagttagatttagtttttagatagattttgttaggggagtttcgagggggtaatgcggagagtgcgtagcgaatcgcgggtcgataaatgtgtgtgtgttcgagtgtgtggatttttggttgcgtgtgtgtgcgtgtgtgtttgtgtgtgtaggggagttgttttcgggtttaggacgtagtagttttcgttttttttatttttcgatttttttaacggaagattttttttaggaggttcggtttaagagttttttgttttttttttttttttttcgtgcgtttcggtgtttaaggggttagtattatgcgcgtagaattcggagttattttcgcggttttttttttttcgcggtgcggtgtcggttgttttttgttggtcgttttgaggtaggatttttgcgagtttcggttttttggggcgggcgggcgggtagttgttttttttttttttttatttttgttttttttatttttttcgattattagattttatttttttagtaggggttttcggaggtttttagaggattagtttcgttgcgtcgtcggtcgttgtaatacggaaggggttacgggtttagtttagtaaatgggattcggttagttggatatagggttggtatttttttttttgggtttgggaaggagagtgtcgttttaggaggtttcgggtttggttttagttgttttttaattttttatgatcgagaataagtgttgttttttcgtttttcgttttattttaatcgtttattaaaaagtgggagagaaattatttttaaagagtgggggttggattattattttattttttttttttgtttaaggattttgttttatttttggataaagttgattttttgtcgagagggttagatattttatgtgagaaggtgtgagtggtgtgtgtgtgtgtgtgtgtgtgtgtgtgtgtgtgtgtgtgtgtgtgtattttggggtttggaaagtttagtttaagggatggacgagggggtaggaaatagaggagaattaggttagatcgttttttttttggggtttttttatattcgaatttggaatttgttgttagtgttgaggtttgggcggtttttttttgttatattgattttggtttaaggtgtaattttcgttttttttatttggtaattttttttttttttatttcgtttcgcgcgcgttaatatatatattgttgtggatataatttttgcgtttaggcgtgaggtttagggagtagtggtttttttgtttgtttttttaaagcggattttttattcgtttgggtcggtttattttttagtttttcgcgtcgtttttcgtattttttagggtaggacgttttaagtttttggttgtaattgagtgtttttttgttagtttttgtatttttttttttgttttagggagagattagagtggggaaaatagttttttttttttattaagagtggagattttttttggagttttttattttttttttcgttgttataagtttgggttaaatgggtttttttcgtttatttggcgttttttatcgttttatttttagaaatttggggtttaaacgtagagagtttagtagaaggggatgtttagattgaatgtggtagtgtttcggggtcgaggggagaggatttttgtttggtttttttatttatttttttaagggattgtttgcggaggaggagttgggtgttgcgagattttaggtgtgtattcggttgtttttcgcgtttttcgaacgttttttgaataattttgttattgaggtttttttttttttattttttattacgtttggttcgtatcgtggttggtaaagaaggattaagaatatttttaattcgacgcgaaggttttgagggatatatagaaagggagttacgtcgttgagttgttttggattgaagaggaggacgcgggaacgtttttttttattttatttttgtggtgcgttgagttttttaaacgtttttagttttttttttcgtggtacgcgaggaagatttttagtgtttttatagagttattttttttgagtttcgaaagtgttggaaaatatttagttttttttttgggaaatttagtttttgattagaatttttgttttatttttggggttgatagtttttttagaggttttattttatattgttttttcggatttgattttttggtaaataggcggggatgttttattttatagagtcgatgtatgtgtgagttcgttgtgagttttttgagtgttttaaatttgtggggttttttttcggttgtattgggattgaagagggaagagggttaaggtgttttcgggtaagcggcggggttaagtggagatgcgattcgtgaggttttttttttcgatttttttttgggatattttttgtttatttttattttggagttagggagatttaagttttggtgatcggatgggttcgtttttagttggtttgggttttgggaattggtggattttttttgggggtttcgggttgggagtgggttcggtttgtgtggtttcggttttaataaagagattcgttgtaattcgtcgaatttgttattaatttttttgttgtttgagtttcgttttacgcgtttcgttcgtcgcgaagtttggaaagtgtacgcggttagtattaatttgggtcgttgattcggaaatatgtcgtagcgtgtgtgtttatgtacgcgtgtgagtgtgtaaatgtgtacgagtgtgaatgtgtatgatgtgtgtgtacgcggtatcggttgtttttggggagagttgattttgtagtttgggttgcgcgagaagtagattttgtagtttatttttttttttggaggaaatttgatatttagggcgggggtggggagatagtcggagtttttttttttttagttggggaaattttagatttttattttttaggatgcgttttttagttttgtagcgttttggggataattgggttttgggtgtggagttttgtttagtaggcgttggggattatataagtattttttttttgagaagtttcgaagcgtttaggttaaaggggcggtttacggagaaaaattttggtacgtttttgagttttatagttttattagggttgtttaggttttttttgttttttttacggtataggttttaagttaggtttttttatcgttttaaagaggtttatttttttttttttttttgtggaaggggtttttttaggggttatgggcgatgtagtgcggtagggttagatttacgtgtaaggggatttttaaaattcgttttttttattcgtattcgttatttattcgtttcgtcgtcgtttataggtggagaagttattagtggggaggaacggtagcggaagtttttaaggttaatttttatttttgaaattttttaggaagggaattttcgtcgttgggggtttttttgttttggaatcgatgcgtttagttgcggttcggaagttagcgtttttggtttcgtttggatttatttgtaagggttttggtttcgtttcgtatttttatttttcggtattgatcgaattaagtttgagttgggttggagaggttagattggaggtagggtggtagagttttaacgataggttcgtagtgtcgcgatggtaaagtggtttataattttagattaggattaagggaaattggagtttttttgggttttttattttttttttttttggtagttgttaggtgtggggtgggagggagagtgaaaaattagaatttgggagaaagttgtggggagggtagggaagggatttttttttcggggaagcgagatttagattttttttttttttttagggttttatttttttttttagttcgtggaagaggttataggcgacgcgggcgagggtggtatttttttttagtttttttggttgggagattcgatttttttttttattattttttagggtttttattttttttttttttttttagtttggttgaagaacgtttttaaggaaattcgggttgtttttttttatttggaagtggttttttttatatcggttcgtaaattgattatgaaatatacgatgttaattcggagttgtattttttagttgggtattttcgcgcgttggttttcggggtttcgttttttattttttgtttttttttttcgcgttttgtttttattttttatttttcgcgttggttatttcgtttttttggtagtttttggcggtagcgcgttttattcgttttcgtgtttttttcgtttatggaattaattttggttttatttgttgttcggtttaggttggggagaggacggagggtggtcgtagcgggtttttgagtgaattatttaggagggattgagtatagtattaattagaggggggttagggggtgcgggattcgagcgagtaggaaggaggtagcgtttggtattagggttttgatttaatagaattgagatacgtttgtaatcgttggcgtgtttcgcgtataggattttagcgaaattagattttttggtgaggttgcgtgggtggattaatttggaaaaagaaattgtttatattttgttattaaaaaatttacggaggagaagcgtagttaattaatagtaaatttaagagatttcggatgttttcgttgtttaaatttgtatgtttgaaaattatttgagaggtaataaatatttgttttttttttttttttttagaagtttattggaatattaagtttaggagttgttttggggatggttggaagtgtaatgttttttaagttttttttagtggttttggttatatttttttttttcgtttaggttgtaattgaagttaatttttggtggtaagtttattttatgtgcgtgtttttttttttttttttttttttttaagatttgtttgtatgatgcggtaatatttaatgttggatagtgagtgtgggtgtatttattgtaagatatatgtatatattttatttatatatagttttaaattagaatttttttttaatttgttaatattgtaaagtttatttttagtttttagggaatgggaaattataaatttaggtttgtttttatgaagtttttgtttagacgtgtgtttgtagtatattatgtaataaaaaagaatagaaatttattttgttagtaattgtaagtttatttataaaatttattttttgttatttttaggtagtaaaagtgagttttagtttttattttttgttattcgagattattattaatttatagagtttgaattaggtagagttttaggaggatagttatattttaagtgtagaagtattggggtttgaaatgtaattaaaaggaggttaatttgaagtagttaaatgtttttaagtgggggtttttttttgggtaggggttttgtagatagattgtaatatatttagaggattatttttgacggtattttgggtatttttttttttgtaaatgaatagtatttttttgattgttaaatatgatttttgtttattgggtattttgttttgggttttttataattatataaggagtttttttaaaatgttaagaaatatggtgaattttttttagtttgtatatttgtttttttgtttttttattagttaaaaggaattgttattttttattcgtatttaattgtgtttatttttagtatttataagtttttaaggtagattggtttaatttgtggggtaaagtgggttattttttttaatgttagaggtttgttttttaaattgttgttttttttttttttgagtggattttggaaatattggtttaggtatatggtgataggggttaggaagggagtgaaaatattaattgaggagttagatggtaggatggggattgtataatattttcgttttttgagtgtagtttaaatagaggagttttatgaagttttttttatattttgttatgaggataagtaggagagaaaaaagtatttgtgtgtttaaaattatgtattgttgatatgtttttagggggtttatttcgagattttacgtaaattttgaatgtatattttttttttttgtagg

SEQ ID NO: 362 - DNA, 6800 bp, Artificial Sequence
  chemically treated genomic DNA (Homo sapiens)
tttgtaagggggggagatgtgtatttaagatttacgtgaaatttcgaggtgggttttttgaaagtatgttagtaatatatagttttaagtatatagatgttttttttttttttgtttgtttttatgataaagtatgagaagggttttataaaatttttttgtttaaattgtatttagaaaacggaggtattgtgtagtttttattttgttatttggttttttagttagtatttttattttttttttagtttttgttattatatatttgaattagtatttttaaaatttatttagaaaaggaggaaatagtagtttgagggataggtttttgatattagagaaagtgatttattttgttttataaattggattaatttgttttgaaaatttatgaatgttgaaagtagatataattagatacgggtaggagatagtagttttttttgattgatggaagaatagagggataagtatatagattggagaaaatttattatgttttttgatattttaaaagggttttttatgtgattgtgagggatttaagatagggtatttagtgaatagaagttatgtttgatagttagaaaaatgttgtttatttatagggaaaaaaatatttagaatgtcgttaaaaataattttttggatatattatagtttatttataaggtttttatttagaaagaaatttttatttggggatatttgattattttaagttaatttttttttgattatattttaagttttaatatttttgtatttggagtgtagttgtttttttagaattttgtttaatttaaattttgtaggttaataataatttcgagtaatagaagataaaggttgaaatttatttttattatttagaggtggtaaaaagtaaattttgtagataggtttataattattagtaaagtgaatttttgtttttttttattgtatgatgtattataagtatacgtttgaataagggttttatagaaataggtttagatttatagttttttattttttaggagttgaagataagttttataatattaataagttaaaagaaaattttgatttaaaattatatataagtaaaatgtatatatatgttttgtaataaatatatttatatttattatttagtattaaatattgtcgtattatataaataaattttaaaaaaagaaaaagaagaggaagaatacgtatatagaatgaatttattattaagaattggttttaattataatttgggcgaaggagaaaaatatggttaaagttattaggaagaatttggaagatattgtatttttagttatttttaaagtaatttttgggtttaatattttaatggatttttggagagggaagaaaggagtagatgtttattgttttttagataatttttaagtatataagtttaaataacggaagtattcggggttttttaagtttattgttgattgattgcgtttttttttcgtgagttttttgatggtaagatataggtagtttttttttttaaattaatttatttacgtaattttattaggaaatttgatttcgttgggattttgtgcgcggggtacgttagcgattataaacgtgttttaattttgttgagttaaagttttggtgttaggcgttgttttttttttgttcgttcgagtttcgtattttttggtttttttttagttggtgttgtgtttagttttttttgggtaatttatttaggaattcgttgcggttatttttcgttttttttttaatttgggtcgagtaataagtggagttagaattaattttatgggcgagaggagtacggaggcgagtggagcgcgttgtcgttagaggttgttaaggaggcggggtggttagcgcggggggtggaggatgggggtaggacgcgggagggaagggtagggggtggggggcgaggtttcggggattagcgcgcgagagtgtttagttgggaaatgtagtttcgaattaatatcgtatgttttataattagtttacgagtcgatgtggggaaagttatttttagatggggaagagtagttcggatttttttaaggacgttttttagttagattagggaggggagaaggagatgggggttttaggggataatggagagagaggtcgggttttttaattaaggaaattggaaaagagtgttattttcgttcgcgtcgtttgtggttttttttacggattgagagaagggatggaattttagaggaaagaagggagtttgggtttcgttttttcggggagaagattttttttttgttttttttatagtttttttttaaattttgattttttatttttttttttattttatatttggtagttgttagggagggaggagatgggaggtttagagagattttagttttttttggttttgatttggggttgtgggttattttgttatcgcggtattgcgagtttgtcgttggaattttgttattttgtttttagtttagtttttttagtttaatttagatttggttcggttagtgtcgaaaggtgggggtgcggggcgaggttagagtttttgtagatgagtttagacggggttagaggcgttggttttcgagtcgtagttgggcgtatcgattttagggtaaagaggtttttagcggcgaaggttttttttttgaagaattttaggggtaggagttggttttggaagttttcgttgtcgtttttttttattggtgatttttttatttgtaggcggcggcggagcgagtaggtggcgggtgcgggtgggaggagcgggttttaaaaatttttttatacgtaagtttaattttgtcgtattgtatcgtttatagtttttgaaggagttttttttatagaaaagaaaagaaaggtgagtttttttaaggcggtggaagagtttggtttggaatttgtgtcgtaaaaggggtagaggggatttaggtagttttggtaaagttatggggtttaggggcgtgttaaggttttttttcgtgagtcgtttttttggtttggacgtttcggggttttttaaagaggaaatgtttatgtggtttttagcgtttgttaagtagggttttatatttaaggtttagttgtttttaaaacgttgtaaagttggggggcgtattttggagaatggaaatttggggtttttttagttaggagagagaaggtttcggttatttttttattttcgttttaagtgttaaattttttttaggggagggagtgggttgtaaagtttgtttttcgcgtagtttaggttgtaaagttaattttttttaagggtagtcgatgtcgcgtgtatatatattatatatatttatattcgtgtatatttatatatttatacgcgtgtatagatatatacgttgcgatatgttttcgagttagcggtttagattggtgttggtcgcgtgtattttttaagtttcgcggcgagcggggcgcgtggggcggggtttaagtagtagagaaattgataatagattcggcggattatagcggatttttttgttagagtcgaagttatataaatcgaatttatttttagttcgaagtttttagggagagtttattagtttttagagtttaggttaattgagagcgggtttattcggttattaagatttgggtttttttggttttagggtagaggtaggtagagggtgttttaaagggggatcggaaaggagagttttacgagtcgtatttttatttaatttcgtcgtttgttcggaaatattttggtttttttttttttttaattttagtgtaatcgagaaaaggttttataagtttgagatatttaaagaatttatagcgaatttatatatatatcggttttgtagggtaaaatattttcgtttgtttattaagagattagattcgaaaagatagtatgaaatgagatttttggggagattgttaattttaggggtaaaataaaaattttgattagaaattgagttttttaaagaaggggttaaatgttttttaatattttcggggtttagggaagatgattttgtaaggatattgagaatttttttcgcgtgttacggggaggaggattgggggcgtttgaggggtttagcgtattataggagtgaggtggaggagggcgttttcgcgtttttttttttaatttagagtagtttaacgacgtggttttttttttatgtattttttaaagttttcgcgtcggattaaaggtgtttttgatttttttttattaattacggtgcgggttaggcgtgatgagggatgagggagaggaaattttagtagtaaaattgtttagaggacgttcggagggcgcggggagtagtcggatgtatatttaaagtttcgtaatatttaatttttttttcgtaggtagttttttaagagaatagataaaaaggttaagtaaagatttttttttttcggtttcggggtattgttatatttagtttaggtatttttttttgttagattttttacgtttaggttttaagtttttgggagtgaaacgatgagggacgttaaataggcggaagaagtttatttgatttaggtttatggtagcgaaggggaggatgggaaattttaaaaagaatttttatttttggtggaaaaagaaagttgttttttttattttgatttttttttaaagtaaggagagagatgtagaaattagtaggagagtatttagttgtagttaaaaatttgggacgttttgttttggagaatgcggggagcggcgcgaggagttaaagaatgggtcggtttaggcgggtaggaggttcgttttaggggagtagataaaggagttattattttttaagttttacgtttgggcgtaagggttgtgtttatagtaatatgtgtgttggcgcgcgcggagcggggtaggggaggagggaattgttagatagagaaggcggaggttatattttgagttagaattagtatgataaaagagagtcgtttaggttttaatattgatagtaggttttaggttcgggtatagagaggttttaggggaagaacggtttggtttggtttttttttgttttttgttttttcgtttattttttagattgggttttttaggttttaggatatatatatatatatatatatatatatatatatatatatatatatatattatttatatttttttatataggatgtttagttttttcggtagaggattaattttgtttagaggtggagtagagtttttggatagaggaagaaaatgaaatgatagtttaatttttattttttaaaggtagttttttttttattttttaatagacgattaaagtgaggcgaaaagcgggaaagtaatatttgttttcgattatagagagttgggaggtagttgaggttagattcgaggttttttagggcgatatttttttttttaagtttagaagaagaggtattaattttgtgtttagttggtcgagttttatttgttgggttggattcgtggtttttttcgtattgtagcggtcggcggcgtagcgaaattggttttttgggggttttcgagggtttttgttgggagagtggggtttggtggtcgggagggatgaagggagtaggggtgggagggagaggggagtagttgttcgttcgttcgttttaaggaatcgaggttcgtaggagttttattttaaggcggttaatagggggtagtcggtatcgtatcgcggggaagaaaaggtcgcggggatggtttcgagttttgcgcgtatagtgttaattttttgagtatcggagcgtacgggggaggggaggagaagataggggatttttgggtcgggttttttggggagggtttttcgttgagagggtcggggggtggaggagacgaaggttattacgttttggattcgagaataatttttttatatatataaatatatacgtatatatacgtagttaaggatttatatattcggatatatatatatttgtcggttcgcggttcgttgcgtatttttcgtattgttttttcgaaatttttttggtagagtttgtttagaaattaaatttggttggttcggtagtgaatgtgcgaaggtggttggggggagggtaggggttgaggaggtgcgattttatcgtaaggtttaagttatttttaaatagcgaattatttatttaaagagagaagagagaaaagagaggcgagagaggagaaggggtttcgatattagatagggattagaaagttaaatagggtcgtggggtttttagatttgaagttttttgttgttgttttttttaattttttggggggaagaggggttatttgtttttaggaaatattttaattttaattttaattttattttttaagaaatttaaaatgggaaagattagaaaaatggaaataggaatcgaagtttggaggatagataagaaaaattgtttagaaaataaaaatttatgttgtaggaagaaacgttaatttttcgtaaaagtgaatttttagtgattttcggagtgtgtgattcggttttaatatataattgataattaaaataaataagagttcgtaaattggttttcgtttgtttttttaaagcggaggtttaagtgttttttaaaggataaggcggatttcgtttagggggtcggggagcgttgtttcggagtacgggattatagttattattattataatttttcgtttttattattgttgtaaagtgtttgagtttatttagtggcggttaataatgttaataacgcgatttcgtttttcgcgtcggggtgcgcgt

SEQ ID NO: 363 - DNA, 11523 bp, Artificial Sequence
  chemically treated genomic DNA (Homo sapiens)
attgtttaagacggaaagattttaagattgtgtgattttttttttttttttttttttttttttttttttataggtgtagaataattttttttttttttttcgtggttttttttttttttattttttttttttgttgtttgtaaagttgaatttggggttaggagttttaattgtaattttagattggaattttagatggtgcgtttaggattggaagtaatttttagtttattaattttatgggtttacgtatttgttttggttacggtttggtttttatttttattgtggtattaatgtagaataaattgagatatattttttatataattagttttagaatttaaaaagatttacggtataataatagaggtagtgtcgcggaatttttttattgaggattttcggggagttcggggattatttcgcggtggtattagaatagacgagtaattttagcggttttaggtattgcgaattgggggagagggggaaattttgtatcgtattcggtagtatttaacggtttcgggtttttagatagggttagcgaggagagttaggatagtaagtggggattggttaaaaaaaatcgatttaattttgaaatgattagaagaagttgggagtagttattataaagttttttttttgtttttttttttttttaattgaaggaatgacgttgaaatttttatcgttagcgcggggttgggaattattttaaatatttgttttgtagtttcgagtgggtagatttcgaagagttggagtcggcggggaggggaggaatagttgttgggttgttttgcgcgtggggttcggggcgcgggtttcggggagaggcgttagtcgaaagtttgtttttttttcgcgataggtagtagcgaggtcgagttattttttattacggtttgcgggtttcgcgcgtagtgtggttgttttcgtttttgatcgatcgtagcgttttggggtgtttatttagttgttcgcggtcgttgggtgattttcggagggcggtttaggcgtgcgtattggtttttggggttgcggttgtagtagtttagtttcgcgttttgttagatgtagtggatagcgtcggggtgaaagtaagggttgagaaatttttattgttttgtttttatttagtttcgatttttttatattgtaataattatgtattttcgaggtcgggatgtttgcgttttgttagtgtattaacgttatatggttttttaggggttgttttcgtttttgtattttattagttttgaagaggtagaggggtggtgggtaaaatttttaattggacgttgagagattcgggttttagttcggcgttgttattaatttgttttttgtttttaaatagtagtagtaataaaaattgtaaagttgattgagttaaaggtttatattgtttttttatttaatttttagaataattttatgaggtgggcgttagtattttattatttcgtttgattagtaaggaaattgaggtttagagagattgcggaattcgtttagggttatatagttgttggttatttggtagagttgaggttttattttggggttattaattttttgttttttatcgttgcgttttatagattgtttttttttcggttgtttgggttttagtttttttttttgtaaaacgagaagtttaatttgtagttttttttgttaatcggtggtttagattaggaatttttgttatagatttcggcgttgataggggtaagaaggtgggtgaaagaagggggcgtttagttttttatagtttgtttttttttgggatttcgcgaagggcgggtttcgcgagttaaaggaggtataggagagcgtttatcgttcgcggcgggtgaaggtgttatttgttttcgtgttaggttgtgagttttggtgtttagtttagggcgttaaggttagtgtagttggtatgttttttttggaaaattttaggtttttcgtagagaacgttatttataataaagaagaggatagagaggtatggagcgttttgcgattgtaggagtacgttagttttttagcgttggtttagtgtcgtttgggttttcgggtatgtggattcgttggggtcgtacggagattttttgtcgggtttttggggtttttcgattgcggttttttagtttagtattttttttttggtttcgtaggttgtagggaattttttttatttttttagtcggagaagtttaagtcgggcgagggggtatttcggggttcgtatcggtgtttttttttttttcgtttttataaggattttgagaaaataaatggtagaggagagaggagttttatatttgtttggtttttttttttttttatttatttttatattttttatttcggggtaaaaatttatttttgaaaaatgttggtagagatttacgtgtttttgttttatttgggttttataaatataacgatttatatttaagttagtttttttttagataatttttttttttttcgttaaaagtgttaaggatggtaaaagaagaaataattttaattttttcgtttggaaatgaaagttttcggttttttataaagggtttttcgttttttatagttgagttttagttaagaaaaacgatttttaagtagaaataataggcggggagaaggaagggagatatagggatttggggggtttttagggtaattggtagtgaattttgtttcgagagttttttttttatttaaaaaattaaacgcgcgagtttcgcgaaaggtttagggatagatcgtgtgggagaggattgagtagagagcgtgggggtagtgttttgtagaatttttttttttttaataataattttaaaagtttttgagtggagacgacgtaaagttaagtagtaaaggtggtttgggaggtaagcggagggtttaagtgtcgtatttttatttttagggttttttgcgtttacgggatgcgtatttttaagaagtgcgtttttcgagtaagttttgggttcgtatatatttcgggttcgtagttagaatttaatggcgataacgtttatgtaatgtaagttaaaaattaaagcgtaaaaaattattatgttatttattgaaacgttattttttgttaaattgtaattattttgttttatataagtttggttggaaagtttgtagttttagttcgggttagttaggtataggaggtcggattgtaatcggttgtttttttttcgtcgcgtttggtcgttttacgttgcgtcgtcgttgttgttttttggcgtttttgggattttatacgtatttttgaaatacgtttcgtttcggttttcggtttttttttttgtttaggggttgttttttaatagatattgatttttttagaagatttaaaaattaaattaaaatattttttattcgttttaaatatttgttttggggcgcgggggttgttaaatagagattagacgaagggagttagatttagcgaagtttttcgagtttttaaagattcgaatattaattcgcgttcgtgggtcgatggaggttttttttattttattttttggtttttttaattggttttcgttttttggttaattattgagtaattagaatggtattttcgattagggttataggtagtgttcggcggagtggttttaggagttattcgttttttgtcgggtttcgtatttaaatttttttttttattttttttttttaaattgggcgttaggatgtttcggtcggaatatacgtaggttttgggcgtttgtttaagggttttttttttttttaaattagtcgttgttttttcggtttaatcgtagaagaattagatattttttattggaaagggaaattaagtgttgttgattttaattttaggtaggcggtaatcgtttttcgtttggcgtaaattttattaagtaaataattattagtcgatcgaaatacgttcggtttataattggtgtaattttcggttatttaattgagggacgttcgtttttagtttcgatttttggaatttataaagggttatttttttttttagtgattttaagattatggttatttttttattcgatagttttagaagtaagagttagatttaagggtgtaaagtaagggtatacgtttttttgaagtttgattgagttttttttgcgtttttttgaagttttcgtttttttggagtttatttgtttttttttttaaattatttttttagattaataattttatttttatttttatcgtattcgattttgttcggatttattgtttatttgaacggattttttagtgagacgaggtttttatattggcgaaggttaagaaggggaggtggggggagggttgtgttatatcggttagttgagagcgcgtgttgggttgaagaggagggtgttttcgagagggacgttttttcggattcgtttttattttagttgcgagggcgtttttaaggagtagcgcgcgttgtttggtcgggtttgggttgttgagtgaatggagcggtcgagttttttggttttttttttttttcgcgtcgtcggttttttttatttgagttttgggaagttgagggtagttaggtagttggggtaaggagtttaaggtagcgtttatattcgggggtttttcgtaattcgatcgtttgttcgtttttttatttttcgtttttttttttatttatttatttatttatttatttatttagagtcgggacggtagtttaggcgttcgggtttcgtcgttttttcgtcgcgattttggatttttttttgttgtaggattcggtttttacgtgtgtttcggagtcggcgttttagtatacgtttcgtttcgggtttgggtgtttatagtagttagagtagtagggagttcgggattcgggcggtatttgggttaagttaggcgtcgtcgaggttagcgttgaacgtttttagggtcggaggagtcgcggggcgttcgggtttgagtcgtagtaaatgggtttcgacgtgcgggatttgaacgcgttgttgttcgtcgttttttttttgggtggcggcggcggttgtgttttgtttgtgagcggcgcggcgtagtgggcgtcggtgttggattttgcgttttcgggcgtttcggtttacgggtcgttgggcggtttcgcgtcgttatcggtttcgtcgttattttcgtcgtcgtcgttttatttttttattaaataggagtcgagttggggcggcgcggagtcgtacgaggagtagtgtttgagcgtttttattgtttattttttcggttagtttattggtatagtcggagtttgtcgttacgggtttttcggttttttttcgtttagttaggcgttattcggttaggttaggatgttttttaacgcgttttatttgtttagttgtttcgagagttagttcgttattcgtaattagggtaagtaggtcggggagcgttttttacgcgcggggtagtggcgttagggatttttcgttttaggatattttttttttttattttttttgatcgtagtttttatttagttgttttttaagggtcgtgaggatagcggaagcggcggttggggaggaggtcggagagtgggagtgtacgtaggtattggttttcgatattttttaaagttaggtagagttaggagtttgattgttcgtaagagtcgggagggcgtttggggttttttagagttcgagagatttcgggattgttagtttttacgggagtggaattaggagatcggcgtagtgtttggttttgttttggggagagttttgttaattaaggaaacgttaaattgttattaagcgtagcgttttttagacgtttggattttggattcggagtgggattagcgcgggggtgagcgtttgtgttgtgttgttttcgtagcgttaaaatgtttaggagtatttttagtttttataatacggtgttggtatatatttaggtgtatattaagtatcgtagagaattagaatgagtatatgtatttttagtaattaaatggttttttggaatagcgtcgtgttcgtggatagttttcgcgtatggtaatatagaagtggatttttattgggtttcgtttaggcggcggttacgtaggttttggggatggaagagaatttgatttattcgagtttaagttatgcgggattaggttttatcgtaggtagtggaaggaggtacgagttttggttttttttttagcgtatttggggcgtttttttattttgtaaacgcggggtttagttgggatagtatttttttaagatttggggttagaataaggatagggttattcgttgtgtttagttaggatataaggagggaattcggtatacgataagtattaggttggttttttatttcgcgtcgatgttcgtttatttttttttcgtttgggcggcgcggattcgaatttgcggagtttttgtagtttgttttttttatttatttttagtggatttttacgttattgagaatttaagttagttcggtttgattcggtaatttagtaaacgttttattaatataatggcggatgttttttttggagtaaaattattcgagggtttagggatcgggatgtttttggaatgcgtgggaagtagagtgtattttttgtaggaggtattttcgtttaaggttcgggagaagggttttgtttttgttgttcgtttttattcgcgttttttaaacgcgcgtttttaggtcgtttttattttagtttaattaggagtattcggttttcgcgaagttttggagaaatcgaaatcgttttttttttcgggagaatttgggattattgttttgtggaggaatcgtaagtagatttaagggttgtttttattttatgtttttagttagtgaaattagtgttttgtatttaaggggcgttgggataatttattggtcgttgaggtttgtgttttttgattagatcgcgttatttttgtttagtaggttggtgttatttttggggagtttttaggttttagtgttttcgtttataagaggatagttgagatgggtaatttggagattgggttcggtttgaagttatattttatagatgtagaagcgttatttattatttttttggggttttaaatatggaattcggtaatttatttaaatatttgtgattgagaaataatgaattcgagagtattgtttgtatgtgtgttatttggaggcggttgagaaattatcgaatttatgtttttggggtataaaatattattacgttattatttttttagtatttttaggggatttttgaaatttgggttttgtcgtttcgtttgggttttttgtttagttttttttagggtaggtttggtgtttgggattttattatatgtcgtggggggtgggattgtgggttttgtagttagtaggtattatatttttggaaaatatttggatttttttgtaatatataggcgtggttgttatggagaaaaagttaaaaggggattaggattagtaggtgaatgtattttttttttttattttggagaaaaagtttaatggagagagggttttagatttaagttatatagtttggaagtattatttttaggtttaagttttgttttgtagtgaaaatagatgggtttattttatttagtttttgaggtttattgggtagtttggatgtgagaagcgtttcggttgttattttggagtgggtaagggtggttttcgagattttgggtttattttttggatttttagggtttttgttgtttttttaggaatgtagggtttggtttaagatttgggttgtgagaggtaagggtattaatttttaaaaatgtggaaatggttattagagcgttaaggttaaattttaggggagaggaattaaggtcgtttttggatttttagggtagtttagttatggtgtataggtaggggtaattgttggtatttatttataatcgtttaaaattttataagtatgtttatattttaaatttttaaatattatattttgtattttaattttgtaaatattaatttagtaaatattaatcgtttatttggttaggtattgggttttgaatattaattaagataatggtttcgagaatttttgtaagaagtttattagttaattttggagaggttttttgttttggatgaggaaatttaggttttatgagattaggtggtagaggtgggatttgaatttagattatgttagggtgtttttattttttttttagggattttggttttatcgttgagatggattttttttggtttgcgggaggggtattaaatttttagtttatgtgtgggggttgacgggtttgtgagggtagatgtggggtgaggatttgagtagttttagattagatgtaaggtttaaggaggaggggaaaaaagtttgtttgggtcggacgcggtggttcgaggcggttggattatttgaggttaggagtttgagattagtttggttaatacggtgaaattttgtttttattgaaaatataaaaaaaaaaattggtcgggtttggtgacgggcgtttataattttagttattcgggaggttgaggtataagaatcgtttgaattcgggaggttgaggttgaagtgagttgagatcgcgttattgtattgtagtttgggcgatagagcgaaatttcgtttcggaaaaaaaaaaaaaaaaaagaggttgtttgttagtttattgatttcgtagtttcgtaggttcgtagaattttaaggtatgattaggtttgggattattaggttattttagggttaggtgcggaggtttgcgacgttcgagggttaaaggttttttttttcggttatataggagagggtattttgttgggggataggttttttttaattatagtgtagttgtagttatcgtttttagttttttgagtatttttttggttgagtttgttgtttattttattttttagtttttacggttcggttaggttaggcggttttcggtttttttgtagtcgtcggcgggggaggagggtatagagcgcgtttcgttttttagcgtacggttaaggttgcgtttttttttcgggtcgggattaatcgtgggaaaggcgttattttggttattcgattttttttttttaaggtttgtataaggagtttttgaatacgttgttttttttagtcggtagttttattttttttggtttttgttttcgtatttttcgcgttaggttaagcgttgggtttagggatagcgcgttttaattaaattcgtgttcgataagtttttaattaaaagagattttttttcgtttcgtaggcgtttttattattgtttttttcggggggatttgaaggagagggtttgaggtcggtttttgttcgtcgaggtttgcgtgttcggtttgggaggaggtttaggagggttcgcgggttacgggtatttttgggttcgagttttggggtgcggacggacgtttcgagagtgggtgtcgcgattcgggatttacggttttcgtcgggtacggatagttgcggagtagggttttgaggattgtgtagtgttttgggtttttgtttatttttgggtttaggaatggagaagggttcgtttagagaaaattttttcgtagtttttatttcgtttttttttttttttttttttttttttttttttttttttttttttttttttttttttttgtgtttgtttttttttttttttttttttttttagtgtttttttagaaattcggtttttatttcgggtaatagtgggtgttttgagttaaatttcgtttgtaagtttatttataggttttaaagaaggttaggttttaggttttaaaaggaagtttgtggaagtttaaacgtgttcgtttatgtaggagagttaacggggtcgggggttatttttgtttatttagtaggagagaaatggaggttttcgaggttatatgataaaagttagtggttttttaaatttttagtgtgtggtgttgagtagtgtgtgagatttaagtttggatttgtattattcgggagttaggatttgtttttttttttttttttttgtattttgttatattattttttaggtttatgtttttgttgttttagagaagttttttttttttttttttttttttttttttttttgggcggggggtggtggtgtgtgtgtatgagcgttcgtgtgtgtttcgaaaatggaggtaacgatgttttgggttttgtttatcggttgagttttgtttaagtttttggaggtattttggttaaatagtgtaagagtgggagaatgggtgttgtttgatttaatttatttttgagaattttgtgaagtttggagatttagggtagttttgggttaggaggatttgaggttgttggggtggttttgttaggattttataggagtagttttttttagttattgtgtttggattttaggttatagatttcggaatttgtagaggaatgagattttatttttgggtttcggggttaatgacgtatttttagtcgaaggatttttttttttagaggtagtaatagttttttagaagtttgtggggtataagtttaaagtaatttaataataaaaattataaaagattatgttttttaattgaggttttacgtttttttttttattttgggggggggggggaatgttaggatttttttagggggaaattgaggtaaaggatcgaagtattattatggagggaaagggagatatagtgttaggtatattttaaaggaaattggttgtttagtttggggagtgaggaagttggtttttatagtagtggttagggtcggatttttgggcgtaaggtgggttttataggggggaggaggaggagagcgtagggtcgttatttgaaggtttaattggaaggggtttttgtttttttttttattagtttttttttgggtgttatggtgttaggtcgggtagttttagatagataatattattcggtaattattttttttatttttaagattaggttatttaattggtttcgagtaattaatgaaagttggtgcgcgggtttttgatttatagttcggagttaacgcggggttagtttagtagatttatttcgtttgttcgcgttgtttttgcggaagagttgtagtttatttttggggggtgaataattttttttgtcgattaggtaacgagttttatatttaatttgttaggggttcgttgtagaagcggtagagatcgtagaagattgcggtataaataaattgggaaaaagcgaggtgggggttttagttagaaaaggatggagaagtttgttttaaggttatatttagggatttgggtcgtttttttgtcgaaagttttggaggtttgtggggttggattttttttcgttgggggttcgaatgcggggtttagcgtatatttttttcgttcgtggttggtttagatttattgtttcgttttgcgagagtatcgttgatattgtgttttttttcgtcgttttcgtagg

SEQ ID NO: 364 - DNA, 11523 bp, Artificial Sequence
  chemically treated genomic DNA (Homo sapiens)
tttgcgggagcggcggagagaagtatagtgttagcggtgttttcgtaagacggggtagtgggtttgaattagttacgggcggggggggtgtgcgttgaatttcgtattcggatttttagcggaggagaatttagttttataagtttttaggattttcggtaggaagacggtttaagtttttggatgtgattttgggataggtttttttatttttttttgattaaaatttttatttcgtttttttttaatttatttatgtcgtagttttttacggtttttgtcgtttttgtagcgaatttttggtaaattaagtataaaattcgttgtttgatcgatagagaaggttgtttattttttaaaaataaattgtagttttttcgtaggagtagcgcgggtaagcgaaatgaatttgttgggttaatttcgcgttgatttcgagttgtaaattaggggttcgcgtattaatttttattaattattcggagttagttaaatggtttggttttaaaaatgggaagagtaattatcgagtaatgttatttgtttggggttattcgatttgatattatgatatttaagggaaagttggtgagggggaaaataagggttttttttagttgggtttttagatggcgattttgcgttttttttttttttttttttatgggatttattttgcgtttaggggttcgattttgattattgttgtaggagttaatttttttattttttaggttggataattaattttttttagagtgtgtttgatattgtatttttttttttttttatggtagtgtttcggttttttgttttagtttttttttagggaaattttagtatttttttttttttttaaagtgagaaaaagagcgtggagttttagttggaaaatatagttttttataatttttgttattaaattgttttaaatttatattttataagtttttggaaagttgttgttgtttttggggaaaaggatttttcggttaaagatacgttattggtttcggaatttaaggatggggttttatttttttataagtttcggagtttgtggtttgaagtttagatataatggttaaggagagttgtttttatgggattttggtagggttattttagtagttttagatttttttggtttaggattgttttgggtttttaaattttataaaatttttaggagtaaattgggttaaatagtatttatttttttatttttgtattatttgattaaagtgtttttaaagatttaagtaggatttagtcgatgagtaggatttagggtatcgttatttttattttcgaaatatatacggacgtttatgtatatatattattatttttcgtttagaaaaaaaaaaaaagaaaaagaaaaaaaaaaagtttttttggggtaatagaggtatgagtttggagggtggtgtggtagagtgtaagggagggaaggagggggtaaattttaattttcggatagtataggtttaggtttaagttttatatattgtttagtattatatattggggatttgagaagttattagtttttattatatgatttcgagggtttttattttttttttgttaagtgggtaaagataattttcggtttcgttagtttttttgtatgggcgagtacgtttgggtttttatagatttttttttgaaatttgaggtttggttttttttgaggtttatagatgagtttataaacgaaatttggtttagggtatttattattgttcggagtgaaggtcgaatttttgaaaggatattaaaaagagagagagagaaagagagatagatatagagagagagagagagagggagggagagagagagagagagagagagagagagagagagacgaaatagaagttacgaagaagttttttttagacgaatttttttttatttttgagtttaggagtaggtagggatttagggtattgtataatttttagagttttgtttcgtaattgttcgtgttcggcgagggtcgtgggtttcgagtcgcggtatttattttcgagacgttcgttcgtattttagaattcgggtttaaggatgttcgtggttcgcgagtttttttaggtttttttttagatcggatacgtagatttcggcgggtaaagatcggttttaaatttttttttttaggttttttcgggaggggtagtggtgaaagcgtttgcggagcggagggaggttttttttaattagaagtttatcggatacgggtttgattagagcgcgttgtttttgggtttagcgtttggtttggcgcggagagtgcgggggtaggggttaggggaggtaaagttgtcggttggaaggagtagcgtgtttaaaggttttttgtataggttttggagggagagaatcgagtggttaaggtagcgttttttttacggttagtttcggttcgggaggggagcgtaattttgatcgtgcgttaagaggcgagacgcgttttgtgtttttttttttcgtcggcggttgtagagaagtcgggaatcgtttggtttggtcgggtcgtgagagttgaggggtgaaatggatagtaggtttagttaggaaggtgtttagaaggttgaaaacgatgattgtagttgtattgtgattggggaaaatttgttttttaataaaatatttttttttgtgtgatcggaagagggagtttttggttttcgggcgtcgtaggttttcgtatttgattttagggtggtttgatgattttaggtttaattatgttttagggttttgcgagtttgcggggttgcgggattagtggattagtaggtaatttttttttttttttttttttttcgagacggagtttcgttttgtcgtttaggttgtagtgtagtggcgcgattttagtttattttaattttagtttttcgggtttaaacgatttttgtgttttagtttttcgagtagttgggattataggcgttcgttattaagttcggttaatttttttttttgtatttttagtagagatagggttttatcgtgttggttaggttggttttaaatttttgattttaggtgatttaatcgtttcgagttatcgcgttcggtttaagtaagtttttttttttttttttttaagttttgtatttagtttggggttatttaagtttttattttatatttgtttttataaattcgttaatttttatatatggattaagagtttggtgtttttttcgtaggttagaagaaatttattttaacggtggggttaagatttttggaaaaggagtagaaatattttagtatggtttgggtttaaattttatttttgttatttaattttatagaatttggatttttttatttaaaataaggggtttttttaggattagttggtgagttttttgtaaaggttttcgaggttattgttttaattaatatttagaatttagtgtttgattaagtaggcgattgatgtttgttaaattaatgtttataagattaggatgtaagatataatatttaagaatttaaaatatgaatatgtttgtgaagttttgggcggttgtgagtgggtattaataattgtttttgtttgtgtattatggttagattgttttagggatttagagacggttttgattttttttttttggggtttggttttggcgttttgatggttatttttatatttttgagagttgatgtttttgttttttatagtttaagttttgggttaggttttgtatttttggggaagtagtaggaattttggaaatttaaagaataaatttagaatttcgagggttatttttgtttattttaggatagtagtcggagcgttttttatatttaagttgtttaatgagttttaagggttgggtaagatggatttatttgtttttattgtaagataaaatttaaatttggagatggtgtttttaggttatatgatttgaatttagggttttttttttattgggttttttttttagggtggagaagaaggatatatttatttattagttttggtttttttttaattttttttttatggtagttacgtttgtatattatagaagaatttagatattttttagaagtgtaatgtttgttggttgtaaaatttatagttttattttttacgatatgtgataagattttaggtattagatttgttttgaaaagggttggataagggatttaaacgaagcgatagaatttaggttttaaaaattttttagaagtattaaaaagataatggcgtagtagtattttgtgttttaggggtatggattcgatggttttttaatcgtttttaaatagtatatatgtagatagtgttttcggatttattgttttttagttatagatgtttagatgggttgtcgagttttatatttaaagttttaagagggtggtgggtagcgtttttgtatttatggagtataattttaagtcggatttaatttttaggttgtttattttagttgtttttttatagacggggatattgagatttagaaattttttaaaagtaatattagtttgttaaataaaggtggcgcgatttgattaaagaatataagttttagcgattagtaagttgttttaacgttttttgagtataaaatattaattttattaattaaaagtatagagtggaggtaatttttgggtttgtttgcggtttttttataggatagtgattttagattttttcgaagaaaagggcggtttcgatttttttaaggtttcgcgggggtcgggtgtttttggttaggttaaggtaggagcggtttgaagacgcgcgtttagaaggcgcgggtgaaggcgggtaataagggtagagtttttttttcgagttttgggcgaaggtattttttgtaaaagatatattttgttttttacgtattttaaaaatatttcggtttttaggttttcgagtaattttgttttaggaaaagtattcgttattgtattagtaaagcgtttattaaattatcgaattaaatcgaattggtttaggtttttaatagcgtggaaatttattgaaaataaatgaagagggtaaattataggggtttcgtaggttcgggttcgcgtcgtttaggcgaaagagaggtgggcgggtatcggcgcgggatgagaaattaatttgatatttatcgtgtgtcgagttttttttttgtattttgattaagtatagcgaataattttgtttttgttttaattttaggttttgaagaaatattgttttagttgagtttcgcgtttataagatgaagaggcgttttagatgcgttgaaagaaaggttaaagttcgtgtttttttttattgtttgcggtagaatttggtttcgtatagtttggattcggataagttaagtttttttttatttttagaatttgcgtggtcgtcgtttgagcgaagtttagtgaagatttatttttgtattattatacgcgggagttatttacggatacgacgttgttttagaaagttatttagttattggaggtgtatgtgtttattttagttttttacgatatttaatgtgtatttaagtgtgtgttaatatcgtattataagggttggaggtgtttttggatattttagcgttgcggaggtagtatagtataggcgtttattttcgcgttggttttatttcgaatttagagtttagacgtttgaaaagcgttacgtttggtgataatttggcgtttttttaattaataaaattttttttaaggtagagttagatattgcgtcggttttttggttttattttcgtggggattagtagtttcggaatttttcggattttaaggggttttagacgttttttcggtttttgcgaatagttaggtttttagttttgtttggttttggaggatgtcgggggttagtgtttgcgtgtatttttatttttcggttttttttttagtcgtcgttttcgttatttttacggtttttgggaagtagttgggtaagagttgcggttaaaaggggtaggagaggggggtgttttagagcggagagtttttggcgttattgtttcgcgcgtagggggcgtttttcggtttatttattttgattgcgaatagcgggttggttttcgaggtagttgggtaggtagggcgcgttaggaaatattttggtttggtcggatgacgtttggttgggcggaggaggatcgaagggttcgtagcgataggtttcggttgtgttagtgaattggtcggaaaagtggatagtgaaggcgtttaggtattgtttttcgtgcggtttcgcgtcgttttagttcggtttttgtttgatgaaggagtgaggcggcggcggcgggggtggcggcggagtcggtggcggcgcggggtcgtttaacgattcgtaagtcgaagcgttcgggggcgtaaagtttagtatcggcgtttattgcgtcgcgtcgtttataggtagggtatagtcgtcgtcgttatttagggaggggacggcgggtagtagcgcgtttaggtttcgtacgtcggagtttatttgttgcggtttagattcggacgtttcgcggttttttcggttttggagacgtttagcgttggtttcggcggcgtttaatttggtttagatgtcgttcgggtttcggattttttgttgttttggttgttgtaggtatttaggttcggagcggagcgtgtgttgagacgtcggtttcgggatatacgtggaagtcgggttttgtagtaagaggaagtttaggatcgcggcgaggagacggcggggttcgggcgtttgggttgtcgtttcggttttgggtgggtgggtgggtgaatgagtaggtgggagggagggcgggaagtgggggagcggataggcggtcgggttgcggagagttttcgggtgtgggcgttgttttgaattttttattttagttgtttggttgtttttagttttttaaagtttaaataagaggggtcggcggcgcggggaagaggaggagttaggaggttcggtcgttttatttatttagtagtttaagttcggttaggtagcgcgcgttgttttttgggggcgttttcgtagttggggtgagggcgggttcgagggagcgtttttttcggagatatttttttttttaatttaatacgcgtttttagttggtcggtgtggtataattttttttttattttttttttttggttttcgttagtgtgggagtttcgttttattggagagttcgtttaggtaagtagtgagttcgggtagggtcgaatgcggtgggagtagagatggggttgttaatttaaaagagtggtttggagggaggggtaggtaggttttaagagggcgggaattttaggaaagcgtagaaagaatttagttaagttttaaagaagcgtatatttttgttttgtatttttgagtttggtttttgtttttagaattgtcgggtaggggagtggttatgattttggggttattggggaaagaggtggttttttgtgggttttagaggtcgggattgaaagcgaacgttttttagttgggtggtcgggagttgtattagttataagtcgggcgtatttcgatcggttagtagttgtttatttggtgaggtttgcgttaggcggaaggcggttgtcgtttatttaaaattggagttagtagtatttagtttttttttttagtgaggaatatttaatttttttacggttaagtcgggaaaatagcggttagtttaggagggaagaaaatttttgggtaaacgtttaaagtttgcgtatatttcggtcggagtattttggcgtttagtttggggaggaggggtgaaggggagggtttggatacgaagttcggtagggagcgggtaatttttggagttatttcgtcgagtattgtttgtggttttggtcgaggatattattttggttgtttagtgattgattaggaggcggaagttagttaaggggattaaggagtggagtagggagaatttttatcggtttacgggcgcgagttagtgttcgaatttttgggagttcgaagagtttcgttaaatttgatttttttcgtttagtttttgtttggtagttttcgcgttttagagtaggtgtttggggcgggtagggggtgttttggtttggtttttggattttttaaaggagttagtatttattgggaaataatttttaggtaaggagaagaatcgggggtcggagcggagcgtgttttagaggtgcgtataaaattttaggggcgttaggaggtagtagcgacggcgtagcgtgggacggttaggcgcgacgggagggaagtaatcggttgtagttcggttttttgtatttggttggttcgggttggggttgtaagttttttagttaaatttatgtgaagtaaagtagttgtagtttgataaagaatggcgttttaataaatgatatagtaattttttacgttttggtttttagtttgtattgtataaacgttgtcgttattaaattttggttgcggattcgaagtgtgtgcgggtttaggatttattcgaagggcgtattttttgggaatgcgtatttcgtaggcgtaggagattttgagggtaaagatgcggtatttgagtttttcgtttgttttttaggttatttttgttgtttgattttgcgtcgtttttatttagaagtttttaaaattattattaagaaaagaaagattttataagatattgtttttacgttttttgtttagtttttttttatacgatttatttttaaatttttcgcggggttcgcgcgtttggttttttgagtggagaaaggattttcgagataaaatttattgttagttgttttaagaattttttagatttttgtatttttttttttttttttcgtttattatttttatttggaagtcgttttttttaattaggatttaattgtgaggggcgaggagttttttatgaaaagtcggggatttttatttttaaacgaaaagattgagattgtttttttttttattatttttggtatttttagcggggggagaggaggttatttgaagggaggttggtttgaatgtgagtcgttgtgtttgtgaaatttaggtaaggtaaagatacgtaaatttttgttaatattttttaaaaataagtttttgtttcggggtgagggatgtaggggtggataggaggaaaggagagttaagtaaatgtagaattttttttttttttgttatttatttttttagaatttttgtgggggcggggaggggaagagtatcggtgcgaatttcggggtgttttttcgttcgatttggattttttcgattaaagaggtgggaggagttttttgtagtttgcggggttaagaagaaagtgttaagttgaggagtcgtagtcggaggattttagggattcgataggaagttttcgtacgattttaacggatttatatgttcggaagtttaggcgatattaagttagcgttggggaattgacgtatttttgtagtcgtagggcgttttatgtttttttgtttttttttttgttgtgggtaacgttttttgcgggagatttgaggttttttaagggggatatgttagttatattggttttggcgttttgagttaagtattaggatttatagtttagtacgaaggtaggtagtatttttattcgtcgcggacgataggcgtttttttgtattttttttagttcgcgaggttcgtttttcgcgaggttttagagaaaagtaggttgtggaaaattgggcgttttttttttttatttatttttttatttttgttagcgtcgagatttgtagtagaggtttttggtttgaattatcgattggtaaagaaagttgtagattaaatttttcgttttatagagaaggaaattgaggtttagatagtcgaaggagaggtagtttatggagcgtagcggtaaagagtaaggggttggtggttttagaatggaattttagttttgttaggtaattaatagttgtgtgattttagacgagtttcgtagtttttttgagttttagtttttttattggttaaacgggataatgggatattagcgtttattttatagagttgttttgaggattagataggagagtagtgtgggtttttgatttaattaattttatagtttttgttattattattgtttaaggataggaaataagttagtggtaacgtcgagttgaaattcgggttttttaacgtttagttggaggttttatttattatttttttatttttttagagttaatgggatgtagaggcgaggatagtttttggaaaattatgtggcgttgatatattggtaaagcgtaggtatttcggtttcgaaggtgtataattattgtaatatgaaaaaatcgaggttgggtaggagtagggtagtgaggattttttaatttttatttttatttcggcgttgtttattgtatttgatagagcgcggagttgggttgttatagtcgtaattttagggattagtgcgtacgtttgggtcgtttttcgggagttatttagcggtcgcggataattgaataaatattttaaagcgttgcggtcggttaagggcggggatagttatattgcgcgcggggttcgtaggtcgtaataaagagtggttcgatttcgttgttgtttgtcgcgggagaggaataagttttcgattagcgttttttttcggggttcgcgtttcgagttttacgcgtaagatagtttaatagttgtttttttttttttcgtcgattttaatttttcggaatttgtttattcggggttgtagggtaagtgtttaggatggtttttagtttcgcgttggcggtgaaaattttaacgttatttttttaattaaaaaaaggggggggtaagggaggggttttgtgataattatttttagttttttttgattattttaaaattaagtcgattttttttaattagtttttatttattgttttaatttttttcgttgattttatttgggagttcggaatcgttaggtattgtcgaatgcggtgtaaaattttttttttttttttagttcgtagtgtttggagtcgttggggttattcgtttgttttgatgttatcgcgagatggttttcgagtttttcgagagtttttagtgaaaggatttcgcggtattgtttttattattatatcgtaaatttttttaaattttggaattaattatatagaggatatgttttaatttgttttgtattaatgttatagtggggatggaggttaggtcgtggttagagtagatacgtaggtttatgaaattgatgaattgagagttgtttttagttttgagcgtattatttggaattttagtttgaggttataattagaatttttgattttagatttaattttgtaaataataggggaaaaaaatggggaaaagaaaaattacgagagagggaaaaaaaattattttgtatttgtaaaaaaaaaaaaaaaaaaaaaaaaaaaaaaaaagttatataattttaaaattttttcgttttagataat

SEQ ID NO: 365 - DNA, 6261 bp, Artificial Sequence
  chemically treated genomic DNA (Homo sapiens)
aatggaaaattaaggtggatattgaaaagtatattataaatggtaatggggtcgggcgtggtggtttataatagtaattttagtattttgtgggggtaggtggattatttgtagttaggagttcgagattagtttggttaatatgatataatttcgtgtttattaaaaatataaaaattagttaagtatggtggtatgtatttgtggttttagttatttgggaggttgaggtttaagaattgtttgaatttgggaggtggaggttgtaatgagtataggttgtattattgtattttagtttgagtgatagaacgagattttgtaaataaataaatagtattggaagtagaagagaaatgggaaatgaaagttaaatggaaagttcggtatattgataaaattttaaataaatatttgttggatttagttaggtttaagaaagaagttgaggtcgggtatagtgtttgaagttaggagtttgagattagtttggttaatatggtgaaatttcgtttttattaaaaatataaaaaaattagttgggtatggtggtgggcgtttgtaattttagttatttgggaggttgaggaaggagaatcgtttgaatttaggaggcggagattttagtgagttaagattacgttattgtattttagtttgggtaagaagagcgaaatttttttttaaaataataataataataaaaaagaagttgaaatgtatatgaatttagttttattgagtagttgggatgataggtagtattgtatattacgttcggttaattttttgtatttttggtagagatggggttttattatgttagttaggatggtttcgattttttgattttgtgattcgtttattttggttttttaaagtgttgggattataggcgtgagttattgcgtttggtttaggaagtatgttttaatatattagaattttttgaaagaaatggatatttttattggaattattgtagagaggattttagattagtttatatgatttttaagtttttttttaattttatgatatttgagttatgtgttaaaataaaatagttcgggtgcggtggtttacgtttgtaattttagtattttgggaggttaaggtagatggattataaggtgaggagtttaagattagtttggttaatacggtgaaattttattttttttaaaaaataaaaaattagtcgggtgtagtggtggtcgtttgtagttttagttattcgggaggttgaggtaggagaatggtgtgaattcgggaggcggagtttgtagtgagtcgagatcgcgttattgtattttagtttgggggatagagcgagattttatattaaaaataaaaaataaaaaataaaaaattatatttgagggatgtagaggaaggtaagtaaattttataacgaaagaattattattagttgtggttaaggtttgtattgaatagagttcgaggaaattgttaggtttgtattaataagtttgaggtttttttattaaggaggtaggatttgaatagaatattgaagaggatagtagaattttgtaagggagttattcgagatttatattagggagaatataattattgtaaaatttatagttaaaagggatatattttagaaataggttaattggataaagtatgtatgtttgttataggaaaggtggaggttggaggaataggagatggaagaatattaggtaattataatttagttattttggaaaataatttcgaaatattaggtgaaacgtttattttgtttatttatttatttatttatttatttatttatttatttttgagatagagattttttttgttatttaggttggggtgtagtggcgtaattttttgttattgtaattttcgttttttgggtttaagtaattcgtttgttttaggttttttagtagttgggattataggtacgcgtttttacgattggttagtttttgtatttttagtagagacggggttttattatgttggtttgattggttttaaatttttgattttaagtgattcgtttattttggttttttaaagtgttgggattataaatatgagttattgtgttcggtttattaggtgaaaattttagatttaagattttgtatataatgaatgagagggagagtgtggttaaagtaatgagagaagtagtttttgtgagtgagttgtttggtgttaaaggtgaggaatttttatgaagaaagggttagtagcgggagaaattagcgtagagatgtttaagttaatattgtgttttatataacgttgtttatatagatgaagggaagaggtagatatgagagatattgtaaaattgtaaaaagtatggtaatagtttagaaatgtagattggtgaagttagggattggtgaggtattatttataagttttttttttttggagagagtggtgttgtttttgtgataaggatgatgaggatgaagagtatttgtgtttttagtacgttttattgttgttggtgatgtgtttgattttttatgttggtttttggttattgtttaaatttatatatatatatatatatatataaaatttgaaaaagttaggtttgtaaaatttaaaattattatgttttttatattaatagtatatgtatatatgatattagttatatgttaaatattgttttaagtattatatatatatattgattaatttaatttttataatatttttataaggtagatattatttgttattattattagtttatagataatgtattgagatataaaaaggttatgtattttgtttagattaaatagtttataagtattagggttaagttatgaatttaagtagtttggttttagagtttttgtttttagttattgtattttattgtaggttgagtagtttttattagaaatgttcggattataagtgttttagatttgggaatatttatatatatataatgcgatattttgggtatgcgatttaagtttaaatataaaatttatttatgttttatatatatttttatatatatagtttgaatgtaatttaatataatattttaaaaattttgtgtatgaaataaagtttatgttaagtatttacgtgaaatgttttatttttggtattatattggtgtttaaaaaatttcgaattttgtagtattttggatttttagatttgagatgtttaatttatatatttatttatttttatatagtatgtatgaattagtagagaaattaaattattatttttaaattaaaatttttttttataataaaaattaaatagtaaattaaatttcggttttgtgatatttttatttttttcgaatgaattttttttagtagttgtaaatattgggaattagaagaaaagataggtattttaaatatagggaaattttaatttaaatggaaagtttatattttatttagtgtttatatatagtgttttcgtttttattttggagttaattttagttatttttggttatattttagatggtaatggaataattttatagtgtttttataataggtaatatttacgttagtggatggtttatttaaggttaatttggtttaggaaagatatgtaaaggagagttttatttatttttttttttaattttatatttttagtggttgttttgttttttttttgtagtggttttcgttttgtttaatttaagtaaaattttagtgtagtatttttattaattgatattttttataaagtaaattgggaagttaaaagaataataggagaatgattaagatttttgagaattaaaaaaaattgaattaagatgtaagtaaatatagtgggagagggggatggcgagttaattgtatatagtatatgtgtatgtataaaacgttttttttttgttttatttattttttttagattgtataagttaaaatgagtaagttttgatttagaaatagggttaaagatatatatttttttttttttgttattaaaagaagatttgattacgtgtatagtgtataaaggatgttagtgggaagattaattttattgttaggtattgtaaggaaatagaaatttatatatggtgagatggtaaaggagtttaagaggaatttatggtaatataatatgaggaatggggttataattgcgtttttaatgagattatagaaggtatataatttaggttagtgcgatttaatattatgaaataatttttaaaaattaaaattaaataaggtagtattttattttttttttgtaaattttatattattttaatttttattggaggtttgttgttgataagggtgtttaaaagagatttttttgggtattttagagttttttaattggatggtaaggattaaataaatgttttgtgtttttttgttttatttgtgtttgtatttgagttgcgtacgcggtggtattgagttttcgatttatttatttgataggtggaggtgggatggggaaggtcggagatcgattaattttaaaggcggtagcgtgtggagtcgaacgcgggagggggtcggtcgaggcggattgaggggggggacgtcgaggtgcggcgataggacgcggaggacgaaagattttaagtagcggtggtcggtaaatgaggtgggtattgggggatttattttgcgaggaggcgggggcggggacggggggcgcggcgcggtagggcggggcggtagtcgggaagtttttttttttcgcggcggaggtgattgtcgggcggggggcggggggcggggggcgggagacgttttgttttacgtttttttagcgttcggtggtttaaagatggcggcggcggtggcggcggcggcggcggcggcggcggcgttgggggcgcggagtcgcgataggaggagggaaaagtagaatttgtgagtcgtttggaggtagcgcggcggttgtcgtgaggaggtcgggtgcggagtcgtcggtggtttagtcgtttagggttagggtttgggttgggagggagagatcggagtagcgttaggagttcgaggtcggagtcgaggaggaatgtgattaggggtcggcgggggcgcgggagtacgcgagagtagggatggggtagtaggtgggtcgcgtcggggaagtttcggggttttagtagttttagtttcgcgggattcggggtagtagtgtagttaggtttttcggtcgtaggcgggattcggcggggcgtattatagagatcggttttaatatttttatttagtatggtgagtgtgtttgggagtcggtatgagagcgtgggggaggtcgggggtggggtcggggcggggtgggtggcggacgggttgttcgaggggtcggagggtggaaggtgtttgagagtgggggcggaattcgttgttatttggtttagttttgggaggcgagttatattttttttttttcgcgtttttagtttggttggtagatttcgggggcggagaaggaaagagaagtgggtttggggattttggatggtttgttttttattttgggacgggattatgcggttgtagaaagaaagtgaatggtagttttaggagagggaaggatgaagggtagtattagtttagttttagaggtgggagtataaattcgtcgttagtgaaggggaaatgggttgtattttaagggattgggaaatgggaattgaattttaggagattgtggagtataaggtatgtgtttacgttaggtgatgagtagtgttaggatagtgaattgtggatagtgttaaatgtttttttgtagggaagatgaagttagtattattttattatttttgatatgtttttgtggtttattttgttttgtatttcgttttttattagaaatgaaaggttttgttaaagtttttgtattatgttttagagtaggatatataattttgagattgttggtaagggttagaggttggtgggtatggttaggacgttagttaggatatgaataagtttttttttgtagtgtgtgcgtgtgtttatatatatatatatatgtatgtatgttttttgtagtttgaaatttattattttgattttattgttaatgtatttttagaatagttgtttttaaattttttttgttttgtttttttgttttgtttttgtttttgttttttttgagatagagtttcgttttggtttttatgatggagtgtaatggcgggatgtcggtttattgtaatttttgtttttcgggtttaagtgatttttttgttttagtttt

SEQ ID NO: 366 - DNA, 6261 bp, Artificial Sequence
  chemically treated genomic DNA (Homo sapiens)
gaggttgaggtaggagaattatttgaattcgggaggtagagattgtagtgagtcgatatttcgttattgtattttattatggggattaaagcgagattttgttttaaaaaaaataaaaataaaaataaaataaaaaaataagataaaaaaagtttggagataattattttaaaaatatattgataatgagattaaaataataggttttagattatagggagtatatatatatgtatgtatgtatatgggtatacgtatatattataaaggaaaatttgtttatattttgattgacgttttaattatgtttattaatttttagtttttgttagtaattttagaattgtgtgttttattttgaagtatagtatagaggttttggtaaagttttttatttttagtaagaaacgaaatataaaataaaataaattataaaagtatgttaaaagtgataagatgatgttaattttattttttttatagaaaagtatttgatattgtttatagtttattattttgatattgtttattatttaacgtaaatatatattttgtattttataattttttgaaatttagtttttattttttaattttttaggatataatttattttttttttattaacgacgggtttatgtttttatttttgggattgagttaatattgttttttattttttttttttttgaagttgttatttattttttttttgtagtcgtatagtttcgttttagagtagaggatagattatttagggtttttaaatttattttttttttttttttcgttttcgggatttgttagttaggttagagacgcgaggggggaggggtgtgattcgttttttaggattggattagatggtagcggatttcgtttttatttttaggtattttttatttttcgatttttcgggtagttcgttcgttatttatttcgtttcgattttattttcggttttttttacgtttttatgtcggtttttagatatatttattatgttgggtgaagatattgaagtcggtttttgtggtgcgtttcgtcgggtttcgtttgcggtcggagggtttggttgtattgttgtttcggatttcgcggggttgaggttgttggagtttcggagttttttcgacgcggtttatttgttgttttatttttgttttcgcgtattttcgcgttttcgtcgatttttggttatattttttttcggtttcggtttcgggtttttggcgttgtttcggttttttttttttagtttaggttttggttttgagcggttgggttatcggcggtttcgtattcggtttttttacggtagtcgtcgcgttgtttttaggcgatttatagattttgtttttttttttttttgtcgcggtttcgcgtttttaacgtcgtcgtcgtcgtcgtcgtcgtcgttatcgtcgtcgttatttttaaattatcgagcgttgggaaagcgtgggatagagcgtttttcgtttttcgtttttcgtttttcgttcggtagttattttcgtcgcggggaaggagggtttttcggttgtcgtttcgttttgtcgcgtcgcgtttttcgttttcgttttcgttttttcgtagggtgggttttttagtgtttattttatttgtcggttatcgttgtttgaggtttttcgtttttcgcgttttgtcgtcgtatttcggcgtttttttttttaattcgtttcggtcgattttttttcgcgttcggttttatacgttatcgtttttggggttggtcggttttcggttttttttattttatttttatttgttaaatgagtgagtcgagggtttagtgttatcgcgtgcgtagtttaggtgtaggtataggtggggtagaaaagtataaggtatttatttggtttttgttatttagttaaggagttttaaaatatttagggggattttttttaaatatttttgttagtagtaggtttttagtaaaaattaaaatggtataaaatttataagaagagagtaaaatgttattttatttgattttaatttttggagattattttatgatgttaaatcgtattggtttggattgtgtgttttttatagttttattggggacgtaattgtagttttattttttatattatattattatgaattttttttgaatttttttattattttattatatgtgagtttttgtttttttataatgtttgatagtaaagttaatttttttattggtattttttatatattgtgtacgtggttaggtttttttttgatgataaaggagaaaaaatgtatatttttgattttgtttttgagttagaatttatttattttagtttatgtagtttaaagagagtgaatgaggtagaaaagaagcgttttatatatatatatatattatatataattgattcgttattttttttttttattgtgtttatttgtattttaatttaattttttttaatttttaaaaattttgattatttttttgttatttttttggttttttaatttgttttataaaaagtattagttaatggaggtattatattgaaattttgtttaaattagataggacgggagttattgtaaagaaggaataaaataattattggaaatgtagggttgggagaagaggtggatgaagtttttttttgtatattttttttgaattaggttgattttagatgaattatttattgacgtagatattgtttgttgtaaaagtattatgaaattattttattgttatttagggtgtagttagaaataattgaaattaattttaaaatgggaacggaaatattatgtgtaaatattggataaaatatgaattttttatttggattaaagtttttttgtgtttaaaatatttgtttttttttttaatttttagtgtttgtaattattgaaaaaaatttattcgaaagggataaagatgttatagagtcggaatttggtttattgtttgatttttattatgggagaaaattttaatttggggataatggtttggtttttttgttaatttatgtatattatataaagatagatgaatatatgggttgaatattttaaatttgaaaatttaaaatgttgtaaaattcgaaattttttgagtattaatatgatgttagaggtggaatattttacgtaagtatttaatataaattttgttttatgtataaaatttttaaaatattgtattaaattgtatttaagttatgtgtataaaggtgtatatgaaatataaatgaattttgtgtttagatttgggtcgtatgtttaagatatcgtattatgtgtgtgtaaatatttttaaatttgaaatatttgtggttcgaatatttttgataagggttgtttagtttgtagtagagtgtagtggttaagggtaggggttttgaagttagattgtttgggtttataatttggttttgatatttatggattatttgatttgggtaaagtatataatttttttgtgttttagtatattatttgtaaattgatgatgataataaatagtatttattttataggaatattgtgaaaattaaattagttaatatatatgtatagtatttaaaatagtatttggtatataattggtgttatatatgtatatattattaatataaaaaatataatggttttaggttttataagtttaatttttttaaattttatatatatatatatatatatataaatttgagtaatggttagaggttagtataaaagattagatatattattaatagtagtaaggcgtgttgaagatatagatattttttatttttattatttttattataggagtaatattattttttttagaaggaaggagtttgtgagtaatgttttattaatttttgattttattagtttgtatttttaggttattgttatattttttatagttttatagtattttttatatttattttttttttttatttatataaatagcgttatgtaagatatagtgttagtttaggtatttttgcgttggtttttttcgttattagttttttttttatagagattttttatttttagtattaagtaatttatttatagaaattgttttttttattgttttgattatatttttttttttatttattatgtataaagttttaagtttaaaatttttatttaatgggtcgggtatagtggtttatgtttgtaattttagtattttgggaggttaaggtgggcggattatttgaggttaggagtttgagattagttaggttaatatggtgaaatttcgtttttattaaaaatgtaaaaattagttaatcgtgggggcgcgtgtttgtaattttagttattggggaatttgaggtaggcgaattgtttgagtttaggaggcggaagttgtagtgataggagattgcgttattgtattttagtttaggtgatagagggagtttttgttttaaaaataaataaataaataaataaataaataaataaataaataaaataaacgttttatttagtgtttcgaagttattttttaggataattggattataattgtttaatgtttttttattttttgtttttttaatttttattttttttatggtaggtatatatattttatttaattagtttatttttgagatgtattttttttagttatgagttttgtaataattatattttttttaatataagtttcgagtgatttttttataggattttattgttttttttagtattttatttagattttgtttttttgataagagaattttagatttattaatatagatttaatagttttttcggattttatttagtataggttttaattataattggtaataattttttcgttataaaatttgtttatttttttttatattttttaaatatggttttttgttttttgttttttgtttttgatatggagtttcgttttgttttttaggttggagtgtagtggcgcgatttcggtttattgtaagtttcgtttttcgggtttatattatttttttgttttagtttttcgagtagttgggattataggcgattattattatattcggttaattttttgttttttagaagagatgggattttatcgtgttagttaggttggttttgaattttttattttgtgatttatttgttttggttttttaaagtgttgggattataggcgtgagttatcgtattcgaattgttttgttttgatatatgatttaagtgttatagagttggaaagaaatttagaggttatgtaggttaatttggaattttttttgtagtaattttagtgagggtatttattttttttaaaaggttttaatatattaaaatatattttttgggttaggcgtagtggtttacgtttgtaattttagtattttgggaggttaaagtgggcggattataaggttaggagatcgagattattttggttaatatggtgaaattttatttttattaaaaatataaaaaattagtcgggcgtggtgtgtagtgttgtttgttattttagttatttagtgaggttagatttatgtgtattttaattttttttttgttgttgttgttgttttgagagggagtttcgttttttttgtttaggttagagtgtaatggcgtgattttggtttattgaaattttcgttttttgagtttaagcgattttttttttttagttttttaagtagttgggattataggcgtttattattatgtttagttaatttttttgtatttttagtagagacggggttttattatgttggttaggttggttttaaatttttgattttagatattgtgttcggttttaattttttttttaaatttgattggatttagtaaatatttatttaaagttttgttaatatgtcggattttttatttaatttttattttttattttttttttgtttttaatattatttatttatttatagagtttcgttttgttatttaggttggagtgtaatggtgtaatttatgtttattgtaatttttattttttaggtttaagtaatttttaggttttagttttttaagtagttgggattataggtgtatgttattatgtttggttaatttttgtatttttagtagatacggggttatgttatgttggttaggttggtttcgaatttttgattgtaagtgatttatttgtttttataaagtgttgggattattgttgtgagttattacgttcggttttattattatttatagtgtattttttagtgtttattttggttttttatt

SEQ ID NO: 367 - DNA, 6130 bp, Artificial Sequence
  chemically treated genomic DNA (Homo sapiens)
ggatgaataggtagagtatagaggatttttagggtagcgaaattgttttatatgatattttaatagtagatacgtattattgtatatttgtttagatttatagaacgtataagttaagagtgagtttttatataaattatgaattatgggggataatgatgtaataacggaggtgttttagttgtaataaatgttttattgtgttggggatgttgatagtgaggggggttgtgtatgtgtggggtaaaggttatgggaaatttttgtattttttgtttatttttgttttgaatttaaaagtgttttaaaagtttggttaatacggtgaaattttatttttattaaaaatataaaaattagttgggtgtggtgttgggcgtttgtaattttagttattcgggaggttgaggtaggagaattatttgaattcgagaggtagaggttgtagtgagttgagatcgagttattgtattttagtttggggtataagagcgagatttcgttttaaaaaaaaaaaaataaaaataaagtttatttaaaataaataagtaaataaatatagaaatatggtttttttagtttttatcgtttggatgtacggtatattttttttgtttgtgtgttttatttttttattttgttatattgaggttttttaattattgttttaggggatattgtttttattttaatttgtatttttaatagtatttttttttgatgataaaaagagtatatgtataaagtttggaaaataaaaagaaaaagaagtaggagaaaaaaattttatttcgaattgttttatttggagatattaattacgttttggatcgcggttggtacgatattgtttatattaaattgtattattttgttaatattatatttttttattatgagaaattttaagaatatatttttttggtaaatattttatatatggttatattatagtttagttaattattcggtatttaggtggtgatatttagatgtgtttagttttgtattattataaataatgtgatgaatatttgtgtggtgaaagttttgttaaatttttgaattaaattatagatttggaattatagggtggaagaatatggatattttggttatttttattttattataagattgttttttagaaattttgttatttgtttatatttttagaagtagaatgtgagtttttgtttttatggttttattaagtaatataatttaaaaaataatttgttgatttgatgaaaatgaaaatagaaatggtattttattgatttaatgaatttttttttttgtttggtaagtttgattttcgaaaatttatttattaattatttgaatatttaattttataaattgtttattatatattggggttttaatgttttttttatgaatttgtaagagttttattttattgttaaaaaaattttttttagttttttatagtttaatttttatgttaaatttatttttaaaatgggaataattttttttttggtaattaaaataacgggttgttatggtaaaaaaaaataatatattatagaaaattatatagaaaaaagtaaaaatttatattttattttttgaatttgtattaatatttttagattatttttttttaaatttttattttatgtttttatggtattttttgaagtttaagaattttaatttttatgtattttaaagtaagtattttaaaattttaatatattttttagtgtttttgtgtttagaaatatttttttaatttagcgatttgataaaaaattatttttaaaaaaatagagttgtgattttttttttttttgagatggagttttgttttcgttgtttaggttggagtgtaatggtgcgatttcggtttatcgtaatttttgttttttaggtttaagtgatttttttgttttagtttttcgagtagttgggtttataggtatgtattataacgttcggttaattttgtatttttagtagagatagggtttttttatgttggttaggttggtttcgaatttttaattttaagtgattcgtttgttttggttttttaaagtgttgggattataggtaaggtattatgttatattatagaatattaaggaaattaagggggaaagaagttagttttaatgtttggattttaatatatttgttttttttatgtattgtttttttaagatattgattatgagtttttaatttattttaatttatttttatatggttgtaagtataattttttattttttttttttttttataattatgttttaagtattatttttttgttgttacgtagtttcggtaatggttgttttaaatgatttttaatggttttttttgtggttgtgttgttatagttgattttatttttttaatgaatattttcgttgtttttaatttttttgttaagcgatatttagaaatattagagtttagtgaagtagaattttttattgttttttgggggttgattgtaatgtaatttgattttgtttatttttttttttttttagaggagtgttggaagaaattatttttagagaatggttagaaaaacgattaatagaaaatgaggaggaaggagattatgagttgaaagtatgttgagtttttaggaggaagttgttttagaagtttagattgtgtaggttttgtttttgtgatttataaatcgggtatgagtttataataattttgatagatgttttttatttatgtagcgtttggtgtttttgagggtattggtgtaggaaggtttgatgtagaatttttgtttattatttgttgtttgtgtgatttatattagcggcgttttagtttgtttttttgtagaataagaatatagttagttttttgtatttgtgggttgggtatttatggatttaattaattgtggattgaaaatatttggaaaaatataataaaaagtaagattataataataaaataatataaataaaaaataaggtcgggtacggtggtttatatttataattttagtattttgggaggttaaggcgggaggattacgaggttaggagatggagattattttggttaatatggtgaaatttcgtttttattaaaaatataaaaattagttgggtatggtggtacgtgtttgtagttttagttgttcggggggttgaggtaggagaattatttgaattcgggaggtagaggttgtagtgagtttagattgcgttattgtattttagattggcgatagagtgagattttgtttaaaaataaataaataaataaataaaaaatatagcgttaataattatttatatagtatttaaattgtattagttattataagaatttagagataatttaaagtattttggaggatttgtgtacgttatatgtagatattgtgttaatttatatgagggatttgagtatttttggattttggtatttacggatgtgttggaattagttttttgggggatatcgagggatattatgataataggttcggaagaggatagacgaatatattgggttatggggtagtattgagcggtggtggaagaatttcgagtagtcggagaaagagtaggagggttttttagggaagagggaatggtttgtgtgaatttaggttgaattttttatttttgggattcgatttttttatttgtataaattgtttggtttgtggtttgtaagagttttttttgtttttttaggaagttttttagggatttttgtttttggttagttttgtttttttgatcgttgcgggttttgtaggttatagttttggtttttgtgtgtgtattagatacgtttaggtttttttagcgggatttatttttttgtttaatttaattaatagttttttagaaatttttaggggtagtaaagtgttgtagtttttgatatgttttagggttgaatgggggtgggtattagtagatttaatacgtatttattaatttaaaagaagtgttattggtttattggtaaagttggttagtaataattttattttttttaggaataatgattattaattatttttttttgttgggggtaggagataattcggcgtatggtggtggagtatttgggagatagaggtagagatttcgtttttcgatttcggcgcgttggttgtaaagtaggaatagtaatagtatttatttttagggttacggagatcgaatgaaataatgtttgttaagttatttagtatatagtaagtatttagtaatgttaggttgttgttattataataaatttttagcgaacgggaagattaagtatcggttggtattgggttaggcgtcgtaggtaaagatgtggagatgtttcggaggcgtttagggtattcgggcgaaaattcgagggtcgaaggttgggaggaggcggagcgtcgggtatcgggtatcgggtatcgggcgggaggtgagtttttggaaaaggagggggtttcgggcgcgtttttttagtagtcgcggtttttttgtttagggtcgcgtttttttcgtcgtattttttttttgatttcgaaagtattttttttttttatttagtttttttttttgggttgtaggagattattgtttgcggggaagattaagacgttaggtcggcggattagttttcgtttcggggcggtgtagttggagcgttaggggagtttcgttcgtcgtagttttagcgtcgcgcgttttttttttttcgcggatttggcggtgtcggcgttcggagtggttttttaaaaggtagtttattgttcggagggggcgggcggggggcgtcgatcgtcgtttgaggttcggttttttttttttttttttttttgttttcgcgtcgttcgttggttagttcgttggttcgttcgttcgttcggcgtacgtttcgttttcgttagttggtttcgttgtcgggtgcgcggcgtggagcggtagtcggtttggacgcgcggtcggggttgggggttgggagcgcggcgcgtaagattttttcgcgcgagagcggtttttgttatcgggcgaggtttgcgtcgcgatggtagagatgggtagtaaaggggtgacggcgggaaagatcgttagtaacgtgtagaagaagtttattcgcgcgtaggagaaggtgagcgagtcggagttttagtagtcgcggagttttagtcgtcgcggagtttcggttatttgtttttttatttttcgatttcggggtttggtttttcgttaggatttggtgttgttatttttagaggagcgttttcgaggggtttcgaggtttttaggttgcgtttttcggcgttttgggtgtttttttaggtttgcgttttttgtttttttatattcggtcggggtaggatagggtttcgttttgtattttcgtggttcggttgtatagtagtggtcggttttgttttaggttttttttaggcgcgcgttttaggttatttcgttttggaggttaagggtcgggaggttgggaggttaggtggtgatttttagttttttaggtttatgtaggtaatttaggttgggtcggcgttcggggcgagagggagtatgtttttttgtttttggggatattattttttcggatttttaaggttgtttttcgaatcggtatttatagtttttttttttttattgtttttttattttcgtttttcgtgggtcgaagagggattgggttttttttttcgagagtgtttgcggtttggaagttttcgtttagttcggttttatcgggagtttagggttacgtatttcgtaagaggtgtttcgttttagtagcggttagcgttttcggcggtcggggagcgggtggcggtattggttttgggagttacggtcgggtggggagttggtttggaggaggcgcgtggaaggcgttataggaaattcgattttttttcgcggagagttggaatgggggatggagtcggggttttttagggtgtttagagcgtgtaggaaatgtagagattgaggggcgggggtttgtattcggttagttgtttattttaagttatttttggtttattgaattggattacgttagttgttgacgttattttttttgacgattttaattttgaaatttgagattgtagaatttgtgtttttgttag

SEQ ID NO: 368 - DNA, 6130 bp, Artificial Sequence
  chemically treated genomic DNA (Homo sapiens)
ttggtagaaatatagattttgtaattttagattttagagttggagtcgttaggggaagtggcgttagtagttggcgtgatttaatttaataaattagaggtggtttgggatagataattgatcgggtgtagattttcgttttttaatttttgtattttttgtacgttttgggtattttgggaggtttcggttttattttttattttagtttttcgcgaggaggggtcgggttttttgtggcgttttttacgcgttttttttaggttagttttttattcggtcgtggtttttaaagttagtgtcgttattcgtttttcggtcgtcggaaacgttaatcgttgttggggcgaggtattttttgcggggtgcgtagttttgggttttcggtggggtcgggttgggcgggagtttttaggtcgtaggtattttcgggaaaggaaatttaattttttttcggtttacggagaacgaaagtggagaagtagtgggaaggaaggaattgtgggtgtcggttcgagaagtagttttgggagttcgggggaatagtgtttttaggggtagagggatatattttttttcgtttcgagcgtcggtttagtttaggttgtttgtatgggtttggagagttgagggttattatttggttttttagtttttcggtttttggtttttaaagcggggtagtttggagcgcgcgtttgagaagagtttggagtagggtcggttattgttgtgtagtcgagttacgaaggtgtaaagcggggttttgttttgtttcggtcgggtgtggggagatagaggacgtaaatttaagagggtatttagagcgtcggggaacgtagtttggggatttcgaagtttttcgaaagcgtttttttagaggtgatagtattagattttggcgaaggattaggtttcggggtcggaggatagggggataggtggtcggggtttcgcggcggttgggatttcgcggttgttggggtttcggttcgtttatttttttttgcgcgcgggtgagttttttttgtacgttgttggcgatttttttcgtcgttatttttttattgtttatttttgttatcgcggcgtaggtttcgttcggtggtaggggtcgttttcgcgcggggagattttgcgcgtcgcgtttttagtttttagtttcggtcgcgcgtttagatcggttgtcgttttacgtcgcgtattcgatagcggagttaattgacggaggcggagcgtgcgtcggacgggcgagcgagttagcgagttagttagcgagcgacgcggggatagagggagggagaggggaggggtcgggttttaggcggcggtcggcgtttttcgttcgtttttttcggataataagttgttttttaaagggttatttcgggcgtcggtatcgttaggttcgcgaggagggaggggcgcgcggcgttggggttgcggcgagcgggatttttttgacgttttagttgtatcgtttcggggcggggattaattcgtcggtttggcgttttggtttttttcgtaagtagtaattttttgtaatttaggaaaggagattaggtggaggagaggagtgttttcgaaattaaagagaaagtgcggcgaagggggcgcggttttgaatagaggagtcgcggttgttgggagaacgcgttcggagttttttttttttttaggggtttatttttcgttcggtgttcggtgttcggtgttcgacgtttcgtttttttttagttttcggttttcgggttttcgttcggatattttaggcgttttcgggatatttttatatttttgtttacggcgtttagtttagtattaatcggtgtttggttttttcgttcgttaaaaatttattataataataataatttagtattattgagtgtttattgtgtattaagtgatttgataggtattattttattcggttttcgtggttttagaggtaggtgttattattgtttttattttataattaacgcgtcgggatcgaggaacgagatttttgtttttgttttttaggtgttttattattatacgtcgggttgttttttatttttagtaggaaggaatgattagtgattattatttttggagaagataaggttattgttaattagttttgttaatagattaatgatattttttttaagttaataaatacgtattgagtttgttgatatttatttttatttagttttaaaatatgttaggggttatagtattttgttgtttttggaaatttttaaagaattgttgattgagttgagtagagagataggtttcgttgaagaggtttagacgtgtttggtgtatatataggagttagggttatggtttgtaggattcgtagcggttagaggagtagagttggttagggatagaggtttttgagaggttttttggaggaataggaagggtttttgtagattataaattaagtagtttgtataaatggagaaatcgagttttaggaatgagaggtttagtttgggtttatataggttatttttttttttttggaaggtttttttgtttttttttcggttattcggggtttttttattatcgtttagtgttgttttatggtttagtgtgttcgtttgttttttttcgggtttattattatgatgtttttcggtattttttaggggattggttttagtatattcgtggatattaaaatttagggatgtttaagttttttatatgaattgatatagtatttgtatatagcgtatataaattttttaaaatattttaaattatttttagatttttgtaatagttaatataatttaaatattatgtaaatagttgttaacgttgtattttttatttatttatttatttatttttagatagagttttattttgtcgttagtttggggtgtagtggcgtaatttgggtttattgtaatttttgtttttcgggtttaagtgatttttttgttttagtttttcgagtagttgggattataggtacgtgttattatgtttagttaatttttgtatttttagtagagacggagttttattatgttggttaagatggtttttattttttgatttcgtgattttttcgttttggttttttaaagtgttgggattataggtgtgagttatcgtgttcggttttgttttttatttatattattttattgttgtagttttattttttattgtatttttttaaatatttttagtttatagttggttggatttatggatgtttaatttatagatgtagagggttgattgtatttttattttgtaggaagatagattgaggcgtcgttgatgtaggttatatagatagtaaatgataagtagagattttgtattaagtttttttgtattaatgtttttaaaagtattaagcgttgtatgagtgaaaagtatttgttaaaattattataaatttatgttcgatttgtgagttataaaagtaaaatttatatagtttgggtttttaaagtagtttttttttaaaagtttaatatgtttttagtttatgattttttttttttttattttttgttggtcgtttttttaattattttttaaaagtgattttttttaatatttttttgaggaaaggaggaaatgagtaaagttaaattgtattatagttagtttttagggaatagtgggagattttgttttattggattttggtgtttttaaatatcgtttgatagaaaaattggaagtaacggaagtgtttattagagggatggggttagttgtgatagtatagttataggaggggttattgggaattatttaaaataattattatcgagattacgtagtaataagaaaataatgtttagggtataattatgaaggaaaggaaaagataggaaattgtatttgtaattatataaaaataaattaaaataaattaaaagtttatgattaatgttttgaaagaataatgtataaaggaagtagatgtgttagggtttaggtattaaggttgattttttttttttttaatttttttaatattttataatatgatataatgttttgtttataattttagtattttgggaggttaaggtaggcggattatttgaggttgggagttcgagattagtttaattaatatggagaaattttgtttttattaaaaatataaaattagtcgggcgttgtggtgtatgtttgtaagtttagttattcggaagattgaggtaggagaattatttgaatttaggaggtagaggttgcggtgagtcgagatcgtattattgtattttagtttaggtaacgagagtaaaattttattttaaaaaaaaaaagaattatagttttgtttttttagaggtgattttttattagatcgttagattaaaaagatatttttaaatataaaagtattggagaatatattgaaattttaaaatgtttgttttgaggtatataaaaattagaatttttaaattttagaaaatattataaaaatataggataaaagtttgggaggaaatgatttaaaaatgttagtataagtttaaggggtagaatgtagatttttatttttttttgtataattttttatagtatgttatttttttttattatgatagttcgttattttaattattaggaaaagagttatttttattttgaaaataagtttgatataaaaattaaattgtaagaaattagggaaaatttttttggtaataaaatagaatttttataaatttataagaaaaatattaaaattttaatatatagtagataatttataaaattggatatttaaataattaataaataggttttcgaaagttagatttattagataaaaagaaaggtttattaaattaatgaaatattatttttgtttttatttttattaaattaataaattattttttaaattatgttatttaataaaattatagagatagaaatttatattttatttttgagagtgtaaatagataatagaatttttagaaagtaattttgtaatagaataagaataattaaaatatttatatttttttattttataattttaagtttatgatttaatttaaaaatttggtaaagtttttattatatagatgtttattatattatttataataatgtaaaattgaatatatttaaatattattatttgaatgtcgaatgattaattaaattatagtatggttatgtatgaaatgtttattaaaagaatatgtttttgaagttttttatgatagggaaatgtgatgttaataggataatatagtttaatgtaaatagtatcgtgttagtcgcgatttaaaacgtgattgatatttttaggtggagtaattcggggtggggttttttttttttatttttttttttttttattttttaaattttgtatatgtattttttttgttattagaaagaagtgttattaaaaatataaattgaaatgaggataatgttttttggggtaatagttgggaaattttagtgtggtagaatagaaagataaagtatataggtagagggagtgtgtcgtgtatttaaacggtgagggttggagaagttatgtttttgtgtttgtttgtttgtttgttttaaatagattttatttttatttttttttttttgagacgaagtttcgtttttgtattttaggttggagtgtaatggttcgattttagtttattgtaatttttgtttttcgggtttaagtgatttttttgttttagtttttcgagtagttgggattataggcgtttaatattatatttagttaatttttgtatttttagtagagatggggttttatcgtgttggttaggtttttagaatatttttaggtttagagtaaaagtaagtagaaggtatagagattttttataatttttgttttatatatgtataattttttttattattaatatttttagtatagtgggatatttgttataattgaggtattttcgttgttgtattattattttttatagtttatagtttatgtgagaatttatttttggtttgtacgttttatgggtttgggtaagtgtataatggtacgtgtttattgttagagtattatatagaatagtttcgttgttttaagaattttttgtgttttgtttgtttattt

SEQ ID NO: 369 - DNA, 6510 bp, Artificial Sequence
  chemically treated genomic DNA (Homo sapiens)
ttttttaatagagatagggtttcgttatgttgtttaggttgatttttaatttttgggtttaagtagtttttttattttaattttttaaagtgttgggattataggtattatttattgtgtttagttagggatttgttttatgaaattgtagaaaggaaaaaaaagtaaaagtggaggtgggaaatagattgataagattggaaaaatgttaatgatggttgaaattggttggtgatgtattattttattgtttttgagtatgtttgtaaatttttataagaatgttttgtaaggaagtagtagtgatattgttatatattgttgagaaaatgtaaaattaaatataaagttaataaaaagagataaattatgtatatatagataatatatgtatatatatatatatgtgttgtgtgtatatatatatattatgtgtacgtgtgtatgtttataatatatagatatatatatgttatgtatacgtatataaaagaaggtagaaaggttgtgggtagatattttgattaagagtttttgtgatattattatagtggttttgtagtttttatttaggggtttttgttgatatgaatttatagtagtgtgttttttaattaggtttgtatttttttaatttgttagataggaagttatttttggtatttggttaggttaaatataagaagtgtttgatgatttttttttaattttgttaattattgaaaatttatgttagaggaaaaaaattgtttttattttgaatttatttatttattgagatagagttttgttttgttgtttaggttggaatgtagtggtgtgattacgatttattgtagatttgattttttaggtttaagtaatttttttattttagtttttaagtagttgggattataggtatacgttattacgtttagataatttttatattttttgtagtgatagggttttattgtattgtttaggttggttttaaatttttgagtttaagtgatttttatattttggttttttaaagtgttgggattataggttgttttgaatttaggtaataattgtttgtgggttttgaagtaaatttttttaaatatgttggttattaattaattattagggttgggttttgtaagaagggtgttggggtaaagatggttgtaaattttttgttatttaagtagaaaggatttttttgttatgaatttgggatggtgttagtagtttgtttgattaattaaatgaggtagatatgatgttgtatagttttcgaggttaggtttttagagttgtttttaggttttttggaatatttgtttttgaaatttagttgttatgttatgaggaagtttaagtaggtttgcgaagggagttataggtagtagtttttagggttttgttaggtatgggagtgggttatattggaagttgattttttaattttaattaaattattttagttgatattttataatatatagttaagttattttgttaattgttttttaatttttgatagaattataggtataaataaaattattgggtttttttgtttgtttttttgtttttttgaggtggagttttgttttgtcgtttaggttggagtgtagtggtgtaatttcggtttattgtaagtttcggttttttgggtttaggttatttttagttttagtttttcgagtagttgggattataggcgtttattattacgtttagttgattttttgtatttttttggtagagacggggttttattacgttagttaggatggttttaattttttgatttcgtaatttttttatttcggttttttaaagtgttaggattataggcgtgagttatcgtattcggttaaaattattgttttaaattataaagtgttgggatagttgtttatttggtaggagattatgagaataggtgtaattatgttaatagaagaggaggtatcggttgtttgtttatattcgattttatgttttagtgttgaatagtagagtagtggttgtgatttggggtagaagggaatggtgagtatatatagttgtttgatattggagtaggtaagttttgttaagaaagttttgtttttgagggtttttaagtaatagttaagattagagcgttttttttttggcgttattaggttattagaggttatttttattttttattttaaggggtttgtttatggagtagagtttggtgatataattaatattttagttgtttttgaaataattattttaaggtttaaataatataatttttaatttttagaataagtaattgcgattttttttttttttttgagacggagttttgtttcgtcgtttaggttggagtgtagtggtgttattttggtttattgtaatttttgtttttcgggtttaagcgatttttttgttttagttttttaagtagttgggattataggtacgtattattatgtttggttaattttttgtatttttattagagacggggttttatcgtgttagttaggatggttttgattttttgatttcgtgatttgattgttttagttttttaaagtgttgggagtataggaatgagttatttcgtttagttattttttttttttttttttttttttgagatagggtttcgtttatattgtcgtttaggttggagtatagtggtataattgattatggtttattgtaattttcgtttttcgagtttaagtgatttttttattttagttttttagggagttgggattataggtgtatatatattattaaagttggttaatttttaaaatttttttatagatggagttttgttatattgttttaagttggttttaaatttttgggtttaagtgatttttttattttagttttttaaagtgttttgattataggtatgagcgttcgtatttagttaggatttttttaggatgttagagtgtgggtagttagttttatttttgagattttgatttttttttaaattataattattttatttttttattaaagaaaaaaaagatgatttattagatagttgttaaggtatttatataaaattatacgatagtaggatagatggtaattaagagggaatttaggattcgttattattagttggaaatatttgatttttagtttgtaaatgtgataagttagattaatattagtaggatattgaatatagtttgtagggatgagtttttgcgttatttttggatatgtgtttaagtaattagaataatttaaaatgttattaggtttttgttgttatttttataaatttcgaatagtgagttgggtttttaaggaatttgtttttgttagtttattttatgttgtataataaataggtttaaagtttttggtagcgtatattaagtatggaggattttttatttattacgatagttttttcgttggagggttggggttgtattttatttttttttttggaaggggcggtttttgtttgaggttttatttgttttatagtagagggatgaaacggtaggattttggttttgacgggttttatttggtaatggtatatgttaagtgggttacgttttattgtttagagtaagttatatggttacgtttgatattgacgtgcgggaaatgtagaatttttttgtatttggggaggtagatatttggataatatgtaatttattatagggttagttggatgaagaacggttaagggtttaggttttttatttcgagttaggtcgaattagtcggggtcgtgagattaagttacggttattagtgttcgtttggaattatgttttgtttttgtcgtgtttatattgtagtagggtttttgttttttaatttatttgaaattggtggtgggtgtggtatatagatgagaaataggaattttttacgttgggttttaataggagttgcggtgggaatataaatggtgtagttattttggaagatagtttggtggttttttataaaattaaatgtattttttatatatgattcgttatatattatttagtaattgtattttttggtatttgtttagatgagttaaaaatttgtatttatataaaaatttgtacgtggatgttgatagtagttttatttataattgtttaaatttggaagtttttaggaggtgagtgggtaaataaattgtggtgttttcggttagcggaatattatttagtgttaaaaagaaatgagtttaagttatggaaagatatgaaagaattttaagtattattaagttaaagaagttaatttgaaaaggttgatgttgtatgagtttatatttatgatattatagaaaaggtaaaattataaagatagtaaaaggattagtggttgtaggagttagggaggagggagggatgaataggtggggtatagaggatttttagggtagtgaaattattttgtatgatattgtaatggtggatataggatagtaagtatttgttttttatttcgtagaatgtacggtattgagaacggatttttttgtaatatatggatttttagttataatattgaatttttttcggggtttcgtatcgttcgtagcgttttttaattttcgttttcgtttcgtttatcgttttttttttttgttatagcgcgttcgtttcgcggtcgttaattagtcgcgcgtttcggtcgcgcgtttcgtttcgttttcggtgggtgtgcgcgcggttaatgggcggtgcgcgggggtcgggtcgcggcggggcggggtagcggggcggtcgttaatcgtcgtggtgttgttgaaattgaaaatattatattatgttaatcgcggtcgggttcgcgcgtacgggggtggggttcgcgcgtataaagggggcgtaggcgggttgggcgttttataggttaagtgcgttgtgttcgaggggtgtcggttaggtttgagcgagcgagttagttagtaggtatcgagggggcgcggttgtcgttcggacgagataggcgaattcgacgtagaagagtttattatcggatagttaggtagtcgtcgcgtttttcgtatacgtagagtcgggcggcgcggggttttttttgcgttcggttttcgttttttttttttttttttttttttttttttcgttgtttttttttttttcgttgttcgcgtttgcgtagtttcgggttatgttcgacgcgttttttcgtagtatatttacgatggagcgttttgtcgttcgtgggatttttttagtattagtgcgtattagcgtttgtcgtagttttttcgggtcggtggattacgaggagttgagtcgcgagttgtaggttcgtttggtcgagttgaacgtcgaggattagaatcgttgggattacgatttttagtaggatatgtcgttgcggggttttggacgtttgtagtggatcgaagtggatagcgattcggtgttcgcgttttatcgcgagacggtgtaggtggggcgttgtcgtttgttgttggcgtcgcggttcgtcgcggtcgcggtggttgttagttcgtttttcgagtcggtcgttgagtttttcgacggtttcgaggaggcgtcggagtagttgtttagtgtttcggtttcggtttcggcgtttatttcgtttttagtttcggttttggttttagtttcggtttcggtttcggtttcggtcgcggtttcggtcgcggtttcggtcgcggtcgcggttttggtttcggtttcggtttcggtttcggtttcggtttcggtttcggttttagtcgcggtttcggttttagtttcggtttcggtttcggtttcggttttcgtttcggtttcggtttcggacgcggcgttttaagagagcgtcgagtagggcgcgaattaggggtagcgcggttaggagtttttcgttgattagttgtattcggggatttcgggacgtttcgcggtcggtatcgcggtcgttagcgttaacggcgcggcgattaagaagttgttcgggtttttgattttcggtgagtttcgtacggtttcgtttcggttcggttcggtttcgttttgttcggtcggtcggtttttttagttttcgggggtttcgttgggttttcgttttttttcgtggtattaaagggttcgtagcgtttagggcgcggttgcgtttttattttttttttcgtttcgttgttgtgttttttagcggtttcgcgcgggcggggtgggaggttgaatttcggtcgcgatttttcgggagcgtagttttcgttttcggtcgcgggagttttttttcgggcgcggtcgggcgtcgtgagtacggcgtggagggggttaagcgcggcggcggtttcggggggtttggtcgcgggataaggggaaatgtttatatagtatattgcgcggcgacgtaaataaagttgattcgtcgcggatttcggcgcgggcggggacggcgtttttatttcggtcggttcgcgtttcgcgttttttttcggttttttttcgggttttcgggtcggtttcgttttgatcggtcgcgcgcgttgtcgttcgtaga

SEQ ID NO: 370 - DNA, 6510 bp, Artificial Sequence
  chemically treated genomic DNA (Homo sapiens)
tttgcgggcgatagcgcgcgcggtcggttagggcggggtcggttcggagattcgagagggggtcgggagagggcgcggggcgcgggtcggtcggggtgggggcgtcgttttcgttcgcgtcgaggttcgcggcgggttagttttgtttacgtcgtcgcgtaatgtgttgtgtaagtatttttttttgtttcgcggttaagtttttcggggtcgtcgtcgcgtttaattttttttacgtcgtgtttacggcgttcggtcgcgttcggggaggggttttcgcggtcgggggcgaaaattgcgttttcggggggtcgcggtcgggatttagttttttatttcgttcgcgcgaagtcgttggagggtataataacggggcggggaggggggtaagggcgtagtcgcgttttgagcgttgcgggttttttaatgttacgggaggaggcgggaatttagcgaggttttcgagggttggggggatcggtcggtcggataaagcggggtcgggtcgggtcggggcggggtcgtgcggggtttatcggagattagaggttcggatagttttttgatcgtcgcgtcgttggcgttggcggtcgcggtgtcggtcgcgggacgtttcgaaattttcgagtgtagttggttagcgagaggtttttggtcgcgttgtttttggttcgcgttttgttcggcgtttttttgaggcgtcgcgttcggggtcggggtcggggcgggggtcggggtcggggtcggggtcggggttggggtcggggtcgcgattggagtcggggtcggagtcggagtcggagtcggggtcggggtcggggttaggatcgcgatcgcgatcggagtcgcgatcggagtcgcgatcggagtcggagtcggggtcggggttggagttaggatcgggattgggggcggggtggacgtcggggtcgggatcgggatattaggtagttgtttcggcgttttttcgaggtcgtcgagggatttagcggtcggttcgaggggcgggttgatagttatcgcgatcgcgacgggtcgcggcgttagtagtaggcggtagcgttttatttgtatcgtttcgcggtagaacgcgggtatcgagtcgttgtttatttcggtttattgtaggcgtttagggtttcgtagcggtatgttttgttggaagtcgtaattttagcggttttggttttcggcgtttagttcggttaggcgggtttgtagttcgcggtttagtttttcgtggtttatcggttcgaagaggttgcggtaggcgttggtgcgtattagtattgggaaggttttacgggcgataagacgttttatcgtggatgtgttgcggagggacgcgtcggatatggttcggggttgcgtaaacgcgggtagcgagagaggagaggatagcgagaagaaggggaaaggagaggaggagagggcggaggtcgggcgtaagggagatttcgcgtcgttcgattttgcgtgtgcgagggacgcggcggttatttggttgttcggtggtggatttttttgcgtcgggttcgtttgtttcgttcggacggtagtcgcgttttttcgatgtttgttggttagttcgttcgtttaggtttggtcggtatttttcgagtatagcgtatttggtttgtggaacgtttagttcgtttgcgttttttttatacgcgcgggttttattttcgtgcgcgcgggttcggtcgcgattagtataatgtagtatttttagttttaataatattacggcgattggcggtcgtttcgttgtttcgtttcgtcgcggttcggttttcgcgtatcgtttattggtcgcgcgtatatttatcgggggcggggcggggcgcgcggtcggggcgcgcggttgattggcggtcgcggggcgagcgcgttgtagtaggggaagggggcggtgagcggggcgggggcgggagttaaagggcgttgcgggcggtacggaatttcgaaagggatttaatattataattgaaagtttatatgttataggagggttcgtttttagtgtcgtatattttacgggataaaggataaatgtttattgttttgtgtttattattatagtattatataaggtagttttattgttttaaaaattttttgtgttttatttatttattttttttttttttttagtttttgtaattattgatttttttattgtttttgtagttttgttttttttataatgttatagatgtgaatttatatagtattagtttttttagattggtttttttgatttaataatatttaaggtttttttatgtttttttatgatttgagtttatttttttttagtattgaataatatttcgttgatcggaggtattatagtttgtttatttatttattttttgaaggtttttaggtttgggtaattatgaataaagttgttattaatatttacgtgtaagtttttgtgtggatgtaagtttttgatttatttgggtaaatattaaggggtataattgttggatggtgtgtggcggattatatgtgaagggtatatttagttttgtaaggagttattaaattattttttaaagtggttgtattatttgtgtttttatcgtagtttttgttaaagtttagcgtggagagtttttgttttttatttgtgtattatatttattattaattttagatgaattaaaaaatagaaattttattataatgtggatacggtaaggataaggtataattttaaacgaatattgatgatcgtggtttgattttacggtttcggttggttcggtttggttcggggtgaagagtttgggtttttggtcgttttttatttagttggttttgtaatgaattgtatgttgtttaaatatttgtttttttaaatgtaggaagattttgtatttttcgtacgttaatattagacgtggttatgtaatttgttttgggtagtgaaacgtgatttatttggtatgtattattgttaaatggagttcgttaaagttagggttttgtcgttttatttttttgttgtgagataaatgagattttagataggggtcgttttttttaaaagagaaaatggagtataattttagttttttagcgaagggattgtcgtggtgagtgagagattttttatgtttgatgtacgttgttaagagttttgggtttgtttgttatgtagtataaggtaagttgatagagataggttttttgaagatttaatttattgttcgaggtttatgggaatgatagtaagggtttggtggtattttgagttgttttggttatttggatatatgtttagaaatgacgtagagatttatttttgtaagttgtgtttagtgttttgttggtgttggtttagtttgttatatttgtaggttggaggttaggtgtttttagttggtagtgacgggttttgagtttttttttggttattatttattttgttatcgtgtagttttatgtgagtgttttaataattgtttagtaagttattttttttttttttgatgaaggaataaaatgattgtgatttggggaagggttaaagttttagagatggagttggttgtttatattttagtattttgaagaaattttggttgggtgcggacgtttatgtttgtaattaaagtattttgggaggttgaggtgggaggattatttgagtttaggagtttgagattagtttggggtaatatagtaagattttatttgtaaaaaaattttaaaaattagttagttttggtggtgtgtgtgtatttgtggttttagttttttgggggattgagatggaaggattatttgagttcgggaagcggagattgtagtgagttatgattagttgtgttattgtattttagtttgggcgatagtgtgagcgagattttgttttaaaaaaaaaaaaaaaaaaaaaaagtggttgggcgaggtggtttatttttgtatttttagtattttgggaggttgaggtagttagattacgaggttaggagattaagattattttggttaatacggtgaaatttcgtttttaataaaaatataaaaaattagttagatatggtggtacgtgtttgtaattttagttatttgggaggttaaggtaggagaatcgtttgaattcgagaggtagaggttgtagtgagttaagatggtattattgtattttagtttgggcgacggagtaagatttcgttttaaaaaaaaaaaaaaaatcgtaattgtttattttgaaaattaaaaattgtgttatttaagttttgaagtggttgttttaggggtagttgagatattgattatattattaagttttgttttatgggtaagttttttgggataaaaaatgaaaatggtttttgatgatttagtggcgttaggaagaaaacgttttgattttagttgttatttgaaagtttttaggggtaggatttttttggtagggtttgtttgttttagtgttagatagttgtgtgtatttattatttttttttgttttaaattatagttattattttgttgtttaatattgaggtataaagtcgggtgtggataggtagtcggtatttttttttttgttagtatgattatatttgtttttatgattttttgttaagtaaataattattttaatattttgtggtttaaaatagtggttttagtcgggtgcggtggtttacgtttgtaattttagtattttgggaggtcgaggtgggaggattacgaagttaggaaattgaaattattttgattaacgtggtgaaatttcgtttttattaaaaaaatataaaaaattagttgggcgtggtggtgggcgtttgtagttttagttattcgggaggttgaggttgagaatggtttgaatttaggaggtcggagtttgtagtgagtcgagattgtattattgtattttagtttgggcgatagagtaagattttattttaaaaaaataaaaaaataaataaaaaaatttagtggttttatttatatttatgattttattagaaattggggaatagttggtagaatagtttggttatgtgttatgggatgttagttagagtagtttgattggggttgaggaattaatttttaatatggtttatttttatgtttggtaaagttttgggagttgttgtttgtggtttttttcgtaggtttgtttgggtttttttatggtatggtagttgggttttaagagtaggtgttttaggaggtttaggagtagttttagagatttggtttcggaagttatgtagtattatgtttgttttatttgattgattaagtaagttattgatattattttagatttatggtagggggattttttttgtttgagtggtaaagggtttgtagttatttttgttttaatattttttttatagaatttaattttggtgattgattgatagttagtatgtttgggggggtttattttaggatttataagtaattgttatttgaatttaaaatagtttataattttagtattttgggaggttaaggtgtgaggattatttgagtttagaagtttgagattagtttaggtaatatagtgagattttgttattataaaaaatataaaaattatttgggcgtggtggcgtgtatttgtggttttagttatttgggggttgagatgggaggattgtttgagtttgggaagttaagtttgtagtgagtcgtgattatattattgtattttagtttgggtagtagagtaagattttgttttaataaataagtaaatttaaaataaaaataattttttttttttagtatggatttttagtaattaatagaattaaaaaaaaattattaaatattttttgtgtttgatttgattaagtgttaggagtggttttttgtttagtaaattagaaagatgtaggtttagttgagaggtatattgttgtgagtttatgttagtaaggatttttgagtaagggttgtaaggttattgtgatgatgttataaaaatttttgattagggtatttgtttatagtttttttgtttttttttatgtgcgtgtatataatatgtatgtgtttatatgttatagatatatatacgtatatataatgtgtatgtatatatataatatatgtatgtatgtgtgtatatattgtttatatgtatataatttatttttttttgttaattttgtatttggttttatatttttttagtaatatgtaatagtattattgttatttttttataaagtatttttatggaaatttgtaaatatatttaaaagtaatagaatagtatattattagttagttttaattattattaatatttttttaattttgttaatttgttttttatttttatttttattttttttttttttttgtagttttataaagtagatttttggttgagtatagtgggtgatgtttgtaattttagtattttgggagattgaggtagaaggattgtttgagtttaggagttggagattagtttgggtaatatagcgagattttgtttttattgaaaaa

SEQ ID NO: 371 - DNA, 9357 bp, Artificial Sequence
  chemically treated genomic DNA (Homo sapiens)
ataataaaagattagttagttgggatttttggagatttaatgtgaaagagtttttattttgggagtgggagtatacggtttttgttttgggtggattcgggggttgttttttgatttagttatttattttttttagcgttttggttttggtttttcgaggagtttatcggaagtaggaagagtaacgtcggaagttggagtagtagatggtatttatggaggtttagtaggtcgaggaggtggcggtgttcgaagttattgtaagggttttggggaagtttaggttttttttttcgtttttttagtttggggatatttttttgtaggttttttatttagttatgtttggatatgttagatagttgtggtatgttataaattgttttggagtgatattatgttatgttgtatgatttggtatgttggggtatatttggcgtgagggaagttggtgtatatgggtgtttagggtttgatggggtgtggttaggtaatgaagaaagatttaggtgtttttggtttggtattaagtggaatgtgaattttatattagtggggttaggttagaagtaatttgggttatgggattaggtttttgggattgacgtatttcgggggttcgtgaggttgtatagttatagttgaagttttaattggtttgtttttcgaagtttagggagggatttatggggattggatagagttttttttggtagtttttttttagggagatgttgggtttggttggtagatttttttgaagggggtcgggtttagtggtgtatatttgtaattttagtattttgggaggttaaggtgggtagattatttgagtttaggagtttaagattagtttgggtaatatggtaaaattttatttttataaaaaaatataaaaattagttaggcgtggtggtatgtgtttataaagatatttaggaggttaaagtgggagggtaatttgagtttgggaagtggaggttgtagtgagttgagattacgttattgtattttagtttgggttatagagtaagattttgttttaaaaaaaaaaataggttaggcgtggtgatttatgtttgtaattttagtattttgggaggttgaggcggggaggattatttgaggttaggagtttgagattagtttggttaatatggtgaaattttcgtttttattaaaaatataaaaattggttgggtgttgtggtatatgtttgtaatttcggttattcgggagattgaggtaggataattgtttgaatttgagaggcgggggttgtagtgaatcgagatcgcgttaataataagatcgtgttcgggtaataagagtaaaattttgtttttaaataaataaataaaatataaaataaaataaaaaggagggagattgaagttggaatggtttagatttagggtgtggatgacgagttgttattaatttaaagttaaggttaagggtttttggattttatgtggtcgagtttgtttgtaattttagtattttaggaggtcgagggaggaggattgtttgagtttaggggtttaagattagtttaggtaaaataggagagtttgttttaaaaataaataaataaaataaggtaaagggtttttgggtgggggataggtatagtaaaggtaatagtttgggatttagggggcgttgtattttaagagaaatttagaatgaatgttaatggtggttagttttagtttttttttgggggtttaggagttgtgggacgtgttaggttaatagtaggtaatgaattagtatgttatttgtataagttatatttttttgtttttttatattaggattggttgagtttgggaaaggggagtttggaacgatttagttaagtttggattagtggttagttgtttttttttagggtggtagttgaaattcgagatagggattagaaagatttttatttttagttttgggggtaggtgttttaggttttatttgtgtaggtgtgtttatcgttttttttagggtaggattacgttagtttgaggttagcgttagttagcggtttggatttgaatttagttaatttgattttagaaatagaataagaagtatggtggcgagtatagttttttttagcgagggttggggttagttatttttcgatttatacgttgtttttggatttgggttaattttgaagaaagtagggaaatggaggtagattattttgttcgtgttggggtggggtagagaagttgaattttttttttgtattttgtcgagttttagagtttaagatttgagtttttggttttattaggttgtttgtggaggggtaaagggagttaaggttatatgtgggaggacggagataggtttttaggttgttttagtaggatttggttatttttacgggtgtttttttagtagatgggtttaggtttttttgtttttggtttgcggtcgtcgtaaggttaaatgttattgtagggtcgcgggtaggggttagggaggcggggtagagttttgatttatttttaggcgggttttagggggtataggggtggttaggttattggaagggggtggggtagtttttgggattggaattattggagtttttgggatttgcgatggtttttttttttttattttttatttagtttttagttgtttcgtaagatttgttttttttaaatttagttttttgtttttttttttttataatttttttaagattttttgagtttttttttttttttttttttttttttttttttgagatagggttttgtttacgttggagtggagtgacgtgacgtgattataatttattgtagttttgaatatttgggtttaagacgggttttattttattgtttcggttggttttgaatttttggttttaagagatttttttgatttggttttttaaagtgttgggattataggcgtgagttatagcgtttgttttttatttaaatttttttttaattttttttgagatttttattttaatgttttttattaaagattttagtaggtttaggtaaggggtttaggatttttgtttttattttaaattattagttatatttttatgtagttttagaattaaagggtcgtttttgtttatttacgttttttttttttttagtagggattatattaggttgtgggtagaattcgattttagatttcgggaagtttttgtttatgtttaattttagttttttttgtttttcgtgtttattaacgtttttttttttattttttaggtagttagaacgtttttggagtaggttgagaggtttagggttgggtgtgtttggtttttttagaattttagtttttttttaagtgttgtaagatttttaagaatttttttttttattttagggagggtaattttttaagttttattagggttttgggaggtagaggagggggtgcgtagaaggtattgttttggttagagtttttagaggtttagttgtatgttttggtgtttagttttgggtttagggcggggtgggattatagtttgggtggttggggttgtaagatttcgaggtgaaaggttatttttggaagggtttgtttagtcggttaaaggttaatttgtttagagttagaggttcgttagttcgggtttcgtatataaagggtgtttaataaatgttggtcgggcgggttttagtttcggtattgggggatggggtgagttggaggtggcggtagttgcgaggttttagggcgtttggaagagatatttgtagtttagtcggtcgttaggttaagttttttttgtaaagtatagaaagaaaaggaaattaaaagggaaaaaggggtaggtttttagatagggtatgtttgtcgtttttagtcgcgcggggcgggtgggcgttttgttttcggaggttagaaattttgtagaggggttttttgatttcgcggtttcggttagtcggttttagattataatattttttttttttggagatttcgggtattaggtgttaattcgagtagagaaagggtggggtgggggttagacgcggcgattttttggaagaggaagtaaatataatttagggtgtgtgtgtgtgtgtgtgtgtgtgtgtgtgtgtgtgtgtttgtttgtttcgcgcgcgcgtgtgttttgcgtaggggcgtatttttttttcgggtgttattggttttttattattgttttgttaggaattgtggggtggggagaggtttcgaggggcgtttcgagggtgatcgagcgatttaacgtttaaggttagaggtggaggggagggttttggagagatattttggcgaggtttaaggaagggtagagggtaggcgcggttgaggttttcgtcgcggttcggtaggggttaaggttcgagttgggcgagggcgagggcgggggtgcggggggaggggtagagggaggcgggggagggttaggtttcgtaatttgcggtaaatttttttttcgggtttttcgcgttcggatggcggttcgttgagttggtcgtagttttcgggcgagcgggcggttaggttagaggacgttttttgcgcggttcgggtcgggttatggttcgcgcgttttcgtcggggttttagggcggcgggacgcgagttttttgggttttcggttcgcgtttattagcgtgtttttttcggtttcgggttcggtttcgcgtacgcgtgggaaagttggtttggaatcggttcgattagtttcgttcgggcgcgaggatcggtcgtaggaagttgttgtaaaatttttttggggggtgtagttcgtgtttttcgcgcgtcggggtcgaatgcgcgtcgcgtagggtttttcgggtcgagaggggtgttcggagggaagagcgcggtgggggcgtttcggtttcgttgttttggggttatggttatggtgatcggcggttggggcggtttcggcggcgatacgaacggcgtggataaggcgggcggttattcgcgcgcggtcgaggacgattcggtttcgtttttcggtgtcgttagcgacgtcgagtcgggcgacgaggagcggtcggggttgtaggtggattgcgtggtgtgcggggataagtcgagcggtaagtattacggtgtttttatttgcgagggttgtaagagtttttttaagcgaagtattcgtcgtaattttagttatatttgtcggtgagttttttattcgcgcgtcgtcgtcgtgtatttcgtttcgatttggggtaggtttttgatttgttcggttattttgggtttggcgttgattttttttgggtttttattgttttttttgagataggggtatagtatttttttttcgtattttatggttgggattgtgtatatagtcggcgttatatcgttgtaggttttttttttattaggtggtttttggaggtttttgttttagttatttgttttttttttttttcgttttttttttggggaggggttattttcgcgttggggtgggggtaggggtgttgttaggggtggtaatttaattttagggtattcgttttcggggatttcggcgcgcgggatgttttcgagggaatcgaacgtggaatttggatcgtggagttcgtagcgtttaggggttattgtttgcggtcgcgcggatcgatacggcgcgtttttggggttaaatattatttttaaagtcgttgtggttacggaggcggtagacggagggaggttggggtggtacggggcggtttttttcgtatgaggggtttagcggtgggggtgggggtgggagttgggtttgtttattttagggaatttttttgggtttattttgggttttgggttatcggaaatcgttattggaaggtcggtagggttatcggaattgattgaaacgttttttttttttaggggtgggtgtagatttggggtttttggaaaaattttttaaattttgggtgtttttgagacgggtagggagtgaaacgttttcgagtaggagttttgggttgttttaggtcggagatttttttggtagggcgtggttttgttagttgttttggcggaaggtttttagggaaagcgatcggggttgtttagttcgggagttttttttttatcgttttcgggcgagtattcgatttgttcgtttataagtttttattttgtattttaggaatatgtagggtttttgtggagttcgtttagacggttttagtttttagttgtttaaaatagaggtttaaaggtttagagagaggttttggtgtttgttttgcgttggatatggagggacgttgttcgagttgggggtattgtgggggaattgtggggttagggtggggatcgttgagttcggatcggagtggttttagggagaacggttgatggaaggtttgttggttgaggttattaaatagggttttaggtattcgagggtggagtttggttttaggtttcgggttagggttggtttggtgtggttatgtgtggtagagttgttttgtttttttttttagtataaagtgggttattagattttggttttatttttgttgttggaaaatcgtttgttttttggttatatttttagggagggtaagggaggggggtttaggtagttttggggttttaggagttttttgagggtggtgttagggagtagtaattttgggtggggggggttttgtttggagttgataggtttgtgttgtgttagttgtgtgatttggtgaaattattattttattttgagttttaaatggattgagtagggtttcgttggggtttagtttgggtagtttgatgttagtttttttagagagattttagttttaagtttagtttttgagaagtttttagtttggaggagatatagtgagatagatgttttaagtttgtgggatttggggttttagggagagagtagaggttttgtttggaggttagagagggttgtttggaggaggttaggggatatgagttttgaagtatggagttggtaggtggaagaaaggttatagggatatgttagaatgtggtttagataaaatatttagtggtagattgggggagttgtgttgtaagagggggattgtgtagttatgggagaagttagagttaggtgggtttgaaatgttggttgagggtaatggggagttatagagggtgtgtgagtaggagagggttttgattaaattggattggaggttagaagtttagggaggaagttgagttgggttatggggttgggtaaaaaagtttgtattttttaggtgggataataggaagaatttaattgtttttttttttggagggatggatttgttttaattttatagttggggaagttgagattgaaggtttagggttttttttgaggttaggggtttttgagttgggtttttgtttgtttgtagggtcgttttaggttaggtcgtttttattcggttgtttttggatttttttattatttagtcgttgggttttgttttggttttgtttgagttttttttgttttagtggggtttttttttaggggtttagtggttggtgttgtaggatttaggtagtggtggagggggggtacgggggagtgggcgtagatttttagtttttttaagttgggtttttcggttgggttttgggttttggtattgtttttcgtgaatttttttgatttagtttattttatatgatagggtaatatttgattttttatttttagatgaggaaatcgaggtttagtggggtagtcgttatttgaggggtagggttgggtatttgtagttgagatttatttgttttgttttgttttgttttgtttttgagacggagttttatttttgttgtttaggttggagtgcgatggcgtgattttaatttattgtaatttttgtttttcgggtttaagcggtttttttgttttagttttttaaatagttgggattataggtatgcgttattatgttcggttaattttgtatttttagtagagataggttttttttatgttgtttaggttggttttaaatttttaattttaggtgattcgttcgtttcggttttttaaagtgttgggattataggtatgagttattgtatttagtttttttttttttttttttttttgagatagagttttattttgttattttggttggaatgtagtgggttaattttggtttattgtaatttttatttttttagtttaagcgattttttttttttagtttgttaagtagttgggattataggtatgcgttattacgtttagtttatttttgtatttttagtagagacggggttttattatgttggttaggttggttttgaattgattttaggtgatttattttttttcgttttttaaagtgttgggattataggcgtgagttattgtagagatgtatttgtttaatttttttaagtggtggttttattttgtgattgtttttgtgtgttttttgggtgtttagttggaattttaggggtagttgttttaggtttaggttttggagagtttttagtttttggtggtaagagattaggggagtttaagggtaggggttaaggggagaaggttttggggatatttgaagaataaggtttggatttttttgtttgggggttgatttaggatggggagtttattattttttagggtggggttatttgttttatttttgtaagaggtaacggtatttattgagggttgattaggaaaatttttagtttgtataggggttgggtggttttttcggaagagcgtaggtgtggggtttttagggttgaggattagagtgattttgtttatttttttattttttggggtgggtattgtgcgggtgataatgttggggttttataatgttatgattttatagattattagtttttggtttgatttttagttaatttataaagtttagttttttgattatgttttttttgtttttatatttttttggggataatgattttgtttagtttgatagtgattaaataaaatgaaattttttaggtttttatatttgtgtattttaatttttttgttttggttgtattttttttttgggattatttcgttatttatttggagaatttttatttattttttaaaatttatgttaatgtgttttttttggggtgtttatttgtttttttatagatttttttttatttattattatttattcgggttattttgtttggtttgtagatttgtaagttgagtttttgtatttttttggggttatttttttagtttagagggtttttattagtatttttgaggggtagtttttaaaggcggtttataggttggttcggggaggaggatatgggggttttagggagttttggtttttgtgtgtttttagg

SEQ ID NO: 372 - DNA, 9357 bp, Artificial Sequence
  chemically treated genomic DNA (Homo sapiens)
tttgggggtatatagaagttagggttttttgagatttttatattttttttttcgaattagtttatgagtcgtttttggaggttgttttttagaaatattagtaggggttttttagattggagaggtagttttaaaggggtataggagtttagtttgtaggtttgtaaattagataggataattcggatgagtggtgatggatgaagaggaatttgtggaaaagtagatgaatattttagggagggtatattggtatgggttttgaaggatgaataggagttttttaggtgaatggcggggtgattttagagagagggtatagttagagtaaaagggttgaaatatataaatatggaggtttaaagagttttattttatttggttattgttaggttgagtagggttattgtttttaaaaagatgtgaaggtaaagaggatatggttagagagttggattttgtgaattaattaggggttaggttaggggttagtggtttgtggggttatagtattgtggggttttagtattattattcgtataatgtttattttaaggaatgaggaagtaaataaagttattttggtttttagttttgaaggttttatatttacgttttttcgagaggattatttaatttttatgtaagttggagatttttttggttagtttttagtgaatgtcgttgttttttgtagggatgagataggtggttttattttgagaggtggtgagttttttattttgggttagtttttaagtaggaaggtttaggttttattttttaaatgtttttagaattttttttttttggtttttgtttttggatttttttggttttttgttattaggagttgggggttttttaaggtttgggtttggagtaattatttttggggttttagttggatatttaggggatatatagagatagttatagagtagaattattatttaagggaattaaatagatgtatttttgtagtggtttacgtttgtaattttagtattttgggaggcgggggagggtggattatttgaggttagtttaagattagtttggttaatatggtgaaatttcgtttttattaaaaatataaaaatgagttgggcgtggtggcgtatgtttgtaattttagttatttggtaggttgaggaaggagaatcgtttgaattggggaggtggaggttgtagtgagttaagattgatttattgtattttagttagggtgatagagtgagattttgttttaaaaaaaaagaaaaaaaaaaaggttgggtgtagtggtttatgtttgtaattttagtattttgggaggtcgaggcgggcggattatttgaggttgggagtttgagattagtttgaataatatagagaaaatttgtttttattaaaaatataaaattagtcgggtatggtggcgtatgtttgtaattttagttatttgggaggttgaggtaggagaatcgtttgaattcgggaggtagaggttgtagtgagttgagattacgttatcgtattttagtttgggtaataagagtgaaatttcgttttaaaaataaaataaaataaaataaaatagatgaattttagttgtagatatttagttttgttttttaggtggcgattgttttattgagtttcggtttttttatttgaaaatgggaggttagatattgttttattatatgggatggattgggttagaggggtttacgggggatagtgttaagatttagagtttagtcggagaatttaatttaggaaagttgaggatttgcgtttattttttcgtattttttttttattattgtttgggttttgtagtattagttattgagtttttgggaagaggttttattagggtagagggagtttaggtagaattagaataaagtttagcggttgggtggtgggagggtttagggatagtcgggtggaaacggtttggtttggggcggttttgtaggtaggtagaggtttagtttaggggtttttgattttaggggaggttttgaatttttagttttaatttttttagttgtggaattgggatagatttatttttttaaggagggaaatagttaagttttttttgttattttatttaaagagtgtaagtttttttgtttaattttatggtttaatttagttttttttttgggtttttggtttttagtttaatttgattagagtttttttttgtttatatattttttatggttttttattatttttagttagtattttaggtttatttagttttgattttttttatggttgtatagttttttttttatagtatagtttttttagtttgttattaagtgttttgtttggattatattttggtatgtttttgtggttttttttttatttgttaattttatgttttaaggtttatgttttttagttttttttaggtagttttttttgatttttaggtagagtttttgttttttttttgggattttagattttatagatttggggtatttgttttattgtgttttttttagattgggggttttttaggagttagatttggagttggggtttttttggaggggttggtattaaattatttaggttgggttttagcgagattttgtttaatttatttgaagtttagaatggaatggtgattttattaggttatataattgatatagtataaatttgttagttttaagtaaggttttttttatttaaaattgttgttttttgatattatttttaggaagtttttgggattttaaaattgtttgagttttttttttttattttttttaaagatatgattagagagtaggcggttttttagtagtaagaatgaggttaaagtttagtggtttattttgtgttggaggagggagtaaggtagttttgttatatatggttatattaggttagttttgattcgggatttggggttaaattttattttcgggtatttggggttttatttggtggttttagttaataagttttttattagtcgttttttttggggttatttcgattcgaatttagcggtttttattttagttttatagtttttttatagtgtttttaattcgggtagcgtttttttatgtttaacgtaaagtaggtattaggatttttttttgggtttttgggtttttgttttgggtagttgggaattgagatcgtttagacgggttttatagagattttgtatgtttttggggtgtagagtaggggtttataaacggatagatcggatgttcgttcgggaacggtgagaaaagaattttcgggttggataatttcgatcgttttttttggggatttttcgttagaatagttagtaaggttacgttttgttagagaggttttcgatttgggatagtttaaggtttttgttcggaaacgttttattttttgttcgttttagagatatttaaagtttgagggatttttttaggagttttaggtttgtatttatttttgggggagagggacgttttagttaatttcggtggttttgtcggttttttagtggcgattttcggtgatttaaggtttagagtgagtttagaggggttttttgagatgggtaagtttagtttttatttttatttttatcgttgggttttttatgcgaagaaggtcgtttcgtgttattttagttttttttcgtttgtcgttttcgtagttatagcgattttggaagtgatatttgattttaagggcgcgtcgtatcgattcgcgcggtcgtagataatggtttttggacgttgcgagttttacggtttaagttttacgttcgattttttcgagggtatttcgcgcgtcgggattttcgagaacgggtgttttggggttgggttattatttttgatagtatttttatttttattttagcgcggagatgatttttttttagagaaaaagcggagggaaggagaagtaagtaattggggtaaaagtttttagggattatttgatggggggggaatttgtaacgatgtagcgtcgattgtatatataattttagttatggaatgcgggaggagggtgttgtgtttttattttagagggggtagtggaggtttagggaaggttagcgttaggtttaaggtgatcgagtaggttagaggtttgttttaggtcggggcggggtgtacggcggcggcgcgcggatggggggtttatcggtaggtgtagttgaggttgcggcggatgtttcgtttgaaaaagtttttgtagttttcgtaggtgaagatatcgtaatgtttgtcgttcgatttgttttcgtatattacgtagtttatttgtagtttcggtcgtttttcgtcgttcggttcggcgtcgttggcggtatcggggggcgaggtcgagtcgttttcggtcgcgcgcgggtagtcgttcgttttgtttacgtcgttcgtgtcgtcgtcggggtcgttttagtcgtcggttattatggttatagttttagggtagcggggtcggggcgtttttatcgcgttttttttttcgggtatttttttcggttcgggggattttacgcggcgcgtattcggtttcggcgcgcggggggtacgggttgtattttttaaaaaagttttgtagtaattttttgcggtcggttttcgcgttcgggcggaattggtcgggtcggttttaggttaatttttttacgcgtgcgcggggtcgggttcggggtcgggaggggtacgttagtaggcgcgggtcgggggtttagaggattcgcgtttcgtcgttttggggtttcggcgggggcgcgcgggttatggttcggttcgagtcgcgtagggggcgttttttggtttggtcgttcgttcgttcgggggttgcggttaatttagcgggtcgttattcgagcgcgggaggttcggggggaaagtttgtcgtaagttgcggggtttgattttttttcgtttttttttgttttttttttcgtattttcgttttcgttttcgtttagttcgggttttaatttttgtcgggtcgcggcgggagttttagtcgcgtttgttttttgtttttttttgagtttcgttaagatgtttttttaaggtttttttttttatttttggttttggacgttgggtcgttcgattattttcgaggcgtttttcggaatttttttttattttatagtttttggtaaagtaatgatggggggttagtggtattcggggggggggtacgtttttgcgtaagatatacgcgcgcgcgagatagatagatatatatatatatatatatatatatatatatatatatattttagattgtgtttgtttttttttttagaaagtcgtcgcgtttgatttttattttattttttttttgttcgggttaatatttggtgttcggaatttttagggggaagggatgttgtggtttgagatcggttggtcggggtcgcgaggttagggggtttttttgtagaatttttggttttcgggggtagggcgtttattcgtttcgcgcggttggaggcgataggtatgttttgtttgggggtttgttttttttttttttttaatttttttttttttttgtgttttgtagaaagggtttggtttggcggtcggttggattgtagatgttttttttaggcgttttggagtttcgtagttgtcgttatttttaatttattttattttttagtatcggggttggggttcgttcgattagtatttattaagtattttttgtatgcgaggttcgggttggcgagtttttggttttgggtaggttaatttttaatcggttggataagtttttttaggagtgattttttatttcggagttttgtagttttagttatttagattgtggttttatttcgttttgagtttagagttggatattagagtatgtagttgggtttttgagagttttggttaggatagtgttttttgcgtatttttttttttgttttttagagttttgatgagatttgaagaattgttttttttggagtagggggaaagatttttagagattttataatatttaaaaagaaattgaggttttgggagagttaggtatatttagttttgggttttttaatttgttttagggacgttttggttgtttgggaggtggaggaggaggcgttagtaaatacgaaaagtaggaaggattaggattagatatgagtaaggatttttcgaggtttagagtcgggttttgtttatagtttgatgtaatttttgttgggagagaggaaggcgtgggtgggtagagacgattttttggttttgaggttgtatgggaatgtgattggtaatttgggatgagggtagggattttaggttttttgtttggatttgttaggatttttggtggggagtattggggtggaggttttagaagggattgaaaagagatttagatgagagataggcgttgtggtttacgtttgtaattttaatattttgggaggttaagttaggaggattttttgagattaggagtttaagattagtcggggtaataaagtgagattcgttttgagtttaggtgtttaaggttgtagtgggttataattacgttacgttattttattttagcgtgagtaagattttgttttaaaaaaaaaaaaaaaaagaagagggagagaagatttaaggaattttgaggggattgtgaaggggagggagtaaagaattaggtttgggggagataagttttgcgaggtagttgagagttgggtgggagatgggggaagaaagattatcgtagattttagaaattttagtagttttagttttaaaggttgttttatttttttttagtagtttggttatttttgtgttttttggggttcgtttgggggtggattaaggttttatttcgtttttttgatttttgttcgcggttttgtagtaatatttgattttgcggcggtcgtaaattagggataaaggggtttaggtttatttgttgagggggtattcgtgggaatggttagattttgttggggtagtttgggaatttgttttcgtttttttatatgtgattttggttttttttgtttttttataggtaatttggtgggattaggaatttaggttttagattttggggttcggtagggtatagggaagaaatttagtttttttgttttattttaatacgagtaaggtggtttgtttttatttttttgttttttttaaagttggtttaagtttagggatagcgtgtgggtcggaaggtgattagttttagttttcgttggaggggattgtgttcgttattatattttttgttttgtttttggggttaggttgattggatttaagtttaggtcgttgattggcgttgattttaggttgacgtggttttgttttgggagaggcggtgaatatatttgtataggtgaggtttggagtatttgtttttaaggttgggaatgaaagtttttttaatttttgtttcgggttttagttgttattttgaagggggatagttggttattaatttaagtttggttgggtcgttttaagttttttttttttagatttagttagttttggtgtggaggggtagggagatgtgatttatgtaaatgatatgttaatttattgtttgttattaatttgatacgttttatagtttttgggtttttaggagaaagttggaattggttattattggtatttattttgagttttttttgaagtataacgttttttgagttttagattattatttttgttatgtttgttttttatttagaaattttttattttattttatttatttatttttgagatagatttttttattttgtttaggttggttttaaatttttgggtttaagtagtttttttttttcggttttttgagatattgggattataggtaagttcgattatatggagtttagaaatttttgattttagttttgagttagtagtaattcgttatttatattttgaatttgaattattttagttttagttttttttttttttgttttgttttgtgttttatttatttatttagagatagagttttgtttttattgttcgggtacgattttgttgttggcgcgatttcggtttattgtaattttcgttttttaggtttaagtaattattttgttttagtttttcgagtagtcgggattataggtatgtgttataatatttagttaatttttgtatttttagtagagacgggggttttattatgttggttaagttggttttaagtttttgattttaggtgatttttttcgttttagttttttaaagtgttgggattataggtatgagttattacgtttggtttgtttttttttttgagataaggttttattttgtgatttagattggagtgtagtggcgtgattttagtttattgtaatttttattttttaagtttaagttatttttttattttagttttttaaatatttttataggtatatgttattacgtttggttaatttttgtatttttttgtagaaatggggttttgttatgttgtttaggttggttttgaatttttgggtttaagtgatttatttattttggttttttaaaatgttgggattatagatgtgtattattgagttcggttttttttaggaaaatttgttagttaaatttagtatttttttgggaaggggttgttaggagaagttttgtttagtttttatgaatttttttttgggtttcgggagataggttagttggaattttagttgtggttatgtaattttacggattttcgaaatgcgttagttttagggatttggttttatagtttaggttgtttttggtttgattttattgatatgaagtttatattttatttggtgttaggttaaagatatttgagtttttttttattgtttggttatattttattaggttttggatatttatgtgtattagttttttttacgttaaatgtgttttaatatgttaaattatgtaatatgatatgatgttattttaggatagtttatgatatgttatagttgtttggtatgtttagatatggttgggtaaggggtttatagaaaggtgtttttaagttggggaggcgggaggggaggtttgggtttttttagggtttttgtagtggtttcgagtatcgttattttttcggtttgttgagtttttatgagtgttatttgttgttttaattttcggcgttgttttttttgttttcggtgggtttttcggaaggttaggattagggcgttggaaggggtgggtggttgggttaggaaatagttttcgagtttatttaaggtaagggtcgtgtatttttatttttagaatgggggtttttttatattgggtttttaagggttttagttagttggttttttgttgt

SEQ ID NO: 373 - DNA, 5774 bp, Artificial Sequence
  chemically treated genomic DNA (Homo sapiens)
atggaatttatttttttagttgaaataaatacgtgttgttaaggaggagtgggggttgggtttgcgatgtttatttattattgggatgaagtggagggtatagaggttgtagtttgttttatttttagttttcgtagggtattagaggggttttaggtaggaggttgtgtgttgtggttttgaagttagggatgtttttagggatatttggttttatttgattttttcggaatttattattttgttttttgggttgggtacgtttttggattgttttgggttttcgggagaattagtttttaggagagttagatcggtttttttatttagttatttttgatggtgttagcggaggtttagttaaggatttggagagtagggagtacgggagtatgtggggtaacgtaggggtggtcgtagtggagatgttttttttttggggtgttgggggttgtagttcgggtaggaggggtgtagagttgggaggagtattggttttgagtagtattaggattatgtgggatagaggtttatgatagagggattgcggtttagttttatgggagtttggtatttattattgtttgtcgttgtttgtgtttattttagattttgtttagagttttgacgtttatttcgttgttatttatgattattgtgggtttttttgttcgtataggagtttaggttttggagtaaaaggtagagtatttatttaagtagtatgtttgggttaggtattaagggatggaattagtaagggttttgggtttagattttaagtagtagggttcgtttttttttgtttggtggattttaggggtttattagagggaggaatttagtgggtgtatttgggggagggttgggaggggatttttataggcgggtagggtttttgttaggtagaaggggtaggaggattttaaggttttttggcgagttttggtatgagagaggatgggggttggaaaattgtttttggaaataggagatttagtttaagattttggtagggtaagttttttatattaaatagtttttttcgtttttgggtgtttgagagtcgggtgtttagttcggatttgtcgtgattaaggagagttgatttgtagatattaagattttttgtatttgtgattgggttttttgggggtattttgattgtagattttttttaggtgtggtatttggtttttagaagtttagttagttattttttgtttagtttttaaatacgttagagggttaattatttatggttacgttgaatattatttataagattcggaaattagaatggggagttagattggatttttgagatgtaaggatcgttaggaagtattttgttgtttttatgtatggatgagatttgggtttttttatgggaggataggttgttgtagtttttagggagtatttatttttgggcgtggagagtggggatagttgtttgttagagattgcgaggggaggtcgggagtagtcggagtatttttggtttttggttacggaaaatttaggtagggatttgtttttaagtttttgttgttgttaagtcgatttgtatagtaggatttgggagtttagtttagttttttttaggaggggtttggttttattgtttttgtgtggttcgttgagggtttattagaggtatttgtagttttttgagagaaagtaggtttagtttaggggttacggtggaaattataggaggggtcgaggggaggtaggtgggtgtttgttatgttatgtatagtgttatacgtgtcgtggagattgttttaagagtttcggggtttagggatttttttaagcgttgagtagtgtgaatatttgtgtatttttattggttagggtttaatgaatggggtttagtggaaagggggtgggtgaggaatggggttttagtgttttgttgattttggagtttttggagtcggttaagtttgaatgggaggtttatattatagtttttatttaatttttttagtgttgagttttgaagtttgtgtggtgggtttatgtagagttgattttttttttgtagttttgttagattttgaagagagttaaggttagtgggtaggagataggtttggagttggtgtagagagaggaatgagttttgtatgggtttgattagaaatttagttttgtgtagggatattttggggttcggtgttgtttatgtatgattttatagaagcgtagagttgttttttttatagaggagcgtttgatttgtgtgggagttaggtagagatttgtatgtatgcggaggagttaggttttaagttagtttgggggatttttaagcgggattatttttttttttgtatttggttttggtgtttttttattgtggatttagtgttttgtttatttattatatttatattttggagttttgggtttttagagatttatgatattgttttatttttaattttaaattttttggggttttattcgttggttttagttacgtgaagtagttatcgtagattagagggtattttttagatttaggttattttattatttaggttggagtgtagtggtataattatagtttattgtagtttcggttttttgggtttaagtgatttttttattttagttttttcgaggatacgtggttttttttttttttttttagatagggttttattttgttttttaggttggagtgtagtggtgcgattttggtttattgtagttttcgtttttcgggtttaagttatttttttgttttagttttttgagtagttgggattataggtatgtattattttatttggttaatttttgtatttttagtagagacggggttttgttatattggttaggttagtttttgaggatatatttttttttttttcgagatggagtttttttttgtcgtttaggttggagtgtaatggcgtaattttggtttattgtaattttcgttttttaggtttaagtaatttttttgttttagtttttcgagtagttgggattataggtatgcgttattatgtttaattaatttttgtatttttattagagatagggttttattatgttggttaggttggttttgaatatttgattttaggttatttattcgttttagttttttaaagtgttggagttataggcgagagttattgcgtttagtcgaggatatttttttttttttttttttaagatagaatatcgttttgttttaggttaaagtgtaaaggcgtgatttcggtttattgtaattttcgttttttaggtttaagttgtttttttgttttagtttttcgagtagttgggattataggcgtttgttattatgttttgttaatttttgtatttttagtagagatggggttttatcgtgttggttagattggtttcgaatttttgatttcgtgatttattcgttttagttttttaaatgttgggattatagatgtgagttatcgtattcggtttggtagaggatattttttaaggttaaagatagtagtagaggtggagtttttgggaatagggttatgaggggaagagggggttcggagggagcgagtagttattggttatttttagaaagggaaggttttggtgtaatatcgtttttttgtagttttatttatttttgttttttgtttttttattatttaatcgggtaggtaggatagggtttgagggggtagggatttagtgggtgtttttttagattaattttagtttaggatttttagagttttttttttgaggttttgttgtttttaagtttagattggggattttaagtagtacgtaggtagagttagtgaggttttcgttagttttattgaaagttttaaaattagcgaatttttagtttagttttaggttaggtatttaggacggttttagtttttatgggtgagttatttttgcggatattgtatagggtttacgatttatcgttgtttttcgaggatgttagttaggttttcgttgagataattgtttttttgttggataaggttgggattagttatttcggtgatagttttagaatttttggtttgggttgttgggtttaatggaaaaaggttgtgattagagttagggggatggttttagtgattttaaggataaggttagatttttgtattgttagtgatttaaagtaataggtgtttagagtagtagtgtggcgtttttacgtttttatatattagtttaatttatttaggatagggattgtagttttagtatttaatttatgtgttttgtgtggggtttttttttattgtatttataggagaggaagggttttttaggggtttattggggtttttttttgtaaatggggtaaggagaggggtaaggggttgttttaaggtttttggagtatatgtaggttttggattggggtttttgggagggttatgattttgggttttatgagtttagagtagacgttttgtttttttttgtttattgttagttattttatttttttttgatttttaaaagaattaggaaatagtatatgatttgttggaaggaggtatttatttttttttttttgtgggtgtggggaggggattatagggtatatattttattttgggatttagttgagtaggggggttagagatgatagttttttcggtttataggttatcggtttatatatagggtaattagaagaaagaaatagtataaggaaggtatagagggagtcgttgtttttgttagaggtgtagtatttcgggaatgttttttatttttttcgtttttttgttttgtttaattttgattaggtgtagaaattttgttaagtgttttcgtaggagttgttggtaattgttttatatttttggttttggtaaagaatgaattaatttattttagattttataaatagggttatttaggtgagttttttattcgttatttttttttttatttttgttaggtttagtagttattatagcgtttgttttttcggttttgaaattatgtttttaggttttttgtggttgggtttagttttgttgggggttttgtatgtttaggtttaggattttattttagatttgattttagttttatttttgagtaaggtttttttgtagtagaatttttaggataattaagtaaggggttaagaggggtatttgtaggtagggtttggggaagagtgggagtagaggggaggagaggtgaagagatttaggaagagcgttgggtaggattttaggagtttagggtttaggttttagtttattttgtgttattagggttttttggtggaaattatgttttttgtttttatgtttattttttgtgagtttgaatatattttttttttgtgttaatatagtttataataaatgttttttttttttttagtttgaatagatttttttaggtttatatttttttttttataatttttattgtttaaagaaggtgggagtatttttagtttttttgtatagatgaggaaattgaggtttaggaaggtttattagttatatgttttttttagtgaggaggttatttttttttttgttagatttagaatcgtttttttttttaggatttttttttggattgatggttttttgtttttgtttttttattagtgtaggtttagtttgggttttgttgtttagttagaggggtttatggttttaagttgggcggtttagaggtgttatagggatagagttggaggggtggtttttagggttatttttgggttgtgttttttattagttttttgtagt

SEQ ID NO: 374 - DNA, 5774 bp, Artificial Sequence
  chemically treated genomic DNA (Homo sapiens)
attgtaagggattgataagaggtataatttaggaatggttttaggagttatttttttagttttgtttttgtggtatttttgggtcgtttagtttggaattatgagtttttttagttgggtagtagggtttaggttgggtttgtattggtgaaggggtaggagtaggaggttattagtttagaagggagttttgggggaagaggcggttttgagtttggtagggaggagggtgatttttttattggaggaggtatgtggttggtgggtttttttgagttttagtttttttatttgtgtagggggattaaaagtgtttttattttttttggataatgggggttatgggagaggggatgtggatttgggggagtttgtttaggttgagaggaaaaaaaatatttattataaattgtattggtataaaaagaaagtatgtttagatttatagggggtgggtatgggggtaaggggtatggtttttattaggggattttggtggtatagagtgagttgaaatttggattttggatttttagagttttgtttaacgttttttttgagtttttttatttttttttttttttgtttttatttttttttaggttttgtttgtaggtgttttttttggttttttatttggttgttttggaagttttgttgtagagggattttgtttagaggtggggttgggattaggtttgaggtggagttttgggtttgggtatgtagagtttttaatagggttaggtttagttataggagatttaggggtatgattttagggtcgaggaagtaggcgttgtggtggttgttgggtttggtaggggtggaagaggaggtggcgagtgagaggtttatttgggtggttttatttatgggatttagggtgggttgatttattttttgttaaggttaggaatgtgaggtaattgttagtaatttttgcggaaatatttggtaagatttttgtatttggttaggattgggtaagatagagggacggggagagtgagggatattttcggagtgttgtatttttggtagggataacgattttttttgtgttttttttgtgttgttttttttttttgattgttttgtatgtgggtcggtggtttgtgagtcggaagagttgttatttttgatttttttgtttagttggattttagggtggggtatgtgttttgtggttttttttttatatttatagaaaggaaagaatgaatgtttttttttaatagattatgtgttgttttttggtttttttaagggttagggaagggtggggtggttgatagtggataaggaaaaataaggcgtttgttttgaatttatggagtttagaattatggtttttttaggagttttagtttaggatttgtatgtgttttaggggttttgagatagttttttgtttttttttttgttttatttgtaggaggggattttagtggatttttgagggatttttttttttttgtgagtgtagtgggaagagattttatatagggtatatgggttgagtgttgaggttatagtttttgttttgggtgagttgggttgatgtgtgggggcgtgaaggcgttatattgttgttttggatatttgttgttttgggttattgatagtgtaaggatttggttttatttttgaggttattgagattatttttttgattttagttatagtttttttttattgaatttagtagtttaggttaggggttttggaattgttatcgagatggttggttttagttttgtttagtagggaagtagttattttaacgggggtttggttggtattttcgggaggtagcgatggatcgtaggttttgtgtagtgttcgtagagatggtttatttatgagggttgaggtcgttttggatgtttgatttgaggttggattgagggttcgttggttttagagtttttaatgggattaacggggattttattggttttgtttacgtgttgtttgggatttttaatttgggtttgggggtagtagggttttagggaaggggttttgggagttttgagttggggttagtttagagaggtatttattggatttttgtttttttaggttttgttttgtttgttcgattggatgatgaaagggtaggaagtaaagatgagtaaaattgtaggggaacgatgttgtattaaagttttttttttttagaggtagttagtggttattcgtttttttcgaatttttttttttttttatgattttgtttttaggaattttatttttgttattgtttttgattttaaaaagtattttttgttaggtcgggtgcggtggtttatatttgtaattttagtatttgggaggttgaggcgggtggattacgaggttaggagttcgagattagtttggttaatacggtgaaattttatttttattaaaaatataaaaattagtagggtatggtggtaggcgtttgtaattttagttattcgggaggttgaggtagaagaatagtttgaatttgggaggcggaggttgtagtgagtcgagattacgtttttgtattttagtttggaatagagcgatattttgttttaaaaaaaaaaaaaaaaaggtattttcggttgggcgtagtggttttcgtttgtaattttagtattttgggagattgaggcgggtggataatttgaggttaggtgtttaagattagtttgattaatatggtgaaattttgtttttagtaaaaatataaagattagttgggtatggtggcgtatgtttgtaattttaattattcgggaagttgaggtagaagaattgtttgaatttgggaggcggaggttgtagtgagttaaggttgcgttattgtattttagtttgggcgatagagggagattttatttcggggaaaaaaaaaatgtatttttagggattagtttggttaatatggtaaaatttcgtttttattaaaaatataaaaattagttaggtggggtgatgtatgtttatgattttaattatttaggaggttgaggtaggagaatggtttgaattcgggaggcggaggttgtagtgagttaagatcgtattattgtattttagtttgggagatagagtgagattttgtttgaaaaaagaaaaaaaaaattacgtattttcggggaggttgaggtgggaggattatttgggtttaggaagtcgaggttgtagtgagttatgattgtgttattgtattttagtttggatgatagagtgatttaaatttaaaaagtattttttagtttacggtgattgttttacgtagttgagattagcgggtggagttttagagaatttgaagttgggggtgaggtagtgttatggatttttgaggatttaggattttagggtatgaatgtggtgggtgagtagggtattgggtttatagtgggaagatattagagttaggtgtagaaggggagatagtttcgtttgggggttttttaggttggtttgaagtttggttttttcgtatgtatgtagatttttgtttagtttttatataaattaggcgtttttttgtagagagggtagttttgcgtttttgtgaggttatgtatggatagtatcgggttttagggtgtttttatataaggttgagtttttgattaaatttatgtagggtttatttttttttttgtattagttttagatttgttttttatttattggttttggttttttttagagtttagtagggttgtagggagggggttagttttatatagatttattatataagttttaggatttagtattaggaaggttgggtaaggattgtggtgtagattttttatttagatttgatcgattttaagggttttagggttaataggatattggggttttattttttatttattttttttttattgggttttatttattgggttttagttaatgagggtatataagtgtttatattgtttagcgtttgggggagtttttggatttcggggtttttgggataatttttacgatacgtgtggtattgtgtatggtatgataggtatttatttgttttttttcggttttttttatggtttttatcgtggtttttggattgggtttgtttttttttaaggagttgtaggtgtttttagtgagtttttaacgagttatatagaagtaatggggttaagttttttttgagaggagttgggttgggtttttaagttttgttgtgtaggtcggtttagtaatagtaggagtttaaagataggtttttgtttgggtttttcgtggttagagattagaagtatttcggttgttttcgattttttttcgtagtttttggtaggtagttgtttttattttttacgtttaagagtgggtgttttttggagattgtagtagtttgtttttttatggagaggtttaggttttatttatgtatgaaggtagtaagatgttttttggcggtttttatattttaggaatttagtttgattttttattttggttttcggattttgtgagtagtgtttagcgtggttatgaatggttaattttttgacgtgtttgaaggttgggtaggaggtgattggttaggtttttaggagttaggtattatatttggaaggagtttatagttaagatgtttttaggaggtttagttatagatgtaggaagttttggtgtttgtagattagttttttttggttacggtaggttcgggttgggtattcgatttttaaatatttaggaacgggaggggttgtttagtgtgaggagtttgttttgttagggttttgggttgagttttttgtttttagaaatagttttttaatttttatttttttttatgttaaggttcgttaaggggttttgaggtttttttgttttttttatttgatagggattttgttcgtttgtgaaaatttttttttaatttttttttaagtatatttattggatttttttttttggtgaatttttggggtttattagatagggggaagcgggttttgttgtttgaggtttaggtttagggtttttgttggttttattttttggtgtttggtttaggtatgttgtttagatgggtgttttgttttttattttagagtttggatttttatgcgggtaagagggtttataatgattataggtggtagcggagtggacgttaaggttttgagtagggtttagggtggatataggtagcggtaggtagtggtggatgttaggtttttatggagttgggtcgtagtttttttgttataggtttttgttttatatggttttggtgttgtttaaaattaatgttttttttagttttgtattttttttgttcggattgtagtttttagtattttaggaaaggggtatttttattgcggttatttttgcgttattttatatgttttcgtgttttttgttttttaggtttttggttgggttttcgttggtattattagaggtggttgggtgagaggatcggtttggtttttttgaaagttggttttttcgagagtttaggatagtttaggagcgtgtttagtttagggggtagggtaataggtttcggaagggttaaatgagattaaatgtttttgaagatatttttggttttagaattataatatatagttttttgtttggagtttttttggtgttttgcgggggttgaggatggaataggttgtagtttttatgttttttattttattttagtggtggatggatatcgtagatttagtttttatttttttttggtagtacgtgtttattttagttgagggggtgggttttat

SEQ ID NO: 375 - DNA, 7069 bp, Artificial Sequence
  chemically treated genomic DNA (Homo sapiens)
cgggttttgttttgttatttaggttggagtgcgatggtgcgattatggtttattgtagtttcgaaattttgggtttaattgatttttacgttttagttttttttgagtagtttggtttataggtatgtgttattatgtttagttaattaaaaatattttttttttttttttggagtggtagtattgttattagaaaggggttttgatttagattttaagagagggttttttggtttcgtgtaagaaataatttgaggtaggaaaaaaaaaatttaaggtgaatttataaagtggaagtaagtttattaagaaagtaaaggattaggtcgggtgttatgttttatgtttgtaattttagtattttgggaggttgaggtgggtggattacgaggttaggatatcgagattattttggttaatatggtgaaattttatttttattaaaaatataaaaattagttgggcgtggtggcgggtgtttgtaatgttagttattcgggaggttgaggtagagaattgtttgaatttggaaggtagaggttgtagtgagtcgagatttcgttattgtattttagtttggtaataaagggagatttcgtttgaaaaaaaaaaaaaaaaaaaaagtaaaggaataaaagaatgtttattttataggtagaggggttattttttgattatatgttaaataagggtggattgtttgtgagttttttgggaaagggatgggtaatttttttttttttttagttgagtgttttttttttttgtagattatatagggtaatttttggttgtttttatggtatttgtaaattgttatggtgttgatgggagtgttttttagtatgtgaatttattatagttagtatataatgagtagtgagggtgattagaggttatttttgttgttattttggttttggtgggatttgatcggtttttttattattgtttgattattaaggtttttgtaatttgtgttttatgttgatttttttttttttttttgaggcggaggtttgttttgttgtttaggttggagtgtagtggtgcgattttagttcgttgtaatttttattttttgggtttaaataattttgttttagttttttaagtatttgggattataggcgcgcgttattacgtcgggttaatttttgtatttttagtagagatagagttttattacgttggttaggttggtttcgaatttttgattttaggtaatttatttattttagttttttaaagtgttgggattataggtatgagttatcgtgtttagtttttgtgtcgattttttattttattttgtgattaagaatggttagttttttgggaatgtagtttagtaggtttaagtttttttttatttagtttttatttaagatggagttgttttggttcgaaagtttttgatagtattttattatattgtgtaggttggttttgagtttttggttttaagagatttttttgttttagttttttaaagtggtgggattataggtgagagttattatatttggtttttttttttatttttaatttttggtaattattaaattagtttattttttatgtttatatttttgttattaatattttataaatgttaaatgtaataatataatagataattttttatgtttggtttttttttagttagtataatttttttgaaatttatttaagggaattatgtatattgtatgtattaatagtttgttatttttttttattgttgagtagtattttatagtatggatgtagtatagtttgtttaattatttatatgatgaaagatatttgggttgtttttagtttttggttattataaataaagttgtaatgaatatttgcgtataggtttttgtgtgaatagagtataagtttttatttttgttggataaacgtttaatagtgtaatggttgggttatatggtaagtatatgtttagttttttaagaaattatcggtcgggcgcggtggtttacgtttgtaattttagtattttgggaggtcgagacgggcggattacgaggttaggagatcgagattattttggttaatacggtgaaatttcgtttttattaaaaatataaaaattagtcgggtatggtagcgcgtttttgtagttttagttatacgggaggttgaggtaggagaatggcgtgaattcgggaggcggagtttgtagtgagtcgagatcgcgttattgtattttagtttgggcgatagagcgaaatttcgttttaaaaaaaaaaaaaaaaaaaaaaaaagaaattattaaatttttttagagtggttgtataattttatatttttattagtaatgtggatttagtttttatatttttttaatagcgtttggtgtattattatttttattttagtattttgataggtatgtagtaatattcgattttggttttagtttgaatttttttggtggttaatgatgttgaatatttttttatgtgtttttttgtttttgtatattttgtttaatgaaatgtttatttatgttttttgtttattttttaattggatttttttaatttgttgagcgtttagagttttttaaatatttaaatttttaaatgaagagaaggtttttatttgatatgtggtttggaaatatttttttttattttagtttgttttttcgttttttttaaaaggttttttataggataaaggttttaaattttttttttgtagggtatagtggtttacgtttataattttagtattttgtgaggttaaggtgggcggattatttgaggttaggagtttgagattagtttggttaatatggtgaaatttcgtttttattaaaaatataaaaattagtcgggcgtggtggtgtacgtttgtagttttagttattcgggaggttgaggtaggagaattatttgaacgtgggaggtagaggttgtagtgagttgagattcgttaaggtattttagtttgggtgatagagtaagattgtattttaataaataaataaataaataaataaataaaggtcgagtacggtggtttatgtttgtaatttttgtattttggtaggtcgaggtagatggaatatttgaggttaggagttcgatattagtttggttagtatagtgaaaattcgtttttattaaaaatataaaaattagggttaggcgcggtggtttatgtttgtaattttagtattttgggaggttgaggcgggcggattacgaggttaagagtttgagattaatttggttaatatggtgaaatttcgttttttttaaaaatataaaaagtagtcgggtgtggtggtgggtatttgtaattttagttgttcgggaggttggggtaggagattcgtttgaattcgggaggcggaggttgtagtgagtcgagatcgtattattgtattttattttgggcgatttggtaaggtttcgttttaaaaaaaaaaaaaaaaaaagaaaaagaaaatatcgggcgtggtggtagacgtttgtagttttagttacgcgggaagttgagttacgagaatcgtttgaattcggatggcggagtttgtaatgaatcgatatcgtgtaattgcgtttcggtttgggcgttaaagcgatattcggttttaaaaagaaaaaaaagaaaataggagaataatgaaattttatttatttattttatttattttttatttttttgagatcgagtttcgttttgttatttaggttggagtgttttggcgtaatttcggtttattgtaatttttgtttttcgggtttaagcgatttttttgttttagtttttcgagtagttgggattataggcgtttgtaattacgttcggtttatttttgtatgtttagtagagacggggttttattatgttgttcgggttggtttcgaatttttgagtttaagtgattttttcgtcgttgttttttagcgtgttgggattataggcgtgagttatcgcgttcggttaaaagttttaaattttagtaagttttaatttattaattttttttttgtatagattggttttttggtgtcgtttaaaaattatttgtttggttttaggttttgaggattttttttaattttttttttttttataagtgatttattgttttatatttaaatttatgatttattttgagtaaattttgtataaggtgagaggtttaggttgaggttttttgggtttatattcgtttaattgttttagtattatttgttgaaacggtttttgattttatttttgtatttttttttcgtttatttttttttagagtagtgggaatgtttttttgttagtgatgatgttatgttttgtgtaaaatttgtattagtattttataatataagatttggttttattttaacggtattttttattattcgatgtttatcgtaatatttggttttcgaagaattattgggttggtttttttattttatgtaggtttattttattattatttatttagagatttttttggttttttttttatagtatttataaaatgcgatttattatatattaatttgtttatttgttttttgtttttttatatttttattttttttagaagttttaagagagtatattgttttatttttagggtttagaataatgcgtttacgtagtaggtatttaaaattttttgtttgataggttagaaaaggtgaataaatataaagcgggagcgaaaagtttatttttaggttaggtattttttggattttacgtaacgtgtgagcgttatttttcgggaagttaatttgttcgcgaacgaaggaagtgagttagagaattcgggggtggagagaagaaagtaagtagttaatcggaaaggtttgaaaaagttagcgtcggaagttaaattgtagaaagttgttttttagaatgattgtttatttttaagaggaagcgtgggcgagcggtgttttgtaaaatgggtttttcggtagcggatttgcgtagaagcgtttcgtgcgtgtaagtgttgcgaattacgtgggtttcgggcgcgtttcgggtgttggcggttgtagtcggagtttaaatttaagtagttggaagggtaagaggtgttcgggattttgagaggaaaaagaaaggagtgtagtcgcgggagtgggttaggtgaggagttagtgaagagatgagtttagttttaagaggcggcgaggaggatcggatgggaggaggggtagggagcgtttgtggataagtgtagatcggtcggcgtacgttttacgttacgtggattcgtttttgtcggtggtcgtttttttcgttaggtcgcgacgatagggttgtgttttatttgtgtttgtcgagagtagtgtcgggtacggagttggcgttttgtaagtgtttgttgaataaatgacgggtgtgtgtgttatttatttagtaagtattgagtgtttattgttgtgttatcgggatcgatgtggagggatatttttagggtgtatttttggcgttttagttttgtttttttttggataatttatgtttgtttcgtattttatcgtgcgatttttcgtagtttttgggttttgtttttttttttttttttttttttggaagttgtagaatggtgataaatgattttttttgtttttattgattgttaggttttgtggttaggtattatagagtttttatataggattaagttagtttggtgtgtaggggaggtagatatataaatagaaaattggattatagtgttaagatgttgtaagaagaggttaattaaaggataggaagatggggttaagagatggtgttattgtttattttagggatcgttttttaaggcgaggggttttttattttaagttgtgatatagggtaggttatgagcgtagttttttgtaaaatgagggatttggacggaatagttattttttaggtttttttttagtatgatgtttcgtattagatatttttaatgtttgtagtttttttatattttatcgtttattggttagttaaaatattttttgtattgtaaagtgtagtataatattataagaatggattaatgggttgggaatgttgggttttggtttttattttggtgttgtggttttgtttttttatttgtaaaatgaagggggttgtaaagatatattttttaaaatttttaatgttatggttgtggtattaagttaaattattattttttattgttttgtatcggatattatttttatattagtaaaattttttattagtgtagttttttttaagtttgattattgagaaagatagtgttttgtttttaatattttgtattttagttttatcgtagtgtttggtatatagtagatgtttaaaagaagtttattaaattaaatggtggttaggtttatggggtttacgtttttaattttagtattttgggaggttgaggtgggtagattatttgaggttaggagttggagattagtttggttaatatggtgaaattttatttttagtaaaaaaaaatatagaaattagttgggtgtggtggtacgtatttgtagttttagttatttaggaggttgaggtaggagaattgtttgtttgggaagtggaggttgtagtgagttaaggtcgtattattgtattttattttgggcgaaagagtaagattttatattaaaaaaaaaaaaaaaaattaaatggggttgggtgtggtggtttatggttataattttagtattttggtaggttgaggtgggtagattatttgaggataagagttcgagattagcgtgggtaatatagcgaaattttatttttaaaaaaattttataaaaattaaaataaatgaaaataaaataaattaaatgggatagaaattatagtttttgtttttggatttttttttatattgatatattagtttatagattaggggattggggaggaattgggtttttattagagggagatttggagttgatttgatagatttaaattagttttatgggataattcgtttgagacggatgacgttgtaggtaagtgatttattgttgttttatttttttatttgtttatttttaga

SEQ ID NO: 376 - DNA, 7069 bp, Artificial Sequence
  chemically treated genomic DNA (Homo sapiens)
tttggggataggtaggtagaggaatgaaatagtagtgaattatttgtttatagcgttattcgttttaagcggattattttataaagttggtttaaatttgttaggttagttttaggtttttttttggtaaaaatttaatttttttttagttttttgatttatgaattaatatgttaatgtgggaaaggatttaaaagtaaggattataatttttattttatttgatttattttatttttatttgttttggtttttgtggggtttttttagagatggggtttcgttatgttgtttacgttggtttcgaatttttgtttttaagtgatttgtttattttagtttattaaagtgttgggattatggttatgagttattatatttagttttatttgatttttttttttttttttggtatggagttttgttttttcgtttaggatggagtgtagtggtgcgattttggtttattgtaatttttattttttaggtaagtaatttttttattttaattttttaaatagttgggattataggtgcgtgttattatatttagttaatttttgtatttttttttattagagatggggttttattatgttggttaggttggtttttaatttttgattttaagtaatttgtttattttagttttttaaagtgttgggattaaaggcgtgagttttatgagtttggttattatttgatttaataagttttttttaaatatttattgtgtattaaatattgcggtggaattaggatataggatgttaaaaataaggtattattttttttaataattaagtttgggagaaattatattgatgaaaagttttattaatgtgaaagtgatgttcggtataaagtagtaagaaataatagtttgatttaatgttatagttatagtattaggggttttagagaatatatttttataattttttttattttataaatgaggaaataggattatagtattagaatgaaggttaaaatttagtatttttaatttattaatttatttttgtaatgttatgttatattttataatgtaaagaatattttgattagttaataaacggtggggtgtgggagaattatagatattaggaatatttgatacgggatattatattgaaaggaagtttagagagtaattatttcgtttagattttttattttatagaagattgcgtttatgatttattttgtattatagtttgagataggaggtttttcgttttgaaagacgatttttaaagtagatagtagtattattttttggttttatttttttgttttttagttaatttttttttatagtattttagtattgtagtttaattttttgtttgtgtgtttgttttttttgtatattaggttgatttagttttgtgtagagattttatggtatttagttatagggtttagtagttaataggagtaaagaaaattatttattattattttgtaatttttaaaaaaaaaaaaagagagagagataaagtttaaagattgcggagaatcgtacgatggggtgcggggtaagtataaattgtttaggagaaaataggattaaagcgttagaaatatattttaaaaatgtttttttatatcggtttcggtgatataatagtaagtatttagtgtttgttgaatgaatgatatatatattcgttatttatttagtaagtatttatagagcgttaatttcgtgttcggtattgttttcgatagatataaataaggtatagttttgtcgtcgcggtttgacgagaaaggcggttatcgataaaggcgagtttacgtggcgtgggacgtgcgtcgatcggtttgtatttgtttataggcgttttttgtttttttttttattcgatttttttcgtcgttttttagagttgaatttatttttttattaattttttatttaatttattttcgcgattatatttttttttttttttttttaggatttcgaatattttttatttttttagttgtttaggtttgaatttcggttgtagtcgttagtattcgaaacgcgttcgggatttacgtggttcgtagtatttgtacgtacggaacgtttttgcgtagattcgttgtcggagagtttattttgtagaatatcgttcgtttacgtttttttttgggagtaggtagttattttagggaataattttttgtagtttaattttcggcgttagtttttttagattttttcggttagttgtttgtttttttttttttattttcgggttttttgatttatttttttcgttcgcgagtaaattggtttttcgagaggtggcgtttatacgttgcgtgaagtttaaagagtgtttgatttagaagtagatttttcgttttcgttttgtgtttatttattttttttagtttgttaagtaaaaaattttgagtatttattacgtggacgtattattttaggttttagggataaaatagtatgtttttttggagtttttgggagggatgggagtataggaaaataagaagtaaataagtaaattaatatgtaatagatcgtattttgtaagtgttgtgaagaaaaggttagagaaatttttgagtaagtgataatagaatagatttgtatgaagtgagggagttagtttagtgatttttcgagagttaagtattacggtggatatcgagtggtggaaaatgtcgttagaatagagttaaattttatgttgtgagatgttaatatagattttgtataaggtatgatattattattaataaaaaaatatttttattgttttaaggggaaatgaacgggggaaaggtataaaaatggaattaggagtcgttttaataaatgatgttggagtaattggacgaatatagatttaaagaattttaatttaaattttttattttatataaaatttatttaaaatgaattatagatttaaatgtaaaataataaattatttatggggaaaaaaaaagttaaaaaaaatttttaggatttagggttaggtaaatagtttttagacgatattaaaagattaatttatatagggaaaaagttgataaattggaatttattgaaatttaaaatttttggtcgagcgcggtggtttacgtttgtaattttagtacgttggaaagtagcggcgggaggattatttgagtttaggaattcgagattagttcgggtaatatagtgaaatttcgtttttattaaatatataaaaatgagtcgggcgtggttgtaggcgtttgtagttttagttattcgggaggttgaggtaggagaatcgtttgaattcgggaggtagaggttgtagtgagtcgagattgcgttagggtattttagtttgggtgatagagcgagattcggttttaaaaaaataaaaaataaataaaataaataagtaaaattttattatttttttgtttttttttttttttttttgagatcgagtatcgttttggcgtttaggtcggagcgtagttgtacgatgtcggtttattgtaaatttcgttattcgggtttaagcgattttcgtgatttagtttttcgcgtagttgggattataggcgtttgttattacgttcggtattttttttttttttttttttttttttttttgagacggagttttgttaggtcgtttagggtggagtgtagtggtgcgatttcggtttattgtaattttcgtttttcgggtttaagcgaattttttgttttagtttttcgagtagttgggattataggtgtttattattatattcggttattttttgtatttttaggagagacggggttttattatgttggttaggttggttttaaatttttgatttcgtgattcgttcgttttagttttttaaagtgttgagattataggtatgagttatcgcgtttggttttaatttttgtatttttagtagagacgggtttttattatgttggttaggttggtatcgaatttttgattttaagtgttttatttgtttcggtttattaaagtgtagggattataggtatgagttatcgtgttcggtttttatttatttatttgtttatttatttattgagatgtagttttgttttgttatttaggttggagtgttttggcggattttagtttattgtaatttttgttttttacgtttaagtgatttttttgttttagtttttcgagtagttgggattataggcgtgtattattacgttcggttaatttttgtatttttagtagagacggggttttattatgttggttaggttggttttaaatttttgattttaggtgattcgtttattttggttttatagagtgttgggattataggcgtgagttattgtgttttgtagaaaagaaatttaaaatttttgttttgtgaaagattttttgaagaggacgaaaaaataagttagagtggaaggaaatatttttaaattatatattagataaaggttttttttttatttgaaggtttgaatatttgaagaattttgaacgtttaataggttaaaaaaatttaattagaaaatgggtaaaagatatgaatagatattttattgaataggatatatagaggtaagaaagtatatgaaaagatgtttaatattattagttattagggaaatttaaattaaaattaaaatcggatattattatatgtttattagaatgttaaaatgaaagtagtgatatattaaacgttattaaggaggtatagaaattggatttatattattggtaggaatataaaattgtatagttattttgaaaaagtttgatagtttttttttttttttttttttttttttttgagacggagtttcgttttgtcgtttaggttggagtgtagtggcgcgatttcgatttattgtaagtttcgtttttcgggtttacgttatttttttgttttagtttttcgtgtagttgggattataggggcgcgttattatgttcggttaatttttgtatttttagtagagacggggttttatcgtgttagttaggatggtttcgattttttgatttcgtgattcgttcgtttcggttttttaaagtgttgggattataggcgtgagttatcgcgttcggtcgatagttttttaaaaaattaaatatgtgtttattatatgatttagttattgtattgttgggcgtttatttaataggaatgaaaatttatgttttgtttatataaaaatttgtgcgtaaatgtttattgtagttttatttgtaataattaaaaattggaaataatttaaatgttttttattatgtgaatggttaaataaattatgttatatttatattgtggaatgttatttaataatagaaaaaaataataaattattaatatatgtaatatatataatttttttggatagattttaagggaattatgttgattgaagaaaagttaaatataaaaagttatttattgtattattgtatttaatatttgtgaaatattaataataaaagtatagatatagaggatagattagtttagtggttgttaggaattagagatgagggaaagggttaggtatggtggtttttatttgtaattttattattttgggaggttgaggtaagaggattttttgaagttaggagtttaagattagtttatatagtataataagatattgttagaggttttcgaattagagtaattttattttaaataggggttgggtaaaaagaggtttagatttattgggttgtatttttaggaggttagttatttttagttataggatgagatagaagatcgatataagggttgggtacggtggtttatgtttgtaattttagtattttgggaggttgaggtgggtggattatttgagattaggagttcgagattagtttggttaacgtggtgaaattttgtttttattaaaaatataaaaattagttcggcgtggtggcgcgcgtttgtagttttaggtatttgggaggttgaggtagaattgtttgaatttagaaggtagaggttgtagcgagttgagatcgtattattgtattttagtttgagtaatagaataaattttcgttttaaaaaaaaaaaaaaagattaatatgagatatagattataaagattttggtgattaaatagtggtaaagaagtcggttaaattttattaaaattaagatggtaataaaagtgatttttggttatttttattgtttattatatgttaattataatggatttatatgttaaaagatatttttattagtattatgatagtttatagatgttatggaaataattagaagttattttatatggtttataaaggggaggagtatttaattgggggagaggggaaattgtttattttttttttagaaaatttataaataatttatttttgtttagtatataattaagaaataatttttttgtttgtagagtagatatttttttatttttttatttttttttttttttttttttttagacggagtttttttttgttgttaggttggagtgtagtggcgggatttcggtttattgtaatttttattttttaggtttaagtagttttttgttttagtttttcgagtagttggtattataggtattcgttattacgtttagttaatttttgtgtttttagtagagatggggttttattatattagttaggatggtttcgatgttttgatttcgtgatttatttattttagttttttaaagtgttgggattataggtatgaggtatggtattcggtttagttttttatttttttaataaatttgtttttattttatggatttattttgaatttttttttttttgttttaaattattttttgtacgaggttaaagaatttttttttgggatttggattaggatttttttttggtaataatattgttattttaaaaagagaaagaaaatgtttttaattagttgggtatggtggtatatgtttgtaggttaagttgtttagaggaggttgaagcgtgaggattagttgagtttaggatttcgaggttgtagtgagttatgatcgtattatcgtattttagtttgggtgatagaataagattcg

SEQ ID NO: 377 - DNA, 5921 bp, Artificial Sequence
  chemically treated genomic DNA (Homo sapiens)
ggagatgtaagagatgatataggtttggattaggatattggtaatagggatgagaagagatgagaagtgtttagattttggatatatatatttttttttttttttttgagatggagtttcgttttgtcgtttaggttggattgcggattgtagtggcgtaatttcggtttattgtaagtttcgtttttcgggtttacgttatttttttgttttagtttttcgagtagttgggattataggcgttcgttatcgcgttcggttaattttttgtatttttagtagagacggggttttattttgttagttaggatggtttcgattttttgattttatgatttattcgttttagttttttaaagtgttgggattataggcgtgagttatcgcgttcggtttggatatatatattttgaaggtagagtttataggatttaagatagtttggatgtggagtatgagaaaaagagaggaattagtaatatttttaaggatttgggtttaaataatggaaagaatagaattgtaaaatttaattttattaggaaggaagagaaggttaagggagaagattaggttagttttggatatgttaagtttgtggtatttgtatttggaagtataagtttggagtttcgggaagtgtatgattttgagagttattagtataaaggtggtttttatagatggtatttgaatttggtagggagttaggagattggatgagattatttagggagatagaaaattagaagaggtttagggaataattatggatattataatggtaagaggttggcgagatgaagagtaattaatagggaggtagagagggaggggtttggggtaacggggggttttatatttttcgaattatatatttataaataatttttaagagtggattatttttgtttattttttattttttttttttttttattttggttttattttgttattttggttggattgtagtggtatgattatggttcgttgtagttttaattttttgggtttaagtgatttttttacgttagttttttaagtagttggggtaacgggtgtgtattattacggtttgttaatttttgtatttttttatagggatggggtttttttatgttgtttaggttgattttgaatttttgggattaagtgatttttttattttggttttttaaagtgttgggagtataggtatgagttatcgttgtatttggtatttttgtttatttttatggttatagtggtttattgttttttttgtgtttggatatattattagggttaatttcggagtttattttttaaggttataagtttttatgattgaagtgtgaatgattgataggtttattttttttagggggtatataatgaaagaaaatttttttaataaaatgaatttttatttgatgaaatattgtaggaaaaagggttattttttagagggaattatttgtatttttggtatgttgtagtttattgtagtgatgatggtattattttggttagtattaatttttgggaagttattgggaaggagaaataagtttttgggggagtattaatattgttttgggttgtaaggttttagaggttaggaaaagtatttgggatttaagtatagtttataatgtttgagtaggtgtatattgttttattttaagtaggataaagtaagaagtgggtaggtagttttttgatattgtttttaaatttagtttttgtttattatatttttggtttttttttatttaattatttttttgttttcgttgtaatttttttttttttttatgttttagtttagtgttttagtttttttttttataaatggtgttagattgttaatattgtagaaatggtgagtttagttttttttattaaggttttcgcggttttatgagaaatttgttgtttttttttattttttttttattatttattagtattaaatttttagttagtaaattagagagtataaaagtagggatttttatattagggttttttttttttatatttatagttgtttttttaattaaggaaggtgatgggaaaatgataatgatattaataggataatgggataaaagtatggataggaaatttataaaagtatggataggaaatacgaatagttattaaatagttaaaaagaatgttgatatttaataataaatgtgtagtttaaaggagtaataagagattattttatttattaaagtggcgaggattttaatgtggagggttggcgagagtaaggatataggtagatattattaattggagtagaaaggttttattgttttttggagaatggtttggtaatatatagagattaagagttttaaaataagtttatgtttttatttttttatttagggtttttatttttagaatttagtttaaggtaataattagttatgtaaatatgtaagtttaaggatatttatcgaaggtttgggcgcggtggtttatatttataattttagtattttgggaggtcgaaagaggtggttagattatttgaggttaggagttcgagattagtttggataatatgatgaaatttcgtttttattaaaaatataaaaattagttaggtatgtgtttgtaattttagttatttaggaggttgaggtaggagtagtttgaatttaggaagtagaggttgtcgtgaatcgagattatattattgtattttattttggataatagagtgagattttattttaaaaaaaaaaaaaaaaagaagaagaaaaagaaaaaaaaagaatatttattatagtttagtttattatatgtttaaaaattgaaggttaggtgtggtggtatatatttgtaattttagagttttgggaggtcgaggaaggaggttgttgtgagtttaggaatttaaggttatagtgagttatgtgcgtgttattgtattttagtttgagtgatagagtaagattttgtttttaaaaaaatagaaagtaaattgagatttatttaaatatgttataataggaaattggtttaaatgaattagtagaatattgggtgattattataaatgatgttggtttacgggtttttaaatgtgatatattggtatttgtgtttaaaaatgtataaatattagatatatttaaatttaggaatagtttataaaataattgttttgtatgtttaaaaatgttagtatcggttaggtgcggtggtttacgtttataattttagtattttgggaggttaagatgggtggattgtttaagtttaggaatttgagattagtttgggtattatggtgaaattttgtttttattaaaatataaaaagttagttaggcgtggtggtgggcgtttgtaattttagttatttaggaggttgaggtacgagaattgtttgaatttaggcggtggaggttgtagtgagttaaggtcgtgttattgtaatttagtttggattgttttaaaaaaaaaaaaaaaaaaagttaatataatgaaaggtaaagtatatttaaggtattgtatttatattaaaggaaattaaaaagattcgatagttaaatgtaacgtaggatgttaaatgagattttagattaaaggaaaaaattgttatgaaggatattatggggtaattggtaggatttgaatttggattgttaattagattatagtattatatcggtttaagttttttgatttggataattgtattatattatgtaaaagaatgttttgtttttagaaaatttgtattgatggatttaagggtaaagggtattttgtatgtaatttatttttaaatggtttagtaaaaaatataaatgtgtatttatagagaaataatgataaagtaaatgtggttaaatgatattagtggatgaatttgagtgaagggtattttggaattttttttagtatttttgttttttttttatgagattaaaagtattttaaaataaaaagttaaaaaaaggaagaaagtggtgttggtgaagtatatttttcggtaggggaaggtttttaggtgtattagtagtagttatgagtgttttaatattagggagagtatagttgttattgatattttttgttattttggatttttagttttttgtgttattaaaggaatttagtgtgtggttgattttaaagttgttttgggttgatttaagaaggtaggatgagtattttgaggtaaagaatttttttttgtgattttattgattttaattttgtattttgattggtattttttgtattttaaggattttgatagcggagggaggtagagatggaggaagtgaaaattatttaaatttagtgtttgttatagataatttagattgtaaaatttagggtagattatgtttatttattattgataatgatagttttaatatttttttataataggaagattaagatttttttaaaatcggttagtattttgtttattcgttagaaggagaaaaataagttttggtaagagttaagataaggtttagaagtttttgggtttttttagttaaggtgagtggttttaaattatgataagttgtaggttttttgagaagtatttgtaataatttggtaaattaagtatttttttttgggaggaggaatatagaattttgtaattatttaatatttgtttttaggttttgttttttttggggtatacggtagttattttgtaatttttatttttagaaaggagagattagattaataaatagtagggttgggattgtttagggggtttcgagattttttttttttttttattatttgttttttaggtatatcgttttatttttttttatttttttaggggttgttagggatagaaggttttttttttattttttttagtgtttttttatttttttttcgttttttattattagggtgtttaggatattgtgtgatttaggaaatagtttagacgtgaggtttgtagtaggtcgaggaggaagaagaggggtagtgggagtagaggaggtggtttttgttttagtgagagttttgagggtttttgtttgaagagggatagggattggggtttggagaaggggttgtggaatgtagttttttttattgttgttgttgttgttgttgttgttgttatgtgttttagtggttagatttagaggtgaggtatggcgtgggtgaggtgaggggatttagtttttttaggaggatgtttagtggggtgggggaagagggttaagttttaggtcgtgtgagggatgttggatggaggagatttttattgtttaaatagagacggtttttagggaaagacggttttgtttatggagttgttttgggtttggtgttaggggtggtgattgttgggggatgggtgagagggtgtttatttttaggaagaatttcgttagtattggtattggaggatttttgtagttatagggaagaggggaagagggaatatattgattatttgtttggggaggagatgagagggaagtaggagatggggatatgaaaggttaggtttattaagtttttttttagtttagttgtttttatttttcggatggtttaatgttcggttttttcgggaggaaattttttcgaagttttagttatttatttttcgggagttattttcgttttttttttgatttttgttgttttgttttcgagagatggagttcgaggttggatttgggaggttagagaataaataggaaaggggggtagggattagtaattgggacggagggtattggggttggggttgggtattatgtggagagtggggatagatgtgaagaagaggtggtttagagtatttgtgggagttgttgtgggtaggttttttaggagtatttagaagaggaaaggtggaggtatagtatttagggtttttattgcgtttgtttttttttttttagg

SEQ ID NO: 378 - DNA, 5921 bp, Artificial Sequence
  chemically treated genomic DNA (Homo sapiens)
tttgagggaggagaggtaggcgtaatggaagttttgggtgttgtgtttttatttttttttttttaggtgtttttgagagatttgtttatagtagtttttataggtattttaaattattttttttttatatttgtttttattttttatatggtatttagttttagttttagtgtttttcgttttagttattaatttttattttttttttttgtttattttttggttttttaagtttagtttcggattttatttttcggaagtaagataataggggttagaagaggggcggaggtggttttcgggaggtgaatggttgagatttcgaagagattttttttcggaaaggtcgagtattgagttattcggggggtggggatagttggattaagaaagggtttagtaggtttgattttttatgtttttattttttgttttttttttattttttttttaagtaggtggttagtgtgtttttttttttttttttttttatggttgtaagagttttttagtgttagtgttgacgaggttttttttggaggtgggtatttttttatttattttttagtagttattatttttggtattaggtttaaagtagttttatgggtagagtcgtttttttttggaggtcgtttttatttgggtagtgagaattttttttatttagtattttttatacggtttggggtttggttttttttttttattttattgaatatttttttaagggagttgggtttttttattttatttacgttatgttttatttttgggtttgattattgagatatatagtagtagtagtagtagtagtagtagtagtgaagggggttgtattttatagttttttttttaagttttagtttttgtttttttttaggtagggatttttagagtttttattggggtaggagttattttttttgtttttattgtttttttttttttttttcggtttgttgtaagttttacgtttgagttgttttttgagttatataatgttttggatattttagtaatggggggcggaggaagagtggaggaatattaggggggatgaaggaggggttttttgtttttgataatttttggggaagtagggggaagtaggacggtgtgtttggagggtaggtgataggaggggagaaggaatttcggaattttttgggtagttttagttttgttgtttgttgatttggttttttttttttagggatgagaattgtaaggtggttgtcgtgtgttttaggaggggtaggatttggaaataggtattgggtggttatagagttttgtatttttttttttaggagaggatgtttaatttgttaggttattatagatgttttttagagaatttgtaatttgttataatttgaaattatttattttggttaaaggaatttaggggtttttgggttttattttggtttttgttaggatttatttttttttttttggcgaatgggtaagatgttggtcggttttggggaaattttggtttttttgttgtaggggaatgttaagattgttattattagtgataaatgaatatagtttattttaaattttgtagtttgaattgtttgtaataaatattgaatttgggtagtttttattttttttatttttgttttttttcgttgttaaggtttttgggatgtagggaatgttagttagaatgtaaaattggagttaataaaattataaaagagaattttttgttttagaatgtttattttatttttttgagttaatttaggataattttggggttaattatatattgagtttttttagtagtatagggaattgagagtttagggtggtagaaggtgttagtggtagttgtgttttttttggtgttgaggtatttatggttgttgttggtgtatttgagagtttttttttatcggggaatatattttattagtattattttttttttttttttagttttttattttaaaatatttttaattttatgggaaaggggtaaaaatattaaaaagaattttaggatattttttatttagatttatttattaatattatttgattatatttattttattattatttttttataaatatatatttgtattttttattgaattatttgagagtaagttgtatataagatattttttatttttaaatttattagtgtaaattttttaagaataaaatatttttttatataatatagtataattatttaaattaggaaatttagatcgatgtaatattatgatttaattgatagtttaaatttaggttttgttaattgttttataatgttttttatgataatttttttttttggtttaggattttatttggtattttgcgttgtatttagttgtcgagtttttttagttttttttaatatgagtatagtattttaaatgtattttgttttttattatattgattttttttttttttttttttgagatagtttaggttggattgtagtggtacgattttggtttattgtaatttttatcgtttgggtttaagtaattttcgtgttttagttttttgagtagttggaattataggcgtttattattacgtttggttgattttttgtattttagtagagatagggttttattatggtgtttaggttggttttaaatttttgagtttaggtaatttatttattttggttttttaaagtgttgggattataggcgtgagttatcgtatttggtcgatattggtatttttaagtatataggatagttgttttgtagattgtttttaaatttgagtatgtttggtgtttatgtatttttgggtataagtattagtgtattatatttggaagttcgtgagttagtattatttataatggttatttagtattttattagtttatttaaattaattttttattatagtatgtttaggtgggttttaatttgttttttgtttttttagagatagggttttgttttgttatttaggttggagtgtagtggtacgtatatagtttattataattttgaatttttgggtttatagtaattttttttttcggttttttaaagttttgggattataggtgtgtattattatatttggtttttaatttttaaatatataataaattgagttgtggtaaatattttttttttttttttttttttttttttttttttttttttttgagatggagttttattttgttgtttaggatggagtgtagtggtgtgatttcggtttacggtaatttttgttttttgggtttaagttatttttgttttagttttttgagtagttgggattataggtatatgtttggttgatttttgtatttttagtagagacggggttttattatgttatttaggttggtttcgaatttttgattttaggtaatttgattatttttttcggttttttaaagtgttaggattataggtgtgagttatcgcgtttagattttcggtaaatatttttgaatttatatatttgtatggttaattattgttttaggttaaattttagaagtgaaaattttgagtgaaagggtgaagatatagatttgttttaaagtttttggtttttatgtgttgttaagttattttttagaaagtagtgaggtttttttattttagttagtagtgtttgtttgtgtttttattttcgttaattttttatattagaattttcgttattttgatagatgaaatggttttttattgtttttttaaattgtatatttgttgttaagtgttaatattttttttaattgtttaatggttattcgtgttttttgtttatgtttttgtgagttttttgtttatgtttttgttttattgttttattggtgttattgttatttttttattattttttttagttgaggaggtaattgtgggtatggggaagaggaattttagtgtaaaagtttttgtttttgtattttttggtttgttgattggggatttggtgttggtgagtagtgaaaggaaaataggaagagataataggttttttatggaatcgcgaagattttggtggaaagaattgaatttattatttttgtaatgttgataatttaatattatttgtggaaaaggaggttggggtattaggttggagtatgagaaaaaggagaaattgtaacggagatagagaggtggttaggtggaagggaattagaagtgtggtgggtagaagttgagtttaaagatagtgttaggaagttgtttgtttattttttgttttattttgtttaaggtaaggtagtgtgtatttgtttaggtattatgagttatgtttgggttttagatattttttttggtttttaagattttatagtttaaagtagtattgatgtttttttaagagtttgttttttttttttaatggttttttaagggttgatattgattagggtggtattattattattatagtgaattgtagtatgttagggatatagatagttttttttgggaaatgatttttttttttatagtattttattaaatagagatttattttattaaagggatttttttttattgtatattttttgagaaggataaatttgttagttatttatattttagttatagggatttgtgattttaaaaggtgaatttcgaggttggttttgataatgtgtttaaatataaagaaggtaataggttattgtagttatagagataagtaagagtgttaggtgtagcggtggtttatgtttgtatttttagtattttgggaggttaaggtgggagaattatttgattttaggagtttaagattagtttgggtaatatagggaaattttatttttatgaaaaaatataaaaattagtaggtcgtggtgatgtatattcgttgttttagttatttgggaggttgacgtgggaggattatttgagtttaggaggttgaggttataacgagttataattatgttattgtaatttagttagggtgataaggtgagattagagtgagaaaaaaaaaaaaataagaaataagtaagagtaatttatttttggagattatttgtaaatatatggttcgggagatatggagtttttcgttgttttaggtttttttttttttgtttttttgttggttattttttatttcgttaattttttattattgtagtgtttatggttattttttgggttttttttagttttttgtttttttaggtgattttatttagttttttggttttttattagatttagatattatttatgaagattatttttgtgttgatgatttttaagattatatatttttcggaattttagatttgtatttttaagtataagtattataaatttaatatgtttagaattgatttgatttttttttttaattttttttttttttttgatagaattgagttttgtagttttattttttttattgtttaggtttaaatttttgaagatattgttgattttttttttttttttatattttatatttaaattgttttaaattttgtggattttatttttaaaatatgtatatttaggtcgggcgcggtggtttacgtttgtaattttagtattttgggaggttgaggcgggtggattatgaggttaggagatcgagattattttggttaataaggtgaaatttcgtttttattaaaaatataaaaaattagtcgggcgcggtggcgggcgtttgtggttttagttattcgggaggttgaggtaggagaatggcgtgaattcgggaagcggagtttgtagtgagtcgagattgcgttattgtagttcgtagtttagtttgggcgatagagcgagattttattttaaaaaaaaaaaaaaaaatatgtatatttagaatttgagtattttttatttttttttatttttattgttaatattttagtttaagtttatgttattttttgtattttt

SEQ ID NO: 379 - DNA, 8420 bp, Artificial Sequence
  chemically treated genomic DNA (Homo sapiens)
gtgtttgtatgtgtataatattttgagatatggttttattttgttgtttaggttagagtgtagtgggaggattatagtttgttgtatatttgaatttttggtttttttaagtaatttttttgtttcggttttttaaagtgatgggattataggtattagttattatgcgtggttatatatttatttttaatattggttaaaatataatttatatattaatatagatatttatttatagaaatagatatattttgtttattgtaagttttataagggtagggatatttgtataatttatgttgtattttagtggttatattaatagtttttggtataaagttggtatttaataaatatttgatgaatgaatgaatgagtgaattttgtgattgcgaagaagtgatttgagttttgtaggttttatgttttttttagttttaagggagttagatgtttgttttttgaattaatttgattatttttgaaaggatattttattgttaaagatttaagttttagttttttagtttgatattgtagggtgtagataaattattttttattaatgtatttagttttagaagggttttttagtttttcgggttagattttttttttttgattttttggtttggagttaattattttttttttaggtttagttatatttagtttagcgtttatattatattatttgggggtatggttttaaaattgttgtatatatttttgttattttttttaaggagggtgggatttttgttagttagttttgtttttttttagttgtgtttagtttagggttggaattattgggtatttaggaattatggataatggatgtttggattttaagtttattttttttttggggatttgggtgtgtttcgtttttttattagggtttaagttttatttttttttttttttttggatttttttgtttttaagaggatttttcgtggttttttattgtagaagatttaagtttgaatgttttagtttgatatttagtttttgttaacgtttttagtttttatttttttttttatcgagtttttcggtgttattataaatattatatgttatatgttacgttatttaggttttatttttgatagtttgttaagagaggtgggtaggtaaggttggttttttgggggttattttatattttttttttgttgttattaatggttttgagtttggttttgtttagtagttgtgtatgtgtgtgtgtgtgtgtgtgtgtgtgtgtgtgtgtgtgtgtgtgtgtgtgtatgtttgagtttacgtagatatatatataaaaaagagggagagagaatgagaaaatatttttattttttttaggtaaaagttaattaggttttgcgaggtagataggggtttttttaggcgtttattttttattatgtttttgtttttttagggtttttttgatgggagttatttggaaaaataaatttaaaatttttatagtttaatttttgtttttttttaggatttggttttgtgtagagttgtattgggaatagaatatttgggttttttgagtaaatattagtttttttaaggatgtgtttttgttttgataattatatttttagttggtatttgttgtgtagaagaggagggggttcggtggtcgggggagtggtgttatgttttatagatagaggatttgtgattagtattttttaggggattttttatttagtttattgtattatttttttatttttatgggaagaggagatttttttgtttttgggagtttttagtttgaggggtattataggatttttcgggtaagtatagagtttggatttttgagttgttttagtttggaggggaatggtgggattggggaaggggatattttttaatttttttttttttgaagtttttatttttagtttttttttttttttttattaattttttagtatttttatgagggttatttagtttatatagtttttttattttttttttttaaaacgtattgatgggtagtatttagtttgggggataggttttggggtgttgaggaagagtagtttttttttaaaattagtttttttttttgtagggattgggttttaagaggggggatataggatagggttttggaggtaggagtttaggatttagtttagttttatttttagtttttagagttgtagttttttgtcggtaatattgtttttattatttaatggtgtttggtttttagttatttattttatttttgtttttttttatttagtggttttagagatgatttttaatatttttacggttttatttgggtttttaggtaagttttattgggattatagttttattagtagggacggaagatatttatttgtttacgttttgaagttttttttatttttgagggagttgagggaaaaatatttttatgtggggaattaattgttttttttgttgggtagtttttttgagcgttaattttaatttttatgttttagtgtagagtaagtggaggtgttgtggttgtaagtttagttttttggttttttagttggttgggagggaggtaggggtttgggagttagttttggggatttattttttattgtatttaggttaaattttaaggagaggaagattataggtaggtatgttttttagggttatagattaggtattgttattgttttagttttggtttgtgtttagtttcggtttttttttcggtgattttggggagaacggtgtgataagttttaagggatatagagattagggtttagataggagagggagggtaggggtagagagataaggaattttatatagagatagtaggagatagaaaaaaagaaatgagagttatagagatataaagatagtgataggtagttggagatagagagatttagtatgagattgagagatggggatagagatgtagatagtgatagggagagtttcgggtttttagagggagaaaatgatatagggttttgagtaaaaggtaggtcgagaggttagttaattttgagggcggagtagtaggttggggatcgtttttaaggagggtagcgggggtttcggggcgcgtgggatttcgtagggagagtttttttggattttttcgggcgcgcggttttttagcgttagttgatagtgttggttgcggttttttttagggtcggtacgtaggggtcgcgtttagttttcgtttttttcgtttttcgtttaaatagattggttcgtagggattttttcgttttttttatttttttcgttaagttaaaatatttagtttgataattgaggggaggataggtttgttggggaaataaggttaaaatacggggggagggtgggttaagaattgagtttttttaaatttcgttgcggttgtagcggttttcgttaattttttgtttttattataggttttttttaagtggggttgtatcgtcggaggggtagttagcgcgttcgggtttttggggagcgttgtgtttagattttgtttttcggtgttttgatatttgcggggtaatttttggtagtttcgattcgggagaacgtggatagtttttggtttttgggagttttttttagttttttaggaggtttttttgttttttttggagattttttagcgttaggtttcgttatcgtttagttttttggttttgattaagatttcgaggaagaaggcgattattgtgtagggttttgttttcgtttggttatttttttgagtttaggttgttcggtcggtttgtgtgtttttgtttcggggatttggggggttattcgtgttggggttttggcggagagaatcgtgagtttttaggaggtcgtttttttttcgttttttggggttttgtttgttttttcgttaagagatatttttttttttttcgttttttttagtttgagacggatgggttagtgtagttacggaggtttgcgcggtgggaggggttgggattagttttttgttgttttgggtgttggggatttcggggttttttaggtgttcggtttttaaggtgcgcggtttttagttttattcgcgggcggtttttgcgttcgaggagttaagagaagatttattaatttttttacgaataaatcgatgtttttgttagggaggcgatcgatgttagttttgttttgttttgttttattttgtttcggggtcggcgttggttggtcggggttagggattgaagttgagatttgaggcgttgtttattgggggttgtagatcgtatttttaggtatttagcgcgggcggggagttcgcgtttttgcgcgcgggtttttcgcgttattttgtggttttttttggaggcgcggttttggtttttcggatttttttcggtcggattaggcgattttttttttttttttgtttcgtttgtgtttttttttttaggttttgcgattgattttttggtagtttttttcgttttttttttagagttcggagaatgttttatttaatttattttaagtgatatgtttatttttttaggtacgcgcgtcgcgaggatggagcgttgagtttggggttggttaggatgatttggatagtaatttttttttaacgtagttatttttttttttttttaaatgtaaaaatgtagttgttttaagttgagagaaataacgtattagttttttattttcggttttagtagatattttcgaggcgttttgttgcggttttttagcgtttgtcggagttgaggcggattttcggggagaaggttgacgttgggggtttttaataggggagggggtagaggggggggcgttagagagtaggaagcgggtggagaagaggggtaaggcggggtcgggcgggggtcgttggtttcgtttttttttggcggttgggtttttaatatcgtttagcgtatatgtcgggggaggtttggtagttgtagttgggagcgtatagacggttgtttcgtttgagcgaggcgggcgtcgtcgcgatgttgcgaggcggacggcgcgggtagtttggttggtatagttgggttgcggggtcgggtagtttgttggtttggttgatattggtatttgcgggcgtcgtattttgtttcgatgtttgttgtttttacggtttttcgggattgcgatgtattcgggatggggttttggatagtttttattatttgttcggcgtagagaatttgattgagttgtgagtgttcggcgggcggtgggggggcgcggggataggtaggtattgtagtgtttcgagggcgcggattcgttgtttgtttgttggttaggtaggacgagtacggcggaaggttggtattacgtagttttcggcgttgttcgggcgttttttcgtagtcgtcgttgttttagtaagttttatggttagtgtttggatgttttttagtgtttagggtagttgggtcgtcggttttagggagatcgaagggggaaattttcgtggattaggtttgagagagtttagtcgtttagaaggcgttttttggagtttagttagaagtttttgttttgttttatagagaaggatggttattagtagagaagtttttagtttgttatttttattgtttttttttttttttaggggtaagttagttttcgtttatttttttgttatgaggaggtaattttagttttttttttggaattggggattgagttggttggtattggtgggaggcggtgaggagttgagtggttgagtttttttttttttatttttattatttttttttttagaattcgttgatttggatttgggaaatgggatttttttttggattttttttttttatttttatttttttttttaattttgtttttttatttggggcggggagttagggtttttgttgagagatttttttttttttggtatacgaagttgggaggaatttttagtattttgtaggattttgatattttgtaggaattggttataaaatatttaagtattttttagtagttggtgaaatttatgggagtatgcggtaatgattggtttggaggtatttaggtattatatggtgatggttggaaaatatttgaatattatatatggttattatggttagtaagatatttagaagaggggagaattgttagaaaattttttttttgtggtttggggtttcgagggtggataaggaattttggttttgtgttgtgatgggttggaaggtattcgaggtgaggattattattgtttggaagttatttgagtagtttgtagtaattggtattgagttttttgggtattttatggtaattaacgggaaggtatttaatttttttttttaatagttttagggagattaggagtagaggagatggttttgttttggtttaggtttaggtttttgtatgatgggagggggtatgagagataggttgttagttttagtttagtttttttattattttgggtttttagattggggtttagatttttgagtgttttttattagggttcgtgttttttaattttttttaagttttaagtgggtttagtagggtagggatgggagtggtagggggagtggataggttagaattggggattagtaagtatgtagggtggtgagttgagatgtttttttgggtggggttgtagtttgatatttttttttttattgtttgtatagttttttttttttttatttattcgtagagttaacgaggagataatggattcgaatagatagattgattatgaatttaaacgaatgaggtagttttgaggtagttttgagtacgttggtttgatagtttttatatattttgttagtttattgtatttttattttttttttgggtttttatagtttgaaattttttgggtaggggttggggggtgggtagaatagggatttggtttttttcggagttagtggaggttattttataggtttttattaagtttatagggaaatttaggatttgattttggttgttttggtggggttaaggttgggaagggaggaaaggaggaagggaggggttatttaggttggttttggtttttataagttagggaaagttagagggtagagggggagagttttgagaatcgttagtgagttaggggtttttggtatgtgtattgttggggtggggggggtatattaatatgttattatagggtagtcgagtttttaggaattttttggtatgtcggatttagtagttaggtaggttttagggcgttagttgttttttagtttcgaatgtttatttattttttttttttttttgtttatttcgttttttgtagttttttgtttttatttgtttgtttttttttttttatttgtttttttttttgtttgttattatttttttgatttttttttgttagttttttttttagtgtttttgttttattttttttttgtttttttgttcgtttgtttttatttttttcgttgagtttttttatttttttgttttttttttttttttttttgttgtgtaagttagttagtttgtgttttttttttttttttcgatattttgattgtttttttttattgtttttttttttttttttgggtttttttttggggtttttaattgatagtttgtaagatttttgtttgatttgttgaaaagatggtaggggaggtttcggtggagtaggggttgttgtttgggtgtgaagaggggttagaggttatgggggtgtagagatgtttgtgtgtgtgtgtgtgtgtgtatgtttgtgtgtgtgtgtagtataggtgagattaggtagtggtttttgggcgggtacgtttgggaatatatatttgtatgagtataggtttcgtttgtgttgggtggggtagtggtagggataagttttggttttttgtggtagtaagtgttttagtataattttttattgatgagtgtgtgttagggatgtttgatataaaaggagaatattaatttgagaatggatttgtgtgtgtgtacgtgagagatggacgtgagttttgtttttgtgtgtttatgggtgagcgtgtttttgtaggtatatgtgtaggtgtatggcgttatttgtgtagatgtttatgtttttgtgtgtgcgtatgtgtatatttaggtgtgtgtatgtgtgtaagaggtatgtgagaatgtgtatatgtgtgagggtgtggggatttatatgtatgtgcgtttgtgtgtttatgtatatatatgtgtatgtgtgatttgaggtgcgtttttgtgtatatgtatgtatttgtgtgtgtacgtttgtgtaagtgtgtatgtaggtttgaataggtgtatatgcgtgtgtatgtggtatgtgtatgtgtattgtgagggagtaagtgggtgggtatgggaatttaagtgtgggtttgagttttgtgatttttattcgttttttttatagt

SEQ ID NO: 380 - DNA, 8420 bp, Artificial Sequence
  chemically treated genomic DNA (Homo sapiens)
gttgtggggagagcggatgggagttatagggtttaggtttatatttgagtttttatgtttatttatttatttttttataatatatatgtatatgttatatgtatacgtatatgtatttgtttagatttgtatatatatttatataggcgtgtatatataaatgtatatatgtgtatagagacgtattttaagttatatatgtatatgtgtgtgtatgaatatataagcgtatatatatatggatttttatatttttatatatatgtatatttttatatattttttgtatatatgtatatatttaggtatgtatatgcgtatatatagaggtataagtatttgtatagatgacgttatgtatttgtatatgtgtttgtaggaatacgtttatttatggatatatagaaataaagtttacgtttattttttacgtgtatatatataagtttatttttagattggtgttttttttttatattaggtatttttggtatatatttattagtgggaggttgtattgaaatatttgttattataaaaggttaaggtttatttttgttattgttttatttagtatagacgaagtttgtgtttatgtaaatgtgtgtttttaaacgtgttcgtttaagggttattgtttggttttatttgtattatatatatatatagatatatatatatatatatatatataaatatttttgtatttttatagtttttggtttttttttatatttaagtagtaatttttattttatcgaaattttttttattatttttttagtagattaagtaagagttttataggttattagttagggattttaaggagggatttaggaaagaggagaggagtaatgagaggaggtagttagagtgtcgaggaggggagaagaggtatagattggttgatttatatagtaagagagagagagagagagatagaaagatggaaaggtttaacgaggagggtgggggtagacgggtagaaaaataaagagagagtgaaatagagatattgaaagagaaattgataggaagaggttagagagatagtgataggtaagaaggaagatagataaggggagggagatagatagataaggatagagagttatagaaagcgagatagataagaaagaaagaagaatgagtaggtattcggggttaggggatagttgacgttttggggtttgtttagttgttggattcgatatattagggagtttttgagaattcggttgttttgtagtgatatgttagtgtgttttttttattttaataatatatatgttaggggtttttgatttattgacggtttttagaattttttttttttattttttaattttttttaatttataggaattaggattagtttaagtgatttttttttttttttttttttttttttttagttttggttttattaggatagttaggattaggttttaagtttttttgtggatttagtagaggtttataaagtaatttttattgatttcgagggaggttaagtttttattttatttattttttagtttttgtttagagggttttaagttgtagggatttagggagggggtgagaatgtagtgggttggtagggtgtgtgggagttgttaggttagcgtgtttaaagttgttttaaagttgttttattcgtttggatttataattaatttgtttattcgagtttattattttttcgttagttttgcgggtgagtgaggagggagggggttgtgtaggtagtggggagggggatgttaggttgtagttttatttagggggatattttagtttattattttatatgtttgttagtttttagttttggtttgtttattttttttattatttttatttttattttgttggatttatttggggtttggaaagagttgggaaatacgagttttgatggggagtatttaggagtttggattttaatttgaaggtttagggtgatgagagaattggattaggattggtaatttgttttttatgtttttttttattatgtagagatttaggtttagattaagataaggttattttttttatttttggtttttttagagttattagagagagagattgagtgttttttcgttaattattatgagatatttaaggaatttagtgttaattattgtaagttgtttaagtaatttttagatagtgatgatttttatttcggatattttttagtttattatagtataaggttaaggttttttgtttattttcgaaattttaggttataggaggaggattttttagtagttttttttttttttagatgttttgttggttatgatagttatatgtaatatttaagtattttttagttattattatatgatgtttgagtatttttaggttagttattatcgtatatttttataggttttattagttgttaaaaagtatttgagtattttgtaattaatttttgtagaatgttagagttttgtagaatgttgaagattttttttagtttcgtgtattaaagggaggagggttttttagtaagggttttgatttttcgttttaggtagagagataaggttggagagggagatgggagtggggagagaaaatttaggagggggttttattttttagatttaaattaacgggttttgggggaaggaatggtaaaaatggaaagaggagagtttaattatttagttttttatcgttttttattaatgttagttagtttaatttttaattttagaagaaaagttagggttgtttttttataataagaaagtgggcgggggttggtttgtttttagaaaaggaaaaaggtagtaagggtgataaattggggatttttttgttggtaattatttttttttgtaggatagagtaggggtttttggttgagttttagaaagcgttttttagacggttaggtttttttagatttggtttacggagattttttttttcgatttttttgaagtcggcggtttagttgttttgaatattaggggatatttaggtattgattataaagtttgttagggtagcggcggttgcggaggaacgttcgggtagcgtcgaaggttgcgtggtgttagtttttcgtcgtgttcgttttgtttgattagtaaataagtagcgagttcgcgttttcggggtattgtaatgtttgtttgttttcgcgtttttttatcgttcgtcggatatttatagtttagttaggttttttgcgtcgggtaggtggtggaggttatttagggttttatttcgggtgtatcgtagtttcgaggagtcgtgggggtagtaggtatcggggtagggtgcggcgttcgtagatgttagtattagttaagttagtaggttgttcggtttcgtagtttagttgtgttagttaagttgttcgcgtcgttcgtttcgtagtatcgcggcggcgttcgtttcgtttaggcggggtagtcgtttgtgcgtttttagttgtagttgttaggtttttttcgatatgtgcgttgggcggtgttaaagatttagtcgttaggaaagggcggagttagcggttttcgttcggtttcgttttgttttttttttttattcgttttttattttttgacgtttttttttttgtttttttttttgttaggggtttttagcgttagtttttttttcgaggattcgttttagtttcggtagacgttgaggggtcgtagtagaacgtttcggaggtgtttgttgaggtcggaggtgggaagttgatacgttattttttttagtttaaagtagttgtatttttatatttggggaggagggaagatgattgcgttgaggaaaggttgttgtttaggttattttagttagttttaggtttagcgttttattttcgcggcgcgcgtgtttaggggagtgagtatgttatttggagtaagttaggtagaatatttttcgaattttaggaagaaaacgaaaaggattattaaaggattaatcgtagaatttggggaggaagatatagacggggtagagaaagggaaggggtcgtttaattcggtcgaagggagttcggagagttaagatcgcgtttttaagagaagttatagggtggcgcgagaagttcgcgcgtaaaggcgcgagtttttcgttcgcgttgggtgtttgggggtgcgatttgtagtttttagtgagtaacgttttaggttttagttttagtttttgatttcggttagttagcgtcggtttcggggtaggatagggtaaggtagggtagggttgatatcgatcgtttttttgataagagtatcgatttattcgtgaagaaattaatagatttttttttagtttttcggacgtaggagtcgttcgcgggtggagttgaggatcgcgtattttggaggtcgagtatttggaaagtttcgggatttttagtatttagggtagtagaaggttggttttaattttttttatcgcgtaagttttcgtggttgtattaatttattcgttttaagttggggagagcgaagggaagaggggtgttttttggcggggagataggtaaggttttagggagcgggggaaggacgattttttagaggtttacggtttttttcgttaaggttttagtacggatggttttttaagttttcgagatagggatatatagatcgatcgagtagtttgagtttaagaaggtgattagacggaggtagagttttatatagtgatcgttttttttttcgggattttggttagaattaagggattaggcggtgacggagtttggcgttaaggggtttttaaagaggataaggaggttttttaggaggttgagaggggtttttagaggttaagggttgtttacgttttttcgggtcgaggttgttagaagttatttcgtagatgttaaggtatcgggaagtagaatttagatatagcgttttttagaagttcgggcgcgttggttgttttttcggcggtgtagttttatttggaagaagtttgtggtggggataaagggttggcgggagtcgttgtagtcgtagcgggatttgaggaagtttagtttttggtttatttttttttcgtattttggttttatttttttaatagatttgttttttttttagttgttaggttaaatattttgatttggcgggaggggtggagagaacggaaaggtttttgcgaattaatttgtttaggcggggggcggggagggcgggagttgggcgcggtttttgcgtgtcggttttgggaaggatcgtagttagtattgttagttggcgttggggggtcgcgcgttcggagggatttagggagattttttttgcggagttttacgcgtttcgggattttcgttgttttttttgggagcggtttttagtttgttgtttcgtttttagggttggttggtttttcggtttgttttttgtttagaattttgtgttattttttttttttggaggttcgagattttttttgttattgtttgtatttttgtttttattttttaattttatgttgagtttttttgtttttaattgtttgttattgtttttgtgtttttgtgatttttatttttttttttttgttttttgttgtttttgtgtgggattttttgtttttttgtttttgtttttttttttttatttgaattttggtttttgtgttttttagggtttattatatcgttttttttagagttatcgggaggagagtcgggattggatataagttagggttgggataatggtagtgtttagtttgtggttttggggagtatgtttgtttgtgatttttttttttttgggatttggtttggatatagtagagggtgagtttttagaattggtttttagatttttattttttttttagttagttgggaggttaaaaaattgagtttgtagttatagtatttttatttattttgtattggaatatgggggttggggttagcgtttaggagaattgtttagtaggaaaagtagttagttttttatataaaggtgttttttttttagtttttttagagatgagaagagttttaaaacgtggataagtagatatttttcgtttttattagtgaaattgtgattttagtgaagtttgtttgaaaatttaaatgaggtcgtgagagtgttagaagttatttttagggttattgaatgggaagaggtaggggtgggataggtagttgagaattaggtattattaagtaatggaggtaatgttgtcgataggaaattgtagttttgagaattaagggtaaagttagattgggttttgagtttttgtttttagggttttgttttgtgtttttttttttagggtttaatttttatagggaggaaggttggttttgggggaagattgtttttttttaatattttagggtttgttttttaggttagatattgtttattagtacgttttagagaggaggggtggggggattatatagattaaatgatttttatggaggtgttgggggattggtggaaagaggaaaaagagttgagggtggaagttttaaaaagggaaggattaggaggtatttttttttttagttttattatttttttttaaattgaagtagtttaggaatttagattttgtgtttgttcgagaggttttatgatgttttttagattgggggtttttaggggtaggggagttttttttttttatggagatgggagagtgatgtaatgggttgggtaggaggttttttaaagggtgttagttatagattttttgtttgtaaggtatagtattattttttcgattatcgaattttttttttttttgtatagtagatgttagttgggagtgtggttgttaggataggagtatatttttggaggggttagtatttgtttaggggatttagatgttttgtttttagtgtagttttgtatagagttaggttttgagggaaggtaggggttaaattgtgaaggttttagatttgtttttttaaatgatttttattaggggagttttggagaggtaggggtatgatgggaagtgggcgtttgagagaatttttatttgtttcgtagagtttgattggtttttgtttggaagggatagaagtgtttttttatttttttttttttttttttgtgtgtgtatttgcgtgggtttagatatatatatatatatatatatatatatatatatatatatatatatatatatatatatatagttgttgggtagagttaagtttaggattattaatgataatagggagaagatgtgaagtaatttttagggagttagttttgtttgtttattttttttaataaattattaggaatggggtttggatagcgtggtatgtggtatgtggtgtttgtgataatatcggagggttcggtgggaagggaagtagaggttggagacgttagtaggagttgaatgttaggttgaaatatttagatttgaattttttgtagtggggagttacggaaggtttttttgggagtaagagagtttagggagagaaagggaagtggggtttgggttttagtgaagaagcgagatatatttaggtttttaaggaaggagtgaatttgggatttagatatttattgtttatggtttttgagtgtttagtggttttagttttggattgggtataattgggggaaagtagagttgattaataagggttttattttttttggagggggtgatagagatgtatataataattttggagttatgtttttaggtaatgtgatgtgggcgttggattaagtgtagttgagtttaaaggggaagtgattaattttaggttagagggttagggaagaaaggtttgattcgagaggttgaaggatttttttgaggttggatgtattagtaaggaatggtttatttatattttataatgttaggttgaggaattgaaatttgaatttttagtaatggaatgtttttttaagagtaattaaattaatttagggaataggtatttaatttttttaagattgggagagatatgggatttgtaaagtttagattattttttcgtagttatagaatttatttatttatttatttattaaatatttattgagtgttaattttgtgttaggagttattggtatagttattagggtataatatgaattatataaatatttttgtttttatggagtttataataaataaaatatatttatttttataaataaatatttatgttaatatataaattatattttagttagtgttaaaaataaatatatggttacgtatgatagttgatatttgtaattttattattttgggaggtcgaggtagagggattatttgaagaggttaggagtttaagtatgtagtaaattatgatttttttattatattttagtttgggtaatagagtgagattatgttttaaaatattatatatatataaatat

SEQ ID NO: 381 - DNA, 12578 bp, Artificial Sequence
  chemically treated genomic DNA (Homo sapiens)
gtgaaattgaagtaagagtagaaagtaataagagtagtataggttggttattttattttggttatttaagaaagttttttttttaattgtttgtttttagattatgtatatttgtgtatagttaatatagtatgtatttagttttgatagattttttgaggatttgagttagaagatgaattgtatttttagaatatggttaataattttatagatatagtgttgagtgaaagaaaataaatataatatatgttgtttgattttattaatatgaagtttaaaaataggtaaaattaaattgtggtgataaaagttaaaatagtggttatttttagagggtgttgattagtatagggtatagagattttttagaggtgttagtaataatttatatgttgaattgagtggtgttatatgatatatatatatgtaaaaatattttgagttgtttatttagaagttatgtattttggttaggttcggtggttcgcgtttgtaattttagtattttgggaggtcgaggtaggcgtattatttgaggttaggagttcgagattagtttggttaatatggtgaaattttatttttattaaaaatataaaaattattcgggcgtgggggtgggcgtttataattttagttatttaggaggttgaggtaggagaattgtttgaatttgggaggtagaggttgtagtgagttttcgagattgtgttagtgtattttaatttgggtaataagagtaagattttattttaaaataaaataaaaaaaaaaaggttaggtacggtggtttatgtttataattttagtattttgggaggtcgaggagggtagattatatgaggttaggagtttgagattagtttggttaatatggtgaaatatagtttttattaaaaatataaaaattagttaggcgtggtggtaggcgtttgtaattttagttattcgggaggttgaggtaggagaattttttgagtttgggaggcggaggttgtagtgagtcgagattgtgttattgtattttagtttggttaatagagcgagattttgtttaaaaaaaaaaaaaaaaaaaagttgtgtattttattgtaggtaagttatattttaatttaaaaaaagaatttaaattgttttttgtatttttgatgaatacgtaaaggatagattggagttatgtagtgtgttttttggaaaaataaagtagattttttaaaattttagagttttttttaggaatttgtgattagatggtttttataaataatatattaaaatatggttaggattagaagaatttaggatgtgtgataaaaagaaaataattaatgattatatagtttattttttttggtttttattgtaattttttggaagagttaggattgttaataaatggtcgtgtagtaagaatggaataagttttgtagtatgagggtaattgttggttgtgaaatttttaataatttttaggttttttgggtattggatgttttttttgttaaatggaaaaatattttattcgttcgaagataggggaaaggattaagtgattttttaaggttttttttagtttgtaaaatttttggtttggtcgggtgtagtggtttatgtttgtaattttagttttttgggaggttaaggtgggcggattacgaggttaggagttcgagattagtttggttaatatagtgaaattttgtttttattaaaaatataaaaattagttgggtatggtggtatgagtaaataatataaaaattagttaggtgcgatggcgtatatttgtagttttagttgtttgggaggtggaggtggaggtgggagaattgtttgagtttagtatatggaggttgtcgtgagttgatatcgtattattgtattttagtttgggtgacgtagtaagattttgatttaaaaaaaaagagaaaagaaaattaatgtatttataaatatttattatatgttatgtatgatattaatagttatatattgttatttaattttttttttttgtttgtttttattttgtaggtaagaaattgggatttagtaggattaaattattgaaattgatatagttttagtgaatggttgagttgaagtataaatatagatttattagtttttattttgtttttaataaatatgtaaagttatttttttagatgtggagggtgagatatattttaggttttgttttttttttatagtttaaggttaggtatttttaaatttataattttaggttttttattagagagttttttttgatttttttattaattgtattagttagggttttttagaggaatagaattaataggatagatatatatataaagggtaatttattaagtagtattaagttatatgattataaggttttataataggttttttgtaagttgagaggtaaggaagttagtgcgagttttaaagttgaagaatttgtagtttaatgttcgagggtaggaaatatttagtacgggagaaagatgtaggttgggaggttaagttagtttagtttttttatatttttttgtttgttttatattcgttggtagttgattagatggtgtttattcggattaagggtgggtttgttttttttagtttattgatttaattgtttttgttttgggaatatttttatagatataattaggattaatattttggattttttaatttaattaagttgatatttagtattaattaatatattatttttattagttatgtttgagattaaattaaatattagtgtttttttttttttttttgaggagttttattttgttattaggttggagtgtagtggcgtaatttcggttttttgtaatttttatttttttggtttaagtaatttttttgttttagttttttgagtagttgggattataggattttagataaatttattattattttatagtagtagagaaagtacggaaattggtattgtatttgttttttattgtttttataataaattattataaatttggtgatataaaataatataaatttattgtttaaagttttgtaggttataggtttgataagtgttttattgggttaaaattaagttgttagtagggttgtgttttttttgggggttttatggaagaatttgtttttatgttttttttagtttttagaagtttttagatttttaggtttttgggtttttttttttatttttaaagttagtaagggtagattgaggtttttttaagttatattattttgattttttttgtttttattttttattttttttttttttttttttgagaacgagtttttttttgttgtttaggttggagtgtagtggcgtggtattagtttattgtaattttcgtttttcgggttttagtaatttttatgtttaagtttttagagtagttgggattataggtatttattattacgttagattaattttttgtattttagtagcgatagggttttattttgttggttaggttggttttgaatttttgattttaggtgatttatttattttggttttttaaagtgttggaattaaggtttgagttatcgtgtttagtttattttttatttttaaggattttatgataatattgggtttatttaattaatttaggataatatttttaatttaatgttagttgataagtaattttaattttatttgtaattttaatttttttttgttatgtaatttaatttatttagtttttaggaattgggaagtggatattattggtagggggtattattttgtttgttataggtatatttgtttataagtttaaatcgagagtttgtatataggaggtaggaggtgtgataataattggataaaggtttttttggaatgataaaattttttttaaatatagggaggttttgcgatatgatatttggtaaattatttgagttttagtatttaaattttcgttaaaatggaaattattattttttgtttggtatgttaaatgaaatatttatgtaaacggatttagattagaggtttataaataggatttaagtttttgatgaattttgatgaggagggtgggcgaagtattttaaatgaaaatgagatagattgcgagattttcggagaggagtgagtgataagcgtttattcgtgtatgaagttggaggtagaaaattttagtaaaaggaatttttaagttttattgaagtttttgaattaaggtttgaaagtttagggttaaaaaaaaggtagtgaagaagtttattaagataatttttcgttaggtagtagatagtatttgaaatgtagtgggaaatttgtgaggtttttataggtaaggattaaattttatatttttattttaagatgtgttatagttgtttaattatttagtgattaaaaaagtgaattaaagatgttgttaagattaaaaaaataaaaattaatgtaggttttatcgagatttgaattcggatcgttggatttagagtttagagtgttaattattatattatggaatcgttacgtatgtgtagttgttttcggttgtttaatttttagagaatttcgtttttatttataaatttattatttataggcggtttcgtttggttttagcgagtcgttttcggtacggtagttcgagaaatgagtaagcggttattaagattatggtagttaggagttttaggatttagttttttttttgagttttttttagcgattaaagtttgaagttttacgtatttcgattttcgcgtatatcgtttttgttgggtttaggggcggggcgtcgttttcggaagtatttttttttaaaggttggggtttgtcggaaatggcgtagcggtagggaggggttttttatttagttcggtagttgaagttcggcgttcgggttatttttgtagcgacgttttttggttttatagatattattgttgttttcgttttttcgtttttcggtcgcgtaatgggtattcgcgacgacgagtacgattatttttttaaaggtgaggttatgggttttcgtattttatatagttttcgttcggggattcgggttattttcggtggattttcgtgtcggttatttttgtattgatataggttttttttagttttttttttttgtgcggtttcgttttttatttagtttagttttttttttttcgtttagataggggtttttattatatgtcgttttttgagcgatttttttataggttttcgttggttttagagtttttttttgcgtgttttttttttggcggattgtttttttttatatcgtcgaattttttttttcgggttttacggtttcgtcgttttttttattattttttttttcgggtgtagcgttttttttttttcggcgtatattttttttagttcgcgttttttttcgaagtttttttgacgggtttttcgttttttttttggttttgttttcggtgtagatttttattataggttttttttttatttgtttttttttttttttcgagcgagcgttttttttgtattttttttttatttggacggtcgtttttttaagttttttttatttcgggtttaggatttcgtaaaatttgagcgggttaagggttttcgtttttatttttcgtttcgcggttttcgcggtttttaattttttttgatcgtttttttttttattttttatttggtaattttttttattttttttttttaaatcgtgtttagagtttttttgttttcgttgcgatttgggtggtgggagggagggtaagagggatcgtttattatttattcgcgtatttgtcgtagtgattcggtaggttgatattattttttatttagttttttttttttttgttttttttatttagtggtatttaattcgggataattttttattcggttcgcgagatgaggttgcggatgggtggtggttgttatttttgttagatttgaaggtttggtttttgagtaggaaaggttgtgcgttgtataaatattagtttgttttatttttatgaattggttgttttttgttgtaacgttgggaggatttaataggaagggaagagttttagttagttatatattttttttaaaaggttgggggtgggaggaagttgtgtgtttttttggttatattaaatatttattataagatacggaaatatgtagtgtttttggatagaatatattggagggttagggttggttagaaagaattgtttattggttgagttcggaaggaattcggtttttttttttaattaacgaagataaagggtatattttttaatgagaagagagtatagtagatgttttttttgtttagtgaatgtatttttattttgatgttttttttttgtttttgaattgggaaggtagttattagtagtgtgtcgaataaagattattattattgaggaagaagttattgttattaaagttttattgtggagggtggagttttaagagtgttaagtatggtgattgtttttgtttttgttattgggtgttaagaatgattgattaaattaagtaggaaagatttttttgtttttttaatattttgtaaattttgttatattaattagtttgttgttatatttttattattttttatttttttgatttagaatattttattgtatagggtgaatatttttggtatttattttttttttttatattggaaagtatttttagggtatttagtttattttataaatataaaattgaggtttggattataaaaagtatatgatagtatattttttgtcgaaggtatttgagatgatgtgaaattatttgaattttttgagattttggggttaaaggttaggtttgtgttttgaaatatggtataatggtagtgtgtttttataaaggttgtttttgaagtaattaatttagaataagatagatcgttagggtattttttttgtttggtttgaatttgaatgttggttatataaggtttttttattttttaataaagaatattaaatattttgaattggtttaaagtattttaattttttgattagattatttttttagtaataattgagagtattgagttttggaattacgtagatttcggtttagattttgatttaggttttatatttattttatgattttggaaaagttaatttttttgagttttagttttttattttataaaaaggaaaatatttgttttttaagattgtgagaattaaataatgagattgttcgtaaaattttaattatgaggatttaataaatggtaataatgtgaaagaagttattgtggttttgttagttttttttttttttttttttttttttttttggaaatagggtttcgttttgttttttaggttggagtgtagtggtataattaaggtttattgtagtttcggtttttttaggtttaggtgatttttcgattttagtttttttagttattttttagtttttaggagtagttgagattataggagcgcgttattacgttcggttagttttttgtttttttgtaaagatagggttttgttatgttgtttaggttggtttcgtatttttggatttaagtaatttattttttttagtttttttaagtgttgggattataggcgtgagttattgtgtttggtttttgttagttttttgaattttaaatgtaggtttaattataagagtatttaaatattattaaagaaaataaaattaggaatttcgaatgtattttatgtttttatgggttatggttttattttgttgtgtattttgttgtttaagatagggtgttaaaaattttgttaaggaggatttttattttttttttttttttttgagatggtatttcgtttttgttttttaggttggagtgtaatgacgcgatttcggtttattgtaatttttgttttttgggtttaagcgatttttttgttttagtttttcgagtagttgggattataggtatggattattatattcggttaattttgtatttttagtagagacggggtttttttatgttggttaggttggtttcgaatttttgattttaggtgattcgttcgtttgggttttttaaagtgttgggattattggtgtgagttatcgtgtttggttagatttttatttttttaaagtttttataggatatgagttatttttttttttttttttttaattttaatgttgattatttagttaattttttatttatataagtattttattttaaagtgaagtaagaatgattttattttaaaatggttttattgtatagagatttatttattgagatggattgtagttgtttttatttagaaggtttatttagtaaatgtaatagttgagggaattggagttagtttgtaattaattagtttaaaataaagggatattttgattaataggggatggagtggtttaaataggaatgtaatgtggggcgagtaggataattattttaaattatgtgtttgtttttgaatagtaatttttatttaagtttaatagtgagatttttggtgggagggaattagttttattttatttaaagttgattttttatttttaaaattttaattttttaagtatttacgaataatgtggttaaggttttgtgggatataagtaagtattaattatgatttttgtttataaatattgtgtggtagatattaatttatagttagattttttgaaaatatttggatatatagtttattgtttaagatattttttttttaattatattggaggttagtagtaattaattattagttgattgttagtagaaattattataggaattttgttgttttgtattttggtagtagttttttttttataagttttggttgagtaatttagattttgttgaatttggaaaaatttgtttagatttgagttttattgtatgtattatatttatatttatatttatatatatatattttttgaggtagggtttttttttgttgtttagtttggagtgttatggtatagttatagtttattgtagttttaaatttttgtgtttaagaaatttttttgttttagttttttaagtagttgtaattataaatgtgttttattatgtttggttatttttttttttttaagattattttatttatagaaataaaatttttttttttgtagagatagggtttttttacgttgtttaggttggttttaaatttttgggtttaagggatttttttattttggttttttagagtgttgagattataggtatgagttattgtgttttgttttgaacgtattgtatattaaaaatttttgaggaggttggattatgaatatagttgaaagaatagaaatgtttttaaatttatgaaaattagaatgaaaattattagttatttttttacgtggtaatttttagggttgaggtattgtttttgatgaattatattttagtttagtaaattagtttgtaagagaaagtataaaattaaatgtggttgaagaggtagaaatttttaatggataattaatatgtatattttgtttttatgtatttagtagtttgatatttagtattaggtatttgcgatgatatttaaatatagtagatgtttagttgataatttttttttttttttttgagatggagttttatttttgttgtttaggttggagtgtaatggcgcgattttagtttattgcgattttagtttattgtaattttcgtttttcgttttaagtaatttttttgtttcggttttttgagtagttgggattacgggtatgcgttattatatttggttaattttgtgtttttagtagagatgaggtttttttatgttggttaggttggttttaaattttcgattttaggtgatttattttttttggttttttaaagtgttgggattataggtgtgagttattacgttcggtttagttgagataattttttaaaatatttatgaattttgagttatttttagattagagtgttttttttttgtagtgttaatattaattggttatattaagagaatatttgtaattttagtattttgggaggttaaagcgagtggattttttgagtttcggagtttgagatttagtttgggtaatatggtaaaattttatttttatagaaaatataaaaaattagttgagcgtgttggtatgtgtttgtagttttagttattagggaggttgaggtgggaggattttttgagtttgggaggtttaggttgtagtgggttttgtttgtgtcgtggtattttagtttgggcgatagtgagattttgttttaaaaaaagaaagaaagaaagaaagtgttggaagttttttttttgagataagttttggttttattttttcggttagagtatagtggtgtatagtttaggtttattataatttttgttttttaggtttaagttatttgtttattttagttttttgagtagttgggattataggtatgtattatcgtgtttgtttaatttttttgtttgtatttatttatgtattttttgtgtatttttttgtatttaaatttttttttttgtataagtgatttaaaggttatttttttagtaaatatttagttttttgtattaagaggtaatagtgaatgtattttattaataatagattattaattgaaattgagatttgattttatatttagaatggtggattttggaaattagtatattaattaattattttataaaattgaaagtgtattgtttttgtatattattttaataattttgatatttttttttgatattaaataaaagtatgtatgtgtttgttatagtatttttgatattttttagttgattttttagttagaaataattattttttgtgttgtattggatttattgttttttgaatgattttttgttgaattagttgattgagaaagttagaaagatatgtatttgataatgtattttgtttaagattgtttagaggttagtttatatttatttttgtggtaaggagggaatgtataatggattttttttgttttttgattagaatgtagtgagtttttagtttttattattttttttattcgtattattattttagtttttttagtaaggaatggttttattttttggttttatttttgtatgtttgattttttagttttgatgtttaaattaattagttagtttagataagaagaagttttagtagttaaaagtaggaacgaatgtaatgttttttgaaatgttgatattaatttttataaaggaaaaaatatttagtttagattttataaacgtgtgaatttattttgaattttaaatttagatagaaaatgttttaaaataatttaattgtttgtttttttattgtttttgaaatttttaagcgtaatattattttgagtgaaaaagaatttttatgtatttagttagtaaataaattgttgtttatagaaattataggaagtaaatttatttaattaagatttatttttaaaaaaattatggagttataagtgaaagtatatgttttttttgttttgttgtattttattttatttatttttttaagatagagttttagtgtgtcgtttaggttggagtgtagtgatataatttcggtttattgtaatttttgtttttcgggtttaagttatttttatgttttaggtttataagtagttgggattatatgcgtttattattatatttggttaatttttgtatttttatagagatggggtttttattatgttggttaggttagtttcgaatttttggcgttaagtaattcgtttattttggttttttaaaatgttgggattataggtgtgagttattatattcggtatttgttttggttttgatttatagtatgttagaattattagttttttaatattttttgtttatttgtagtggtttgggtttttttggtagaggggtttttaattttgaattaatttgataaatgtaattattaaaggttattttagtttttgtgatttgtatggtgatgtttataaattttatgttttatatgttaaatgttttttattttgtttaggttttagttttgaggttatatttagtttttgatgaaacgaagtatatttattttgtttttttttatttattaatagtttttgttgtttttatttttgatatattatattttaatattataaattatttatttagtttaggatttatttttgaagttgttattttttaaagtagtaagattggtatagtattgacggtaattaatgtttgttattaatgttaagggtatttgtgattaaaattgtatgtttaagatagggtatcgtatttgtgttaagtagatgatatgtggaagttatgtaggtagaaataggttgaaaagaataaatcggttttattgattggtaattggttaagaatatgttgtttaattttttatttttatttttttttaaaagttatatattttattttttttgttttatttattttgaagttaaattttattttgttgaaagtatagtggtgttttgaatatgtttgttttatttatttgatattgaattttttgtttttttagt

SEQ ID NO: 382 - DNA, 12578 bp, Artificial Sequence
  chemically treated genomic DNA (Homo sapiens)
attggaaagataaagaatttaatgttagatgaatgaggtaaatatatttagaatattattatgtttttaatagaatgaagtttggttttagagtaaataaagtaagaaaaataaggtatatgatttttaaaaaggaatgggggtagggggttgaatagtatgtttttgattagttattaattaataaaatcgatttattttttttaatttgtttttatttgtatgatttttatatattatttgtttagtatagatacggtattttgttttaaatatgtagttttaattatagatgtttttggtattgatgataggtattaattatcgttaatgttatgttaattttattattttagaagataataattttaaagataaattttaaattaaatgaataatttatgatattaaaatgtaatgtattagaaatgaaaataataaaggttgttagtgggtagggaaggataaaatgaatatatttcgttttattaaagattgggtgtgattttaggattgagatttaggtaaaatgaaaaatatttaatatatgaggtatagggtttataaatattattatatagattatagaaattaaaatgatttttaatagttgtatttattagattggtttaaagttagagatttttttgttaaaaaaatttaagttattatagataaatagggggtattaggaaattaataattttgatatattgtgagttaaaattaaagtaagtgtcgggtgtggtggtttatatttgtaattttagtattttggaaggttaaggtgggcggattgtttgacgttaagagttcgagattagtttggttaatatggtgaaaattttatttttataaaaatataaaaattagttaggtgtggtggtgggcgtatgtaattttaattatttgtgggtttgaggtatgagaatagtttgaattcgggaagtagaggttgtagtgggtcgagattgtgttattgtattttagtttgggcgatatattgagattttgttttaaaaaaataaataaaataaaatataataaagtaaggagggtatatatttttatttatgattttatgatttttttgaaaataggttttgattagatgaatttgttttttgtgatttttataggtagtagtttatttattaattagatatatggagatttttttttatttaaagtggtattacgtttaagaattttaaaaataatggagaaataggtagttaagttgttttaaaatattttttatttgaatttaaagtttaaaatgagtttatacgtttatagaatttgagttagatatttttttttttgtaaaaattggtattagtattttaggaaatattatattcgtttttatttttgattattaagatttttttttatttaaattagttaattgatttagatattaggattagaaaattaaatatataaaaataaggttaaggagtaagattattttttattaaagagattgggatggtggtacgagtggaaagaatggtaaaaattgagagtttattgtattttggttagagggtaaagagagtttattatatattttttttttgttataggagtggatataagttagtttttggatagttttggatagagtatattattaaatgtatatttttttggtttttttagttagttgatttagtaagaaattatttaggaggtagtgaatttaatgtagtataaagaatggttatttttaattagagagttaattagagggtgttaaagatgttgtggtaaatatatatatgtttttatttgatattagaagaaaatgttaaagttattaaagtgatgtataaaagtaatgtatttttaattttataggatggttagttgatatattagtttttaaggtttattattttggatatgaagttaaattttagttttagttaatagtttattattaataggatatatttattgttgttttttagtataaaaggttggatgtttgttaaggaaatggtttttgaattatttatataaaaaaaaaaatttaaatataaaaaaatatataaaaaatatatgaataaatataaataaaaaaattagataggtacggtggtgtatgtttgtagttttaattatttaggaggttgaggtgggtaaatggtttgagtttgggaggtagaggttgtggtgagtttggattgtgtattattgtattttagtcgggggagtagagttagaatttgttttaaaaaaaaaatttttagtattttttttttttttttttttttttgagatagggttttattgtcgtttaggttggagtgttacggtataagtagagtttattgtagtttagattttttaggtttagaggatttttttattttagtttttttagtagttggaattataggtatatgttaatacgtttagttaattttttgtattttttgtagagatggggttttgttatgttgtttaggttgggttttaaatttcggggtttaaaagatttattcgttttggttttttaaagtattgggattataggtatttttttaatgtaattaattaatgttaatattataaaaaaaaagtattttaatttgaaaataatttaaaatttatgaatgttttaaaaagttattttaattaggtcgggcgtggtggtttatatttgtaattttagtattttggaaggttaaggagggtggattatttgaggtcgggagtttgagattagtttgattaatatggagaaattttatttttattaaaaatataaaattagttaggtgtggtggcgtatgttcgtagttttagttatttaggaggtcgaagtaggagaattgtttgaagcgggaggcggaggttgtagtaagttgaaatcgtagtaagttgaaatcgcgttattgtattttagtttgggtaataagagtgaaattttattttaaaaaaaaaaaaaaaagttattaattagatatttgttgtatttgagtattatcgtaaatatttaatattgaatattaagttgttaaatgtataaaagtagaatatatatattaattatttattgaaaatttttgtttttttaattatatttagttttatatttttttttgtaaattaatttattggattaaaatataatttattaaagatagtattttaattttaaaagttattacgtgagagaataattggtaatttttattttagtttttataaatttggagatatttttatttttttaattatatttatagtttaatttttttaaaagtttttaatatataatgcgtttaaggtaggatatagtggtttatgtttgtaattttagtattttgagaggttaaggtgggaggattttttgagtttaggagtttgagattagtttgggtaacgtagggagattttatttttataaaaaagaaaattttatttttgtaagtgggatagttttaaaaaaaaaaaaatagttaggtatggtggagtatatttgtagttgtagttatttgggaggttgaggtaggaggattttttgagtataggaatttgaggttgtagtgggttatgattgtgttatggtattttagattgggtaatagagggagattttgttttaaaaaatatatatatatagatatagatatagatataatgtatataataaggtttaagtttagataagtttttttagatttagtagaatttgagttgtttaattaaaatttgtgaaagaaaaattattattaagatgtaagatagtaaagtttttatgataatttttattgataattagttgatggttaattattattgatttttaatgtgattgaaaagaaaatgttttaagtaatagattatgtatttagatatttttagaaaatttaattgtggattggtgtttattatataatatttgtaaatagaaattatgattgatgtttatttatgttttatagggttttaattatattgttcgtaaatatttaaggaattaaagttttaaaaataaaaagttaattttaaataaaataaaattaatttttttttattaaaagttttattattgggtttaaataaaggttattgtttaagaataaatatataatttagaataattgttttgttcgttttatattatatttttatttagattattttattttttattaattaaaatatttttttattttgaattggttagttataaattaattttaatttttttaattattgtatttgttaggtaaattttttaagtagaaatagttgtagtttattttagtgaataaatttttgtataataaagttattttgaaataaaattatttttgttttattttaaagtaggatatttgtataaataagaaattggttaaataattagtattgaagttaaaaaagaaaaagaaaaagtgatttatattttgtaagagttttaaaaaagtagaaatttggttaggtacggtggtttatattagtaattttagtattttgggaggtttaggcgggcggattatttgaggttaggagttcgagattagtttgattaatatggagaaatttcgtttttattagaaatataaaattagtcgggtgtggtggtttatgtttgtaattttagttattcgggagattgaggtaggaaaatcgtttgaatttaggaagtagaggttgtaatgagtcgagatcgcgttattgtattttaatttgggaaataagagcgaaatattattttaaaaaaaaaaaaaaaaagtagaaattttttttagtagaatttttaatattttattttaaatagtaaaatgtataataaaatgaaattataatttatggaaatataaaatgtattcgaagtttttagttttattttttttaataatatttaaatgtttttgtagttgaatttatatttaaggtttaaaaaattgataaaggttaggtatagtggtttacgtttataattttagtatttggggaggttgaggaaggtggattgtttaagtttaggagtgcgagattagtttgggtaatatggtaaaattttgtttttataaaaaaataaaaaattagtcgggcgtggtggcgcgtttttgtagttttagttatttttaggagttagagagtagttagggaggttgaggtcggggggttatttgagtttgaggaggtcgagattgtagtgagttttgattgtgttattgtattttagtttgggggatagagcgagattttgtttttaaaaaaaaaaaaaaaaaaaaaaaaaaaaaattgataaaattatagtaattttttttatattattattatttattgagtttttatggttaaaattttacgaatagttttattatttaatttttataattttaagaggtaggtatttttttttttataaagtagagaattgagatttagaaaagttaatttttttaaggttataaagtaaatataagatttgagttaggatttaaatcgaggtttacgtgattttaaagtttagtgtttttaattgttgttagaaggatggtttaattaaaaagttaaaatattttaggttaatttagaatatttaatattttttgttaaaaaataaaaggattttgtataattaatatttaagtttaaattaaataggagaaatattttgacggtttattttgttttgaattaattattttaaagataatttttataaaagtatattattattatattatattttaaaatataaatttaatttttaattttaaagttttaagagatttaaatagttttatattattttagatattttcggtaaaaggtatgttgttatatattttttgtaatttaggttttagttttgtatttgtaaaatgaattaagtattttgaaagtattttttagtatggagggggagggtggatattaaaagtatttattttatatagtagaatattttgagttagaggagtaagagatgataagagtataatagtagattagttagtataataagatttgtaaagtattgggaaagtaaagaaattttttttgtttggtttagttaattatttttagtatttaatggtaaagatagaaatagttattatgtttaatatttttgaaattttattttttatagtaaagttttaatagtaatggttttttttttagtggtaatgatttttgttcggtatattattgatggttatttttttaatttaggagtagagaaagagtattagagtgagagtgtatttattgaataaaaaaagtatttattgtattttttttttattgaaaaatgtattttttattttcgttgattaaaaaaaaaaatcggatttttttcggatttaattaataagtaattttttttaattaattttgattttttaatatgttttgtttaagggtattatatgttttcgtattttataataaatatttaatgtaattaaaagagtatataatttttttttatttttaattttttgggaaaggtatgtggttaattagggtttttttttttttgttggatttttttagcgttgtagtaggaagtaattagtttatagagataaagtaagttagtatttgtgtagcgtataattttttttgtttaggaattaggtttttaggtttggtaaggataatagttattatttattcgtaattttatttcgcgaatcgagtaaagagttatttcgggttgggtgttattgagtagggagggtaagaaaagaaaaggttaggtgggaagtaatgttagtttgtcgggttattgcgataagtgcgcgagtgggtgatgggcgattttttttatttttttttttattatttaggtcgtaacggagataagggagttttaaatacgatttggggagggaaggtagagagagttgttaaatggggagtgggagagggagcggttagagaaggttaaggatcgcgagaatcgcggggcggagggtgggggcggaggtttttggttcgtttagattttacggggttttggattcgggatgggagaagtttagaggggcggtcgtttaagtggaggggagatatagaagagacgttcgttcgaggggggaaagagggtagataagaaaaagatttgtaatgggagtttgtatcgaaggtaaggttaagagggaagcgaagaattcgttagaggggtttcgggagaggacgcgagttgggaagggtgtacgtcgagggggagggggcgttatattcgaaaagagagatggtgggaggagcggcggggtcgtagaattcggggaaaggaattcgacgatgtgggagaaggtagttcgttaggggaaggatacgtagggaggggttttgaggttagcgaaggtttatggagaggtcgtttagagagcggtatgtgatggggatttttgtttgagcgggggagaagaggttgagttgggtaggagacggaatcgtataaaaaggaagggttgagggaggtttatattagtgtaggggtggtcggtacgagggtttatcgggagtggttcgggttttcgaacgaggattgtgtagagtgcgagagtttatggttttatttttaaagaggtagtcgtattcgtcgtcgcgggtgtttattgcgcggtcgaggagcgaaagggcgggagtagtagtggtatttgtgggattagggggcgtcgttgtaggggtaattcgagcgtcgagttttaattgtcggattgggtgaagagtttttttttgtcgttgcgttattttcggtaggttttagtttttaaggggaagtattttcgggggcggcgtttcgtttttgagtttaataagggcggtgtgcgcgagagtcgagatgcgtggggttttaagttttagtcgttaaaggaggtttaaaggggaaattgagttttggaatttttagttattatagttttagtggtcgtttgtttatttttcgagttatcgtgtcggaagcggttcgttggaattaggcgggatcgtttgtgagtggtgggtttgtggatgggggcggggttttttgaggattagatagtcgaaggtagttatatatgcgtggcggttttatggtgtaatggttagtattttggattttgaatttagcgattcgagtttaaatttcggtggaatttgtattggtttttgtttttttaattttgataatatttttaatttatttttttggttattaagtaattgaataattatgatatattttaagatggagatgtaaaatttaatttttgtttatgaagattttataaattttttattgtattttaggtgttatttgttatttggcggggggttgttttaatgagtttttttattgttttttttttaattttgggtttttaagttttgatttaaaagttttagtgaaatttgaaaattttttttgttggaattttttatttttagttttatgtacgggtaggcgtttgttatttattttttttcggaaatttcgtaatttattttatttttatttagagtatttcgtttattttttttattaagatttattaagaatttgagttttatttgtaggtttttaatttaagttcgtttatataagtattttatttaatatgttaagtaaaggatggtaatttttattttagcggaagtttggatattaagatttaagtgatttgttagatattatgtcgtagggtttttttgtatttgaagagaattttgttattttagaaaagtttttatttaattattgttatattttttattttttatatgtaaattttcgatttagatttgtgggtaagtatgtttataataagtagaataatgttttttgttaatgatgtttattttttaatttttggagattgaataggttaggttatatggtaaaggggaattgaggttatagatgaaattaaggttgtttattagttgatattaaattagggatattattttggattagttgggtgggtttagtgttgttataaggtttttaaaagtagaaaatgggttgggtacggtggtttaggttttaattttagtattttgggaggttaaggtgggtggattatttgaggttaagagtttaagattagtttggttaataaggtgaaattttgtcgttattaaaatataaaaaattagtttggcgtggtggtgggtgtttgtagttttagttattttggaggtttaggtatgagaattgttggaattcgggaagcggaggttgtagtgagttgatattacgttattgtattttagtttgggtaatagagagagattcgtttttaaaaaaaaaaaaaaaaaaagtggaaaatggaggtagaagaggttagagtgatgtgatttgaaaagattttaatttgtttttgttggttttgaagatggaggaaagggtttaggagtttaggaatttggaggtttttagaagttgggaaaggtatggaaatagatttttttataaggtttttagaaggaatatagttttgttgataatttgattttagtttaatgagatatttgttagatttgtgatttatagaattttaagtaataaatttgtgttgttttatgttattaagtttgtggtaatttgttatagaagtaatagaaaataaatatagtgttaattttcgtgttttttttattgttataaagtgatagtaagtttatttaaggttttgtaattttagttatttaggaggttgaggtaggagaattgtttgaattaaggagatggaggttgtagagagtcgagattgcgttattgtattttagtttggtgatagagtaagattttttaaaaaaaaaaaaaagaatattaatgtttaatttagttttaagtatgattaataaaaatggtgtgttggttaatattgagtgttagtttgattgaattgaaggatttaaagtattgattttggttgtgtttgtgagggtgtttttaaagtagaaatagttgagttaatgggttgggaaaggtagatttatttttaattcgggtgggtattatttaattagttgttagcgaatataaagtaggtagaaaaatatgaaaaggttaaattggtttagttttttagtttatatttttttttcgtgttggatgttttttgttttcgaatattggattgtaagttttttagttttgagattcgtattggtttttttgttttttagtttgtagaaggtttattgtaggattttgtgattatgtgatttaatattatttaataaattgttttttatatatgtgtttattttattagttttgtttttttagagaattttgattagtatagttggtaagaaaattaaaaggaattttttagtaaaaagtttggaattataaatttagaaatgtttagttttagattatgggggagaagtaagatttgaaatatattttattttttatatttggggaggtaattttatatgtttgttaaaaataaagtgaggattgataagtttgtgtttatattttagtttagttatttattaaagttgtgttaattttaataatttaattttgttgaattttagttttttatttgtaaaatggggataaataggaagaaggaattaagtaataatgtatagttgttaatattatgtatggtatataataaatatttatgaatgtattgatttttttttttttttttttttgagttagggttttgttgcgttatttaggttggagtgtagtagtgcgatgttagtttacggtaatttttatatgttgggtttaagtaatttttttatttttatttttattttttaagtagttgggattataggtgtgcgttatcgtatttggttaatttttgtattatttgtttatgttattatgtttagttaatttttgtatttttagtagagatagggttttattatattggttaggttggtttcgaatttttgatttcgtgattcgtttattttggttttttaaagagttgggattataggtatgagttattgtattcggttaagttaaagattttataagttggaaagagttttaagagattatttgatttttttttttattttcgagcgggtaaaatatttttttatttagtagaggaagtatttagtgtttagaaagtttgaaagttattgaaggttttatagttagtaattatttttatgttgtaggatttattttatttttgttgtacgattatttattagtaattttgatttttttagaaaattgtaatgaaagttaaaaagagtaaattatatgattattggttgttttttttttattatatattttgaatttttttagttttaattatattttgatgtattatttataagagttatttggttataggtttttggagaaaattttggaattttaaaaagtttgttttatttttttaggaaatatattgtatagttttaatttattttttacgtgtttattagggatatagaaggtaatttggattttttttttaaattgagatataatttatttatagtaaagtgtataatttttttttttttttttttttagatagagtttcgttttgttagttaggttggagtgtagtgatatagtttcggtttattgtaattttcgttttttaggtttaagaaatttttttgttttagtttttcgagtagttgggattataggcgtttgttattacgtttggttaatttttgtatttttagtagagattgtgttttattatgttggttaggttggttttaaatttttgattttatgtaatttgtttttttcggttttttaaagtgttgggattataggtatgagttatcgtgtttggtttttttttttttattttattttaagatggagttttgtttttgttgtttaggttggagtgtattggtataatttcggaagtttattgtaatttttgttttttaggtttaaataatttttttgttttagttttttgagtaattgggattataggcgtttatttttacgttcgggtgatttttgtatttttagtagagatggggttttattatgttggttaggttagtttcgaatttttgattttaggtgatgcgtttgtttcggttttttaaagtgttgggattataggcgcgagttatcgagtttggttaaagtgtataatttttaagtggataatttaaaatatttttatatgtgtatgtattatgtaatattatttagtttaatatatagattgttattagtatttttgaagaatttttgtgttttatattagttagtattttttagggataattattgttttgatttttattattataatttagttttgtttgtttttgaattttatattaatagaattagatagtatgtattgtatttgtttttttttatttaatattatgtttgtgaaattattgattatattttaaagatgtaatttattttttggtttaagtttttagggaatttgttaaaattaggtatatattatgttagttatatataggtatgtatagtttaaaaataggtagttgagaaaagaatttttttaaatgattaaaatagaataattaatttatgttgtttttgttgttttttatttttgttttaattttat

SEQ ID NO: 383 - DNA, 6022 bp, Artificial Sequence
  chemically treated genomic DNA (Homo sapiens)
ttttttaaaattagatttgattatgttatgttatttaaacgttttaaatggttttttattatttatagaataaaatttaaatttaaagttttattttagttttattttttttttttttttttttttatgtattttataatattttataattattttggataatttgttttgaatatattgtaattgtaattgtaaatggagtttatttatagttttatgtttttatttatgtttttattgcgtggtatttgtttttttagtttaaaggaagttaaataaagtttaagtattttttatttgtttttttaaaattttttttttttagtttttatttagtttgtacgtaggaaagttgatttgaatggatagtattagtggttattttgttttttggtttttgattgttttgggttgagaggtagaagagttgggttaggattatttagttttttggttgtttttttattattgatattttttttttaggtttaagtgatttttttgttttagttttttaagtagttgggattataggtatttgttattacgtttggttaatttttgtgtttttaatagaaacggggttttgttatgttggttaggttggttttaaatttttgattttaggttatacgtacgttttggttttttaaagtgttgggattataggtatgaattatcgtatttagttagttttgttaattttgtttatttttttaaaaaatagttttagttttatttatttttttttttttttttgtttttttggtttttattttattttggttttaatttttattattttatttttttttttaattttgggtttagtttgttattttttttttagtttgttgtagtataaatttaggttgtttattggagatttttttttttttttaatggaggtatttatcgttgtaaattttttttttaaaattgttttttttgaattttttaaaattttgatgtgttgtattttatttttatgtattttaagatttaaaaaaaattttttttgattttatttggtttattggttgtttaggattatgttattaaatttttatagatttgtgaattttttagttttttttttgttattgatttttagttatatatcggtgtggttagaaaagataattaatatgatttcgatcgttttaaatttgttgagatttgttttgtggtttattgtatgttttattcggaagaatattttacgtgcgtttgagaagaatgtatatttttttttagttggatagaaagttttgtatgtgtttgttaattttatttgttttataatgttgtttagatttgttatttttttattgattttttatttggatgatttgtttattgttgaaaatagggtatttaaattttttattattattgtatggttatttatttttttttttagtttggttaatatttgttttatatatttaggtgttttgatgttgggtgtttatatgtttataattgttatatttgtttgatgaatttatttttttgttattatataattatttttttagttttttgggattgttttttatttgaagtttattttgatataagtatagttatttttgtttttttttggtttttatttgtatgaaatatttttttttatttttttatttttagtttgtttgtttttaaatttaaagtaatttttttttaggtagtaaataattgtattttattttttatatatattttgttattttatgttttttattttttatttttatttttatttttttttttttgagatggagtttcgttttgtcgtttaggttggagtgtagtggcgcgattttggtttattgtaattttcgtttttcgggtttaagtaatttttatgttttagtttttttagtagttgggattataggtgttttttattatgtttggttaatttttttgtatttttagtagagatggagttttattatattggttaggttggttttgaatttttgattttaagtgatttgttcgttttggttttttaaagtgttaggattataggtttgagttatcgtgtttaatttttatgttttttagttggagaatgtaatatatttatatttaaagtaattatcgatagatagggatttattatgttattttgtttattattttttatttggtagttcgttttttttttttttttttttttggtgtgttgagttgttttttaagtagatgattattattttgtttgttttgagtttttatgttattgttttttaaattttagaagttttggggttttgaatttttgagattttttggagattttgtgatgagtttttttttggatttttttattggtagataaagagttagtttttcgaggtttgttaattagttatttttagtttatttattttgtagtttttattattttgttgtttttattatttgatttttgtttttgtgagtttatgtttaaaagaaataaaatattttttattgttatattagtgagattttgggaggtagtagaattatatgtatatgttgagtatgttatttttattttgaagtttgaaagatattttagaaagtttttaatataaaagtatttaaaaaaggttttgttgttttaagtagattatgaaaattggtattgttataattttatttgttatttaaattatagttttagagttaggaatgttagtattatttgggtattatttgggtgtttattaggagaaatatagatttttgagttttttataggattttttttgtttgtttttgtttttttgagacggagttttattttgttatttaagttggagtgtattggtgcgatttcggtttattgtaagtttcgtttttcgggtttacggtatttttttgttttagtttttcgggtagttgggattataggcgttcgttattatatttggttaatttttttgtatttttagtagagacggggttttatcgtgttagttaggatggtttcgatttttttttataggaatattgaattagaattagtattttgaaagatttttaggagatttttatatattttgatggttgagaagtgttaatatgaatttgtaattaaaggaagttaattttaatgaattttaatttgggatttaaaaatttggatatatttttttattaaattgtttttaaaattttcgaggttgttgtgtgatataaaaaagaaagaggtgtatttttatgagattttcgttaggtgtgaaacgaaaattttattttatttattatgagaagagatgttagattggttgtgtttagattttttttagttgtttatagtttttgaggtcggtggtggtttttttagattggatagattgagtttttagttatacgttgagttgttataatgaaagcgtagttttttttagaggtaagggatagattgattagttttatgttcgatattttatttaataatttataagtgtttaataagtgattgtggggtgaatgaataaaaaataagatataatttttgtttttaagattgttataaagtaatagtaaagattaagaaataaattgaataattagtatataggggtgattatttttagaaatagtaagtatagggaaggtgtatttagtttagtattgttggtataaggagttaaggagttgatttttttagtgaatagaatttggtggatttatagtagtagtttttatattttagtgtgtattagaattatttggagtgtttgttgaattatagatatttgtgttttatttttagaatttttgatttagttgggtgggtttaagaatgtgtaaatttaataagtttttagaagatgttataatattggttttggaattatagtttgagaattatttaatttagcgaattataaaacgtattgatggttggattttagtagtttataggaaggaggcggtgatattgaaggtagaagtttaaggagtagggattttattgtggagattgtggggagttattaataggagagtgatggatttttatttgttttttggaaagattattttgggtgtggtgtggaggatggattagagttaagaatacgtggggattagaaaattaaataagtggtttattatagttatttaagaaataataaaaatttggagtaggagtaagaagatgaatatttttaggatttggtggttaattggaagtgggaggggtagagagggaggagttaatgagagttattagatttttggttgtgttgggattgtgtgatttaagatataggaagagaagtgggtttgaagtaaggttgtggagaaaagtaaaggaggtgagtacgggatatgttggatttgagatgttagtaagatatttgggtggatttttttgtaggtagttttatttatgaaattggaggttagttgtaaggtttggtaagtaatttagttttattttttttgttatttttatttgattttttatattgtttgtttggattaggtattgtatttgtaagtaataatatgaatataatttttaagggttttgagaatataaggtatttttttaagaaaataaatgttttattgttttgatttacggggtaggtgggcggaagaaagagttgaagtgtagagttttttaatattagaagaggttaataaagtcgttttttgagtggttagtcgaattggaatttggtaagtttgaaaggggtaaaaattatttgattggtttgtagtgttatatgataaatagttgagattaattagttggattgtgggtttttatagcgatgtttgttttgaaagttgatggagcgaattgtttttttaaagatttttttgaaaaattttttaagtaggttattttgattttaatatttttttttgttttaatattagataaaaagtaatttttttgaagaggatatgtgattggaagttgttaattgttgaagtattggtaattttagtttttaacgttttagaaaattataataagcggttttttattttgtaaaggtatggttttgtatttattttttttttttttggtagtggttttgagttttgttatgttaatttttatgcgtttaaattatgtgtaatataatatataatattattgtacgtattgtttttaaattaaagatttaatgatgtttattaaattttttgggattagtttgaaaagtgtatttttagtgattacggagtgggtatgaatattgatcgtatttttttttttttttttgtatttgaataaagaaatataggtttttatttttaggaaattgttgaatatgagagttgattaggaaattgaattattttgagagttttgtttattttttgagggttgtttgataaaaatttaagtttattggtgttttgtttttgatagtattaatagtttttgttttgttttgttttgttttttaaatttgagatagagttttgttttgtcgtttaggtttgagtgtagtggtataatttcgggttattgtaatttttgttttttaggattaagtgatttttttgttttagtattttgagtagttgggattttacgttattatgtttggttaatttttgtatttttagtagagatggggttttattatgttggttagtttgttttttaatttttgattttaagtgatttttttatttgggttttttaaagtgttgggattataggtatgagttatcgtgttcggtttaaaagtgttaatagttttaatggaggaatgtaagtgtgtgttttagtataaggtttattttttttgggaattaaatttgtttttaaattagtgttaattttgttaggtttgataagggtattgttatgtaaggaaatgtttatatattttagaaatacgaaatgaagtatgtcggagtgaaagatttgagtggtgagtgtgatgggagattttattatataattttatttttggatattgtattagtttattagagttgttataataaagtattataaattgggtggttttaaaattgt

SEQ ID NO: 384 - DNA, 6022 bp, Artificial Sequence
  chemically treated genomic DNA (Homo sapiens)
atagttttaaagttatttagtttatggtattttgttatggtagttttagtaaattaatataatatttagaagtagaattatataatgaaattttttattatatttattatttagattttttatttcggtatattttatttcgtatttttaaaatatatggatatttttttatataataatatttttattaaatttaatagaattaatattaatttaaaagtagatttaatttttagaagaaataaattttatattaaaatatatatttatatttttttattaaaattattaatatttttaggtcgggtacggtggtttatgtttgtaattttagtattttgggaggtttaggtgggaagattatttgaggttaggagttagaaagtaggttggttaatatggtgaaattttatttttattaaaaatataaaaattagttaggtatggtagcgtggggttttagttatttaggatgttgaggtaggagaattatttgattttgggaggtagaggttgtagtgattcgagattgtattattgtatttaagtttgggcgatagagtaagattttgttttaaatttaaaaaataaaataaaataaaataaaagttattaatattattaaaaataaaatattaataagtttgaatttttgttaaataatttttagaggataagtaagatttttagaataatttaattttttaattagtttttatatttaataattttttgaaagtaaaaatttatgtttttttatttaagtatagaaaagaaaggaagaatgcggttagtatttatatttatttcgtggttattgaaaatgtattttttaaattaattttaagaaatttagtagatattattaagtttttagtttaaaaatagtacgtgtaatggtattgtatgttatattgtatataatttaagcgtatgaaaattgatatgatagagtttaaaattattattaaaaaaaaaaaagataaatataaaattatatttttatagggtagagaatcgtttgttatgattttttaaaacgttagagattggagttattaatgttttaataattgataatttttaattatatgttttttttaggaaggttattttttgtttaatgttaagataaagagaaatgttaaagttagaatggtttatttaaaaagttttttaaaagagtttttggaaaagtagttcgttttattaatttttaaaataggtatcgttgtaaaaatttataatttagttaattagttttagttgtttgttatatggtattgtagattagttaagtgatttttgttttttttaagtttattaagttttagttcgattggttatttagagggcggttttattaattttttttggtgttagaagattttgtattttagttttttttttcgtttatttatttcgtgaattaaaatagtagaatatttgtttttttgagaaagtgttttgtatttttaaggtttttaaaggttatatttatattgttgtttataaatataatgtttgatttaaataaataatatgggggattaaatggaagtggtaggagggatggggttagattatttattagattttgtagttggtttttaattttataagtaaaattgtttataagggagtttatttagatattttgttggtattttaaatttagtatgtttcgtatttattttttttgtttttttttataattttgttttaaatttatttttttttttgtgttttgaattatataattttaatatagttagaaatttgatggtttttattaatttttttttttttgttttttttatttttaattggttattaagttttaaggatatttatttttttgtttttattttaagtttttattattttttagatggttataataaattatttatttggttttttggtttttacgtatttttgattttgatttattttttatattatatttaaagtgatttttttaaaaggtaaatgagagtttattatttttttgttaatggttttttataatttttataataaaatttttgttttttaagtttttgtttttagtattatcgttttttttttataagttgttagagtttagttattagtacgttttataattcgttaagttaagtggtttttaaattgtggttttaagattagtattatagtattttttaggaatttattagatttgtatatttttgggtttatttagttgaattagaaattttgaggatagggtataggtgtttgtggtttaataagtattttaggtgattttgatatatattaaagtgtgagagttgttgttgtaaatttattaagttttgtttattaagagaattagttttttggttttttgtgttagtaatgttgagttggatatattttttttgtgtttattgtttttagaaatggttatttttgtatgttaattatttaatttattttttggtttttgttgttgttttgtgataattttgaagataggggttgtattttgttttttgtttatttattttataattatttattgagtatttatgaattattgggtgaaatgtcggatatagaattaattaatttattttttgtttttaggagaagttacgtttttattatggtagtttaacgtgtgattgaagatttaatttgtttaatttaaaaaaattattatcggttttaagaattgtgggtaattaagaaaagtttgagtataattagtttgatatttttttttatggtaaatgaaatggaattttcgttttatatttgacgaaaattttatgaaaatgtattttttttttttttatattatatagtaatttcgagaattttgagaataatttagtaagaaaatgtatttagatttttaaattttagattaaaatttattagagttagttttttttaattataagtttatattagtattttttaattattaggatatataggaattttttagggattttttaaaatgttaattttgatttaatatttttgtagggggagatcgagattattttggttaatacggtgaaatttcgtttttattaaaaatataaaaaaattagttaggtgtggtggcgggcgtttgtagttttagttattcgggaggttgaggtaggagaatgtcgtgaattcgggaggcggagtttgtagtgggtcgagatcgtattaatgtattttagtttgggtgatagagtgagatttcgttttaaaaaaataaaaataaataaaaaaaattttgtagggggtttaggagtttgtattttttttagtaagtatttaggtgatgtttaggtaatattaatatttttaattttggaattataatttgaatagtaagtaaaattatgataatattaatttttatagtttgtttaaagtaataaaattttttttggatgtttttgtattgaaagttttttaaaatattttttagattttagaataaagatggtatgtttaatatgtatatgtggttttgttgttttttaaaattttattaatatagtaataaagaatgttttattttttttagatataaatttataaggataaagattaggtagtggaagtaataaaatggtagaagttatagagtagatggattagaggtaattgattagtagatttcggaaagttgattttttatttgttagtagggaaatttaagaaggaatttattatagaatttttagaaagttttagggatttagaattttaaaatttttggaatttgggggatagtaatatagggatttaaaatagatagaatggtggttatttgtttaaaaagtagtttagtatattaagagaagaagaaaagaaagaacgaattattaaatagaaaataatgaataaaatggtatagtaagtttttatttatcgataattattttaaatgtaaatgtattatattttttaattgaaagatatagaggttgggtacggtggtttaagtttgtaattttagtattttgggaggttaaggcgggtagattatttgaggttagaagtttaaaattagtttagttaatgtggtgaaattttatttttattaaaaatataaaaaaattagttaggtatggtggagggtatttgtgattttagttattagggaggttgaggtatgagaattgtttgaattcgggaggcggaggttgtagtgagttaagatcgcgttattgtattttagtttgggcgatagagcgagattttattttaaaaaaaaaaaaataaaaataaaaataaaaaataaaagatatagaatgatagaatatatataaaaaataagatataattatttgttgtttgaaagagagttgttttagatttaagggtagatagattggaagtaaagggatggaaaaaaatattttatgtaaatggaaattaaaagaaagtaggggtgattatatttatattagaatagattttaagtaaaaaatagttttaagagattaagaaggtagttatgtggtgataaggaggtgaatttattaagtagatataatagttgtaaatatgtaggtatttaatattaaagtatttaaatatataaagtaaatattaattaaattgaaaagagaaatagataattatataataatagtaagggatttgaatattttgtttttaataatgaatagattatttagatagaaaattaataaggaaatggtagatttgaataatattatagaataaatggaattaataggtatatatagaattttttatttaattagaggagaatatatattttttttaagcgtacgtggaatattttttcggatagaatatatagtaggttataaaataagttttaataaatttaagacgatcgaaattatattaattattttttttgattatatcgatatgtaattagaaattaataataggaagaaaattgaaaaatttataaatttgtggaaatttagtaatataattttgaatagttaatgggttaaataaaattaaaaggaattttttttaaattttgagatatatgaaaatagaatataatatattaaaattttaggggatttaggagaagtagttttaagagggaagtttatagcgataaatgtttttattaagaaaaaagaaagatttttagtaaataatttaagtttatattgtaataaattagaaaaaaggtaataaattaagtttaaaattagaagaaagaatgaaataataaaaattggagttaaaatgaaatagagattaaaaaaatagaaaagaaagaaaagatgaataaaattaagattgttttttgaaaaaataaataaaattgataaaattggttgggtgcggtggtttatgtttgtaattttagtattttgggaggttaaggcgtgcgtataatttgaggttaggagtttgagattagtttgattaatatggtaaaatttcgtttttattaaaaatataaaaattagttaggcgtggtggtaggtgtttgtaattttagttgtttgggaggttgaagtaggagaattatttgaatttgggaaggggatattaataatgaggagatagttagggaattaaataattttgatttaatttttttgttttttaatttaaaatagttagaagttagaaagtaaggtagttattgatgttgtttatttaggttagtttttttgcgtgtagattggataaaggttggaggagaagagttttggaagggtaaataggaaatatttggattttatttggttttttttaaattggggaaataaatattacgtaatgggaatatgagtgaaggtatagaattgtaaatgggttttatttatagttatagttatagtatatttaaggtagattgtttagagtagttatagagtgttgtaggatgtatggaagaagagaagaagaagggatgaggttggaatgagattttgaatttggattttattttgtaggtaatagggaattatttgaggcgtttgagtagtatgatataattaaatttgattttgaaaaa

SEQ ID NO: 385 - DNA, 6076 bp, Artificial Sequence
  chemically treated genomic DNA (Homo sapiens)
aggtataagttgtttaataaatgtttgttgaatgaataaattattgtgtaaattttttaaatttatttttattttgtattttaatttattttttttattgtttatagattattatattaaagtatatgtaaatattttaataaagtatagtgttttttttatagaataaatattttttgtttttttatgtgtattttaagggtaatttaaaattaattttatttttattaaggtaatatattttataatttaaaataaaattaaaatttatagtttttgtggaatagtgtagatcgttttttaagttttggttttaatttttataggtaaatatttgattttttagtagtttttgtatttttatatgtttaattggtttgtttattttgttatttttttatttagtaattttatatattatttattgatttttgttatgatgattgagggtttagttgttttttttgtatatatatatagatagtttttttttttgttattttttatatgtagttttattgtaggttagggttaatttttttgttggtatttttaatatttttattatgtttagatttgaataaagtggtattttattataatgtttttttttttttgtaattttttgttttttatggagttaataatatttttttaaaattagtttagtatatttcgtatttattgtatattatttataattgtttttgattgatttttaagattgtaatagagtgatttaattgtggtaataattttaaaaaattttcgtggtattatataatataagtttatttttagtttatgtggtagtttaatgtgtggtagttgaggtagttatgttatattttaatttaggtttatgattttttatttaggggtttttatgttttttaggggtttagagtttttcgttggtttttcgtatttgcgtattagtaagggaagaggggaagtgtggaggattttaggggttattttatgggtatattttggaagcgatgtatatgatttttgtttataatttatgaattagattttagtgatatgtttttttatttgtaaggggttaagaaatgaaatttagtgtggtgtttaggaaaaagagtagaatatggaatttggcgggtatttttcgttatttattgtatttttaaatgtatatgtgtattaaataatttattattttttttttattttttttttttttggagatatttttattgtaagttatttgtttatttttttttaggtttgttttatatttattgttttggagaatttattttattgttttttatgttgggtttgtatttttggggttttattttttttttttttttgatttataagtttgtttggggaattgttattttaaaatggtatataggatgtatattttttaagtttttgtatatttgaaaattttttaaaattaagtttggttgatagtttgttttgatatataattttaagtttaaaataattttatttaaaaaatgtgaaggtatttaaagaaatttttggatttattattgtttttgagaaatttaatgtaattttttttttttgtatgtgatttgttttatgtttttggaagatgttttaggtttttttttttatttttgtatttattttattttagaatgatatatttcgatgagtttaattatttgattaatttaaaggattgtttttttggacgtttagtgaaattttcgatttttaaagtttattatttttatttttggtattgtttttgtattgtttttaaattagtgtttttatttttttttgtatagaaagaagttttttttagagttttttgagatttttattagttagaatttttttttattttttgaaaattttttgtagttaaatagattttttaatttagttttttaatttatttgttagtttttttgtaaatgttgagtatatttttaattttaaaagattttttttttgttttgtatataaattttttttttatttattatttttaggagtagggtaaaaaggtatgtgtttagtttattttgttgaattataaattattttagtttattttttttagaaaataaatttttagttttttggaagttggattgagtagatggaggaatttatggttggttgattgtgtgatagtggggaagggaattttgggtttaagtattttaatatatagacgtataattaaatttttgtgtttattttattatttggtttttttttatgttgagatttttgttttttaggtttgagtttgtttaggttttgtaggaagaattggtttgttttttattataattttttttgtaggtatgtagtgtatagaattttttgtttttttaaattagttattacgtttgtatttgatttagttttttttaaaatttattataagtttatgtgttattttatttgtttatttgtttttgtgatttaataatatttaaaaaaatttatttatttttgtaataaagtagtttgaggagagatgaaatatatgtgataattttgttatttgtaattatatattattttatgtatattaatgtttattttagtgttatattgattgaattagatagatgttatgtttatttaagttatgttatataaattttaggtataggaagatgttattattattattattatgatatataatgttgttattttgtttttattggttttttattgttttttattttgttttatttttggttaaagtggtttttatggagtggttaagtaatattttttttatgtttttttatttttttttttttttggaatttttttttttagggaaggaaatgttttattattttttggtagtgttattatgtaatattattgaatttgagttttggaatttcggagataggattatatgtggtaagttattttaggagagttatttttgtaagagttggttttataaagtaggtgatatatttatttagggaaaggtggtaaggagagttattaataaatgtgtgtgttagatttttttatggtaggaattttttttagaagttgtagtgaggtagtataatatagtgattattgtgagttcggtatttaggattaatagatttgttttttattttttgaattttattattttggatagatttattgcgatttttttaattttagttattttattttgaaaatggagataataaatataatagacgttttgtttattttatagtaatgttgtgaaagttaaatgagatgaaattttattgtatataggaaataatagttattaggattaatgttagtagtgaatatatgaattagataaagaatatgggttattattgtatagtatagagggtgattttaagttaatgtgttaatagtggaaaagatttaaggtttttatgtttttttttttatttttgtttgggtttatggatatatattttttatatatttagatattgttgttaaatgtaaagtagatttattataaatatagattttaagtatatatattttgaaaatttataggttgagttttaaagatttttatgtagtagatttaaaataatttttaggaattggattttatttggggagaatggaatagattgttattaaaattataagtatagttaatatatttatagaatttattgtgttaggtacgttttatatatattattgatatgaagttaattttttataataatattatgaagatattattattatttttttttttaatttttaagaatattgaaggatataaaatagaatttttttaatagttttataatagaatagatagatttttatgagattaaaatgttttttttaatattttatttttttattagtttgttattgtttgttttgtgttttggtttgggttatttttttgtttttttttataagaaattttttgggagttgataatagtagtgttttttagattgtttttagggtatcgaataagaaataagttaagtaattaaaatttaagtagttattggtatttcgttgtttattaatatgaatgtaagatataggtttggaatttttaaattttgtttatagaggagtaaatcggttgttattataatgtatttaattttgtatttttatttttattattagtttgtaaattagggatgtttgaatgtgtttaaaatggaattttaagatgggtagttaggatttttgttttgtggacgaatttaatgtgtttagaatacggtatagtatatagtaggtgtttaataaatattggtttaatgttttcgtgtgtttattattttatttagtggtaatttattgatttttgaagtgattttaggaagtgaattagggttttgggaagtgaatttggatgttgtatattgattaatgtatttatacgaatatattttaatttttaaaatattaatttttttttaacgtttttttttatttttcgaggttattttttgttttttattcgtaatttttcgtttttattttttatagttaatgagatattttttcggaggagagaacgtaatgttagggttttagtttttatagcgttttgggttttttgaatgagagatattaaagaaaatatagaataaaaatgaataaaaatgagttcgttggtaaggttagaagttttatagtgtggagattttattttcgagaggagtgtgttttttattgtagtagttgagttattagtaagatttgtttgaggtgagtttcgtatattcgcgttgggatttgtagatacgttttttttttatataaattttatttagtttcgtcgtcgcggcggatttcgagggtggtgttattagttttgttattcgtagttttgacgggtaggggttgcggatcgttcggttttggatttattcggagttataggttggaggagataagtagttgttttcgtgtttatcgttttgtggagtagattttgtttttttgttgacggtggagttcgggagttttagggtttgggaaggggaaggaaatttttttgaaatttgatatttgttttttcggtaaggaaatttcgtaggttggtgagttgggaaggcgggttgttgttgttggaacgcgtttttatttattcgggtgttgtagcgtcggtttgcgtcgtgggaagtgaggtttttgtgtgtgtgtgtgtgtatgtgtgagtgcgtgtgtattttcgatcgcggtttttagtagaaatttttgtaaagaagatagtagtgttgtgtgttgtacggatggtatgggttaattcgatttggttttttttgagtgtttgtttattaaatagttggttattattaaaaaaagtaaaaagaaaaataaaaagtttaggtatagtaatgttaatttttttttatttgtattttaaaaaataattaaaataatgaataagaaaaagtatggatgatgatgtgtttagagttttattttaggaggagcgatttagtgaggtaagttaggagagtaataagatatttatatgtatttttttagatgaaatagttatagagattttaagagtattttttgttttttaattttttgttttgttattttcgaattttgatttaagtgttgtattaattagggtatatgtgtgtatgtgtgtttatttaattgattataataaattagtttttaagatttttttatttaatgtaatattaattaagtttttgaaaattattgaagtaggtgaattgtaagtagagattgtatttttaggaaaaagttgtgtttggttagagtttttatatttgtattatgttttgtgagttttttatgttaagatgtaaagttaagggtatgtaattttagttgttttaaattgtatattattaaattaagtttaaagtaataatataaattttaaggttattaataataaaattattgtttaatataatatagttttgaattttgattttgttttgtttataagaaaaatgtttatagtttttaatatttagttatatttatatatatttatttatatatagaatatatagggttttatggttataaattttgaaaagttgagggaaag

SEQ ID NO: 386 - DNA, 6076 bp, Artificial Sequence
  chemically treated genomic DNA (Homo sapiens)
tttttttttaattttttaaaatttataattataaaattttgtatattttatatatgaatgaatatgtgtgaatataattaaatattgagaattgtagatattttttttataaatagaataaaattaaaatttagagttgtattatattaaataataattttgttgttaataattttgaaatttatgttattattttgggtttaatttaatgatgtgtagtttaaaataattggaattatatatttttagttttatattttgatataaaaaatttataaaatatgatataggtgtgaaggttttaattaaatatagtttttttttaggaatgtagtttttgtttatagtttatttattttagtagtttttagaggtttaattaatgttgtattgggtgggaaagttttgaaagttaatttattgtgattagttgggtgaatatatatgtatatatatattttagttggtgtaatatttagattagaattcgaaagtaatagagtaaaaaattggaaaatagaaagtatttttaaggtttttgtggttattttatttaaggaagtgtatataaatgttttattgtttttttggtttgttttattaagtcgttttttttggaatgaaattttgagtatattattatttatgtttttttttatttattattttgattgttttttgagatgtaaatgaaaggaaattggtattgttgtgtttaggttttttgtttttttttttgttttttttggtggtaattagttgtttgataagtaaatatttaaggagagttaggtcgagttggtttatgttattcgtgtagtatatagtattattgttttttttgtaaggatttttgttggaaatcgcgatcgaaggtgtatacgtatttatatatgtatatatatatatatagaggttttattttttacggcgtaggtcggcgttgtagtattcgggtgggtgggaacgcgttttagtagtagtagttcgtttttttaatttattagtttgcgaagtttttttgtcgggagagtaggtgttagattttagagaggttttttttttttttttaagttttggaattttcgggttttatcgttagtaaggagataggatttgttttatagggcgatgagtacggggatagttatttattttttttaatttgtggtttcggatgggtttaaggtcgggcggttcgtagtttttgttcgttaggattgcgagtggtagggttggtggtattattttcggagttcgtcgcggcggcggggttgggtaaggtttgtgtgagaagaaggcgtgtttgtaagttttaacgcggatgtgcggagtttattttaggtaagttttgttggtgatttaattgttgtagtgagaaatatatttttttcggggatgaagtttttatattgtggggtttttagttttattagcgagtttatttttatttatttttgttttgtgttttttttgatgttttttatttaaagagtttagggcgttgtgagaattggggttttgatattgcgttttttttttcgagggggtgttttattaattatgaggagtgaaggcgagggattgcgagtggggagtagaggatggtttcgggaaataaaagagggcgttggaaagaaattaatattttaaaagttaggatgtgttcgtatgaatgtattaattagtatgtaatatttaaatttattttttaaagttttaatttattttttaaagttattttagagattaataggttattattaagtaagataatgagtatacggaggtattgaattagtatttgttaagtatttattatgtgttatgtcgtgttttaaatatattagattcgtttataaagtaaagattttggttgtttattttgggattttattttagatatatttagatatttttaatttatagattggtagtaaaggtaagaatataaggttaggtatattataataataatcgatttatttttttgtgaataaaatttaaaagttttaaatttgtgttttgtatttatgttagtaaataacgagatgttaatgattgtttgaattttaattatttaatttgttttttattcgatgttttagagataatttgggaggtattgttgttattagtttttagagaattttttgtagaagggagtaaaggaatagtttaaattaaaatataaaataaataatagtaaattagtggaaaaatggaatattagagaaaatattttggttttatagaaatttgtttattttattatgaaattattaaagaagttttattttatgttttttaatgtttttgaaagttgaaaagaagagtaataataatgtttttatagtgttattgtgaagaattgattttatattagtaatgtgtgtagaacgtgtttggtatagtaagttttatgaatgtgttggttatatttataattttggtaataatttattttattttttttaagtaagatttagtttttaaaaattattttggatttattgtataaaagtttttgaggtttagtttgtagatttttaaagtatgtatgtttggaatttatatttatgataaatttattttgtatttaatagtaatatttaagtatataagaagtgtgtgtttatgggtttagatagaaataaaagaaagaatataagagttttgaattttttttattgttaatatattgatttaaaattattttttgtgttatataatgataatttatattttttatttagtttatgtgtttattattgatattagttttaatagttattattttttgtatgtaatagagttttattttatttggtttttataatattattgtgaaataggtaaggcgtttattatatttattgtttttatttttagaatgaggtaattgaggttgagaaagtcgtagtaaatttgtttaaagtgatgaagtttaaaaggtggaagataggtttattgattttgaatgtcgagtttatagtggttattgtgttgtattattttattgtaatttttagaaaaggtttttgttataagaaaatttgatatatatatttattgatgattttttttgttatttttttttagataagtgtgttatttgttttatagggttaatttttgtagggatagtttttttggagtgatttgttatatatggttttgttttcgaggttttaaggtttagatttagtagtgttatatagtgatattattagagagtggtggaatatttttttttttgggaagaggggttttaaggaagagaaagagtaggaagatataagagaaatgttgtttggttattttatgaaggttattttgattagaggtagagtagaataaaaaatagtggaaaattagtgaaaataaggtgatagtattgtgtgttatgataataatagtaataatatttttttgtatttggagtttatgtagtataatttaagtagatataatatttgtttaatttaattaatatggtattgaggtaaatattaatgtatatggggtgatgtgtagttataaatggtaagattattatatgtattttatttttttttaaattgttttattataagaataaatgaatttttttaaatgttattgaattataaagataaataagtagataaaataatatataaatttgtaatgaattttggaagaagttaaattagatgtaggcgtggtaattgatttggaagagtagaggattttatatattgtatgtttgtaggagagattatggtaaaaagtaagttaattttttttgtaaaatttgggtaggtttaggtttaggaggtagaaattttagtatagaaggaggttaggtggtggggtaaatataggggtttggttatacgtttgtatattggaatgtttggatttagagtttttttttttattgttatataattaattaattataagtttttttatttgtttaatttagtttttaggagattggaggtttattttttggagaaagtaaattagagtaatttgtggtttaataagatgaattgaatatatgtttttttattttgtttttagagataatgaataaaaaagaaatttatatataaaataggaaaaaaattttttgaaattgaaaatatatttaatatttataaaaaaattgatagatgggttagaagattaagttgaaaaatttatttagttgtagaaaatttttaaaaaatggaaaaaaattttgattaatggaaattttagaaagttttagaaaagatttttttttatgtagaaaaggataaaaatattaatttgaaaataatgtaaaaataatattagaaatgaagatgatgaattttggagatcgaaagttttattaaacgtttaggaaaataattttttaaattaattaaataattaaatttatcgaaatatattattttgagataaaataaatgtaggaataaagagaaaaatttaaaatattttttagagatataaagtagattatatataaggaaaaaaaattgtattggattttttaagagtaataatggatttagaagtttttttgaatgtttttatattttttaaatgaaattattttgaatttagaattgtatattaagataaattgttagttaagtttgattttaaaaaatttttagatatgtaaggatttaaaaaatatatattttgtgtgttattttaaagtaatagttttttaaataagtttataaattaagaaagaggaagagatgaaattttaaaaatgtaggtttaatataagaggtagtaaaataaattttttagagtaataagtgtgaagtaggtttaaagagaggtgaatagatggtttgtagtaggaatgtttttaagaaaaaaaaaaatggaaagaaaatgatagattgtttgatatatatgtgtatttgaaaatatagtagatagcgggaagtgttcgttagattttatgttttgtttttttttttgagtattatattagattttattttttagttttttgtaggtggggaggtatgttattgaggtttggtttatggattgtgggtagaagttatgtatatcgtttttagggtatgtttataaaataatttttgagattttttatattttttttttttttttattagtgcgtagatgcgaagaattaacgaagagttttaagtttttagaagatatgaaagtttttagatgaaaagttatgaatttgaattagggtgtgatatggttattttagttgttatatattggattattatatgagttagaagtaaatttgtattgtatgatgttacgaagattttttagagttgttattatagttagattattttgttatagttttaaagattagttagaggtaattgtgaataatatataataggtacggagtgtgttgaattaattttaaaaggatattattaattttatgagaaataaaaagttgtaagaaaaaagaaatattatgatagaatattattttgtttagatttggatataataaaaatattgggaatgttaataagagaattaattttaatttataataaaattatatgtggaggatggtagagggaaagattatttgtgtatatgtgtagagaagatagttaaatttttaattattataataaaaattaataaataatgtgtaaagttgttaaataaagaaatagtaggataggtaaattaattagatatataaaagtataaaagttgttaaagagttaaatgtttgtttgtggggattaagattagggtttaggaggcgatttgtattgttttataagaattgtagattttgattttgttttaaattatgagatgtattattttaataaaaataaagttaattttaaattatttttaaaatatatataaggaaataaaagatatttgttttatagagaaaatattatgttttattaaagtatttgtatatattttaatataatgatttataagtagtggagaaagtgaattgaaatgtagaatgaagatagatttgagaggtttgtataatgatttatttatttaataaatatttattaagtaatttgtgttt

SEQ ID NO: 387 - DNA, 17144 bp, Artificial Sequence
  chemically treated genomic DNA (Homo sapiens)
attatttgaattcgggaggcgtaggttgtagtgagttaagattacgttattgtattttagtttgggtaataagagtaaaattttattttaaaaaaaaaaaaaaaagaattttgtttttttttttatttttttttgggtatttggatttggaagtgaagatagtttagtataatttgatttgtgttgttttttttttaggtggttattttagttaataagaaggtagtttatgagggtataaatgatgtaatttaaatgttagatgtggtttttttgtttttttttttttttttttttttttttgagatggagtttcgttttgtcgtcgaggttggagtgtagtggcgcgattttaatttattgtaagtttcgtttttagggtttacgtttttttttgttttagtttttcgagtattgggattaaaggcgtttattatttttatttatgattatttttgtgatgatttacgaattaagttagtttgagtggtattttttgttagggtagtatcgttattttttgttttgtgggatttttggttatgattgttttattcgaaattttatatagtttttttatgttagattattgatatggttaataatgcgagggaattaaagttgggaggttgggttggagtgtagtggcgcgattttaatttattgtaagtttcgtttttagggtttacgttatttttttgttttagtttttcgagtatttgggattaaaggcgtttattacgacgttcggttaattttttgtgtttttagtagagatagggttttattacgttagttaggatggttttgattttttgatttcgtgattcgttcgtttcggttttttaaagtgttgggattataggtatgagttatcgttttcggtttttttttttttttatttgagattaagtttgattttgttatttaggtaagagtgtagtggtgcgattttggtttattgtaattttcgtttttcgggtttaagcgatttttttgttttagttttttaagtagttgggattatagttatttgttattatgtcggttaatttttttgtatttttagtagagatggggttttataatgttggttaggttggttttgaattttttattttaggtgatttgtcgattttggttttttaaagtgttgggattataggtgtgagtcgttgtttggttgtttttttgtttttttaagatttaaatgtaatgggtttgaattttaatatttatattttttaatttatgtaagtgtaaagttttatataagtttttgtaagttttataagggtttgtggttttatagttatttttgtttttagtttttttttttaattgagatttaataaagtatattgtttaattttttatttatgtatttttataattttttttttttaaaaagcgtttttgggtgtaatagttttttttgaagttttgagagttatataggatggttacgttttagtgtaataaataatttattttattttaggtattttattgttgaaatatttttgttaattattatgggagagttttttttgattttttatttatgtagtatttatttttatattgatttttttatttatttttttttttttttttttcgatttttattaatttgtttttttattttgttaagtgaattttaaatttgtttttttttaatttttttatttttatttttttttttttttttttttttgagatggagttttatttttgttttttaggttggagtgtaacggcgtaatttcggtttatcgtaatttttgttttttgttatttttaattttgtttagatggagttttattttgttgtttatgttggagtgtagtagtataatttcggtttattgtaattttcgttttttaggtttaagtgattttttcgttttagtttttcgagtaggtgggagtataggcgtttattattacgttcggttaatttttgtatttttagtggagatagagttttattatgttggttaggttggtttcgaatttttggttttaggtggttttaaagtgttgggattgtagacgtgggttattatgttttatttatttttattttttttttaaatatagagagtaatttttttttttaaagttacgtatttatttttattaattgaggttttaagtaggataaaaggattttttgtgtattgggatttgttatttttggaaggtagttgtggtttaaaaatagtatttttttttttttgttatacgaagtatagtgttttttatttgttgaatgtttattgtatgtttattattttattaagttttttttagtagtttgtgtttttatttgatttttttaataattttgagaagtagtttttattattgttttttttataaataaggaaggggtgtgcgtgcgagagaaattaggtaattggtataagattatatagtaagtaaggattgaagattaggtttgtttggttttaagtttgtgtgtgttttttttaatttattatatcgttttttagaggagggagaaggagaaagtaattagaagaattgaggttatataaaagtaatattatttgtttttatattgttttataattttaaaaggatggttttatatgttgttttattatttttaggaagaaagaataattattattatttcgtttattttgaaatgaggaaagtagggttttgtgagagaaagagagtgagggagtagtttagcgtagtatgtttgattttgttattatagaggtattagtagtgggtgattaagagtttaagagtgattatgggagttggtggttaaggtgatgtggaggataaggattgagggattaggaaattttatagttattgaagttattaggaggatggtaggataggggttagtgaggatgattatgagttaggggttgtaatttgtaatgtataaggagtaattggggggttagtgatgaggaggggttgaggggggtatggttggagagtatagaagaaagaatttttgtataagggtggaaatggttatgttatttttatattttagttttatagtatatggggagtggaaaaatgagaagttttttagtagagggtagtaaaggaggtagtatttggaggaggtttaggtaaagaagttatttgagtattttgaagaagtagagggtatagtagagtttgttgataaaagaataggattttagaaggtatagaggaaagagttgttagtgtgatgggtagtgtgagtgaaagggttgggtaagaagtttagaagagtaagcgtttgaggtagaggttagataagtagaggagttgttagtttgggtggtttttaggttggagatgtatattgtagatagggttataatggaatttggggggaaaatggttttggtatttgatttagatttttaagatttgagatgggggagaagtgtggggaaagataatgattttagagtaagtttttagttggtttttgtgattttaggaagattggaagtttatattaggatttgagggtggggtatttattgttttttttatttgttttttttagtggaagtgggattttttagggttaggttaggtaagaatatttttttatttttgttgatagttttttggtaatgggaaattattgagaggtttttgtttgtttgtttgtttggtttttgatggagtttggttttgttgtttaggttggagtgtattgttggagtgtagtgatttcggtttattgtaatttttgttttttgggtgtaagtaattttgttttagttttttaagtagttgggattataggtatgtattattatgttcggttaatttttgtatttttagtagagatagggttttattatgttggttaggttggtttcgaatttttgattttaagtgatttgtttattttggttttttaaagtgttgggattataggcgttagttattgtgtttggtcgagagtttttttaaataaggttgatggtaatatggtgatattttttaaagggttgttcgggtttgtgttaaaatgattttggtatttgatttagaatgaatgggattaggaagttttatagttatcgaagttattaggagtatggtagaataggggttagttaggatgattatgggttaggggttgtaatttttaatgtataaggaataattgggtgttagtgatgaggaggggtggagggtggtatgattggagattataggagaaagaatttttgtataagggtggaaatggttatgttgatattacgttttggttttatagggtgaattggagagtgaaggtaggaattaggaagttgttgtattagtttttagtaagaagtgatgatgttggagttagaataagggtaatggagatatagaggaagggtagggatatgttaaggcggtgggatgtggggtgtgaaggaaatatagatagggtagaggatagcgtttaggtttttggtttggtttcgcgtttgtagttagttttttatatgggttttggaagacggagttatagaacggatcggattagaaagtagtttggaaatggtaaaattgttatttattattagttatattattattaaagttttttaattattttagtaagtttagttaatggaacgaggtatgataattaagataaattacgagagttatttagatatgggggatttggaggttttgagttatttcggattatatttgttaggagttgagggtcggggcggggcgaatatagatttcgtttttgggcggggtttggatgcggtcggagcggagtagtgttggagcgggagttttagtttttaggcgttattgtgaggatttgatcggattagattatttcgtagcgtttcgtttcggtttttttcgcgttttttcgacgttaggttttgtcgtttcgtcgatcgttcgggagcgaattcgtcgtttcgtattcggagttcgcggtaaggggcgcggtttcggtagttcgttcgcggaggattagggatcgattttcggcgcggggcgttgggtatcgagagcgggcgtcgagaaggagcgcggggtagcggaaggaagtcgggggaggagcgagggagggggtttcgcggcggtagaggtggggtttatttagggagggggcgtcgagggggttttttagacgttgggggtagtcgggggagttttaagggcgggaggggagtaagaaagacggcgtttgggttgggaggagagatggggggtaattggagggtagtgagggatcgttatgatgtttgatgattgattacgatttcgagttcggtatttcgtgggtatgaaggatttagttagtagtggaggaaagtgtttttattagtggaaatcgtatgggaaaaggttttaatttaaaagtatttttagtttaagaaatagatttttagttttttaaagattatgatatgaagggaggtattagttatttatataaaatatttaaatagattttttttttaagtttgaagtttttagggtttttttttatttttttaaagtatagtataggttttggtgtatagtaggtgtttggtgaatgttgattgaatgaataattggtgtttttgttttaatttttttatttatttttaagaattgttgtgagaattaaataggataatgtgggtgaaaagaatattgtaaattgtaaaataatgtataaagagagaggttattgatgttattttgtaggtgtttttgttttgttagtggatatatttatggttatttttttttaatttggaggaggaaggaaatgaatattaagtatttgttggtgtaagatggaatgttttgaaagtattttgtagaatgttagatatttagtaggtgtttaataaatggtagttattgtgatattgtttttgtggttttaggagatttgggaaaataatgagaaggtggtgatgggttagtagtggggaatggtttaaagatagattgaattagaaaagtagagtatggtttaaaggaggatgaggtttatatttgtttaattttttttttatttttattgaaatgttttaagtaggaagatagggaattatattattgagtttttgttatattgtatatatagttgatttttgaatagtatgggtttgaattgtgtaggtttatttatatttgaatttttttttttaattaaatattgattaaaaaaaaatattatggtgggttaagcgtagtggtttaaatttggaattttagttatttgggaggttgaggtaggaggatcgtttgagtttaggaatttgaagttatagtgagttatgattaggttattgtattttattttgggaaatagagtgatatttattttttaaaaaagaagaaaaagagaagaaaatatagtagtgaagggaggtgaagtttgtatatttagaggattaatttttagtttaggtgggttttattgggttaattgtggtttttgagtaggcgtggatttcggtatatatgggggttttggagttaattttttgtttatattaagaaattattgtattattttagatgtataatttatattatttataatttttttaataatatttgttttatgaatgaggaaattgttttaattatgtaatattttttgttaaggttttataggtaataaatgatagatttggaaattgaatttagtttgtttgatttggagttttaaattatttttattatataggatgatttgttagaagaaattatgaagtatagagataaataaataaataaaataaggggttaataaaatatttttttatatataggttttaatttttgtaatagttttgttaggaagttattttatgagttttttttatagataaggaaattgaggttaggggtgtgatttgtttaagtttataggattattgaaagagttagggtttattttttaaatgttaggttttttggatttagttttatgttttttgtaataaaaggtaagtttttttatttatttttttattttatttattgagttgattttttttcgttggattttagggttttttttttttttttttcgtttttttttggttgaagttggttttttttttaggtgtttatttttgtcgtttattagattgaaagggttgttttttatagttattttttgaggagttattttttttttttagtttgggatagggacgattttttagatggtttttgggtttttatttgtattgtttgttacggagatagttttattattttatgtgattgttataaaatagaggaaagatttgattgatgtttattttataaatgtaattttgtatgtattattgtgtatgatttgtttgtttagatttgttttaggtagttgtttgttgggatgttttttgtttgttttttaaatgtttgagtagtttttggtcgtttttttttaagaagatttttttgggggtttttatttgaatgagttttttaattgaatttagttttttgttttttttcgtttttatattatttattgggaaagttatgttgtgtgtgtataagtagatgttaatagtgtggtatggtaagtatagtacggtagtaggatatttaggatgttggggatgttttttttttttaatttttatttttagagatagggttttattttgttatttaggttgggatatagtggtgtaattatagtttattttaatttcgaatttttggatttaagtgattttttagttttagttttttaagtatcgaggattataggtgtatattattatattcgattaatttaaattttttttggttgggcgcggtggtttacgtttgtaattttagtattttgggaggtcgaggtaggcggattataaggttaggagatcgaaattattttggttaatacggtgaaattttatttttagtaaaaatataaaaaattagtcgggtatggtggcgggtgtttgtagttttagttattcgggaggttgaggtaggagaatggcgtgaattcgggaggcggagtttgtagtgagttgagatcgcgttattgttttttagtttgggcgatagagtgagattttgttttaaaaaaaaaaaaaaaaaaattcgtagaaatggaattttattatgttttttaggttggttttgaatttttggttttaagtgatttttttattttggtattttaaagtgttgggattataggtatgagttattatgtttagttaggatgtttttttatttattttaaaattgttgtggttttcgttttttttaatttcgttaaatttggaagttattaggtaatagaagttttatttatgattttttaattgatttgttgtgtgagtttggataaattatttgtttttgtagagttttaattttttttttttttttttatttgtaagataaacggaggtagattaggaattgaaataattttttatttttgttattattttttagttttttatttgtggtagttatagttaataaaggtaggtaaattttttattgattatatacgaggttatatgtattttttttagtatagtgtatgaaatatatttatatacgtttttttatttaaaatttatagtatttcgtgaagtaagtattattgttagatgaggatattgaggtatagaatttaagtaattaggttaagtttatatattgagttattgggaaagttgggtttagtagttaggttttttgttataataaaaagttgttattttaaagttttttttaattttagtagtttaagagtgtgaagttgggttatattagaaaagtgaaaattagtaatttgatatttatattgatagtttggtatttgaaaaatgttttatatgtgttttttgaaagatataatattttttaaggatttattgtaggtttagcgttgattagatgtaaggatggataaagtttttttgaatttagaagagagagtaaatagttaattgtaaaataggtttaaataatggagttataattagggagagggtagttgaataagatttgtttgtagaagtgaattaaaggggttagtgaaataatatgtatttagtatttttatgggtcgagaaattgtgttagattgtttatatatagtattattttttttatttgtattaagttttgtgaagtaggtggtattttttttattttaaggtaaaagtgttgtggtttagagaggtaatatgatttatttaagaatttatttgagggtagagtattgattttaaatttttttataatattgtagggtattaagtttagtttcggttgttagttatgagatttgggtaaatttttttaattttttatttttagttttttttttgattaaatggaaataataatttttgtttttttagttttattttttaggtttatttagagataaaagaagataaaggatatgaaattgtggtaaagattatatttatgttttagtagtgattttttgattagtaattttattttaaggaattttttttaaggaagtaattaggaaaatgtataaaaatttatgtaaagaaatgtttattgtagttttatgtataataattaagagtagaaaaataatttaaaaataattttttaaagagagtgataatattaaataattgatttggttgggttaatatggtgaaattttatttttattaaaaatataaaaattagtcggtgtgatggtgagtatttgtagttttagttatttgggaggttgaggtaggagaatcgtttgaatttaggagttggaggttgtagtgagttaagattgtgttattgtattttagttagggtgatagagtaagattttgttttaaaaaaaaaaaaaaaaaaaaagaattggttttatgatatatttataggatggaatataatgtagttaattgaaatgatgtttttttagagtttttaaagtttaagtttcgtttatgttttttttttttttttttttttttttttttttaattagagagtttttattgttgtttgggttggagtgtaatggtataatttacgtttattgtaattttcggttgttaggtttaagtgatttttttgttttagtttttagagtagttgggattataggcggttattattacgtttagcgaattttttgtatttttagtagagatggggttttattatgttggttagattggtttcgaatttttgatttcgtgatttattcgttttagttttttaaagtgttgggattataggtatgagttatcgcgtttagtttttatttttttttttttttttttgagatagtgttttgttttgttatttagattggagtgtagttgtgtaattttgatttattgtagttttcgttttttgggtttaagtaatttttgtgttttagttttttgattagttggaattataggtgtgcgttattatatttggttaatttttatatttttagtagagattggattttattatgttggttaggttgattttaaatttttgagtttaaatgattcgtttgtttcggttttataaagttttgggattatgggtttgagttacggtatttggttttaaaattttatatttttgtagtatttttggtattattaaatttttgtagtatttaagtatagttttgtattgttaatgataaggatatgttttgagggatgtgttattagtcgattttatagttgtatgaatattatagagtatatttatataaatttatatggtatatggtatagtttattatatatatagtttatatggaatagatagtttattgtttttaggttgtaaatttgtatagtatgttattgtattgaatgtagtaggtaattgtaatatagtggtaagtatttgtgtagttaaatatatttaaatatagaaaaggtatagtaaaaatatgatggtttttttttttgagattaagtttggttttattatttaagttggaatgtagtggtgtaattttagtttattgtaattttagtttttcgagtagttgggattataggtatttgttattatgtttggttaattttttgtattttaatagggatggagttttattatgttggttaggttggtttttattttttgattttaagtgatttatttattttggttttttaaagtgttgggattataggtgtgagttattgtatttaggtataatatggtataagagataaaaaatggtatatttatataagatatttaattatgaatggagtttgtagggtcggtagttgttttgggggagttagtgagtgagtggtgagtgaatgtgaaggtttaggatattattatatattataggagattttataaatattttatatttaggttatattaaatttatttaaaaatatgtttttttaataataaattaattttggtttattataatttttaaattttataaatttaaaaaatttttaaaattttttagatttttttattttttatttattattattattattatttttttgagattgagttttgttttgttatttaggttggagtgtagtggatttttgtttattgtaatttttatttttcgagtttaagtaatttttgtgttttagttttttgagtagttgggattataggtgcgtattattacgtttggttaatttttgtatttttagtagagatgaggttttattatgttggttaggttggttttgaatttttgattttaagtgatttgtttgtttcggttttttaaagtttggggttataggtttgagttattatgtttagttatagatttttttataataatatttaatttaaagtataaatatatcgtatggttttttttgagatgaaggtttagtgtgttatttggattggaatgtagtggtgtaattatgggttattgtagttttaaattttttggtttgagcgatttttttattttggttttttaaagtgttgggattataggtatgagttattgaatttggttttttttttttttttttttttagtttttaaatttatgtttaaaattattttgttaaaaaggaagatataaatatatatatttgagtttaggtttatatagggtttaggagtattaatattattgttttttatttttatgttttgttttattggaaggtttttaggggtaataataggtatggagttgttattttttatggtaatatttttttttggaatattttttgaaggatttgtttgaggttgttttattgttaattttttaaaaaatattaaatataaatagaaaaagtatattttaaaataataataaaaagtgtagtaagtaaatatagaagttagtaatatagttatttattattaatattaagtattatgtatagtatataattatatgtgttatatttttatataattggtaatgtagtaggtttgtttatattagtattaatataaatatgtgagtaatgtgttgtgttataatgttattatggttattatgttattaggtaataggaattttttagttttattataattttatgggatcgttattgtatatgtggtttgttattgattgaaatgttgttatgtagtttatgattgtatttttaaaatttaagtgatttgttaaatgataatatattatatattttagtttatattttgtgtatatgatgttagttattataatatgtatagaaggtatagattagaatgtatggtatgttatttatatagaaataaaaagtataaataggtttttttgtttatatatgtaagggttatttttgaaggatatataaattgataatatgtatgtttttggggaggggaattggattaggaattagagatggaagtaagatttattttttagtgtaaatttttaggttttatattatttgtattttatgttaggaattaagaaaataatgtagttgggtgtggtggttttcgtttgtaattttagtattttgggaggttacggagggtagattatttgatttcggtttaagattagtttggataatatggtgaaattttatttttataaaaagtataaaaattagttgagtatggtggtatatgtttgtagttttagttattcgggaggttgaggtaagaggattgtttgagtttaggagattaagattgtagtgagttaagatagtgttattgtattttagtttgggcgatagagagagattttgttttaaaataaaataaaataaaataaaaataataataattgagttatagttggtaaaaaaggtaatatttgtaaataggatatgtttgaattatttttcgtaagtatgtattattttttaaattaataaataaaatatagtattaaaatagatggtttttttttaaagtataatttttattttatttttttttaggaaatagtttatttttagtttttaaggatttagttttttatatgggttttggtgggggtcgtggggtagtatttataggtttaaattagggtgggggtgtttggtttttgcgggttttatgagatcgatttttgattattttgttgtgaattgtataattcgtatagtaatgtagttttatatattgtttgggaagtatataggtatcgaagatgtttattttagaaatgtttttgattgttgtggtttttattatgttttaaatgacgaattttttaatggttttgtttttgggtatatattgggtatagtttatttagtgaataggttgtaagtggttgtaggtttttttggtatgattattgtttttttttttttttgttattttggaggtatggattggagagaggaggtttttttttttttttggtagagatagttttgttttgttgtttaagttggagtgtagtggtataattatggtttattgtagttttaaatttttgggtttaaataatatttttgttttagttttttaagtagttgggattatagatgtgtgttattacggttggttaattttttattttttgtagaaatggggtttttttatgttgtttaggttggttttgaatttttggtttgaagttatttttttattttggttttttaaagttttgggattataggtgtgagttattgtatttggttttaggtggtatttttttgtatgaaaaaatattggaggaaatatagtaaaatgttaatagttatagtttttgagtgggtgggatgttagttaattttttttttgggggggtggagtttcgttttgtcgcgtaggttgaagtgtagtggtttggattttagtttattataagtttcgtttttttggtttacgttatttttttgttttagttttttgtagttgggattataggtattcgttattatttttggttaattttttgtatttttagtagagatggggttttatcgtgttagttaggatggtttcgattttttgatttcgtgatttgtttgtttcggttttttaaagtgttgggattataggcgtgagttatcgtgtttagtcgttagttaattttaaatttttttttttatatttttgtataatataatttttaaattttttataatgaatatatttatagtagaaatttttttttgtgaataaagaaagatgatttgtaggtagtagagcggaggatggtgtgaggttgttgtggttgttttttttgtttttatgtagaaaaagtataatgtggttaggtgtggtggtttacgtttgtaattttagtattttgggaggttgaggtaggtggattatttgaggttaggagttcgagattagtttggttaatatggtaaaatttcgtttttattaaaaatatagaaattaattaggtatggtggtagatgtttgtaattttagttatttgggaggttaaggtaggagaatcgtttgaatttagggggtagaggttgtagtgagttaaggttgtattattgtattttagtttgggcgaaaagagtaagattttattttagaaaaaaaaaaaaaaaaagtataatgtttttatatggtaagtttttgtaatagtttttgtatttagtattatgaaaagttgaaaagttaaggttgtgagatagtttaagtagttaatggtatttttttttttaattttattttttttttttatgtaagtgttatgttttagtttttaagtgttttgggtatgttttatatttgtttagtgagttttgttatggggtagattgatatagggatggaatttatagttttagataaggattgagagttgggaataaagggaaggaagaatagagattataggagtttagtggtgatatatgtaaggaatttttattaaaaggttgttaataattttatatatttgtttaatttttttttaagagagttttaaatttatattaattagttttttatttttatagtttatttgagaggtttaaagagttatatttattagttttatgttttttttttgtttttggggaaaaaaataggaatttttaaaaagaatgaaaatttagatattattatatttgaatgttgtttttttatttttttttgattatttatttagttatttgggtatttttgtgttgagaagaaggggagattttaggtggagaagtagggtatttgaggtttttaagatataggagaagtaattaaagatttaaataagattatgtgattaagtgttgaattatggagtttagattcgggtgttttaggaaagtagatggtgatagaattgagaaggttggggttttaggaaaggtttggtatgtattaaatatttgttgagtgaatgagtgaataaataaaggatttaggttttgaaggttttggaataataaggatatatgtttatatttgtgtggaatttattagttgataatggttttatttattgttattttatttgagttttgtgatagttttgtgagaagagtagggtggaaattgttttttttattttttagatgaggagattgagttttagagtgatgaagtgattgtgatgaatttagtatatattttttgagtgtttattatgtgttaggatttatgttggaagttagatatgtaggaatgaagtttattaaggtttagatgtttattttaatagtgttgaagtgatataagggttgttatagtgttttgggagtatagggaagttggtatttgatttggatttttaaggatgggtaggagttttttaggaggaaaagagaattttaggtagaaggaatatatgtaagggataaaggtaaggaataatgtggtttatttggtataaagtgtgtaattagatttaagggaagtataggttggtgaagagaaggggtatgggaagataaagtttagagaattgtttttttggttagttggttatttgttaaattgaatagtttggatttgatttttagagttgtggaaagttatgaaagtttttatgttttatttattttattttttagagatgaggttttgttttgttatttaggttggtatttagtggtatgattatggttttttgtagcgtcgaatttttgggtttaagtgatttttttattttagttttttgagttataatagtttttgaagtaagagaatgatagttttttattgagtttttttttggatgtgtatgtgtttgttgtttttggttttttttttttttttttaaaatagtttaggagttgttttttttaggagtttttttttgattatcgggtttttaggttgaatgagatgttttttatggatttttttagttaggatttttttgttttattatttatttattgttttgttattttgtgttgatttattttttattttagtttttgtttatttagaggttaggtattatgtttgatttatgtttgtaagttttatgtttagtatagggtttgttttagattaatgtgtttagtaaatatttgttgaaggaatgaatgggaggagttgggttttattttagtgttgagataatatttggggtaggtgtagtgatggggtgattttgagtagtgtgtatttttttagtggtgttggagtaaggagtgagtgtgtgaatggtggggtgattattagaaggatggtgatttagggtgatatcgaaggtttgtttttgagtgattttaggttttttttgtaga

SEQ ID NO: 388 - DNA, 17144 bp, Artificial Sequence
  chemically treated genomic DNA (Homo sapiens)
tttgtaagagagatttagagttatttaggaatagattttcggtgttattttgagttattatttttttaatggttattttattatttatatatttattttttattttagtattattgaggaaatgtatattatttagaattattttattattatatttgttttaaatgttgttttagtattgaggtggaatttagttttttttatttatttttttagtaaatatttattgagtatattgatttggggtaagttttgtgttgggtatggggtttataaatatgagttagatatggtgtttgatttttaggtggataaaaattagaataaaaggtgggttaatatagagtaataaagtagtagataagtgataagatagaggagttttggttgaggaagtttatgagaagtattttatttagtttggaggttcggtgattaaggagaggtttttggaggaagtagtttttgagttattttggggaaagaaaaaaaaagttaagaatagtaaatatatgtatatttaaggaaagatttagtaaagggttattatttttttgttttaaaaattattatgatttaggaggttgaggtgggaggattatttgagtttaggagttcgacgttgtagggagttatgattatgttattgaatgttagtttgggtagtagagtaagattttatttttaaaaaataaaataaataaaatatagaaatttttatggttttttatagttttaaagattaagtttaaattgtttaatttgataaataattaattaattaaagaggtaattttttaaattttatttttttatattttttttttttattaatttgtgttttttttagatttaattatatattttatgttaaataagttatattattttttgtttttgttttttatatgtattttttttgtttagaatttttttttttttttaaaagatttttatttatttttggagatttagattaagtgttagtttttttgtgtttttagaatattgtaatagtttttgtattattttagtattgttggaatgagtatttgggttttaatggattttatttttatatgtttggtttttagtatgaattttagtatataataagtatttaggaaatgtgtgttgaatttattatagttattttattattttggggtttaatttttttatttggaaaatggggagaataatttttattttgttttttttatagggttattataggatttaaatgagataataatggatgaaattattattaattggtaaattttatatagatgtgaatatatgtttttattattttaaagtttttaaagtttaggttttttatttgtttatttatttatttagtaaatatttaatatatgttaggttttttttgagattttagtttttttagttttgttattatttgtttttttagaatattcgaatttgaattttataatttagtatttggttatatggttttatttaagtttttaattgttttttttatgttttggaagttttaggtattttgtttttttatttgaaatttttttttttttttagtataagggtatttagatggttggatgagtggttagaggagggtgggaggatagtatttaagtgtgatggtgtttgggtttttattttttttaggaatttttgtttttttttttaagggtaaagaaagggtatgaggttggtgggtgtggttttttgggttttttagatgagttgtaaggataaggagttgattaatgtaggtttaaagtttttttgaagaaaagttagataaatatgtaagattgttagtagttttttaataaaagttttttgtatatgttattattggatttttgtggtttttgtttttttttttttttgtttttagtttttaatttttatttgagattgtaagttttatttttgtattaatttgttttatgataagatttattaggtaagtgtggaatatgtttaggatatttggagattgaggtatagtatttatatggaggaagaaagtgaggttggaagggagggtgttattggttgtttaaattgttttatagttttaattttttagttttttatggtattaggtgtaaaggttgttgtaagaatttgttatgtaaaggtattatgttttttttttttttttttttgagatggagttttgtttttttcgtttaggttggagtgtagtggtgtagttttggtttattgtaatttttgttttttgagtttaagcgatttttttgttttagttttttaagtagttgggattataggtatttgttattatgtttagttaatttttgtatttttagtagagacggggttttgttatgttggttaggttggtttcgaatttttgattttaggtgatttatttgttttagttttttaaagtgttaggattataggcgtgagttattatatttggttatattatgttttttttatataaaaataagggaagtaattataataattttatattatttttcgttttgttgtttgtaagttatttttttttatttataagagaaaatttttattatgaatatatttattataaaaaatttgaaaattatattatgtaaaagtgtaaaaaagagaatttaaaattaattgacggttgggtacggtggtttacgtttgtaattttagtattttgggaggtcgaggtaggtagattacgaggttaggagatcgagattattttggttaatacggtgaaattttatttttattaaaaatataaaaaattggttaggggtggtggcgggtgtttgtagttttagttataggaggttgaggtaggaaaatggcgtgaattagggaggcggagtttgtagtgagttgagatttaggttattgtattttagtttacgcgatagagcgagattttatttttttaaaaaaaaaattaattgatattttatttatttagaaattatggttgttaatattttattgtattttttttaatatttttttatataaaagagtgttatttaaggttaggtgtagtggtttatatttgtaattttagaattttgggaggttaaagtgggaggatggttttaggttaggagtttaagattagtttgggtaatatagggagattttatttttataaaaagtaaaaaattagttagtcgtggtggtatatatttataattttagttgtttgggaggttgaagtaggagtattatttgagtttagaaatttgaagttgtagtaaattatgattgtgttattgtattttagtttgggtaatagagtaagattgtttttattaaaaaaaaaaaaaaattttttttttttagtttatgtttttaagatgataaagaaaagaaggaataatggttatgttaaaaaggtttgtagttatttgtagtttatttattggatgaattgtgtttaatgtgtgtttaaggataaggttattaagaaattcgttatttgaaatatagtggaggttatagtagttagggatatttttgaagtgagtattttcgatgtttatgtgttttttaagtagtatgtgaagttatattattatgcgagttgtgtaatttatagtaaagtagttaggaatcgattttatgaagttcgtaaggattaaatatttttattttgatttagatttgtaggtgttgttttacgatttttattaaagtttatgtaaggagttgagtttttaaagattgaagatggattattttttggagaaaaataaaatggaaattgtattttaaaaaaaagttatttattttaatattatgttttatttgttaatttaaaaggtaatatatatttacggaaaataatttaagtatattttatttgtaagtattattttttttattagttgtagtttaattattattatttttattttattttattttattttgagatagggtttttttttgtcgtttaagttggagtgtaatggtattattttggtttattatagttttgattttttgggtttaagtaatttttttattttagtttttcgagtagttgggattataggtatgtgttattatgtttagttaatttttgtattttttgtagagatggggttttattatgttgtttaggttggttttaaatcgggattaagtgatttgtttttcgtggttttttaaagtgttagaattataggcgagagttattatatttagttgtattatttttttaatttttagtataaaatataagtaatatgaaatttaaaggtttatattgaaaagtaagttttgtttttatttttgatttttgatttagtttttttttttagaggtatatatgttattaatttatatattttttagagatagtttttgtatatataagtaaagagatttatttatattttttatttttatataaataatatattatgtattttagtttatattttttatgtatattgtaatagttgatattatatgtataaggtataggttagaatatatggtatgttattatttagtaaattatttaaattttaaaagtataattatgaattgtataataatattttagttaatgatagattatatgtataatggcggttttataagattataatggagttgaaaaatttttattgtttagtgatatagtagttatggtaatattgtagtataatatattatttatatatttgtgttgatgttggtgtaaataaatttattgtattgttagttgtataaaagtatagtatatatgattatgtgttatatataatatttgatattgataataaatgattatgttattggtttttgtatttatttattatattttttattgttattttagagtgtattttttttatttatatttaatattttttaaaaagttaatagtaaaatagttttaggtaggttttttaggaggtattttagaagaagatattgttataagagatgatagttttatgtttattattgtttttgaagattttttagtgggataagatatggaaatggaaggtagtgatattgatgtttttggattttgtgtaggtttaagtttaggtgtgtgtatttgtgtttttttttttaataaaataattttaaatataaatttaaaaattaaggaagaaaagaaagaaaaggttaggtttagtggtttatatttataattttaatattttgggaggttaaggtgggaggatcgtttaagttaaggagtttgaggttgtagtgatttatgattgtattattgtattttaatttaggtgatatattgagtttttattttaaaaaaggttatacggtgtatttgtgttttaagttaagtgttgttataaaagagtttatggttgggtatggtggtttagatttgtaattttagattttgggaggtcgaggtaggtagattatttaaggttaggagtttaagattagtttagttaatatggtgaaattttatttttattaaaaatataaaaattagttaggcgtggtggtgcgtatttgtaattttagttatttaggaggttgaggtataagaattgtttgaattcgggaggtggaggttgtagtgagtagagatttattgtattttagtttgggtgatagagtaagatttaattttaaaaaaataataataataataataaataaaaaataaaagagtttaagaagttttaaaaattttttaagtttataaggtttaaaagttatagtaagttaaagttaatttattattggagaaatatatttttaaataaatttagtgtagtttaagtgtagagtgtttataaagttttttatagtgtatggtaatgttttaggtttttatatttatttattatttatttattgatttttttagagtaattgtcggttttgtaagttttatttatggttaagtgttttatataggtgtattattttttattttttatattatattatgtttgggtgtagtggtttatatttgtaattttagtattttgggaggttaaggtgggtggattatttgaggttaggagatagagattagtttggttaatatgatgaaattttatttttattaaaatataaaaaattagttaggtatggtggtagatatttgtaattttagttattcgggaggttgaggttgtagtgagttgagattgtattattgtattttagtttgggtgatagagttagatttggttttaaaaaaaaaaattattatatttttattgtattttttttatgtttagatgtgtttagttatataaatatttattattgtgttataattgtttgttatatttaatatagtaatatgttgtataggtttgtagtttaggagtaataggttatttattttatatagattatgtgtatagtaagttatattatatattatataggtttgtgtaagtatattttatgatgtttatataattatgaaatcggttaatgatatattttttagaatatatttttgttattagtaatgtaagattgtatttaaatattataaaaatttagtagtattaaaagtattataaaaatatgagattttgaggttaggtgtcgtggtttaggtttataattttaggattttgtgaggtcgaggtaggcggattatttgagtttaggagtttaagattagtttggttaatatggtgaaatttagtttttattaaaaatataaaaattagttaggtgtggtggcgtatatttgtaattttagttagttaggaggttgaagtataaaaattgtttgaatttaggaggcggaggttgtagtgagttaagattgtataattatattttagtttgggtgatagagtaagatattgttttaaaaaaaaagaaaagaaagtaagggttgggcgcggtggtttatgtttgtaattttagtattttgggaggttgaggcgggtgaattacgaggttaggagttcgagattagtttggttaatatggtgaaattttatttttattaaaaatataaaaaattcgttgggcgtggtggtggtcgtttgtaattttagttattttggaggttgaggtaggagaattatttgaatttggtagtcggaggttatagtgagcgtagattgtgttattgtattttagtttaggtaatagtggagattttttaattaaaaaaaaaaaaaaaaaaaaaaaaaaaaaaagtatgaacgagatttgaattttgaaaattttaaaaaaatattattttagttgattatattatattttattttatagatgtgttataagattaattttttttttttttttttttttttgagatagagttttgttttgttattttggttggagtgtaatggtataattttggtttattgtaatttttaatttttgggtttaagcgatttttttgttttagttttttaagtagttgggattataggtgtttattattatatcggttaatttttgtatttttaatagagatggggttttattatgttggtttagttagattaattatttaatgttgttattttttttaggaagttgtttttaagttgtttttttatttttaattattatatatgaaattgtagtgaatatttttttatataaatttttgtatatttttttaattatttttttgagagagattttttgaagtggaattgttggttaaagagttattattaaaatataaatgtgatttttattataattttatattttttatttttttttatttttaaataaatttgggaaataaagttggaaagatagggattattatttttatttgattaagaaggaaattgaaaatgagaaattaaaaggatttgtttaaattttatagttaatagtcgagattagatttagtattttgtagtgttatgaaaaagtttaaaattaatgttttatttttagatgaatttttaggtaagttatattgtttttttaagttatagtatttttattttaaaatagagaaaatattatttattttatagagtttggtataaatagaaagagtagtattatatgtaaataatttgatatagtttttcggtttatggaggtattgaatatatattattttattggtttttttaatttatttttgtaggtaaattttgtttaattgttttttttttgattgtggttttattatttgggtttgttttataattaattgtttgtttttttttttggatttaagggggttttatttatttttatatttggttaacgttagatttatagtaaatttttagagggtgttatgttttttaagaaatatatatagagtattttttaagtgttagattattagtgtaaatgttagattattggtttttatttttttgatgtagtttagttttatatttttaaattgttagaattagaggggattttggagtagtagttttttattgtaataaaaagtttggttattgggtttagtttttttagtaatttagtgtgtaaatttggtttagttatttaaattttatgttttagtgtttttatttgataataatatttattttacgaggtgttgtgaattttaaataagagaacgtatataagtatgttttatatattgtgttgagaaaaatatatgtagtttcgtgtataattagtgagaaatttgtttgtttttattagttgtgattgttatagataggagattaggaagtgatggtaagagtaaaaaattgttttagtttttgatttattttcgtttattttataggtaaaaaaaaaaaaaaaaaattgaggttttgtaaagataagtgatttgtttaagtttatatagtaagttagttggagggttatgaatggaatttttgttatttaatggtttttaggtttgacgggattaaggaaaacgaaaattataataattttagggtgaataaagaagtattttggttgggtatggtggtttatgtttgtaattttaatattttgggatgttaaaatgggaaaattatttgaggttaggagtttaaaattagtttgggaaatatagtgagattttatttttacgaatttttttttttttttttttgaggtagagttttattttgtcgtttaggttggagggtagtggcgcgattttagtttattgtaagtttcgtttttcgggtttacgttatttttttgttttagtttttcgagtagttgggattatagatattcgttattatattcggttaattttttgtatttttattagagatggggttttatcgtgttagttaggatggtttcggttttttgattttgtgattcgtttgtttcggttttttaaagtgttgggattataggcgtgagttatcgcgtttagttaaaaaaagtttaaattagtcggatgtggtggtgtgtatttgtagttttcggtatttgggaggttgaggttggaaaattatttgagtttagaggttcgaggttagagtgagttatgattgtattattgtattttaatttgggtgatagagtgagattttatttttaaaaataaaaattaaaaaaaagaagtatttttaatattttgagtgttttgttatcgtattgtatttgttatattatattgttaatatttgtttatgtatatatagtatggtttttttagtaggtggtgtgagaacggggagaggtagagagttgagtttagttggaaggtttatttagatggaagtttttaaggggatttttttaggagggggcggttaggggttatttagatatttggaagataggtaaaaagtattttagtaggtagttgtttgaggtagatttaagtagataggttatgtatagtggtgtatgtagaattgtatttgtaagataagtattaattaaattttttttttattttgtgatagttatataaaatgatagagttattttcgtgataagtaatatagatgaaggtttagggattatttgggaagtcgtttttgttttaggttgggggaaagaaatgattttttaaagggtggttgtgaaaaataatttttttagtttgataggcggtagaaataagtatttaaggaagaagttaattttagttaggaaagagcggggaggaggaggagagagttttaaaatttagcgagaagagattagtttaataaatggagtgaagaagtgaatgaaggaatttattttttgttgtaaagaatatgagattgagtttaagagatttggtatttgaaagataagttttggtttttttagtggttttgtaaatttaggtaaattatatttttggttttagtttttttatttataaaaggagtttataaaatggttttttggtaaaattgttgtaagaattaaaatttgtatatgggagggtgttttattaattttttattttgtttgtttgtttgtttttgtgttttatggttttttttagtaagttattttgtgtagtggaaatagtttggagttttaaattaaataaattagatttagtttttaggtttattatttattatttatgagattttggtaagaaatgttatatgattaagatagtttttttatttataaaataagtgttgttgggaaaattataggtaatgtgggttatatatttagaatagtatagtaattttttggtataggtaagggattggttttaggatttttatatatatcgaaatttacgtttatttaagaattatagttggtttagtggaatttatttagattaaaagttggttttttgaatatatagattttatttttttttattattgtatttttttttttttttttttttttttaagagatgggtgttattttgttttttaggatggagtatagtggtttgattataatttattgtagttttaggtttttgggtttaagcgatttttttattttagttttttaaatagttgggattttaggtttgagttattgcgtttgatttattatggtatttttttttaattagtgtttggttgaaaaaaaaaatttaggtataagtgaatttatatagtttaaatttatgttgtttaaaggttaattgtatatgtaatatagtaggggtttaataatgtaattttttgtttttttatttggagtattttagtgagaataagaagggagttgggtaaatgtggattttatttttttttaagttatattttatttttttaatttaatttgtttttagattattttttattgttgatttattattatttttttattgtttttttaggttttttagagttatagaaataatattataatagttattatttattgagtatttattaaatgtttagtattttataagatgtttttaaagtattttattttgtattaatagatgtttgatatttatttttttttttttttagattggaaagagatagttatgggtgtgtttattgataaaataggaatatttgtagaataatattagtggtttttttttttgtatattgttttatagtttataatgttttttttatttatattattttatttgatttttataataatttttgggaatggatgaagaaattgaggtaggagtattaattatttatttaattaatatttattaagtatttattatgtattaggatttgtgttatattttagggagatggagagaaattttaggagttttaagtttagaggggaaatttatttaaatattttgtataggtaattgatgtttttttttatgttataatttttaagaaattgaagatttattttttggattggagatgtttttagattaaagtttttttttatacggtttttattgataagaatatttttttttattgttagttaaattttttatgtttacggggtgtcgagttcgaaatcgtaattagttattagatattatggcgattttttattgttttttagttgttttttatttttttttttagtttaagcgtcgttttttttgtttttttttcgtttttggagttttttcggttgtttttaacgtttgggagattttttcggcgttttttttttaggtgagttttatttttgtcgtcgcggagttttttttttcgtttttttttcggttttttttcgttgtttcgcgttttttttcggcgttcgttttcggtgtttagcgtttcgcgtcggggatcggtttttgatttttcgcgggcgggttgtcggggtcgcgttttttatcgcggatttcgagtgcgggacgacgggttcgttttcggacggtcggcgggacggtaggatttggcgtcgggagggcgcggagggggtcggggcggggcgttgcgggatggtttggttcggttaggtttttatagtggcgtttgagggttgaggttttcgttttagtattgtttcgtttcggtcgtatttaggtttcgtttaagggcggagtttgtgttcgtttcgtttcggtttttaatttttagtaggtgtaattcgaggtgatttaggatttttaggttttttatgtttgggtgattttcgtgatttattttaattgttatgtttcgttttattgattgaatttattagggtaattagagagttttgatgataatgtagttgatgatgggtagtagttttgttatttttaaattgttttttggttcggttcgttttatggtttcgttttttaaaatttatatgggaggttgattataagcgcgaaattaagttagaaatttggacgttgttttttattttatttgtgttttttttatattttatattttatcgttttaatatatttttgttttttttttgtgtttttattgtttttgttttgattttagtattattattttttgttggggattaatgtaatagttttttaatttttgtttttattttttaatttattttataaaattaggacgtggtgttagtatggttatttttatttttgtataaaaatttttttttttgtggtttttagttatattattttttatttttttttattattgatatttaattgttttttatgtattaaagattgtagtttttggtttatggttattttaattagtttttgttttgttatatttttggtgatttcggtagttgtgagattttttggttttatttattttgagttagatattaaaattattttgatataagttcgagtaattttttaaaaaatgttattatgttattattaattttgtttaagaaaattttcggttaggtatagtggttgacgtttgtaattttagtattttggaaggttaaagtgggtagattatttgaggttaggagttcgagattaatttggttaatatggtgaaattttgtttttattaaaaatataaaaattagtcgggtatggtggtgtatgtttgtagttttagttatttgggaggttgaggtagaattgtttgtatttaggaggtagaggttgtagtgagtcgagattattgtattttagtagtgtattttagtttgggtaataaagttagattttattaaaaattaaataaataaataaataaaaattttttaatggttttttattattaggaggttgttaataggagtagaaaaatgtttttgtttggtttggttttaggaagttttatttttattagaggaggtagatagaggaggtaataaatattttatttttaaattttgatatggatttttagtttttttgaggttataggagttagttgaaggtttgttttagaattattgtttttttttatattttttttttattttagattttagaggtttgagttaaatattaaaattattttttttttaagttttattatgattttgtttatagtgtatatttttagtttaggaattatttaagttgatagtttttttgtttgtttggtttttgttttagacgtttatttttttgagttttttgtttagtttttttatttatattgtttattatattggtagtttttttttttgtgttttttagaattttgtttttttgttaataaattttgttatattttttgtttttttagagtatttaggtgatttttttgtttgagttttttttaggtattgttttttttgttgttttttgttagaaggttttttatttttttattttttatatattataaaattaggatgtggggatggtatggttatttttatttttgtgtaaaaatttttttttttgtgttttttagttatattttttttaatttttttttattattgattttttaattgttttttatgtattatagattgtagtttttggtttatggttatttttattagtttttgttttgttatttttttggtgattttagtagttatgagattttttggttttttagtttttgttttttatattattttggttattagtttttatggttatttttgagtttttaattatttattgttggtatttttgtaatagtaaaattaaatatgttacgttgaattgtttttttatttttttttttttataaggttttattttttttattttaaaatagacgagatgataatgattattttttttttttaggaataatgagatagtatatagagttatttttttaaagttgtgagataatatgagaatagatggtattgtttttatgtagttttagtttttttggttgtttttttttttttttttttttgaaaggcggtatagtaaattagaaagggtatatataggtttggggttaggtagatttggtttttagtttttgtttgttgtgtgattttatgttaattatttaatttttttcgtacgtatattttttttttatttgtagaaagagtaataataagagttgttttttagagttgttgggaagattaaatgagaatataagttattggagaggatttgatagagtggtaggtatatagtaagtatttaataaataggaaatattgtgtttcgtataatagaaaaaaaaaagtgttatttttaaattataattgttttttaggaatgatagattttaatgtatagaaagtttttttgttttgtttggggttttaattgatgagagtgaatacgtaattttgggagaagaaattgttttttatgtttaaaaagggagtaggggtaggtggggtatgatggtttacgtttgtaattttagtattttgggattatttgaggttaggagttcgagattagtttggttaatatggtaaaattttgtttttattaaaaatataaaaattagtcgggcgtggtggtgggcgtttgtatttttatttattcgggaggttgaggcgggagaattatttgaatttgggaggcggaggttgtagtgagtcgagattgtgttattgtattttagtatgggtaatagagtgagattttatttaaataaaattaggggtagtaggaggtagaggttgcgatgagtcgagattgcgtcgttgtattttagtttgggaaataagagtgaaattttattttaaaaaaaaaaaaaaaaaaaaaggtgggggtgggagggttgggggaaggtaaatttggaatttatttgataaaatgggagggtaagttaatagagatcggaggggaaaaggaaaaagatgagtaagaaaattaatgtaaggataggtgttatataggtaaagagttagaagaaatttttttatggtagttgataagagtgttttagtagtgggatatttaaaatgggataagttgtttgttatattaggacgtgattattttatgtgatttttaagattttaggaagggttattatatttaggaacgttttttgagagaggggaattgtgagagtatatgagtagggagttgagtaatgtgttttgttaggttttagttgaaaaaggagattggaagtagaggtaattgtgagattataagtttttgtggaatttgtaaaaatttgtgtaggattttgtatttatatgagttgggaaatgtgaatattgaggtttaagtttattgtatttggattttgaagaggtagagaggtagttagatagcggtttatatttgtaattttagtattttgggaggttaaggtcggtagattatttgaggtgaggagtttaagattagtttggttaatattgtgaaattttatttttattaaaaatataaaaaaattagtcggtatggtggtaggtgattgtaattttagttatttgggaggttgaggtaggagaatcgtttgaattcgggaggcggaggttgtagtgaattaagatcgtattattgtatttttgtttgggtgatagagttagatttggttttaaataaaaaaaaaaaaaagtcgggggcggtggtttatgtttgtaattttagtattttgggaggtcgaggcgggcggattacgaagttaggagattaagattattttggttaacgtggtgaaattttgtttttattaaaaatataaaaaattagtcgggcgtcgtggtgggcgtttttagttttaggtattcgggaggttgaggtaggagaatggcgtgaattttggaggcggagtttgtagtgagttgagatcgcgttattgtattttagtttagttttttagttttaattttttcgtattgttggttatattaatagtttggtataagggagttatgtaaagtttcgagtgaggtaattatgattagggattttataaagtaaagaatggcggtattgttttgataaaagatattatttaaattgatttaattcgtgagttattataggggtagttatgggtgagggtggtgggcgtttttagttttagtattcgggaggttgaggtaggagaaggcgtgaattttggaggcggagtttgtagtgagttgagatcgcgttattgtattttagtttcggcgatagagcgagattttattttaaaaaaaaaaaaaaaaaaaaaaggaggtagagaggttatatttgatatttgggttgtattatttatgtttttataagttatttttttattgattaaggtaattatttgagggaagaataatataaattaaattatattggattgtttttatttttagatttaaatgtttaaggaagaatgggaaggaaaataaaatttttttttttttttttttgagatagagttttgtttttgttgtttaggttggagtgtaatggcgtgattttggtttattgtaatttacgtttttcgggtttaaatgat

SEQ ID NO: 389 - DNA, 6086 bp, Artificial Sequence
  chemically treated genomic DNA (Homo sapiens)
aagaaataatggttgaaaaaattttaaatttgatagtaattataaatttaaagattagagaagtttagtgaaatttaaggataagaattttaaagaaaattaatattaaggtatattataattaaattgttttagattagtgatatagatgaaattttaaaattaagtagagataaaagatacgttgtataaaagaaataaagataagaatggtagtttattttttatcggaaataaaatgagttagaaaatattgaaatagtatttttatgttagaaaaaaaaaattgaaaattttaaaaatcgaaattgagtaaaaatagttttaaatatagaagtgaaataaagatttttttggatatataaaagttgaaagaattagttattaggagatttatattttaagatttgttaaggaaagttttttagataaaagggaaatgagattatggaaatttaatttatataagagaataaggagttttagatatggtaattatgtgagtaaatataaaatattttttttttattgtttaaatttattgaaaagaattggttgaaaatgtagtatatatgtataaagtattgaatagtatttagttttaaataggaaggaaattttgatatattttataatgttatagatgaattttgaggatattatgttaagtgaaatacgatagtgaggaaaagataaatattgtatgattttatttatatgaggtattgtatttagagaagttaatttttagataggaagtaaaatggtggttgttaggtattgtggggagaagtgaatggggagttgttgttaaataggtatagagttttaggtttgtaatatgaagcgttttagagatggatggtggtgatggttgtataataatgggaatatatttaatgttattgtatattttaagatggttgagttgttatattttatgtttattttattataattaaaaggaaaagagagatagagaattagtagtttattaagtaaaaataataataatgtatgtgggtgtataatatatgtagaagtataatatttttagtatagatgttggggaaggatggaagtaaatggttgttagttttttatattttgtataaagtagtgtattattatttggaggtggattgtgatgaagatttatattattaattttaaaattattattaaattttataagaagttattttttttaagtgataaatgagataaaataattataaaaatgtttttgtttattgaaaaggtttagaaatagcggttttttggagtagtaagtataagcgtatatatatattaaaaattgttaaaatgtatattttaaatatgtgtaggttaggtgcggtggtttacgtttgtaattttagtattttgggaggttgtttagtattttgggaggttgaggtaggcggattatttgaggttaggagtttgagattagtatagttaataaggcgaaatttcgtttttattaaaaatataaaaattagttaggtgtggtggcgcgtggttgtaattttagttatttagaagtttgaggtaggagaattatttgaattcgggaggtagaggttatagtgagttgagattacgttattgtattttagtttgtgtaataaagtaagattatattttaaaaaataaaataaaataaatatatacgtatgtgtagttatgtttatattttaataaaattgttttaaataaaagtacgatgagttgtttggataggtgaaaattttagtggtagttataatgtttttttatagatttttttttttttttttttttagggatataataatattgtattttttgttttttttgaaattaagtgttgttatatgatttgttttggtttatgaaatgtaaatagaagtttttatagtaatttttggtaagtgtttttttaattaatgtataattagttttaatgtatagttatttttatttgagtgattgtggagatgtatttagataaaatatattcggttagtttgggtttaggagggtttatgagtaagtttttgttcgtgggagtggataggtagtttgagcgaggaattttgttgcgtaagttataaatgggttgagagatttgtattattgtagttaatttagtttattttgattgaatattttttagtaatagaggtatttgattatggatatagttttgatagtggaaggtaaagtggtttagtgatttttgaggtgtttatttttttgaagatgtgagttatatgttatagtttttattagtttgggtgtggaattgagtttttatttttaagtttttatttgtatgtttggaatttggtttttttttaaggtaatatttagggattgttgagtttttaagtgtttagatataagtttatttattttttttaattttagttattaaagaaagttattattttatcgaggttgtgattagtgttttttattaggtttagttttaagaattttatgtattaagttttagggttttttacgttgggtattaaatgtaaggttatgttatattttttaatattgttaggaagtaggaaggaaagtattagatatttgaaggatttattgatttggaaaaaagtgggatttagttttagtttgaaaaaatttttttttataattatattttttttaggtaaatttttaatatgtttaggtttttgtatatttgtttttattgcgttataaattttttttaaagagaagggagacgataattggagaaaattataaattaattttttaatattttttttttttatataattagtagtgttttagaattaaagtagtttttaaaaatattttgaagaaatttatttttttggatttttaaagatttaaagttattgagatgtaaagaattttttatagtattatttaaggatattgaagggtttttttaaatttcgtttttgtatatttttttttttagttgtgatattgtagttatatttgtaaattaaatgatttttttgggtggtttttttaaaataaatcgttttttttaaaggtttatttaagtttttattttttataaagtagaaaattgtttatagttttgaaatggtagtataatttgtatttttattattttgtttaggttttagggatttttggtttagttttagttaataatgttaattattattgtagtttattgattttttttttgtatatagtagtttttcgtaggaagaaaataaatttaacgaataggaataattttaggtgatgttgtttttttttcgttttttgggattattgttttttttttgaaatggttttaattagaattaatttgttatatttaggagtttaaattaaatacgatatgtagagagataaataagaaagtaataaatgatttgagttattgaataagaaatatatataaaatagttttaggaattatagttgttataattttttattatggggttttttttgtgatttagaaaaaattgtatttatttgttattaggatcggagataagagaaaaatatcgatttaaatagttattggggaagagggaagttttgatgttaatttatgtggaggatggagttaaattgatttatatatatatatataaaagtatgtattggtattttttatatagtttaggttatttgggagtttagttaaggatattttgagtattcgattatttattgtgaataaggttgggaattatgaggcgttatgtggttttgattaagtttagatgggttaaatttttaattaaaatttttttttttataaatgtttatttttatattttttatagaaggggattttaatttagttttgtttttgaaattaaattatttaaggttaggtgagatgatttatgtttgtaattttagtaatttgggaggttaaggagggaggatgtttgaatttaggagtttaagattagtttgggtaatataataagattttatttttataaaaaatttaaaaattggcgcggtgtggtcgtgtgagtttttagttttagttatttaggaggttgaggtaggagaatcggttgggttgggttgatagtgttagattttgttaaaaaataaaaattaaaaaaatttttaaatttggaaatatatttttagttgagggtcgggagatattttttaatcgtaatttagaattttttaaaatgggatgtggagagttgtagtttgtagttttgcgatgattttttagtatttgggtattttgcgtttttgttatttcgtttatattcgtttagttttatttaagagggttcggtagtttggagtgaaagtttagttttttaacgggtaaatgaatttgttttttatttatagggcggtttttgcgtggatatttggggtttattgtttttttgttatatattaattaagttttggtttttatcgtaatagcgttagggaagtttttttttggttgatagtcgtagatgatgatcgaagataacgttttaattgagacgggttaatttggtaaatggattgtttttttttttagtgcgggtattttttttttttgttcggtaattggattttattgtttttagttttttgttatttttaaatttgtttatcgttcgtttttattcgatttttttttagggaaatcgggatttagtttttaacgtttttatttgtcgttttgtttattttagcgtatatcgttagagcgtttagttcgcgtacgtgttttcggcgtcgtcgaagtttttacgcgtttcgtttcggttttttcgtgcgtacgcgaacgcggggtggtcgggtttcgcgtagtttatttttttttttttttcgcggtcgcggtcggacggagggtggagggttttgcgtttgcgcggagttggagttcggttgggcgtagtcgttgggagatcggcggttgtcgtgggatcggtcggtttttttttttttcggtttttcgttttaggtttttttttatcgagacgcgtcggcggatcgcgggcgagtgtagtcggtgattcggcgagaggcggcgtcgtttttaagatgtcgtagacggttatgttcgaaatttacggtacgaggttcgggttggcggggcgcgcgggtcgggtcgcggggggcgtcggtggcgcgggttcgggtttgggttgcgggggttttgagggtggcggtggcgcgttcggagtcgcgggacggatttcggaggtgtttgggtttgggatcgggatgggggacgcgggcgttgggggttcgggtggggtagcgggatcgcgggcggcgggacgtggtgtatagcgtattgcgtgattcgtttttttaagtttttttttgttttttttttgtttttgtatttttagcgtttttttttttttagtttaatgtaaataattgaaggtttgaaaagttagtttgatgttcggttttagttgcgatattatttttagcgagtttgtgaagggtttagggcgacgtttgtgttttttaaatattttagtttgattttttttggtttggaattttttgttttatattgggattatagtgaggagttattaataggttaatttatttattttttttttcggagattttttgtttcgtttattttttttttttttttagtgttttttagttttttttgggttgtattttggttatttataaatatgttttgttttttttttaagatcgtaagtattttggaagtaaagttttggttgtttaatttttgttttttttgtagtatttagatttggaggtgtttgataaatattgttttgaataagcgaaattttttttagtgtatatgttgtgtgtttttttttttttttttttttttttggttttgcgtggtaagaataaataatttgtattttgtattagagttgaatattaatagatgtttattagtttttaattatttttttagatgtatgtatttttagattaagattttgatttggagttttatagttttagagagaggtttaagtttaaaattatatattttaagttaaattagttttgtttttatttgttttggtatgttgtttttttttttgtaataaatattg

SEQ ID NO: 390 - DNA, 6086 bp, Artificial Sequence
  chemically treated genomic DNA (Homo sapiens)
tagtatttgttgtagagaaggaagtagtatgttaggatagatggagataggattaatttggtttgaggtatgtaattttgaatttgagtttttttttgggattgtaaaattttaaattaaagttttaatttgagaatatatatatttgaaagagtgattagggattggtaaatatttattaatatttaattttgatataaagtataagttgtttatttttattacgtaaggttaaaaaaggggagaaaaaaaaaaaagtatatagtatatgtattgggaaaggtttcgtttatttaaaatagtatttgttaagtatttttaggtttgggtgttgtaggggaaataaagattaaatagttagggttttgtttttaaggtgtttacggttttaagaaggagataagatatgtttataaatagttaaaatgtaatttagaaaaggttaaaaaatattgagagggagggagaaataaacgaagtaagaggttttcggaggaagagatgaatgaattagtttattaataattttttattgtaattttaatgtaaagtaaggaattttaaattaggaaaggttaaattgaagtatttgaggaatataggcgtcgttttaagttttttataggttcgttggggataatatcgtagttgaaatcgaatattaagttggttttttaaatttttagttatttatattagattgagaggggaaaagcgttaagagtgtaagagtagagaaagagtaagaggaaatttgaaaaggcggattacgtaatgcgttgtgtattacgtttcgtcgttcgcgatttcgttattttattcgagtttttagcgttcgcgttttttatttcggttttaagtttagatattttcgagattcgtttcgcggtttcgggcgcgttatcgttatttttaagattttcgtagtttaggttcgggttcgcgttatcgacgtttttcgcggttcgattcgcgcgtttcgttagttcgggtttcgtatcgtaggtttcggatatggtcgtttgcgatattttgggagcggcgtcgtttttcgtcgggttatcggttgtattcgttcgcggttcgtcggcgcgtttcggtggggaaggatttggggcgggggatcggaggagggaggggtcgatcggttttacggtaatcgtcggttttttagcggttgcgtttagtcggattttagtttcgcgtaggcgtagggttttttatttttcgttcggtcgcgatcgcgaggaggaagaggagatgggttacgcgaggttcggttatttcgcgttcgcgtgcgtacggggaggtcggggcggggcgcgtgaggatttcggcggcgtcggaagtacgtgcgcgggttgggcgttttggcggtgtgcgttgaggtgggtagagcggtaggtgggggcgttgggggttgagtttcgatttttttgagggagggtcgggtagaggcgggcggtgggtaggtttgggggtgatagagggttggggatagtggggtttagttgtcggatagaggaggaaggtgttcgtattggggaggaaagtagtttatttgttaaattggttcgttttagttaagacgttgttttcggttattatttgcggttgttagttaggaaaaaatttttttgacgttgttacgatggaggttagaatttggttaatgtgtaataaggaggtagtaggttttaggtgtttacgtagaggtcgttttgtgaatgggaggtaggtttatttattcgttgggaagttaagtttttattttaaattgtcgggtttttttggatggagttgagcgggtgtgggcggaatgatagaagcgtaagatgtttaggtgttaaaaggttatcgtaagattataggttgtagttttttatattttattttagagggttttggattacggttgagaagtatttttcggtttttagttggggatgtgtttttaaatttaggagtttttttaatttttattttttaatagggtttggtattgttagtttagtttaatcgatttttttgttttagttttttgagtagttggggttaggggtttatacgattatatcgcgttaatttttaaattttttgtagagatggggttttgttatgttgtttaggttggttttgaatttttgagtttaagtattttttttttttggttttttaaattgttgggattataggtatgagttattttatttggttttggatagtttggttttagaagtaaaattgagttagaatttttttttgtgggaaatgtagagataaatatttatgggaaagagaattttggttgaggatttggtttatttgagtttgattagggttatatagcgttttatagtttttaattttgtttataataggtagtcgaatgtttaaaatatttttggttaagtttttaagtgatttggattgtgtggaaaatgttagtatatatttttgtgtgtgtgtgtgtgagttagtttggttttattttttatataaattggtattagagttttttttttttttagtggttatttgggtcggtattttttttttgttttcgattttaataataaataaatgtagttttttttaaattatagagaaggttttatggtgaaaagttgtgatagttgtaatttttaaaattgttttatatatattttttgtttagtggtttagattatttgttgtttttttgtttgtttttttgtatgtcgtgtttgatttaggtttttgagtataatagattggttttgattaaaattattttagaggaaagatagtgattttaggaagcgggaagaaaatagtattatttgaagttatttttattcgttagatttgttttttttttgcgaaaaattgttatgtataagaaagaagttagtgagttgtagtgatagttagtattattgattgaaattggattagagatttttgaaatttggataaggtggtagaaatataaattatgttgttattttaaagttgtgggtagttttttattttgtggaaaatgaagatttaggtaggtttttgggaaagacgatttgttttggaaaaattatttaaagggattatttggtttgtaaatgtaattgtagtattataattggaagaagaaatatataagggcgaggtttgaaggagttttttagtatttttggatgatattgtggaagattttttgtattttagtaattttggatttttgaagatttaagaaaataaatttttttaaaatatttttagagattgttttgattttgaggtattgttgattatatggaagaaaaaaatattggaagattaatttgtggttttttttagttatcgttttttttttttttgggggaggtttgtgacgtagtaaaaatagatatataaaagtttaggtatgttagagatttgtttaagggaaatgtaattatgaagaaggatttttttaagttgaaattagattttatttttttttaggttagtgggttttttaagtatttggtatttttttttttgttttttgataatgttaaagaatgtggtatgattttatatttaatgtttaacgtgaggagttttggggtttgatgtatgagatttttggagttaggtttggtggagggtattggttatagtttcggtggaatggtgattttttttggtaattggaattgaagaaaatgagtggatttgtgtttgagtatttgggaatttagtaatttttgggtgttattttgagaaggagttaaattttagatatataagtggagatttgaaaatggaagtttaattttatatttaggttggtggagattatgatatataatttatatttttaagaaagtagatattttagaggttattgggttattttattttttattgttaaaattatgtttatgattagatatttttgttgttagggaatatttagttagaatgggttagattaattgtagtaatgtagattttttaatttatttatgatttacgtagtaaagtttttcgtttagattatttgtttatttttacgagtagagatttgtttatgggtttttttagatttaggttgatcgagtgtgttttatttaaatgtatttttataattatttaggtaggagtggttatgtattaggattgattgtgtattagttagagaagtatttattaggaattgttataagaatttttatttatattttatgggttaaagtaagttatgtggtaatatttaattttaaagaggataggaaatgtaatattgttatgtttttgaaagaaaggagaagagaaagtttatggaaagatattatgattattattggaatttttatttgtttaggtagtttatcgtgtttttatttgaaataattttattgaagtataggtataattgtatatacgtatgtatttattttattttattttttgagatgtagttttgttttgttgtataggttggaatgtagtggcgtgattttagtttattatgatttttgtttttcgggtttaagtgatttttttgttttagatttttgagtagttgggattatagttacgcgttattatatttggttaatttttgtatttttagtagagacggggtttcgttttgttggttgtgttggttttaaatttttgattttaggtaattcgtttgttttagttttttaaagtgttgggtagttttttaaagtgttgggattataggcgtgagttatcgtatttggtttgtatatatttaaagtgtatattttgataatttttaatatatatgtacgtttgtgtttgttgttttaggggatcgttatttttaggtttttttagtggatagaggtatttttgtgattgttttattttatttgttatttaggaagaataattttttgtgaggtttagtggtggttttggggttgatagtataggtttttattatagtttatttttaagtgataatatattattttatatagagtataagaaattgataattatttgtttttatttttttttagtatttgtgttggggatgttgtatttttatatatgttgtatatttatatatattgttattgtttttatttaataagttattaattttttgttttttttttttttttaattgtggtaaaatagatataaaatgtagtaatttagttattttgaaatgtatagtggtattaaatatatttttattgttgtgtaattattattattatttatttttagaacgttttatgttgtaaatttgaaattttgtatttgtttaataataattttttatttatttttttttatagtgtttggtaattattattttattttttgtttaggaattggtttttttaggtatagtattttatataaatggagttatatagtatttgttttttttttattgtcgtattttatttagtataatgtttttaagatttatttgtaatattgtagaatgtgttagaattttttttttgtttaagattgaatattatttaatattttgtatatatatattgtatttttagttaattttttttaatagatttaaataataagaaaaaagtgttttatatttatttatatagttattatatttaagattttttatttttttgtatagattagatttttatggttttattttttttttgtttgaagggttttttttgatagattttgaagtgtagattttttggtgattaatttttttagtttttatatgtttaaaaaagtttttattttatttttgtgtttgaagttatttttgtttaatttcgatttttagggtttttaattttttttttttaatatgaagatattgttttagtgttttttggtttattttgttttcgataaggagtgaattgttatttttatttttattttttttatgtaacgtgttttttatttttgtttggttttaagattttatttgtattattagtttgaagtaatttgattatgatgtgttttggtgttgattttttttaaagtttttgtttttgagttttattgaatttttttggtttttgagtttatagttgttattagatttggagtttttttagttattatttttt

SEQ ID NO: 391 - DNA, 7261 bp, Artificial Sequence
  chemically treated genomic DNA (Homo sapiens)
tggagggtttagggtaggggtattttaggaattgagaaattttggagttgaaatggagttgagagatgatttataattttttagtttttaatagaagaaattaagtttagagttattaattttattaataatagaattaggatatgtagagtttaagttattattagaagattttttttattggaatattatattaaattttgttttagttggaagatttgggttattttgtttgtttttttttttgggttattaaatgaatggtttttgggtttgcgttttgttgatttaaatttttgaattggaaatataggtttatggatgggaggataaataatttttttttttttatgtttttttttagagataatggatttgaggaaaatattaaattagatggttattaagtttttaaagtagaaacggttttttagtttgaggattattttagtataggtattgtattagagtttataatgtggatttttttcgtagttggattaggttatttatattagtattatttttttttagatgtttttgtttgataaattttgaatttatttttttgtttttagaatagagtttataatttttttaagaagaggaagtaaattaaagtttggaatttaaagttttttttagtagagttaatagattaataaagaaagggagtttttttgtttgtggtattgtttatatttatagggttttatatttttatttgtttttatagagtaaaacgaggttagaaatatttatttttttttttttttggtgtgtgtgtgtgtggcgagagagagagagagatagagagagagatggttagttggggaaaaaaaataatttttttgtggatattattgtgtgtgggggggtagggggtacggtgaaaggtgggataagttttttttatgttgggaagtttaagttgtagattttaaattaagaggatataaagagatttttagttgtatttttattggaaaaaagttaggatttatttttgagttaagttttgaaatatgttttatttttaatttatttagaggaaggagattgtttagaagttataatttaattaattaattgtatttagtgggtaataaagatattatattttgtgtttgagatattaatttttattgattagggtaaggtataattttgaagttgttaaaatgagggtagtttttattattttgaagtttattttagaagttttagtgaaattttttttgttttttaatggtaaagttattttttttttttaagattttatttttattttaggagttatttatttgattgtttttatgatttaagggtttgtttggattttttggttttaggttgttagtagggaaagttgaagtttttttgtaaattataaagtaagatttacggatttattggtaggtttatggggaggtgagggattattatatattttaattaaacgaaatattatgtttttaaagattgtttgatttggttttttatttggttttgtttttagaatttgagttatcgttaagtggaaatattttaggtagttagataatatttttatgtttttttaaggatatgaatatgtatttttatttaggtaaagtgagtaagtattagtaaggggagataggttttaatggttatttggttgattatgacgttggaatatttaaagttgatatgtgagtatgttaggaatatattatgtttattattgatgtttcgagggtataggttggggagataggtatagtaggaattattagatatataagcgagggttgataagagtaataataatagatagttttgtttatgagagaagggaatggggcgaaataaggtatgtaaaaaattttttggttaggtacggtggtttatgtttgtaattttagtattttgggaggttgaggcgggtggattatttgaggttaggagtttaagattagtttggttaatatggtgagatttttatttttattaaaaatataaaaaattagttaggggtggtggcgggtgtttgtaattttagttatttgggaggttgaggtaggagaattttttgaatttgggagatggaggttgtagtgagttgaggtcgcgttattgtattttagtttgggtaataagagtgaaatttcgttttaaaaaaaaaaaaaaaaaaaaattttttggaagtagagttcgtaattttttgattttggatggggattggggtataatattttataagtatatcgaaaggtttacgttttattaaatattttattgtttttagaaaggattagttataattttttttaaaggtatagaaataatatagaaaatttaaaaagtgagaatttataattttagtagttatgaggtaagaaaataacgggatggggtttgtgtgaggaggtatagggagggttgtttcggtatataggagtaggtagtttgttttttaagtttgtagttttcgtttggatgtttgttttggggatttttttgttgtattttttttttagggtttttaagtagtgaatttttttttttttagttttgttttttaagttttttatattttttattttatattgtgtattttttattttattttaagttttttttttatatgttttttttaatatgtttattgttttttagattttatttaggtttacgtttttatttttagatttttgtttttagtatttttcgatttaatattcgggtttttcgttttttttgtttagatattttttttgttgttttttttttttcgttgtttttttgttgtatatttaagttatatttttacggaggagtttcgcgtttggtagtttttgtttgttttcggttttttgttttgatttgtttttcgtttttttaggattttcgagtttttgttatttcgtttttaatattggggtttcgggttaaattttttcggttattttttaatttttcggttttagtttaattcgcgatttttttttagtttgggttttttttttcgtttacgtttttttttttttttacgttagagttttttaggtttcgttttcggttatcgaggtttcgttttcgttttatttttattaagtttcgttttttatttatttgaggtgttttcgcgcgcgcgtaggttgtgaggggttggggagaggggatagtgttgggggagagggaggcgagggggcgggggttttttattttggttcgggcggtttagtgcggggggagtggggttattgaggcggcggtagtcgtcgggtcggagttaggattcgggcgtttagaggcggcggtggcggcggttttatttttattagtagttttatttgagaagggatttgtttttttaaatatttttttttattatagtcgtttttttttttttaataattttcggttttattattaggcgataggcggcgtggtcgaatatcgagcgtttttaagttcgggagattgttgggggaaaatgggagaggagttaggggagagtagtcgagcgtcgaaagatttaaattcgaaaggtattatcgtttgtcgaaggtaatttaaaaattagtttttaatttgtatttagtttgtaatttaagtatacgttggacgttcgatgtggtttggtacgttaggttttagagttaagttttttttttgtattttgtgaattttaaaaatttgagataggttttagtttaggaagtttttggtaaaatttaattttgttaaagttagggacgtacgttcgtaacgtagttttaggaggttttgacgatatgtgttttaggtgattggagtatagtttggtgttatatattttagggagataagagatattaattaatatatgtaaaggcgggataatttaagttgggaggaggtttttaggttataggtagataagaggtaaatggagcggggcgtagtggtttacgtttgtaattttagtattttgggaggtcgaggcgggcggattatttgaggttaggagtttaagattagtttggttaatatggtgaaattttatttttattaaaaataaaaaattagtcgggtgtggtggttcgcgtttgtagttttagttatttgggaggttgaggtaggagaatcgtttgaattcgggaggcggaggttgtagtgagtcgagatcgttttattgtattttagtttgagtaatagagtgagattttttttttaaaaaaaaaaaaaaaaaaaaaaaaagtcgggtttggtggtttacgtttgtaattttagtattttgggaggtcgaggtagacgtattgtttgagtttaggagttcgagattagtttaggtaatatggtgaaatttatttttattaaaatataaaagaaattagtcgggcgtggcggtgtgcgtttgtcgttttagttatttgggaggttgagatagaattgtttgaatttcggagacggaggttgtagtgagcggagatcgtgttattgtattttagtttgggtaataagagtgacgttttaaaaaaaaagaagaaaaggaaaagaagagtttagtattaggatgttaaggagatattggggatttagggtatcggtgggtggatttggatattttttaggttagttaaaggttgattattttgtgtgatttaaataaaaaattttgaagatttggtggggaattattggggaattaaaaatttttagtttttagtttttttatttcggtttttttggtagttagagattatgtggtagggtagattttagaagtagtttttattttgttttttttaatttttattattgaggattagttgtttgggatttttttagagttaagtttttatagaagtaaggagatgaagaggttttatttttttttgaaaagcgattgtagttttaatggacgtatgtttaattttatttattttttttttttgtaggagtgttgaagtttggaaatttttttttttttttttttttttttttatagtatttttttttttttatttttttttattttgataatttggttatgattagtagaagtatagttaggtttaatgggtaattttaggttagtaaaatttgttagtttaaattggttttgttgggagaatttgtagtgggaaagttaagtttggtattacgttttgttaaagggtagttttatgagtattaggagagtattattggaggtgagtgttttggggtaataggagattgaatgtttggtaagggtttttttttttttagatggagttttgttttgttatttaggttggagtgtagtggcgtaattttggtttattgtaatttttgttttttaggttcgagcgatttttatgttttagtttttcgagtaattgggattataggtgtatatcgtggtatttgtttaatttttgtatttttagtggagagggggttttattattatgttggttaggttggttttaaatttttgattttaggtgatttgtttgtttcggttttttaaagtgttgggattataggcgtgagttattacgtcgggttcggtaaggtatttgaaaagagatataagatttgattatggagttggtttttttagttttatttttttttttagaaatggaaatttattataaaatatagaggtcggttttagtggtttatttttttgggaggttaagatgggcggattttttgaagttaggagttcgagattagtttgtttatatggcgaaatttaatttattaaaaatataaagaaaaaatttttttagggtgttaattatattaaggattttttatgagaattttttattattttttttttttgttatttttatttatttatttatttatttttgagacggagtttttgtcgtttagattggagtgtagtggtgtaattttggtttattgtaatttttgttttttaggtttaagtgattttcgtgttttagttttttgagtagcggagattataggtatatattattatgttcggttaatttttgtatttgtatagagatagggttttatcgtgttggttaggttggttttaaatttttgattttaagtgatttattcgtttcggttttttaaagtgttgggattataagtatgagttatcgtgtttggttttttttttttttttattagttattttggaaatgtatttttggatttgtagtagattatatgaaaaagtaatagttaaataatattgataatgatgggatttgttattaagttttaaaattttttaattaattttttttttttttttttttttttttggatattgagttttattttgttgtttaggttggagtgtagtggtgtagtggttgtttattgtaattttcgtttttttagtttaagtatttttgttgttttagttttttaagtagttggaattataggcgtttattattatgtttggttaatttttgtgtttttagtagaggcggggttttattatgttggttaggttggtttcgaatttttgattttaagttatttatttgttttggttttttaaagtgttgggattataggtatgagttattgcgtttagttaattttttaattaatttttttgtttgtttgcgtttgtttgtttgttttttgagacggagtttcgtttttgttgtttaggttgaagtgtagtggcgttattttggtttattgtaatttttattttttaagtttaagggattttttagttttagtttttcgagtagttgtgattataggtgtttattattacgtttggttaatttttgtatttttagtagagacgggttttgtcgtgttggttagattggtttcgaatttttgattttaggtgatttatttgttttagtttttattttttaaagtgttgggattataggcgtgagttatcgtgtttagtttaattttttaattaatttttgatgtgatttttatttgaagttattttttttgttatttgttatttttttattttggttagaagaaggatgattcgtataagtgttagtttttttgttttttttagtttatgatgtatttttattttttagttagtgatatttttggtaggaaggatttagttaagggtagttttaattttggttttaagatttatatgtaaggagaatttaaaatttttttttgtagttgattattttgggtggtgattggttttagtgtagggtagttatattttgaagggggggagggatgtttttatttatttttttatttatagtatttttttttttatttttttatttatagt

SEQ ID NO: 392 - DNA, 7261 bp, Artificial Sequence
  chemically treated genomic DNA (Homo sapiens)
gttatggatgagagaatggaggggaagatgttgtaagtgggaggatgaatgggaatatttttttttttttttaaaatgtaattgttttatattaagattagttattatttaggatagttagttataggaaaaggttttgagttttttttatatgtaagttttgaaattaggattaagattgtttttggttaagttttttttgttagaaatgttattagttaaggaatgggggtatattataaattaagagggatagaagaattggtatttatacgagttattttttttttaattaaaataggagaataataaatgatagagaaaatagttttagataaaagttatattaagaattaattagaagattgggttgggtacggtagtttacgtttgtaattttagtattttgggaggtgggggttgaggtaggtggattatttgaggttaggagttcgagattagtttggttaatacggtaaaattcgtttttattaaaaatataaaaattagttaggcgtggtggtggatatttgtaattatagttattcgggaggttgaggttggagaattttttgaatttgggaggtggaggttgtagtgagttaagatggcgttattgtattttagtttgggtaataagagcggaatttcgttttaaaaaataaataaataaacgtaaataaataaaagaattaattagaggattggttgggcgtagtggtttatgtttgtaattttagtattttgggaggttaaggtaggtggatggtttgaggttaggagttcgagattagtttggttaatatagtgaaatttcgtttttattaaaaatataaaagttaattaggtatggtgatggacgtttgtaattttagttatttgggaggttgaggtagtagaagtgtttgaattggggaagcggaagttgtaatgggtaattattgtattattgtattttagtttgggtaatagggtgagatttagtatttaaaaaaaaaaaaaaaaaaaaaaagaattaattagaagattttaaagtttgatggtaagttttattattattaatattatttggttgttatttttttatataatttgttgtaggtttaggaatatatttttaagatgattaataaaaaggggaaagaggttaggtacggtggtttatgtttgtaattttagtattttgggaggtcgaggcgggtggattatttgaagttaggagtttgagattagtttggttaatacggtgaaattttgtttttatataaatataaaaattagtcgggtatggtggtatgtgtttgtaattttcgttgtttaggaggttgaggtacgagaattatttgaatttgggaggtagaagttgtaatgagttaagattgtattattgtattttagtttgggcgatagagatttcgttttaaaaataaataaataaataaataaaaataataaggggaaggaataataggaagtttttataaaagatttttgatgtaattagtattttaagggggttttttttttgtatttttagtagattagatttcgttatgtgggtaggttggtttcgaatttttgattttaggggattcgtttattttggttttttaaaggggtgggttattgggatcggtttttgtgttttataatgggtttttatttttggggaaaagaatgggattaagagggttagttttataattaggttttatatttttttttaaatgttttatcggattcggcgtggtgatttacgtttgtaattttagtattttgggaggtcgaggtaggtagattatttgaggttaggagtttgagattaatttggttaatatgatggtgaaattttttttttattaaaaatataaaaattagataggtgttacggtgtgtatttgtaattttagttattcgggaggttgaggtatgagaatcgttcgaatttgggagatagaggttgtagtaagttaagattgcgttattgtattttagtttgggtaatagagtaagattttatttaaaaaaaaaaaaatttttattaaatatttaattttttattattttaaggtatttatttttaatggtgtttttttggtatttatggaattgttttttgataaaacgtaatattaggtttgatttttttattgtagatttttttagtaggattaatttgaattggtaaattttgttggtttggggttgtttattgggtttagttgtgtttttgttagttatggttagattattagaatgggaaagggtggagggagggggatattgtaaaggggggagggggaaggggaggggatttttaggttttaatatttttgtaagaaaaaaaagtgaataaaattaaatatacgtttattgaagttgtaatcgttttttagagaaggatagaatttttttatttttttgtttttatgaggatttagttttgagaaggttttaggtagttgatttttagtggtaagagttgggaagagtaaaataagaattgtttttggagtttgttttattatataatttttaattgttaagggagtcgaaatagagagattgaaaattgagagtttttaattttttagtaattttttattaggtttttaaagttttttgtttgagttatataaagtgattaatttttagttggtttgaagaatatttagatttatttatcggtattttagatttttagtatttttttggtattttggtgttgagtttttttttttttttttttttttttttttgagacgttatttttgttgtttaggttggagtgtaatggtacgattttcgtttattgtaattttcgttttcggagtttaagtaattttgttttagttttttaggtagttgggacgataggcgtatatcgttacgttcggttaattttttttgtattttagtagagatgggttttattatgttgtttaggttggtttcgaatttttgagtttaggtagtacgtttgtttcggttttttaaagtgttaggattataggcgtgagttattaagttcggttttttttttttttttttttttttttggagaagaagttttattttattgtttaggttggagtgtagtggggcgatttcggtttattgtaattttcgtttttcgggtttaagcgatttttttgttttagttttttaagtagttgggattataggcgcgggttattatattcggttaattttttatttttagtagagatggggttttattatgttggttaggttggttttgaatttttgattttaggtgattcgttcgtttcggttttttaaagtgttgggattataggcgtgagttattgcgtttcgttttatttattttttatttatttatgatttggaagtttttttttagtttgagttgtttcgtttttatatatattgattgatgttttttgtttttttaaaatgtataatattaagttgtgttttagttatttagggtatatgtcgttaggattttttgaggttgcgttacgggcgtgcgtttttaattttggtaaaattaagttttgttaaaaattttttaaattgagatttgttttagatttttgggatttataaggtatagagggaaaatttggttttagggtttgacgtgttaggttatatcgggcgtttagcgtgtgtttagattgtaaattgggtgtagattaaaggttagtttttgggttattttcggtagacgatggtgtttttcggatttgaatttttcggcgttcggttatttttttttagttttttttttatttttttttagtagtttttcgggtttggggacgttcggtgttcggttacgtcgtttgtcgtttggtagtgggatcggaagttgttagggggagggggacggttgtgatggggggggatatttgggggggtaagtttttttttaggtgaagttgttgatggagatggagtcgtcgttatcgtcgtttttgagcgttcgggttttggtttcggttcggcgattgtcgtcgttttagtgattttatttttttcgtattgggtcgttcgggttagagtgggggattttcgttttttcgttttttttttttttaatattgttttttttttttaattttttatagtttgcgcgcgcgcggagatattttaggtgagtgaggggcggggtttggtgggggtaaagcgggggcggggtttcggtagtcgggggcggggtttgaggggttttggcgtgaaggaggggggagacgtgggcgggggaaggggtttaggttgagagagggtcgcgggttgggttggggtcggagggttggaagatggtcgggggagtttggttcgaggttttagtattaagagcgaggtagtagggattcgggggttttaaaaaggcgggagatagattaaggtaaggggtcgaggataggtaggagttgttaggcgcggggttttttcgtggggatgtggtttgggtatatagtagaaggatagcgaggagaaaggagtagtaaagagggtatttgaataaaaaaagcgagggattcgggtgttgggtcgaggaatgttgaagataggaatttggggataaagacgtaggtttaggtgagatttgggaggtaatgagtatattgggagaaatatgtagagaagaaatttaggatggagtgagaagtgtatagtgtagggtgagaggtgtagggaatttgggaagtaaggttgggaaagaagagatttattgtttgagagttttaagaaagaaatgtaatagaggaatttttagggtagatatttagacgggagttgtaaatttgggaagtaggttgtttgtttttgtgtatcgaaatagttttttttgtatttttttatataaattttatttcgttatttttttattttatggttgttagagttgtaggtttttattttttaaattttttatattatttttgtgtttttaaaaaaaattatgattagttttttttgggaatagtggagtgtttaatggaacgtggatttttcgatatgtttatgaaatattgtattttaatttttatttaaggttaagaagttacgaattttgtttttaggaaatttttttttttttttttttttgagacggagttttatttttgttgtttaggttggggtgtaatggcgcgattttagtttattgtaatttttattttttaggtttaagagatttttttgttttagttttttaagtagttgggattataggtattcgttattatttttggttaattttttgtatttttagtagagatgggggttttattatgttggttaggttggttttgaatttttgattttaggtgatttattcgttttagttttttaaagtgttgggattataggtatgagttatcgtgtttggttagaaaattttttgtatattttatttcgttttattttttttttttatgaataaaattgtttattgttgttatttttgttaattttcgtttatatgtttaatagtttttattgtgtttgtttttttagtttgtgttttcgaagtattaatggtgggtatggtatgtttttgatatgtttatatgttagttttagatgttttaacgttatggttaattagatgattattgaagtttgtttttttttattgatatttgtttattttgtttgggtgaagatatatgtttatatttttaaggaagtatgaaaatgttatttgattatttagaatatttttatttaacgataatttagattttgaggataaggttagataaaaggttaaattagataatttttgaaagtatagtgtttcgtttggttggggtgtatggtaattttttatttttttatggatttgttagtaggttcgtgaattttgttttatggtttgtaggaggattttagttttttttattaatagtttaaagttagagaatttagatagatttttgggttatgagaatagttagatgagtagtttttgagataaaaataaaattttaaaagaagaaaatagttttattattgggaagtaagagaagttttattggagtttttggggtgggttttagaatggtgagagttgtttttattttggtagttttagaattatattttgttttagttaatagaagttgatgttttaaatataaaatataatgtttttgttgtttattgagtgtagttagttagttgaattgtagtttttgggtaattttttttttttgagtaggttaagggtaaggtatattttaggatttggtttagaaataagttttgatttttttttagtgaaaatgtaattgaaagtttttttatgtttttttagtttgaaatttgtagtttgaattttttagtatgggagaaatttattttattttttatcgtattttttgtttttttatatatagtagtatttataaaggaattattttttttttttaattggttatttttttttttgtttttttttttttttcgttatatatatatatattaaagaaaaagaaagataggtatttttagtttcgttttattttgtaggaataaataagagtgtgggattttgtgagtgtggataatgttataggtaaagggattttttttttttattggtttgttgattttgttgaagaaagttttgaattttaggttttgatttgttttttttttttagaagagttatggattttgttttggaaatagagagataggtttaaagtttattagataaaggtatttaagaaagggtagtgttgatatgaatgatttggtttagttgcggggaggatttatattgtaggttttgatgtaatatttatgttggggtagtttttaagttaagaggtcgtttttattttagagatttaatgattatttagtttggtgttttttttaggtttattatttttgaaaagagatataggaggaagaggattatttatttttttatttataagtttgtgtttttagtttaaggatttaggttagtaagacgtagatttaaaaattatttatttaataatttaagaaagaaggtaagtagggtggtttaaattttttaattggggtaagatttaatatagtgttttagtggaaagaattttttaatggtaatttggattttatatgttttaattttgttgttaatgagattgatgattttgggtttagttttttttgttaaaaattaggaaattgtagattattttttaattttattttagttttaggattttttagtttttggagtatttttgttttagatttttta

SEQ ID NO: 393 - DNA, 9402 bp, Artificial Sequence
  chemically treated genomic DNA (Homo sapiens)
atattatgtttttatatagttatatgaatggtagaaaaatggtagtttttttttatttatttttttttattaaggaagaaaatatgtttttttattttttttttttttttagaataaaaaaagtttttagtatattttttttattttttattggtttagatggatttatgtgtttataatttagttgaagggaggttggaaatatatttgttatttttagtatatatggtggaagtatgtgtgtgtgttatgtgtgtattgttggatatgtaattattagtgtttgttattaagaataagatgaaattgattgggcgtagtggtttacgtttgtaattttagtattttgggaggttaaggtaggaggattatttgaggttaggagtttgagattagtttggttaatatggtgaaatttcgtttttattgaaaatataaaaattagttggatatggtggtatatttttgtaattttagttatttaggaggttgaggtaggagaatcgtttgaatttaggaagtggaggttgtagtgagtcgagatcggttattgtattttagtttggatagagtaagattttgtttttaaaaaggaaaaagagaaattttagttaagtatagtggtttacgtttgtagttttagtattttgggagagtaagatgggtagattatttaaggtcgggggttcgagattagtttgattaatatggagaaattttatttttagtaaaaatatataattagttgggcgtgatggtatatgtttgtaattttagttatttaggaggttgaggtgggagaattgtttgaattcgataggcggaggttgcggtgagtcgagattacgttattgtattttagttcgggtaataagagtaaaattttgttttaaaaaaaaaaaaaaaaaaaaaatttagtttttttgtaagaagttttgtgttttttagggtagaagataagttataattttattataatttttgtgtgatagattttttatatatttttgggttttaatttagatatgatttttaaatagataatgaaagttgttttaggtattttgaatttggagttgtgaagattgtttttttttattgtttttaatttttagttataagatttgtttttagtattttttttataagtaatggtttaggaaagaagtattaaattatatgatatatttttgggtaatgttttttttttttaaaatgtttttaattttttttttttgtatgtttaaattttatttattttttgaagatagtgaaaaataattttttttttatttgattttgttagtaaatatttgttgtatgtttattatgtagtaagtattttttaagtattggggatataagatgagatttgatttcgtggaggttatagttaagtagggaatattgataatgaatagtaagtaagaatagagtataatagtataggtaaaggtatttatattgttagtggggatgggagtagatgcgagtaagatttgtgtggtagattgaatgtttgtgtttttttaaaatttatatgttgaaattatagtttttaatgtgatggtattagtaggtggtattttagggaggtgattaggttatgagggtggagtgtttataaatgggattagtttttttgtaagagggagtttagagagtttttttgttttttttttgttatgtgagggtatagtgagaagatggttgtttatgaattaggaagtgggtttttattagatatagtattttttggtattttgtttttggattttttagtttttagttgtgagaaataaatatttgttgtttaagttatttagttatggtattttgttatagtagtttgaatggataaagataatttttttaagtggtaagtgatttaaaagaaaaaaaaaaaaagataatttttttaattgaaggatgagtaggaattggggaagagtggggaagggaggggaagagtgtttgtagtaaagagaagtgagcgtaggaaattatgaaggtgaaaatgttggtgaaaatatttttgaaaagggtttttttaattttttttttttttgagtaatttttttatttgttatattttatagtatttaatatgtaatgtttaggttataaagtttttgaagataaaatttatatagagtatttggtaatatgaaggtagttttagaggataatgaggttgtgtatgtgttaatgtaaaatgaaagtttaaaatattaaaatattttaggtaagaggtggattagattataaggttttttaaaatgatagggaatagtattatttgtttaggtgattatagagattaaagtagtagggaggattgatttataaagttttgtaggaagtataaagtaattatagttttaatttttagatgttattttaaagtttattttaggaagtataatgaaaatttggtatttattagaaagaaaatagttatttatttttgtttgtataatttttttaaaaagttttttggtttaagttgttttttgtatgtgttagggttttgggttaatggtggagaggattttattagatttgataaattatttgtaaaattaaatgtttatgttataagttaggtttttattattttattttagatgtatgttttatttgtatatggttgggagaggaattagaagggagtaaattttgatagagatggtttgaggatatagttgttgttttgataggttagaatagatgatattttaagaattttggtttttttttgtaatttattttaggttagtaatttatttttgggtttgagaaggtatttttttaattttgttatttttatagttaagtaaataattttttaataatgagaaaatgtatataaatgttttgtgaatgatatatataaatgatatatatttgtgtatagatataaatgtaaggatatattttttattatttatttagaaagtttttttgttttttttgtttttttttaagatagggatttgttttgttatttagattttagtgtagtggtgttatattttagtttttaatttttggatttaagtaatttttttgttttaggtttttgagtagtcggaattataggagtatattacgatattcggttattttattttttgtagagatagtgttttgttttgttgtttagtttggtttcgaatttttgggtttaagcgattttatcgtttcggttttttaaagtgttgggattatagacgtgagttatcgcgtttagttgttttatggatttttttttttggagatagagtttcgtttttgttgtttagattggagtgtaatggtgtgattttggtttattgtaattttcgtttttcgtgtttaagcgatttttttgttttagttttttaagtagttgggattataggtattcgttattatattacgttaattttttgtatttttagtagagatggggttttattatgttggttaaggttggtttggaatttttgacgttaggtgatttatttaatttagttttttaaagtgttgggattatagggatgagttattacgttcggtttttttttttttttttttttttttttttttttttgttgagatggagtttcgttttgtcgttaggttggagtgtagtggtgtgatttcggtttattgtaattttcgtttttcgggtttaagcgatttttttgttttagtttttcgagtagttgggattataggcgcgcgttattatttttagttaatttttgtatttttagtagagatagggttttattatgttggttaggatggtttcgattttttgatttcgtgatttattcgttttcgttttttaaagtgttgggattatagtcgtgggttatcgcgtttagttcgttttatggattttgtaagttatttattttttttaagttttagtttttttatttgtaaaattgggaggttatgattttggtagttataatatttttgggagtaatggaggagaatgttatttagtaagatgtttgtgaggaattatgatgagaggatggagaaggtggggtgtgtgtaatggtgaagaagggatttgaggattgtgaggtacggttgagggtttaggaaagaggtttttattataaattttaaggttataggattttatttatattttttgggggattatattttatttttgtttcggtttcgttttcgttttatttttttttttttttttttttttttttttttttttttttaggttgagaggcgttatattttttatggtcgttatagtgtttcgttttttatagttcgagggttgcgcgcgtttttacgttgttattttattcgcgtgtgggttcgtttttagtttttttcgattggtttattatgtaagtgacgtaagggttttagttttttattaatttatttttggtttgtttcgtttttttttggttttttttgacgttagtggaaatttaatttgtttcgtcgtcgtcgtgcgggaggagtcggtagagttgtttaaattaggaaggcgatggcgatggcggtggcgcgtacgtatgtacgtacgtacgtacgttacggtcggcggggtcgtagttcgcgttcgggttcgttcgcgtcgcgttagaggtcgcgtatttagtaggttgggttgcggcggcggcggtagttgtggaagtttaggcgttgcgcgtgagaggttttagatacgtttgcggtttcggtttcgttatttttagttttttttttttaggtttgggagtcgagtgcggaaggagggaacggttttagttttgggaagttagaggatatttttggtttttgtcgatatcgttttttttttttttttagtcgcgggtttcgttcggtgttaggttattttgtcgggaggcggcggcggttgttagtttgtggagagttttgttgttttttagtcgggtttttttatcgggttttgtaggggtcgagagagttcggtgttcgttttttcgttcgtttttttcgttagttggttggagtagtatcggttcgggaggtttttaggttgaggcggcggtcgtttttttagttttataatgtttacgggcggagatttcgggaattcgttgaggaaatttaagttggtgtttttgggggagtaaagcggtgagtgcgtggtttttttatttttggtagttggtcgtagcgttttcgtatcgttttcggtcggttttttcgttcgcggaggttttttgttcgtttcgcgttcgcgttcgttgttatcgtagtttttttcgatgtgtttttcggtgttattggtttttcgttagtggtcgagtttttattttgtttttcgggttttttaattttcgatttttcggtttcgtttttcgtagttcggttattttcggtcgatttgttttttttttttagattttatttcgtttagttttttgtttattttttttttttttcggtttcggttattgttcgtatttcggtttttttttttgagttttatttttattttttgttttttttttagttttttagttttgtgaggtttatttagggaagttttattttcgagagcgggttttttttaattttggttaaggagggtgggatttgggcgttgttttttttagaggtttggttttgcgaagtgttgatgtcgtggaaggtgggaaggggtggtagtagaaaaaattaaatgatttttatttgggtgggaaattagtttgggttatagaggaaatatttgaattggagacgatttgagtatggggtggttgggggtgaaaggggtagcgtcggtagtggagatttttgttttttaggttagatggggttgtggtttgtcggaaaattttattttgtttttttgatttttattattgataatttttttggtaatgttgatgattttttaatttttgttagatgttatgttatgattattttatttggaattttttttattttattttttttttttttttttttaatatgaagtagcgtttgagttttatggtggtataaaagggaattattggggaaatgttaattatttatttttttttgagtattttttaatgatatattgaggatttatgtgagagaaggtttggaataataaatatttttgttttgtcggattttttttggaaaatggagtagagtaggaatagatttattatttagttatttaaattagatttaaatattatttgggttaaataatttttttatgtttaatattttgtattgtttgatgagtgaaattgttatgttatttatttggttaggttttgttgttattgtatttttgtattagatattagattttaattttgtgatggttgtatttacgattattttttgtagtaattttagttttatgttgtattatataaatttgatattcgataatttagagatgattatttttttttgttttttttatattttgtatgtttatttttaaaatttagatattgagagattagttttgagttattaaatattgagtatttattaggtgttttaggtgaggttatagaaaatattagttatttgttttgattggaaggtatgtaagtgatataaattcgtagtttttattattattttgaattatttatattaatttgtatgttattatagaggttaatatttttgtaaaattgtttttagttagaattgggaaattatttttttttttttatgtgtagattatttttttttttttttttttggggggaaaaatataattttttttttttttgtttatatatttttttgaagtaagtataaatttgtgtttttaggtgagtaatttggtagaatttatggagttgtttttagtttagtttttttgtgttaatattaggatagtttttaaatataaaatatagtttattggttattattgataaaaaggatttaaagtgtttattgtgtattttaaggatattattgttttttttatgttgtgatgtatagttatttagtttgtatgaaaaaatttatttatttttttgtttaaaaaggttttagtatgaatggagtgtttaattttttaagtatttttaggttttttttgaattttttgagtatttgtgtatgttttaatgtataatggagagttttatggtttttaatttcgtattttgtttaagtttttattattttttttattttattattgaagtttggttagattttttttaatagattttattttttagaatagttttagatttatagaaaaattgaaaagatagtgtagagtttttatatatttatatatttagttttttttgttattaatattttgtattagtatggtatatttgttaataattaatgaattaatattgatatgttattattaatttaagtttatagtttatttagatttttagttttaatttaatgttttttttttgttttagtatttaatttaggatgtgaagttaattattttttgaggttattatattgttaagtaatgttatttattagttttgataatgaaagattgatttttgtttttatggttagtgtttatagtttttttatgcgttagtagaagtttgtagattttatgtttttttgatgtaattttttatgaattatttatttttaggtttgttagaattttataatttagtttttaaagattgtaatttatggtaaagttttgtttttttttaatagtatttattatatttataattattttattttttatgtgtttgtttttattttttatagaagaatgtaatttttatgaagataaaaattatttttttttgtttagtgtgtttttattgtttagcgtagagttaggtttatagtagttgtttagatatgttgggtaaatgaatgatggttgaatttagtagtaacgaaagttagtagtttatgttatattttttgatatggttacgtaattgatagtttaataataatatttaaaatttatattatttgattgtatataggaatatattagatatttaagggggtagagaaattaatcgtttagaggtttaattattttatttaaaaaataggattgatttgaattttgtatttttttttgagttgagtaaaattcgtttttttttattaaagttgttaaattatttgttattaatgtaacgtatgaaaagtatttaaattatattaatgatgtgtttatggaattgatttgaaattaggttttatttggtttattaaaaatttaagatattaggttgggtgcggtggtttatgtttgtaattttagtattttgggaggttgagataggtgaattatttgaggttagtagtttaagattagtttggttaatatggtggagttttcggtttttttttattttatggttcggtttttataaaaatataaaaattatttaggtatgatggcgggtgggagtttgataatttattttagttatttaggaggttgaggtaggagaatcgtttgaatttgagaggcggagggtgtagtgagttgagattatgttattgtattgtagtttgggtgatagagtgtaatatttatttatttattttataatataaagtgaagttatggatttttggtaattttttgttagagaagtagagagttttatttggttttgaaatgaattttaaaatagttttttttgttagttttttttattttttttttttttttgagacggagtttttgttgttaggttggagtatagtggtgtgatttcggtttattgtaatttttattttttaggtttaagttatttttttgttttagtttttcgagtagttgggattataggcgtgtaattattttgtttagttaagttttgtatttttagtagagatacgattttattatgttggttaggatggtttcgattttttgatttcgtgatttatttacgttggttttttaaggtgttgggattataggcgtgaattatcgtatttggttagttttttttatttttaaaatagtgtagtttttgtagtttttatattttttttaagattattttttgtttttttatttttagggattatattttgatttgttagatgaagtggatttaagtttttattaattttttttgttagggttaagtaagtgtttatttggttttttgtgaattaggaatgttagtatataataatagaatgtttttaatttttaattatagattgtttatttgtgtttttaaattgggagatggttgtttgtgtttggagaaagttattttgataattttggggttatatgggttttaattatttttagtagaattattgtaggtattttttattgattttaattgtagttttttgtagaaaaattttttgagaatttaatgtaatgtgtttattgagtaaatttttttttcgttttattttagt

SEQ ID NO: 394 - DNA, 9402 bp, Artificial Sequence
  chemically treated genomic DNA (Homo sapiens)
attgaaatgaaacgaaaaaaagatttgtttagtgaatatattatattgggtttttagaaaatttttttatagagaattgtaattaaagttaatgggaaatatttgtaatggttttattaagaataattaaaatttatatagttttaagattgttaaaatgattttttttaaatatagataattattttttaatttaaaagtataggtaaatagtttatagttaaaagttgaaaatattttgttattatatattgatatttttaatttataaaaggttaagtaaatatttatttggttttaataaaaagaattaatggaggtttaggtttattttatttagtaaattaaagtataatttttgggagtagaaaggtaaaagatagttttagaaggggtatgagggttataagaattatattgttttaagagtgagaaaaattggttaggtgcgatggtttacgtttgtaattttagtattttgggaggttaacgtgggtggattacgaggttaagagatcgagattattttggttaatatggtgaaatcgtgtttttattaaaaatataaaatttagttgggtagggtggttgtacgtttgtagttttagttattcggaaggttgaggtaggagaataatttgaatttaggagatggaggttgtagtgagtcgagattatattattgtattttagtttggtaatagagatttcgttttaaaaaaaaaaaaaaagtgagaaaaattgataagaaaagttgttttaaaatttattttaaaattagatagaattttttatttttttggtaaagaattattaaagatttataattttattttgtattgtgagatagatagatagatattatattttgttatttaggttgtagtgtaatggtatgattttagtttattgtatttttcgttttttaggtttaagcgatttttttgttttagttttttgagtagttggagtgaattattaggtttttattcgttattatatttggataatttttgtatttttgtagagatcgggttatggggtgggggggagtcggggattttattatgttagttaggttggttttgaattgttgattttagatgatttatttattttagttttttaaagtgttgggattataggtatgaattatcgtatttagtttagtattttaaatttttgataagttaaataaaatttaattttaaattagttttatgagtatattattggtataatttgaatattttttatgcgttatattaatagtaaataatttaataattttaataaaggaagacgaattttgtttaatttaaaaaaaagtataaaatttaggttagttttattttttgaatgaaatggttgggtttttaaacgattggtttttttatttttttaagtatttgatatatttttgtatataattaaatgatgtaagttttaagtgttattgttaaattattaattgcgtaattatgttaaagagtgtaatataggttattagttttcgttattattagatttagttattatttatttatttaatatgtttgaatagttattatgagtttggttttacgttaggtaatggggatatattgaataaaaaagaatagtttttatttttatgggagttgtatttttttgtgggaaataaaaataaatatataaaaaataagataattgtaaatgtggtaaatgttattaagaagaaataaggttttgttatagattatagtttttgaaagttgaattgtggaattttaatagatttaaaaataaataatttatgaagagttatattaaaaggatatggagtttatagatttttattaacgtataagaaaattatagatattgattatgaaaatagagattaattttttattgttaaagttaatgaatggtattatttgataatatagtaattttaaaagataattaattttatattttgaattgaatgttgaaatagaaaaaggatattaggttaaaattaaaaatttaaataaattatggatttaagttaataataatatattaatattagtttattaattgttaataaatgtgttatattaatgtaagatgttgataataggggaaattagatgtgtgggtatatgggaattttatattatttttttaatttttttgtaagtttaaaattgttttaaaaaatgaagtttattaaaaaaaatttaattaggttttagtaatggagtggggagggtagtagaggtttaaataaggtacgaaattagaagttataaaattttttattatgtattagaatatatataaatatttaagaaatttaaaggaaatttgaagatatttaggaagttaagtattttatttatgttaaaatttttttagataggaagatgaataggtttttttatgtaaattaaatagttgtgtattataatataaggaaggtaataatatttttagaatgtataataagtattttggattttttttattaataataattaataaattgtattttatgtttggaaattattttgatattgatatagaaaagttggattagaagtaattttataggttttattaagttatttatttaaagatataagtttatatttattttaggaaaatatataagtaaaaaggagggagattgtatttttttttttaaaagggaggaggggaagataatttatatatgaaaggagaaaaatgattttttagttttaattggaggtaattttgtaagagtattaatttttgtgatggtatataaattagtataaatagtttaaagtagtaataaaagttacgaatttatattatttatatgttttttagttaaaataaataattaatgttttttataattttatttaaaatatttagtaggtatttaatgtttgatgatttagaattaattttttaatgtttgaattttaaagatgggtatgtaaagtatgagaaaaataaaggagggtaattatttttgaattgtcgagtgttaagtttgtataatatagtataaaattggaattattataagaagtaatcgtagatataattattataaaattaggatttagtatttaatataaaagtatagtgatagtagaatttgattaggtaaatgatataataattttatttattagatagtatagaatattaagtataaaagaattatttagtttaaatggtatttaaatttaatttaggtaattagatgatgagtttgtttttattttattttattttttaaaggaaattcgataaaataaagatgtttgttattttaagtttttttttatatgaatttttaatatattattggaaaatatttaagaaggaatgaataattaatatttttttagtaatttttttttgtattattatgagatttagacgttgttttatgttgaaaagagaaaaaggggaggtgagatgagaaaaattttaagtaaaatgattatgatatagtatttggtagagattgaaaaattattaatattgttaaaagaattgttagtgatgaaagttaagagaataaaatgaggtttttcgataagttatagttttatttaatttaaggggtaaaaatttttattgtcgacgttattttttttatttttaattattttatgtttaagtcgtttttaatttagatgttttttttatggtttagattaattttttatttaggtgaaaattatttaattttttttattattatttttttttattttttacgatattagtatttcgtagggttaagtttttggggaaaataacgtttagattttattttttttggttaaggttgaagagggttcgttttcgggagtggggtttttttgagtgggttttatagagttgaggaattgggaaaagagtaaggaataagggtggggtttaagaaagggggtcggggtacgggtaatgatcgagatcggaggaagaaagggatggataagaggttgggcggggtgaggtttggggagggagggtagatcgatcggagatggtcggattgcgaggaacggagtcggggagtcgaggattgaagaattcggggaatagggtaaaaattcggttattggcgaagagttagtggtatcggggggtatatcgggaagggttgcggtggtaacgagcgcggacgcgaggcgggtagggagttttcgcggacggaagggtcgatcgggggcggtgcggggacgttgcggttagttgttaggagtaggggagttacgtatttatcgttttgtttttttaggaatattagtttgaatttttttagcggattttcgaagttttcgttcgtggatattgtggaattagaggagcggtcgtcgttttagtttagagatttttcggatcgatgttgttttagttagttgacgaaaaaggcgagcggaagggcgggtatcgagttttttcggtttttgtaaggttcggtggaggagttcggttggagggtagtaggattttttatagattggtagtcgtcgtcgtttttcggtagagtagtttagtatcgagcgaggttcgcggttgggaagggaaggagggcggtgtcggtaggagttaggggtgttttttggttttttaaagttagggtcgtttttttttttcgtattcggtttttagatttggggaagagaagttgagggtggcggagtcggaatcgtagacgtatttgggattttttacgcgtagcgtttgagtttttatagttgtcgtcgtcgtcgtagtttaatttgttgagtgcgcgatttttggcgcggcgcgggcgagttcgggcgcgagttgcggtttcgtcggtcgtggcgtgcgtgcgtgcgtgtatgcgtgcgcgttatcgttatcgttatcgtttttttggtttggatagttttatcggtttttttcgtacggcggcgacggggtaggttaggtttttattggcgttaaaagaagttaggaggaggcggggtaagttagggataagttagtgggaggttggagtttttacgttatttatataatgagttaatcggaaggggttgagggcgagtttatacgcgagtgaggtggtagcgtgagagcgcgcgtagttttcgagttgtggaaagcggagtattgtggcggttataagaagtgtggcgttttttagtttgaggggaggggaaggaaagaaaggggagggggagaagggtggggcggaggcggggtcgggataaaggtggaatatgattttttaaaaagtgtgggtggggttttatagttttaaaatttgtaatgggagttttttttttgagtttttagtcgtgttttatagtttttagattttttttttattattgtatatattttattttttttatttttttattataattttttataggtattttattaaataatatttttttttattgtttttaggaatgttataattgttagaattatggttttttaattttgtagatgaggaaattgaagtttagagggagtaaatgatttgtaaaatttataaagcgggttgggcgcggtggtttacggttgtaattttagtattttgggaggcggaggcgagtggattacgaggttaagagatcgagattattttggttaatatggtgaaattttgtttttattaaaaatgtaaaaattagttgggggtggtggcgcgcgtttgtagttttagttattcgggaagttgaggtaggagaatcgtttgaattcgggaggcggaggttgtagtgagtcgagattatattattgtattttagtttggcgatagagcgagattttattttaatagaaaaaaaaaaaaaaaaaaaaaaaaaaaaaaaagtcgggcgtggtggtttatttttgtaattttagtattttggaaggttgagttgggtggattatttgacgttaggagttttagattagttttggttaatatgatgaaattttatttttattaaaaatataaaaaattaacgtggtgtggtggcgggtgtttgtaattttagttatttgggaggttgaggtaggagaatcgtttgaatacgggaggcggaggttgtagtgagttaaggttatattattgtattttagtttgggtaataagagcgagattttgtttttaaaaaaaaaaatttataaagtagttgggcgcggtggtttacgtttgtaattttagtattttgggaggtcgaggcggtagaatcgtttgagtttaggagttcgagattaggttgggtaataaagtaagatattatttttataaaaaataaaatagtcgaatatcgtggtgtgtttttgtagtttcggttatttaggagtttgaagtagaaggattgtttgagtttaggagttggaggttgaggtatggtattattatattgaaatttgggtgatagaataagtttttgttttaaaaaaaaataaaaaaaataaaaaaattttttaagtgaataataaaaaatatgtttttatatttgtgtttatatataaatgtatattatttgtgtatattatttataaaatatttatgtatatttttttattattggggagttatttgtttagttgtagaaatgataggattgaaaaagtgtttttttaggtttagggatgaattgttgatttagaataaattatagggaagaattaaagtttttaaaatattatttattttggtttattaagataatagttatatttttaaattatttttattaaaatttatttttttttggttttttttttagttatgtgtaggtagaatatgtatttaaaataaaatggtaaaaatttggtttgtagtatggatatttgattttataagtagtttgttagatttaatagggttttttttattattaatttagaattttggtatatataaagagtagtttaaattaagaaattttttaaaaagattatgtaaataaaagtgagtagttattttttttttgatgggtattaagtttttattatgttttttgaaatagattttaaagtaatatttgaggattggaattataattattttgtattttttatagaattttatgaattagttttttttgttgttttggtttttgtagttatttagataggtggtattgttttttgttattttgaagggttttatggtttagtttattttttatttaaaatgttttaatgttttaagtttttattttgtattgatatatatatagttttattattttttgaagttgtttttatattattaagtattttgtgtaagttttgtttttagagattttatggtttaaatattgtatattaagtgttgtagggtatagtaaatggaaaaattatttaggagaaagaggaattagagaggttttttttaagagtatttttattaatatttttatttttatgattttttacgtttatttttttttattgtaaatatttttttttttttttttttatttttttttaatttttatttattttttagttaaagaaattgttttttttttttttttttttaaattatttattatttaaagaagttgtttttgtttatttaggttgttataatagaatattatgattgggtggtttaaataataaatgtttattttttatagttggagattggaaagtttaagagtaaggtattagaagatattgtgtttggtgaaggtttattttttggtttatagataattatttttttattgtgtttttatatggtagaaagagagtaagaaagttttttgggtttttttttataagggaattaattttatttatgagtattttatttttatgatttaattatttttttagggtattatttattaatattattatattggggattatagttttaatatatgaattttggggagatataaatatttagtttattatataagttttgttcgtatttgtttttatttttattaatagtataagtatttttgtttgtattattgtattttatttttatttgttgtttattgttagtgttttttatttgattgtaatttttacgaggttagattttattttgtatttttagtgtttgaagagtgtttgttatatagtaagtatgtagtagatgtttgttgataaaattaaataaaagaggaattattttttattgtttttaaaggatgaatgggatttgggtatgtagagaaggaaggttaagagtattttggagaaagagaatattatttaaaaatatgttatgtaatttgatattttttttttaaattattatttatgaaaaagatgttgagaatagattttgtaattaaaaattaggaataatgggagaggatagtttttatagttttaaatttaaagtatttaaagtagtttttattatttatttaaaggttatatttaaattgaagtttaggagtatgtagggaatttattatatagaaattgtaataaaattatagtttattttttgttttgagagatataaaattttttgtaggaggattgaattttttttttttttttttttttgagatagagttttgtttttgttgttcgggttggagtgtaatggcgtgatttcggtttatcgtaattttcgtttgtcgggtttaagtaatttttttattttagttttttgagtagttgagattataggtatgtgttattacgtttagttaattgtgtatttttattagagatggggtttttttatgttggttaggttagtttcgaattttcgattttagatgatttgtttattttgtttttttaaagtgttgggattataggcgtgagttattgtgtttggttgaaattttttttttttttttttggagatagagttttattttgtttaggttggagtgtagtggtcgatttcggtttattgtaatttttattttttgggtttaagcgatttttttgttttagttttttgagtagttgagattatagaagtgtgttattatgtttagttaatttttgtatttttagtagagacggggttttattatgttggttaggttagttttaaatttttgattttaagtgatttttttgttttggttttttaaagtgttgagattataggcgtgagttattgcgtttagttaattttattttatttttagtgatagatattagtggttgtatatttagtaatgtatatataatatatatatatatttttattatatatattagaaatgatagatgtgtttttagtttttttttagttaagttataggtatatgagtttatttgagttagtgggagatgaaggaaatgtgttagaggttttttttattttaagagaagaagagagatagagagatatatttttttttttgatgaaaaggaataaatgagaaaaaattgttatttttttgttatttatgtagttgtgtaaggatatgatat

SEQ ID NO: 395 - DNA, 7329 bp, Artificial Sequence
  chemically treated genomic DNA (Homo sapiens)
  unsure 1029..1030, 1053, 1056: n is a or g or c or t
ggaggtgattaggttatgaaggtggtagttttttgattgggattattgtttttatgaaagacggtacggggaatttgttttgttttttttgttatgtgaggaagtagtaagaaggtgttatttatgaagaggagggtttttattagatattaaatttgttggtattttgattttggatatttagtttttagaattgtgagtaatatattttcgttgtttatagattatttaaatttaaggtattttgttatagtagtttaaatatagagaacgttatagtttttttgttagttttagttataatgaatatttattattttttaaattttttgtaattttttatttggtaagtttttatttagtttgagtatttttttttttataaggatttttttgattttattttcgttttttattattataagaagtaaagatttggcgttttttgtattgagatataattttttttatatgtttatttgttttttggattgttttttttagataggaacgtttttttttttagttttgtattttatatatttaatgaagtatttggtatatggtaggtatattattattgtttatattaatgatttaaataatttgttaataatttaagtttattttttatcgttttaaatataaattttggattttattggtttttttttaaatttgtataagaattttaaattttttttgttttaatttgaaattttattttattttttgatttttatttattttaaatgttattttaaaaatttttttttgattttttttttttttggattttagtggtataggtttttatattttttataatttttatagtaattatggatatataaaaggtgtgtaataaaaaatattttgtttaggttaggtgtagtggtttatgtttgtaattttaatattttgggatgttgaagtgagaagattgtttgaggttaggggtttgagattagtatgggtaatatagtaagtttttgttattattaaaaaaaaaaaaacgtttggagtggnnaagaaatttcgttcgattgttanagnaaatttttgggtgataaaattatttgtaagttaaattcgcgtaatatgtagtttattcgtgtaataaatttgtatatgtattttttgaatttaaaataaaagttggagaaaaaaaaaaaaggaaagtattattgaatatgaagtagagaggatgagtgggagaaattatttattgaagaaatatttaattagatatggtaattgaattttttttaaaagggtatagattaggtgcggcggtttacgtttgtaattttagtattttgggaggttgaggcgggtagattatttgaggttaggagtttaagattagtttggttaatatggtaaaattttgtttttataaaaaaaatataaaaattagttaggtttggtggtatgcgtttgtagttttagttacgtaggaggttgaggtataagagttatttgagtttaggaagtagaggatgtattgagttaagattatgttaatgtattttagtttggataatagagtgagattttattttaataaataaataaataaataaataaataggtataaagggatatgtgtaaaggaaataataatgtttagaatttgaagtttatatggaggtaagaaatgatgagattagtgatagaaatagggaagttgagaaaaggagttatttttatggtaatgtagtaagaggaaggatgtggtaggatatttaagtgggggtattttttgggtagttgaatattattgattagagataaagaataaataaagtgttaatggtagttatgatagcggttattattagtgtcgtgagtatttttttattaagggttgatatagagaataattatatttattgggtatatttattaattttggttggtaattatgtttggatgtaattattttatgacgtagttatatatgttttttgattttagtatttattataataaatttgtttttataattgaggtatatcgtttttaaaaatttatttgtaaataggattggatttagttagaaaaaatgaacgtatttgtttaggaagattgtattgtagaataggtagagatgttgtataatgatttttatggaattattattaattggttttttaaggggatgtttagtttgaattgtattttttagtttgcgtgttacggttatattatgtttagttggtttgaataaaatggttagatggtagatataataagaagtatagtaagagtttttattatttggaattatggtagtatagtgatattttaattttaaatgatatggttcgttttaggagtttaatataaggatttaaaattaaaagaagaaatatttaaagtattcgaggtatatttgattttaatgttaggaattggagtgtttaaaggagtcgaaaatggataaaaatatttggaagttttgtgattttaatgatgattgtgtttttaatttgtgttgtttgtttttgtatagtttgtagatgtgtattttgatttttgcgagaagtagtttatcgtgataaagttgtttttgtatttattaatttgtaaattagagaagagggatatgttgagagtaggttttttaaaatttggttataaattggttttaaaattggttataaataaaatttttgtagtattgtaatatgtttataatggttttaacgtttacgttggaaggttgtaagtttataggaacgagggtaaggaatatttggttcgtttagggtggaaaatcgtttaaaggtatttttaagttataaataatagtatgagtgatttgtgttttaaggatatgtttttgttgtagttaattagtttaatttatttttttaattcggtttattttttcgttttttataagggatatttttagttaatttaatatttatagaaataatgttaatgattggtttgttgttaataaatacgtgggtaaatttttgttcggggtttttagttttaaaagttttaaaggaaattagatttttgattttttattttatatttttatatttttgtgtgtgtgtttttaatttttttagtattattgggttagggtttttttaatagagttggttttgatagaatattattgattagagataaagaataaataaagtgaagatagatttttgatattaaggataatttattaaagagtttatcgaatgattgatttagagattaagaatcgggttttaggaaatatttagcgggaaatgggatggagagaaatttgaaagaaaaagataattattagagaagtacggggatgataaagaaagaatagtattatagaaggtataagggaaataaatgttaaggagtggttaattatgttaaaacgaataagaatagagaaaattggatttttaaagatgagtagtttgaattaattttttgtatttgggtaacgaatattttgggtaaaatatattgtgaattatgttgatgttttttcgttataaaatataagtgatagtttttttattaagagatttagattttttagtgtttggttttgggttgtttttttatggtttcgttggttttttttttttatttttagaaaagtatagaaaatggagttttttttgtttgttattgagtttatgttttgttaatttttatttaagtgataggtaggttagtaaagttataggttgagaaattaaaattatttgttaaatattagttttatgattatttattaataatagttataataaattaagaaggagttttagtgtattttaattagtttttagtttaagtgatatatgagtagtatggttagaataggtattgtagaagtatgaatggagaattgttttttgttttttgtttatttttattgttattgttggatattaaatgttgtaatttttggtataggttttttttaaagattggttttttgggttaagtttttttgaatttgtttggtattgggtaagtttatatagaaaatatgagttattttataaagttttgggtttgtttatttatttgaaggaataggaaatggattttatttggagtatgatggatgaggtttgggtttttattaatgaaataagttttaattttaatttagttaaatttttaaagataggagaaaattatttggggatggatttaggttagtgagattacgttgtataaatttttttttaagggatttttattgatttagaattgttttaaaataagattttaaattgtcgagggagtttgaagttttgaaatttggtgtaggtttgtttaaaataaaataacgaatatattatattttttaggaggtttcgcggtgagttttcgtattcggttggttttttttatcgcgaggaaagttgggaaatgtagtgttataggtaattttgtacgtgacgtttgcggaggaaggggagagagaggcgcgcgggaggtcgtttagggaatcgaggtgtcggttgttttttttttataatttggtttgtgttgtaaggggagggtttttattatttggttttagtggtgtaaggagttgattgggatttagttattgatttggagtcgttcgggggaagtttcggtgggtgaggtttcgcggcgtttggtttagtttttcggtagttaggttaggagggggtggggaaggtgcgaatagtcgggggttcggagttcgcgttttgcgttttatttaggttgcggtcgttcggggaggaagcgcgtataggttgagtgtaaagtttttttttttgttttttcgttagagtagtttagataggcggtgggtgggaatgttttattttagtttgaagagggttcggatttaaaggggttaaaacgagcgaatttcgattttcgattatatttttcgtttttttaaaacgtatatttcgttagttatgggtagtcgcgattatttgtttaaagtgttggtggtgggggacgtcgtagtgggtaagacgtcgttggtgtagcgatatttttaggatagttttagtaaatattataagtttacggtgggaggtgagacgtttcgggggtggggagggggagggggaggaggaggtttcgatcgcggattcgagttggggatttaagtggggtggggatttgttgtcggttgttgggttttttttcgggttaggaagtattgtttgggaatttagatggtgtaattgtcgggtgtttggtttatacgttttttttgagtttttcgttagatttttttaaattgagtttattgttaggagaaaggtaagagtaaaggcgtgaagatgagaaatagggaagggaggatgaggatgagtaattgttgtttatggtaggcgtattgtgaatttaagtttttagttttttagttgttcggtaaatttttttaattagtagaagtagttgagattttttgtggggttttttggttaggtgtcggttggggttgtagttttgtttttttgttgagggaggaatcgtaaggtgtttaatttggttttagtgggagaacgtaggaagcggaattggtttgaaggattgtagttttgttgtggggttgtgggtgggagggaagatataaaattttcgaacgagttttttggttacgtagttagatgtttatgagggttgatgagttgtgtttttgttcgttgattgtttaaataaaggtaattaaggaatttttttaagaatgtgaaatatattatttttttgatttatttttttattatttttttttttaaattggagaaggtagggaggaaggggatatcgagtttatttatttttttttcgggtgtggtttttggatttaattatttttttagaggtagaaatgttttattgttaattagaaggtatttagttaggaagagttggtgatgggggagagtaatttaaaattttatttttttttgttaaaagaatttgttttaaggggggaaaattcgtattaatggaaaaattgaaaatgtgtgtttttgtttatatggaagtttaaaaagaaattaataaatatttatattgtaattaaaatattttttttaagaatttttagtagggtttagtatcgtggtttatatttgtaattttagtattttaggaggttgaggcgggaggattgtttgagtttaggagttcgagattagttatgggaaatatggtaagatttttatttttataaaaattaaagaagaaagtagtcgtggttttagttattcgggaaattgagacgagaggattgtttgaattggggaggtcgaggttttagtgagtttcgttcgtattatttattgtattgtagtttgggtaatagagtgagattttgttttaaaaataaaggaataaaaaatttaagtttggtaaaattaaaggtttaaagttttagatattttattttgatcgttttgtttttttatttttaaataatataagggtttttattttacggatttgggttaaaagtggtttgttattaatagttaatttttaataattgttgtagtttttttttagtaaagaatataattggttaatttttttttagtgtttagtttaaattttttttagttttgatttttgttatagatgtgaaagataatatttttaaattttagaaattattttgtttttttttttagttaaaaggttttttttatggaatatttatttagttttaaggagttttagtatttgtagatttggtggtagattttagtaggattttttagtaatatttatatagtgttttttttttgggatttttttgggattttttttatttattttatttttgtttaagataatatttgtaattttatggtggatgtagagttttttagggtgtgttttttttataatataatttgattagaaattaatagtgaaattgaatgtggaagatacgaaagtaattatatttgttttatttttttttttttttttattattttttttttgagaaaattttttaaattttttagaaattatttaatttgagaatgagaattgtttttatagttatttttatttttagttttggagataaatagtagtaaataaatgagtttgatagtagagtaaaagttggaaatttttttggagagtgagtatgaattatttattttatattaaatatacgtatgtggatttattttagtgaattgagggtttaaagataaatatatgggattggagttgtgtgtttatagggttttattgtttatttgatttgagtttatttttattaattttttatagtgaaattttattaaagtataatgtatatatatttttagt

SEQ ID NO: 396 - DNA, 7329 bp, Artificial Sequence
  chemically treated genomic DNA (Homo sapiens)
  unsure 6274, 6277, 6300..6301: n is a or g or c or t
attgaaaatatatgtatattatattttaataaaattttattgtaaaaaattaatagggataaatttaaattaaataggtagtgaaattttatggatatataattttaattttatatgtttatttttaagtttttaatttattgagatgagtttatatgcgtgtatttagtgtgagatggatgatttatatttattttttaaaggggtttttagtttttattttattgttaagtttatttatttgttattgtttgtttttaagattgggggtgggagtaattatgaaaataatttttatttttaggttaaatagtttttgggagatttagggggtttttttagggaaggggtgatgggggagaagggggaaatgagataagtgtggttgttttcgtattttttatatttaattttattgttggtttttaattaaattgtattatgaaaagaatatattttggggaattttatatttattataaggttgtaggtattattttgggtaagaatggaataaatggaaaaggttttagaggagttttaagaagaagatattgtgtggatgttgttgaagagttttgttggaatttattattaagtttgtaggtgttgagattttttaaggttgagtaagtattttatggggaaagttttttggttaaggagagaaatagagtaatttttgaggtttggaaatattattttttatatttgtgataggaattaaagttaagggaaatttagattaaatattgaaaaaaaattagttaattatattttttgttaaaggaaaattatagtaattgttaaaaattaattattaatagtaggttatttttaatttaaattcgtgaaatagggatttttatattatttaggagtgggagggtagagcggttaggatagagtgtttgaaattttgaatttttaattttgttagatttaaattttttgtttttttgtttttgagatagggttttattttgttgtttaggttatagtgtagtgagtggtgcgaacggggtttattgaagtttcgatttttttagtttaagtaattttttcgttttagtttttcgagtagttgggattacggttatttttttttttaatttttgtagaggtgggggttttgttatgttttttatggttggtttcgaatttttgggtttaagtaattttttcgttttagttttttaaagtgttgggattgtaagtatgaattacggtattgggttttattgggggtttttaaggagaatgttttaattgtaatgtaaatgtttgttaatttttttttaaatttttatatgaataggagtatatatttttaatttttttattggtacgagttttttttttttgaaataagtttttttaatagagagaaataaaattttaagttatttttttttattattagttttttttagttaaatattttttaattaataataaggtatttttgtttttgaaaaaatagttgagtttaaaggttatattcgggaaagaaatgaatgaattcggtgttttttttttttttattttttttagtttgaggaaaaaagtggtgggaagataggttagagaagtggtatattttatatttttggaagaattttttggttatttttatttaagtaattaacggataaaaatatagtttattagtttttatgggtatttgattgcgtagttaaggggttcgttcggggattttgtgtttttttttttatttatagttttataataaagttatagttttttagattagtttcgttttttgcgtttttttattgaagttaggttaaatattttgcggttttttttttaatagaggggtaggattatagttttagtcggtatttaattaggaggttttatagaggattttagttgtttttgttgattggagagatttgtcggatagttgaaaggttggagatttaagtttatagtacgtttgttataaatagtaattgtttatttttatttttttttttttattttttatttttacgtttttgtttttattttttttttggtagtgggtttagtttgggaaaatttaacgggaaatttaagagaggcgtgtaaattaaatattcggtaattatattatttaggtttttagatagtattttttgattcgaagaaggatttaataatcgatagtaaatttttattttatttgggtttttagttcgagttcgcggtcggggtttttttttttttttttttttttttattttcgagacgttttattttttatcgtggatttgtagtgtttgttgaagttgttttgggaatatcgttgtattagcgacgttttgtttattgcggcgttttttattattagtattttgaataggtggtcgcggttgtttatggttagcggggtgtgcgttttagggaggcgggaagtgtggtcggggatcggggttcgttcgttttaatttttttggattcggattttttttaaattgaagtgaggtatttttatttatcgtttgtttgggttgttttgacgagaaagtaaaaaaggaaattttgtatttaatttatacgcgtttttttttcgggcggtcgtaatttgggtggggcgtagggcgcgagtttcgagttttcggttgttcgtattttttttatttttttttggtttgattgtcgagaaattggattaggcgtcgcggaattttatttatcgggatttttttcgagcggttttaagttagtgattgaattttagttagttttttatattattggggttagatgatggggattttttttttgtagtataaattaaattgtgaggaaggagtagtcggtatttcgattttttagacgatttttcgcgcgtttttttttttttttttttcgtaagcgttacgtgtagggttgtttgtggtattatattttttagtttttttcgcggtaaagagaattagtcgagtgcggaggtttatcgcgaagttttttgggaaatgtagtatattcgttattttgttttaagtaaatttatattaagttttaaggttttaaattttttcgatagtttggaattttattttgaaataattttaggttagtaaagattttttaaggggagatttgtgtaacgtgattttattggtttgaatttatttttagatagtttttttttgtttttaaaggtttaattgagttaagattgaaatttattttattagtaaaagtttaagttttatttattatgttttaagtgaagtttattttttatttttttaagtagatagataagtttaggattttgtgaaatgatttatattttttgtgtgaatttgtttaatattaggtaagtttaggaaaatttgatttaagagattagtttttggaaaaaatttatgttaaaaattatagtatttaatatttagtaataataataaagatggatagaaaataagagatagttttttatttatatttttataatgtttattttagttatattatttatgtattatttgagttagaagttaattgaaatatattgggatttttttttgatttgttgtggttgttgttaatagataattataaaattagtgtttggtaaataattttaattttttagtttgtaattttattgatttatttgttatttgggtagaagttggtaggatatgagtttaatggtaagtaaagagagttttattttttatatttttttaggaatagaggaagagaattagcggggttatgggaaaatagtttaggattagatattaggaaatttaggttttttgatagagaggttattatttatgttttgtggcgaaagaatattagtatggtttataatatattttgtttagaatgttcgttatttaggtataggaggttagtttaagttatttatttttaaggatttagttttttttgtttttattcgttttgatatagttgattattttttgatatttgttttttttatgttttttatgatgttgttttttttttgttattttcgtatttttttgatgattattttttttttttaggtttttttttattttatttttcgttaagtattttttaaggttcgatttttggtttttgagttaattattcgataaattttttagtgaattgtttttggtgttaaagatttatttttattttatttgttttttatttttgattagtgatattttgttaagattagttttgttggggagattttaatttagtggtgttagaggaattaaagatatatatatagaaatatagaggtgtgaagtgggaaattaggggtttgattttttttagagtttttagagttgagagtttcgaatagagatttatttacgtatttattaatagtaaattagttattagtattgtttttatagatattaaattaattaaaagtattttttatgggaaacgaagggatgggtcgaattaaaggaataggttgggttagttaattgtagtaggagtatgtttttaaggtatagattatttatgttattgtttgtggtttaagaatgtttttaagcggttttttattttgggcgggttaggtgttttttgttttcgtttttgtaaatttataattttttagcgtggacgttagggttattatgaatatgttatagtgttgtagagattttgtttatggttagttttggggttagtttatggttagattttggggggtttgtttttaatatgttttttttttttgatttgtaaattgataaatgtaaaggtagttttgttacggtgagttatttttcgtaggagttaggatatatatttgtagattatataaagataaataatatagattaaaagtataattattattgaaattatagagtttttaagtgtttttatttattttcggtttttttaagtattttagtttttggtattaaggttaagtgtgtttcggatgttttaaatatttttttttttaattttaaatttttatgttaagtttttagagcgggttatattatttgaggttgaggtgttattatattgttatggttttagataataggaatttttgttgtattttttattatatttattatttgattattttgtttagattagttgaatatagtgtggtcgtggtacgtagattgagaggtgtaatttaagttaaatatttttttaggggattaattaataatgattttataggaattattgtgtagtatttttgtttgttttgtaatgtaatttttttaaataagtacgtttattttttttaattgggtttaattttgtttataaataagtttttgagggcggtatgttttaattataggagtagatttattatggtaaatattgagattagaaagtatgtgtaattgcgttataaagtgattgtatttaggtataattgttagttaagattgataaatatatttaataagtataattgttttttgtgttagtttttaatgaaggaatatttacggtattggtgataatcgttattatagttattattaatattttatttgttttttatttttgattagtgatatttagttgtttaaaaggtgtttttatttggatgttttgttatatttttttttttattatattgttataaaaatagtttttttttttagtttttttatttttgttattggttttattattttttgtttttatgtagattttagattttgagtattattattttttttatatatgtttttttatatttatttatttgtttgtttgtttgtttattgagatggagttttattttgttgtttaggttggagtgtattggtatgattttggtttagtgtattttttgttttttgggtttaagtaatttttgtgttttagttttttgcgtagttgggattataggcgtatattattaagtttggttaatttttgtattttttttgtagagatagggttttattatgttggttaggttggttttgaatttttgattttaagtgatttattcgttttagttttttaaagtgttgggattataggcgtgagtcgtcgtatttggtttatatttttttaaaaaaaatttagttattatgtttgattgaatgtttttttagtaaatggttttttttatttattttttttgttttatatttagtaatattttttttttttttttttttttaatttttattttaggtttaaggggtatatgtgtaggtttgttatacgagtaaattgtatgttgcgcgagtttggtttatagataattttgttatttaggggtttnttntagtagtcgaacggggttttttnnttattttaggcgtttttttttttttagtagtgataggggtttgttatgttgtttatgttggttttaaatttttagttttaaataatttttttattttagtattttaaaatgttgggattatagatatgagttattgtatttagtttaaatagagtattttttattatatattttttatgtgtttatgattattgtaggagttgtaggggatataaaggtttatgttattgaagtttaaagaagaaggaggttaagaaagagtttttgaagtagtatttaagatggataaaaattaagaggtgagatagaattttaggttggggtaaaagaagtttggaatttttatgtaggtttgggaaggagttagtagaatttagggtttatgtttagagcggtgggaaataagtttagattattggtagattgtttaggttattaatataagtaatagtgatgtatttattatgtgttaggtattttattaggtatgtaggatgtagggttggggaaaagaacgtttttgtttaggaagggtagtttagaaagtaggtggatatgtaaaaagaattgtgttttagtgtagagagcgttaagtttttattttttgtagtgatggagggcgaggatgaggttaaggaaatttttgtaaaggagagggtgtttaagttgggtaaaagtttgttaaatggaagattataggaaatttggagaatagtggatatttattatagttggagttggtaggaggattgtagcgttttttatgtttaggttgttataataaaatgttttagatttgggtaatttataaataacggaaatgtattgtttataattttggaggttggatgtttaagattaaggtgttagtaaatttggtgtttggtgagggtttttttttttataagtggtatttttttgttgtttttttatatggtagaaggggtaaaataagtttttcgtgtcgttttttataaaggtagtaattttagttaggagattgttatttttatgatttagttattttt

SEQ ID NO: 397 - DNA, 5947 bp, Artificial Sequence
  chemically treated genomic DNA (Homo sapiens)
agaaagtgagggaaagttatgtatagtgagaattggatattagatttttatttcgaaggtatggaaggtttaatatgtaaggatataatgtaaatagtttttttttttgtatttttttttggttattgttacgtaattatagtcgtttgttatttaatgatatatggtgataaagttttaagatatgtattaggcgattttgttattgtggtattattatagagggtatttatataaacgtagatggtgagttttattgtatatttaggttgtatgataaagtttattgtttttagattataaatttgtggaatatgtatattgtattgagtattgtagataattgtaatataagggttaagtatttgtgtatttaattatatttatatatagaaaagttatagtaaaaatatggtataaaggataaaaaatggtatatttatatagggtatttaataggaatggagtttgtaggattggaagttgttttgggtaatttagtgggtgaatggtgagtgaatgtgaaggtttaggatattattgtatattattgtagattttaaaaatattgtttggttaggttatattaaatgtattttgaaaattgtttttttttttaataataattttagtttattgtaatatttttattttgtaaattttttattttttttttttttttttgagatggagttttgtttttgtggtttaggttggagtgtagtggcgtgatttcggattattgtaatttttatttttcggtttaagtaattttttttttttagtttttcgaatagttgggattataggcgtgtgttattacgtttggttaatttttgtatttttagtagagacggggttttattatgttggttaggttggttttaaatttttgattttaggtgatttatttattttgattttttaaagtgttcggattataggtgtgagtcgtcgtgttcggttaattgtttatttttttatatttttaaatttttttgtagtaatatttagtttaatatataaatatgtatagttgtgtaataatattttttttatgtttttatttttttattttttttttttttaaataatttttaattttttaaaattttaaaaattttttaattttttaaaattttaaaaatttttttttaaaagtgaaggtataaatatatatattagtttaggtttatatagggttagggttattagtattattgttttgtatttttatattttgttttattgaaaggtttttaggggtagtaatatatatggagttgttattttttgtgataataatgttttttgaaggatttgtttgaggttgttttatagttaatttttttttttaagtagaaggagtatattttaaaataacgataaaaagtatggtaaatatataaattagtaatataggtatttattattattattaagtatgtattgtacgtaattgtatgtgttagatttttatatgattggtagtgtagtgggtttgtttatattagtattgttataaatatgtgagttatgtattgtattataatattatgatggttatagcgttattagaggataggaattttttagttacgttttattattttatgggattatagtgatatatgtggtttgttattgattgaaacgttattatgtggtgtttgattatatatatggaaattttgagtgtagttatgttttataaatgagtttattttgtagtgagtttaaatattaagtaaaaatattaattttattgtaatgtatgaagagattggtttttttttttatgttgaaggtattaaaataaaatagaaaatatttggttttttgagtggtatggttataatttatatgttgagttggtgatgaggtaagattttttgattttgtaatattagaaaaatgtatatagttaaaaaaaaatagagataggggttttgttatgtttttaggtgattttttttatttttatttttatattttttattttaattttttatagtattgggattataggaatgagttattgtatcgggttaaaaagtatataattttaagggaatgatttttttttttttttttttattttttgagatagtgttttgttttgttgtttaggatgagtgaagtgtgttaggagtgggtttttaagtaagaaaacgtattattttagatatatatttaaaattttgtttaaaaatgtgatatttttaaaatttatggttttgaattttatttattattttaatttattattattattttttaaagagtggggttttattatgttgttcgggttggttttaaagttttgagtttaagtgatttttttattttagtttttagagtagatgggattgtaggtgtgagtttttgagtttggttagttttgaatttttattatttaaatgtgaagaggtttagtttgtatagaatttaatattatattttagttttattggtaaatttgaataggatataagtggttttaataattaataaaagaagatatattttatagatatatatatgtttttttatatgtatatataaatatttaaaatttttttatgttaaaaaatgttagaaattaaagttaagtgataaaataagaaaaatatttttaatatatatgataaagtattatgggtaaatattcgtaatatataagtaatttatataagtagtaagaaaaagatgatttttataatagaaaatgaataaaagaagaattataaatagtcgataattatatgaaatagtgtttatttatattggaaattaagaaatgtaaataaaaatgataagtttttttagttaatagatttatgaagattaaaaatattgaaaaataagagtagtgttgtttgggaatgtgggaaattggtatttttatatttattggttgaaatgtaaatgggtgttttttttggatggtagtttgatatatgtattgagagtttaaaagagtgtatatttaagttgggtatgggagtttaggtttgtaattttagtattttgggaagttaaggtagtcggattacgaggttaggagtttaagattatttcggttaatatggtgaaatttcgtttttattaaaaatataaaaattagttgggtatggtggtacgtgtttgtaattttagttattcgggaggttgaggtagggagttagaggttgttgtgagtcgagattatattattgtattttagtttggtgatagagcgagatttcgttttaaaaaaaaaaaagaagagtatatattttttgatttagtagttttatttagatgaattttattttaggatatttgaaatatgtttaaagatttgtataaataggtatgggtaaggattttatgtttaaaatattaaaagcgatggtaataaaagataaaattgataaatgggatttaattagattaaagagtttttgtatagtaaaagaaattattattagagtgaataggtaatttataaaatgggagaaaattttcgtaatttatttatttgataaagggttaatatttagaatttataatgaatttaaataaatttataagaaaaaaataaataattttattaaaaagtgggcgaaggatatgaatagatattttttaaaagaagatatttatgtagttaaaaaatatatgaaaaaatgtttattattattggttattagagaaatgtaaattaaaattataatgagatattattttatattagttagaatggtaattattaaaaagttaggaaataataggtgttggagaggatgtggagaaataggaatatttttatattgttgatgggattgtaattagtttattattgtggaagttagtgtggcgattttttaggggatttagattagaaattttatttgatttagttattttattttttgggtatatttttaaggattttaaattatgttgttataaaggtttatgttttcggaagttttattgcggcggttttttttatgcgtaagttttgggatttatttcgattgttttatatttgtagcgttttttttatttttttaattatagacgtttttggtaatcgggcggattgtgtagataagggtttttttagattagcgagtttataggattgaggtttcgcgtgtatatttattcgtattacgtttttttttttttaattttgtatatataattttttgtttttttttaacgttttattattcgttttttttcggggcgttcggaatcggcggtgacgcggatggtagggttagttttaaaaagttttcggtcgtacgtggcgcggtggtttaggtttgtaattttagtattttgagaggtcgaagagggcggattatttgaggttaggagttcgagattagtttggttaatatggcgaaattttcgtttttattaaaaaatataaaaattagtcgggcgtggtggtgcgtgtttataatttagtttttcgggaggttgaggtaggagaatcgtttgaattcgggaggtagaggttgtagtgagatcgtattattgtattttagtttgggcgatagagtaagatttcgttttaaaaaaaaaaaaaaagtttcggtcgggtttcgtttcgtagttagtcggttttattttaagtttaagttttaggtagttattgattttttttagcgttgcgaattataagtttcgcgatttttcgcgcgttttttatcgttattttcgcgtttttatcggcgtcgttgggtaggtcggttaagagtgttttttattggttttcgtattgttaattatttgggagtattgaggggcggggcggaggtggagattcggattcggagcggttgaaaggcggaagtggaggtcggagtttgggatatcgtcggcgggtagagaagcggatttcgttcgagtttcggttttaagtaacgtcgtcgtttcggagtcgtcgtgagtatgtttgttttaggatttgttgtttcgtttgcgttgaagtatttttagggtagttttttttttcgtttagttttagtttagggggatattgatttttttttcgattcgtagtttttttttgaggggttttttaggcgtcgggttataggaggtggggagtttttttttttagtttatttgtttttggtgagttttaaggaaatcgttatgattgttttttggtttgtttattttagttgtgggagagaggtattttaagtttcgttttttttgtttttagaatcggaggatttttgttaggtgtgaaggaatttgtttttttttttttttagaagtgatagggagtgttgtttgtcgtcgttttttttttttttgttttataaaattagttgttttttttagttttagaggaatatttcgattttttttgggggaggggggtcgtttgggtgagatcgttttatacgtatagaagtgtgtgtgcgttttcgtaattttttattttttttttttttttaagttagagaattaattaggattttagttgagtttaaagttatttattagaaatgagttgtttttttgttttgttttttttgttttttagttttgttttttagttatgttgttttttgagtgtttttttttttttgtttttgaagaatttagttgaggtttgtttaattttagttatagattatagattagggtggatgtgtttatttattatttttttttttttttttttttgttttaggtttagttttgtttttttagagtacgtgagtggttttttagtcgttttaaagggattgttttttttgggattgttgttcgtgtgtttatagggaggagaataagatttaaaatgaggagtttggaattgaagggttattttttttttatttttaaatatatatatatatatttttttgagtaataggtttatattacgttagggtttgtttgtaatttttttagggtttggatttat

SEQ ID NO: 398 - DNA, 5947 bp, Artificial Sequence
  chemically treated genomic DNA (Homo sapiens)
ataagtttaagttttgaagggattgtagatagattttggcgtggtgtggatttgttgtttagggaggtgtatgtgtgtgtgtttgggagtgggaaagagatggttttttaattttagattttttattttgggttttatttttttttttatagatatacggatagtagttttaagaaaagtagtttttttgaggcggttgggaaattatttacgtgttttgggaggatagagttgagtttggagtaaggggggaggggaaagaagataatgaatgggtatatttattttgatttgtgatttgtagttaggattgagtaaattttagttaaattttttagaggtagaaagagagagatatttaaagaataatataattagaggatagggttgggagatagaaggggtaaaataggaaaatagtttatttttagtaagtgattttaaatttagttgaggttttggttggttttttggtttgaggaaagagaggaagtaaggagttgcgggagcgtatatatatttttgtgcgtgtggaacggttttatttagacgattttttttttttaaaggaaatcgagatatttttttagggttagaggggataattggttttgtgggataggaggaaggaaaacggcgatagatagtattttttgttatttttaaaagagaagagggataggtttttttatatttagtaaagatttttcgattttggaagtagggggagcggaatttagggtattttttttttataattagaatggataggttagaggatagttatagcggtttttttaaggtttattaaaggtaggtaagttaaggaaagaagttttttattttttatggttcgacgtttggggagttttttaagagggggttacgggtcgggggaggggttagtatttttttaaattggggttgggcgggaggaagggttgttttggagatgttttaacgtaggcgagatagtaggttttgggataagtatatttacggcggtttcggggcggcggcgttatttggggtcggggttcggacgggattcgtttttttattcgtcggcggtgttttaggtttcggtttttattttcgttttttagtcgtttcggattcggatttttattttcgtttcgttttttaatatttttaggtgattgatagtgcggagattaatgggaggtatttttggtcgatttatttagcggcgtcggtaggaacgcgggagtggcggtagggagcgcgcgagggatcgcgggatttgtagttcgtagcgttgggaggagttagtggttgtttgggatttgggtttagggtggagtcggttgattgcgaggcggagttcggtcggaattttttttttttttttgagacggagttttattttgtcgtttaggttggagtgtagtggtgcgattttattgtaatttttgtttttcgggtttaagcgatttttttgttttagtttttcgaggagttggattataggtacgtattattacgttcgattaatttttgtattttttagtagagacgggggtttcgttatgttggttaggttggtttcgaatttttgattttaggtgattcgtttttttcggttttttaaagtgttgagattataggtttgagttatcgcgttacgtacggtcgggaattttttaaggttaattttgttattcgcgttatcgtcggtttcggacgtttcgagggaaggcgggtggtggagcgttggaagaaggtagaggattgtgtgtgtagaattgggaaagaaaaaacgtggtgcgaatgaatatgtacgcgaggttttagttttgtgaattcgttgatttggagaagtttttgtttgtatagttcgttcgattgttaggggcgtttgtgattgggaaggtgaggaaagcgttgtaggtgtgagataatcggggtgggttttaaggtttgcgtatggggaaaatcgtcgtaataaaattttcgggggtatgggtttttatagtagtatgatttaaagtttttggggatatatttaggaaatgggatggttgggttaaatgggatttttagtttagattttttgaggaatcgttatattgatttttataatggtgaattagttatagttttattaatagtgtaaaagtgtttttatttttttatattttttttagtatttgttgttttttgattttttaatgattgttattttaattggtgtgagatggtattttattgtggttttgatttgtatttttttgatggttagtgatggtgagtatttttttatgtgttttttggttgtataaatgtttttttttgagaagtgtttgtttatgtttttcgtttattttttgatggggttgtttgttttttttttgtaaatttgtttgagtttattgtagattttggatattagttttttgttagatgagtaggttgcgaaaatttttttttattttgtaggttgtttgtttattttgatggtagttttttttgttgtgtagaagttttttagtttaattagattttatttgttaattttgttttttgttgttatcgtttttggtgttttagatatgaagtttttgtttatgtttatttgtataaatttttaaatatattttagatgttttagaatgaaatttatttaaatgaaattgttaagttaaagggtatgtattttttttttttttttttgagacgaagtttcgttttgttattaggttggagtgtagtagtgtgatttcggtttatagtaatttttgattttttgttttagtttttcgagtagttgggattataggtacgtgttattatgtttagttaatttttgtatttttagtagagacggggttttattatgttggtcgggatggttttgaatttttgatttcgtgattcgattgttttagttttttaaagtgttgggattataggtttgagtttttatgtttagtttgagtatgtatttttttaagtttttaatatatgtattaaattgttatttaaaaaaagtatttatttatattttaattaatgagtatgaaagtgttagttttttatatttttaagtaatattgtttttattttttaatatttttagtttttataaatttgttaattgaaaaaatttgttatttttatttgtattttttgatttttagtatgggtgaatattgttttatatgattatcggttatttgtagttttttttttgtttattttttattatgggaattattttttttttattatttatatagattatttatatattacgaatatttatttataatgttttgttatatatattagaaatattttttttattttgttatttagttttggtttttggtattttttggtataaagaagttttaaatatttatgtatatatataaaaagatatatgtgtatttataagatgtatttttttttattagttattaaagttatttatattttgtttaaatttattaataaaattggaatgtaatgttaagttttgtgtaaattagatttttttatatttgggtaataaaaatttaaaattagttaggtttaggggtttatatttgtagttttatttattttggaggttgaggtgggaggattatttgagtttaggattttgagattagttcgggtaatatagtgagattttattttttaaaaaataataataataaattaaaataataaataaaatttaaaattataaattttgagaatattatatttttggataaaattttaaatgtgtgtttaaagtaatacgtttttttatttaaggatttatttttggtatattttatttattttgggtaatagagtaagatattgttttaaaaaataaaaaaaaaaaaaaaaaaattatttttttaaaattatatgttttttggttcggtgtagtgatttatttttgtaattttaatattgtggaaggttgaggtgggaggtgtggaggtggaggtgggagggattatttggagatatagtaagatttttgtttttatttttttttaattatgtgtatttttttggtattgtaaagttaagggattttgttttattattaatttagtatgtgaattgtagttatgttatttaggaagttaaatattttttattttgttttgatatttttaatatgaggagaaaggttaatttttttatatattataatgaaattagtatttttatttgatatttaaatttattgtaagataaatttatttgtaaaatatgattatatttagagtttttatatatgtagttaggtattatataatgacgttttagttaatgatagattatatatattattgtggttttataagataataaaacgtagttgaaaaatttttattttttagtgacgttgtagttattataatgttgtaatgtaatgtatgatttatatgtttgtggtaatgttggtgtaaataaatttattgtattgttagttatgtgaaagtttagtatatataattgcgtgtagtatatatttgataatgataataaatgtttatgttattggtttatgtatttattatattttttatcgttattttagagtgtattttttttatttaaaaaaaaaagttaattgtaaaatagttttaggtaggttttttaggaggtattgttattataagagatgatagttttatatgtgttattgtttttgaagattttttagtggaataagatgtggaggtgtaagatagtgatattgatgattttgattttgtgtaggtttagattaatgtgtgtgtttatgtttttatttttaagaaaaagtttttaaagttttgaaaaattaaaaagtttttaaagttttgaaaaattaaaaattatttaaaaagagaaaaagtaaaagaataaaaatataaagaaaatattgttgtatagttgtatatgtttatgtgttaagttaagtgttattataaaagagtttaaaagtgtaaaaaagtaaatagttggtcgggtacggcggtttatatttataattcgagtattttgggaggttaaagtgggtggattatttgaggttagaagtttgagattagtttggttaatatggtgaaatttcgtttttattaaaaatataaaaattagttaggcgtggtggtatacgtttgtaattttagttattcgggaggttgaggaaggagaattgtttgaatcgggaggtagaggttgtagtgattcgagattacgttattgtattttagtttgggttataagagtaagattttattttaaaaaaaaaaaaaaaaagtaaaaagtttataaagtaaaagtattatagtaggttaaggttattattgaagaaagaaataatttttaaaatatatttaatgtagtttaattagatagtatttttaaaatttatagtaatgtatagtaatgttttaggtttttatatttatttattatttatttattgagttgtttagagtaatttttagttttgtaagttttatttttgttaagtattttatatagatgtattattttttattttttatgttatgtttttattgtaatttttttatatatagatatgattagatatataaatatttaatttttgtgttataattgtttatagtatttaatatagtatatatgttttataggtttgtagtttaggagtaataggttttattatatagtttaggtgtgtagtagggtttattatttacgtttgtgtaagtattttttatgatggtattataatgataaaatcgtttaatgtatgttttagaattttgttattatgtattattaagtgataaacgattatagttacgtaataataattaaagaaaaatataaaaagagggattatttatattgtatttttatatattaaattttttatgttttcggaataagaatttagtatttagtttttattatatatagtttttttttatttttt

SEQ ID NO: 399 - DNA, 6552 bp, Artificial Sequence
  chemically treated genomic DNA (Homo sapiens)
ataatgatatatggttattattaatttatttttgatgtttttaaaattagaatttgtttagaattttttgtttatttataggtgatattaattaaaattatgaatattatgaaataaatttttatttatttagtataaatgaaaagaataagcgggtagttatttttttgaggacgtaaaatagttatattttaagaaatttaatttttttaagatttaatttgtgtattttggaaggaggttattttgtgagtaaaggttaggaatgggatttttgtttatgtaaagtattaaagttaagttgtttttttttgatagtttttatgttagattgttttttaaaaatgtttttttatataatttgaaaatgttttttttagataaaagttttatttattggatgttttggtatttttttttaagatagtattgatttagtgtttttattttaataaatgaagattttgattattttagtatttttgtgatttagggagatagattgatatattagtatatatttttttgtggatcgaaaatatgttatgttttattaaggattgatatgattttttaatataaatagagtttggaaaaggataaaatattatttatatatttattaataaatatttgagggttttttacggtattaagtgttgtgaaggataaaggtggttttaaagataaattagatatggattttgtttttgagtattttatatggtgtttaaggtgattagatttagttatggaaatgtaataattatagtataggatagataatgttttacgttgtgagtgggggtaaaaatatttttaataaattttatatgaagaaatgattaattttaaaaatttgtatattgggtcgggtatagtggtttatgtttttaattttagtattttgggaggttgatgtgggtagattatttgagattaggagttcgagattagtttggttaatatgatgaaattttgtttttattaaaaatataaaaattagttaggcgtggtggtacgtttttgtaattttagttatttaggaggttgaggttggagaattatttgaatttgggaggtagaggttgtagtgagttgagatcgtgttattgtattttagtttgggcgatagagtaagatattgttttaaaaaaaaaaaaaaattgtatattttttattgttttatttgaaattttaaaggtttaatataaatttttttgtggaagattatttgaatgtaataaaaattgttattgaagaatttttaataaaaagtatttaaattgtggtatttttttggtattgaggaggttataaaggtttagtaatatttatttatatggttatttagagttttaggaatggttattttttaagggattgttaggttgtttgggtttgagtagtaatttgatgtacgtatggggtgttgtagttttagaaatatgttttcgtttattatttgttaattattatttttttggatagtttggtatatggtaagggtagttaagatagtagggttttaattttgtttagttttttttgttgtaaaatgattgatttggtgatcggattttttttaagtttttttgtgtaggtaggtgcgtagggtaaattatattattattattttatagaaagggaaattaaggttaggagagtttaagtgattcgtttaaggtttttgataataattgatatttaatatttgagattagattttaggtttagaaggataaagtatttgtttttatattatatttagaattatatttaatatttgtggttaagagtattaatagaggtttatatagtattaatttaagtatttaagttataaattaagataataaattgttaaataaaatatgatttgtttttttattttgataaatattttttatacggagttggatggttagttgtgaattatgaatttttggatttttttaagggttaggttggaaggtgttatggaggataaagttgatcgcgaatgatttttttttttgtattacgaggggtttaaagtatttgggagtgtatattttagtttataggtttaggtattgtttatattttaaagaagagttattttttggatataggagtgagtttagagtttcgattagattttgaaagtgaatttggtattatttgggtagagtagtttagagttttgattatatggagcgtatgtagtttagaagagggttaggttttagttgggttattagtttgatcggaagaggggtattgttagaggagagttagagggtggttgtgggcggaggttttttttgggtttaagagttagtttgattatatagtttttaaaattattttaagaaagaataatatatcggaatatttatgtgacgggtaagtatggtttagtggttatgagattaggttttgtaggtaaatttttgggttggaattttaggttggttattttttagttgtggtatcgtaggtaaattattgattattttatagttttagtttttttatttttaaaatgggtaaataattattattatgaggagtggtagtatatgtaaaacgtttggtggatattatatattgggtggatgttgatagggttttttttagtttaggcgagtttgtttttgagaggtttttttggagaattatataagttttataatatttaagtattttgatagttaaggtgaaagttttttttttttattaaattggggtgaggcgcgggtgtgggtattatttattttatttaaggtattaggggtagtttacgtttcgttcggttttgtgtttaaggattttacgttgtagacgtgtacggaagttgttttggttaggggtttggaggttaattagtaaacgtagcgtgagttacggcggtattaggaattgaaatcgtgttagttatgtttaggtttatttttcgatgcggacggtgaaattagggagtagtgatattaggacggggagttagcgttgacgtagttttatcgtttttttttttatttcgtattcgtcgtcgtcgagtttagtttgtagataggttttgatatttttttttagcgaggagcgagggagtcggaataagtcggggtattttttttgtatttttcgggagcgttagtttagttaagtttagcgattgttcggttcgttagcgaagacgttttttttgaagtaagtttggatatttttttattttttcgggtgaaacgaattttaagtggtttatttcggtttttcgtttttttttattttttgtaaaaaaatttggtaattttgcggttttttgcggattaaaatttgtaattagttttttgtgttttttttaaggggtagtcgtgattggaaatcgaggagttagattttttcgaaaatattaataaagaattatatttagttttgagtttttagtttaaatgttttttatttttttatttttattttaaaacgttagggttggggaagtgggaggtagagggtgggggagtaacggagaaagaatagttgtgttttcgttttttcgtttaatttttataaataattaatcgcgagcggaggttattttttagttaatgaagcgttttaaattgataaagttttggcggtagttaatgaataatatttaggggtgttagattcgcgtttcgagattaatgagtgtagagtttgggagaggtaatttgagttagagtgtgggtgtgtggtgtaaaagttttttatttttaagtttaaaaatttgttttgcgattgagtatgttttgaattaattgcgggcgttttgagatttttggattgggatgtaattcggttttcgggttttgatcgtattcgagcggggaggtgggtacgattcgcgggattttgtttcgagagagttgtaggtattagaagttattttttttttagtcggaatagtattttagatttggagtattttttgttttttttgtgtaaggttgtagtgtatagagtcggttagagaagatagagtagcgtttttgtggcgaacggtttagaaaaatttatggggtaggtttgtttcgtcggttgttcgtgtattttacggtatttataggatttcgggttttcggtttttagatttacgttcgttcggggttgagtgaatggcgtttttgggtttttgataacgggagttggtaagattatagtttattttatttttgaggcggttcgtcgcgtttacgtgtttttcgtagagtcgtcgtttttgtttattatttttatagttgtaaaataaagcggtttgtatgttttttatagcgtttttttcgtttttatatacgtatatatattttattttttagttagtttttaattcgcgttattttttaaatcggatttaaattcggagtttcgtttattgtttcgttttttttcggtttcgcggaaaattaggagcggtcgtttgggtaaggcgcggtcggaacgtattgggtatgttcgtcggggaggggcgggtcgggttgcgcgcggcgagtaggaagttttcgtttagtagaggttgtgggagagagcgcgatgggtcgcggcggtgggcgtacgtttcgcggggatttatgttacgcgcgtttcggttcgacgcgtaattagtagttattttcgtagttcgtcgttatcgtttttttgttttttcgggttgtcgtagttaggagttttagtcgtcgtttcgcgtaggttgcgggtattgttttttcggttcgtcgttcgggttgttgttgtcgtcgcggattgttgcggggttcggattcgtattttagggatacgttgtcgtcgtcgtcggtcggttcggcgttcggttttcgttcggtggttttcgttttgcgttttttgggttgtttttttttgggttttttttgcgtagttgaggaaggggaagagaagtttagtcgttaagtttagtttttttcggcgcgtagtttcgacggggtcgcggtaggcgcggcgagagcgttgacggagttatgagagagtataaagtggtggtgttgggttcgggcggcgtgggtaagttcgcgtttatcgtgtagttcgtgacgggtttttttatcgagaagtacgattcgattatcgaagatttttatcgtaaggagattgaggtggattcgtcgtcgtcggtgttggagattttggatacggcgggtatcgagtagttcgcgtttatgcgggatttgtatattaagaacggttagggttttattttggtttatagtttcgttaattagtagagtttttaggatattaagtttatgcgggattagattattcgcgtgaagcggtacgagcgcgtgtttatgattttggtgggtaataaggtggatttggagggtgagcgcgaggtttcgtacggggagggtaaggttttggttgaggagtggagttgtttttttatggagacgtcggttaaaaataaagtttcggtagacgagttatttgtcgagatcgtgcggtagatgaattacgcggcgtagtttaacggcgatgagggttgttgttcggtttgcgtgattttttgaggcggttatcgcgcgtcggtcgcgttttgcgtataaaagttaaacgtattcgattttttaaatgtgatttattttttgttttgagattggagattattttgtattggttagggtgttttgggagttcggttggttttcgcggtcggcgttttttgtttttattttgtgttcgagggggtgttcggttttgtttattcgatattttggtggaaatgtggttttttgtagtatgtacgtttttttttgattttggttgatgtatattttttcgtttaagtagtcgttagggcgtagtatcggtagtttgatatttattaagtaaaagttttagtttggaaaaaaaatgggggggaagggtggatgaaaaggagggagagaaggtggaaatggtttttttttttttttttttattttttttttttttttttttttttttttttggttaatagtcgtttttttagttttaagttttaaatatatggaaggaagttcgggagaattatatgaaggagtaggaggagaggaagaaatttttttttttttttttttaggagtagttggaaattaagatcgggttttttttttgttagtttggaagggtaattttatgattgattgcgattttgaggatgtttatgtaaagttggatttttgttatagtgtatttaatttgaagtattgtatatttgaattgggattgttaatattgatgttaatatagtgtggggtgttagaaagtgtttgttgatatttgtggaaaaaaaatttattttgtttatttattgtattaaaggggagtttgggggagaatggtagtattttttttttttattagttgtgaaaaaaatgttatagatttgtatattttcgtgtgtattatggtgtgtgtgtgtatgtgtgtggtgtgtgtgtgttttaagtttagttttttgtttttgttttttggttggtagtaatcgattttaatgattagtttttaaaaatatagtataaagatttt

SEQ ID NO: 400 - DNA, 6552 bp, Artificial Sequence
  chemically treated genomic DNA (Homo sapiens)
aaagtttttgtattgtatttttaaaagttagttattaaaatcggttattgttaattaaaaaataaaaataaaaggttaaatttaaaatatatatatattatatatatatatatatatattatagtatatacgaaaatgtgtagatttgtaatattttttttatagttgataaaaaaaaaaaatattattatttttttttagatttttttttgatatagtaggtaaataaaatagattttttttttataaatattagtagatattttttggtattttatattgtattggtattagtgttaatagttttagtttagatgtgtaatattttagattggatatattgtaataagaatttaattttgtatagatatttttagaatcgtaattagttatggggttgtttttttaagttggtagaaaaggaattcgattttaatttttagttatttttggaaaagaaggaaaaaaagtttttttttttttttttgtttttttatatggttttttcggatttttttttatgtatttaaaatttggaattagaaaaacggttgttgattaaaaaaaaaaaaaaaaaaaaagaaagaaaatagaaaaaaaaaaaaaaaaattatttttatttttttttttttttttttatttattttttttttttattttttttttaggttgaaatttttgtttggtgggtgttaagttgtcgatattgcgttttaacggttatttaaacggggaaatatgtattaattaaaattagggagaaacgtatatgttgtaaagagttatatttttattagagtatcggatgggtaggatcggatattttttcgggtatagggtggaggtaggggacgtcggtcgcggaggttagtcgggtttttaagatattttggttaatgtaaagtggtttttaattttaaagtaagaaataaattatatttagagagtcggatgcgtttggtttttgtgcgtagagcgcggtcggcgcgcggtggtcgttttagaggattacgtaggtcgagtagtagtttttatcgtcgttgggttgcgtcgcgtagtttatttgtcgtacgatttcggtaaatagttcgtttatcgaggttttgtttttggtcgacgtttttatgaaggggtagttttattttttagttagggttttgtttttttcgtacgagatttcgcgtttattttttaggtttattttgttgtttattaggattatgggtacgcgttcgtatcgttttacgcggatgatttggtttcgtatgggtttgatgttttggaagttttgttggttgacgaggttgtagattaggatgaagttttggtcgtttttgatgtataggtttcgtatggacgcgaattgttcggtgttcgtcgtatttaggatttttagtatcgacggcgacgagtttattttaatttttttgcggtaaaagttttcgatggtcgggtcgtatttttcgatgaaggagttcgttacgaattgtacggtgagcgcggatttgtttacgtcgttcgagtttagtattattattttgtatttttttatggtttcgttagcgttttcgtcgcgtttgtcgcggtttcgtcggggttgcgcgtcggggaaggttgggtttggcggttggattttttttttttttttttagttacgtaggaaaaatttaggagagagtaatttagagaacgtagggcggaaattatcgaacggaggtcgggcgtcgggtcggtcggcggcggcggtagcgtatttttggggtgcgggttcgggtttcgtagtagttcgcggcggtagtagtagttcgggcggcgaatcgagaggataatgttcgtagtttgcgcgaggcgacggttggagtttttagttgcggtagttcgggagggtagggaggcggtggcggcgggttgcggaggtggttgttaattgcgcgtcgggtcgggacgcgcgtggtatgagttttcgcggaacgtgcgtttatcgtcgcggtttatcgcgtttttttttatagtttttattgggcgagggttttttattcgtcgcgcgtagttcggttcgttttttttcggcgagtatgtttagtgcgtttcggtcgcgttttgtttaagcggtcgtttttggtttttcgcggggtcgggagggggcggggtagtgggcggggtttcggatttgagttcgatttggggagtggcgcgagttaggaattggttggaagatggggtgtgtgtgcgtatatgggagcgaggaaagcgttgtaggaagtatgtaggtcgttttattttatagttgtgggagtggtggataagggcggcggttttgcgagaagtacgtgggcgcggcgggtcgttttagggatggagtaggttgtggttttgttaattttcgttattaaaggtttaaggacgttatttatttagtttcgggcgggcgtgggtttgggggtcggaaattcgaagttttgtgggtgtcgtggaatgtacgagtagtcggcggagtaaatttgttttatagatttttttaaatcgttcgttatagaaacgttattttgttttttttgatcgattttgtgtattgtagttttgtataaagaaaataggaggtattttaagtttgagatattgtttcgattaggaaaggggtagtttttggtatttgtagttttttcggggtagggtttcgcgggtcgtatttattttttcgttcgagtgcggttaaaattcggagatcggattatattttaatttagaagttttagggcgttcgtagttagtttagggtatgtttagtcgtagagtaggtttttgggtttggaagtaggaagtttttgtattatatatttatattttagtttaaattattttttttagattttgtatttattggtttcggggcgcgagtttgatatttttaagtgttgtttattggttgtcgttaaggttttattagtttggggcgttttattggttaaaaagtagttttcgttcgcgattggttatttatagagattgagcggagaggcggaggtatagttgtttttttttcgttgtttttttattttttgttttttatttttttaattttggcgttttgaagtaaaagtgaaaaaataagaggtatttaggttgagagtttagaattaaatatagttttttgttggtgttttcgagagggtttgatttttcggtttttagttacgattgttttttaaagggagtataaagggttaattataggttttggttcgtaagaaatcgtagagttgttaagtttttttgtagggagtgggagggggcgaggagtcgaaatgggttatttggaattcgttttattcggaggggtaggggagtgtttaagtttgttttagaggaagcgttttcgttggcgggtcgggtaatcgttagatttggttgggttggcgttttcgggaggtgtaagggagatgtttcgatttgtttcgattttttcgtttttcgttgaggagggatgttaagatttgtttgtaggttgagttcggcggcggcgggtgcgggatggggagggaggcggtggagttgcgttagcgttggtttttcgttttgatgttattgttttttggttttatcgttcgtatcggagggtaaatttgggtatggttaatacggttttagtttttagtgtcgtcgtgatttacgttgcgtttgttagttaatttttaaatttttggttaaagtagttttcgtgtacgtttgtagcgtgaagtttttgggtatagaatcgggcgggacgtgggttgtttttgatgttttgggtggggtgggtggtgtttatattcgcgttttattttaatttagtagagagaggagatttttattttgattgttagagtgtttggatgttatgaagtttatataattttttagaaaaattttttagaggtaaattcgtttaagttggagagaattttgttaatatttatttaatgtgtaatgtttattaagcgttttatatatattgttattttttataataatgattatttatttattttaaagatgaggaaattgaggttgtgagatgattaataatttgtttgcgatgttataattagaaagtggttaatttaagattttaatttagggatttgtttgtagagtttagttttataattattggattatatttattcgttatatgaatgtttcggtatgttatttttttttagggtgattttagaggttgtgtgattagattggtttttaaatttaagagggattttcgtttatagttattttttggtttttttttggtagtgtttttttttcggttaggttgatggtttagttggagtttgatttttttttagattatatacgttttatgtagttagaattttggattgttttgtttaaatggtgttaagtttatttttaggatttggtcgggattttgaatttatttttgtgtttaagaaatagtttttttttggggtgtggatagtatttggatttgtgggttaaggtgtgtatttttaggtgttttgggtttttcgtaatgtaggaagagggattattcgcgattagttttattttttatgatattttttagtttggtttttagagaagtttaggaatttatagtttataattggttatttagtttcgtgtaggaggtatttgttaaggtgggaggatagattatattttgtttaatagtttgttattttgatttatgatttaaatatttaggttaatgttatgtgggtttttattggtatttttaattataaatattaggtgtggttttgagtgtgatatagaagtagatgttttgtttttttgggtttgaagtttaattttaagtattggatattagttattattagaggttttaggcgagttatttaagtttttttaattttagtttttttttttataaaatggtgataatataatttgttttacgtatttatttatataaggaaatttggagaaaattcggttattaaattaattattttatagtagagagagttgagtagaattaggattttgttgttttagttgtttttattatgtgttaggttgtttagagggataataattaatagataatagacggaaatatgtttttaaagttgtagtattttatacgtgtattaaattattgtttagatttagatagtttgatagttttttgagaaatgattatttttaagattttaggtagttatgtggatgggtattattgaatttttatggtttttttagtattagaaagatgttataatttgaatattttttattagggattttttaatagtaatttttattatatttagatggttttttatagaaagatttatattggatttttgggattttaaatgaagtaatgaaaaatgtataatttttttttttttttgagatagtgttttgttttgtcgtttaggttggagtgtaatggtacgattttagtttattgtaatttttgttttttaggtttaagtgattttttagttttagttttttgagtaattgggattataggggcgtgttattacgtttaattaatttttgtatttttagtagagatagggttttattatgttggttaggttggtttcgaatttttgattttaggtgatttgtttatattagttttttaaagtattgggattagaggtatgagttattgtgttcggtttagtgtataaatttttagggttgattatttttttatgtaaaatttgttaggaatatttttatttttatttatagcgtgaaatattatttattttgtattataattattatatttttataattaagtttggttattttaagtattatgtgaaatatttaagggtaaggtttatgtttagtttatttttagagttatttttgttttttatagtatttagtatcgtagaaagtttttaaatatttattaatgaatgtgtgaatggtattttatttttttttaaattttatttgtgttagaagattatattaatttttgataagatataatatgttttcgatttatagaaaaatgtatattaatgtgttagtttgtttttttgagttataaagatgttggagtgattaaagtttttatttattggggtgaaaatattaaattagtgttattttgaggaaagatattaaagtatttaatggataaagtttttgtttgaagaagatatttttagattatgtggaaaggtatttttgaaaaataatttaatataaaagttattaggaagagatagtttaattttgatattttgtataaataggggttttatttttaatttttgtttatagagtgatttttttttaagatatataggttgggttttgaaagaattagattttttagaatgtgattgttttacgtttttaagaaaataattattcgtttgttttttttatttgtattaggtaagtggaggtttgttttataatgtttatagttttagttagtgttatttataggtaaataaaaaattttgaataaattttaattttgaaagtattaaaggtaagttgatagtgattatatattattat

SEQ ID NO: 401 - DNA, 7969 bp, Artificial Sequence
  chemically treated genomic DNA (Homo sapiens)
tgtttggcggattatcgtttcgattttttttcgatttttttgttttttttcgagatttattttttttttttatggttatttgggggtttaggggggagagtttggagtggaggtttcgggagaaaggatggaagtagaggatagatatgaagattttaaggttttatattattttttttagtattttttttggtatttttttttttttttatttttttttattttattttgtgtttgggtgggcgttggatttagtatagatattttagggattaggagtaatttttttttttttttttgggttttaggtgttttttatgttaaagggaggtttttttggttttcgtttttaatattttattttttaattttcgtagtttttttaataatttatttaaattttaagattttattttttggttttttaagaggtaaagttaatattaaggttttttgtgtgtgttgtattgtgattttaaagggtgtgttttatagttttataaatttattttttttaaggttaatgtgttgggtaatatttaatattatgttttaaatattatacggttttttagagtattaattgttttcgatggtgaggattatttttaaattgtatttatatatttaagttggaaattttattgagtgatttgtaaaattagtatgttatttttaaaatgaaaacgttaaattttagaaagatatgtcgaaggaaaattttataggaggtatttatttatcgttatttgtataaagtttttgtaatgttatggaaattttttgatatgattttttagttaggtagttgaaagattatttattaaataggtggatgttttgattagggttttagaaaaatatgaatattttagttgtaagtttttttatgattgttaaatttgttatttataagataatatttaattttaaaatttttagaaagttttaaaatttttaatttataatttagtatgtttaattgtaaatgtacgaaataggagtatttattttagagaatggttgtgaatatttaaagtttgatttttgttatatatttagagtattttaagtgtttaatacggatgaagaggaatgatattattagtttttaacgtttaggttttttttatatttgttttttcgttttttttatagtatgtttgtaaagataaggttttggttttgttttagattttatatagatttttaaattatgttaagtttttatatttagttttttagttttatttaatttttaattttttaagatatatttaattttgatagtttattatattttagttttttttattaatatttaataagtttagttttagtttttggttttggaattgttttttagtatttttcggggaagtatatgttatttataatagtgattgttatatattagaagtttaattaatatttgttgattataggttgagggatttttaaattttttgtagtatataaagatgtttgtttgtttatttagaaagtattaggtttcgtagatatatttttagttattgagattttttgaatagaagaatgttttgtagatattgttaggttttatttggattagtggtttttttaataatagggttatatattagtttagtgttttataaatagtttgttttaaaaagtaaatagaataaaatagttttttatagtatagtataagtagtaagtggaaatgttaattcgtggaaggtgagttaatgttaatatattatgttatataatgttaaatatattatgattgtttgtattaggttttaatgaaaaaatgtattttaatgtagattacggttaatatggtttaggtttttttttgaaaagtattgtaatagtgggtttagatgattttttagatttttttagattaatgtagattaattttaatttttttaataatttttagggtaatgtagaattttaaaatattttttatttgaattattgtttgaagggtaagtatatttaagttgggtaaaatttttttatttttttttcgtattattattcgttataagttgttttgattttaaaggtattcgaatttgttttaggtattaaaattgtatttttgtagttatattaaagttatttagatggttttaggtttttttaattgtttttagttttttgttatttattattagatattatttatattttggagattttagatttttagtatattttaatatttggcgtttttttttggtgggtataatttaattttttagggggttttaaatgattttttagtttttgaatattttttttaggtttgataaatggttttagatttatgtagattagttgtatttttaggttagtttatgtagatattttttagttttaaaagatatattttaggtttttagatggttttgaagatattttttaggttttgtagatttttttttatttttgggatatattttaagattttaagatggttttagaattttttaattagattttagttttcggttagtttaaaaagataatttatagtgtttatagatacgatttaggttagttgtgtgatggagggtaggttttaggttcggtttaggtttagagacgttttaagttttttcggagacgttttatagacgtttttaggaatttacggatgcgtttcggggttttgagaaggtttttttttcggcgttaggtttcgtcgtagttgtcgggttcgagatcgtttcgagaagttttttaggattcgtggtttgtggggaggatttcgggataattagcgatttaatttcgtttcgtttattttaataggttcgagtttcgcggttcggattgtcgtcgttattttatttcgtcgttcgggttgcggtttcggtttcggcgcggggcggggcgggttggggcggggttcgtgagtaaaggaggagagaggcggagttaaagcgtcgtcgagtttgtcgggattttaagtatcgagtacggcgacgtgaaggtcggcgggaaggtaatcgtattcggttttttagaagttaatgggatatatggggcggggttcgcgcgatgtacgtcgggaggcgtagttcgcgtatcgtttttgtcgcgcggggatagttaatggggtgagaggtgaagtgggcggggtcgcggtagttcgcgatgacgttttatagtgttttgcgcgcgcgcggaaagggtggcggaataggaggtgacgtaagaggcgttaggtagaatagacgtaagggaattgtagttcggcggagtgagtacgatttgttggatgttgtgttgtttatattttggggtttttagaatttagattttttaggtttttttaaatttagaattagacgggatgtagtggcgtatatcgtagttttattcgggagattgaggcggaaggatggtttgagtttagaagttagaagttagtttaggtaatatagggagatttcgtttttaaaaaaataaaaataggttaggcgcggtggtttacgtttgtaattttagtattttgggaggtcgaagtaggcggattatttgatattaggagtttaagattagtttgattaatatggtgaaatttagtttttattaaaaatataaaaattagtttggcgtggtggttaacgtttgtaattttagttattcgggaggttgaggtaggagaatcgtttgaattcgggaagcggaggttgtagtgggttaagatcgcgttattgtattttagtatgggttataagacggaaatttcgttttaaaaataaataaataaaaataaatttagaatttagaagttcgattttatagtcgtttcgtttagtatagagaagtttgaatttcgaatttttttatttagagtagtgtttagatttttatttttttttttttttcgatttaggagtttgattttttttttttcggatttaagagtcggttttttagattagttttggttttaagtttttatatacgaattcgggtttttttaagttagtgttttcgttcggatttagaattttgggtttttagtttttttaatttttggatttaagagtttaggttttcggtttttttttttatcgaatttagtacgaaggaatttgtttatttttttttttgatatttttttttttaggatttaggagtttatatttttagttttatttttttttaaggatttaggagtttgggttttttgttttttttttttttaagatttagaaattttggttttaggttttttatgatttaggtatttttatttgggcgagttggtttatggattaggaatgtagtgattttacggtttttttttgtttcgttattttgttgtttttttttagggttttattttttttttagtttgtttttcgtttggttgggatagcgggaatcggaagtttgggttttttagcgggcggagattttagtttttaatttagacgtcggggtcgaaagtttggttaggattttaggagggaggtggagttattttttaaaatttgttgttttttcggagcgttttatatacggtcgcgcgcgcgagtcgacgagtttcgtttattatattaaggtttcggagacgatgttttaagtagtagtgttataggggtttttatttgtatagttttttttttgaggaatttttcgtttcgtttgttgaaagaataaatttttattagtatagttacgtttatagatcgttttttcgttgagagcgcgtggcgtcgtttagggtaaagtataggttttttattagtatagtttcgttttattcggaattttttttcgtagcgaacgtcgtttttttttttttattaatatagtttttttttttttttggttcgtttttttttttaagtgttcggagacgcgagttttttttgttagagtttatgattatgtagtagttttattagcgtagttcgttttttcgggtttcgttcggttttttcgtaggcggtagcgaaggtagtagtagcggtggcgatatgagtagcggggcggcgttcgggatagggcgggggcggtttcggggcgggggatttgggttcggggatttttcgtttagcgagatatataagttggtggtcgtgggcggcggcggcgtgggtaagagcgcgttgattatttagtttatttaggtagtgggtttttattcgggagggtgtttttcgggatttagaattgagtttttggggggattttcgagatttttttttttttttgatttattattgagatttttttataaggttttttaattttaaaagatttttatagattgtaatttaaatttttggagagtttttattttttgtacgggggatttttttttttgtattcgtatttcgagatttattatttttttttttagtgtttaagatttcgtttatttgttgatttggttttgagtattttttgggagtatgttaaatataaaatatttattttattcggattttaagtatttttaggatttttattacgtttttggtgttattttttattattttgagttttattttttttaaattttagtttttaattttttttttaagttattgagagtttttttgggagaatgttagtgtttagtatttttgagattttattacgttcgatttttttttttttttttttttttttttgagatagagttttatttattttgttatttaggttggagtgcggtggagtgtagtggtgcgatgttggtttattgtaatttttgttttttggatttaagtaatttttttgttttagttttttaagtagttgagattataggcgagtgttattatgtttggttaatttttgtattttttagtagagacggggttttattatattggattggtttcgaatttttgatttcgtgatcggtttgttttggatttttaaagtgttgggattataggtatgagttatcgtgttcggttttacgtttgatttttagttttttttatgattgtttttagaatttagaaattttatttagattttggttttgagatttttttgggattatttagttttaagagagttttgtttttcgattcgagatttaaaaagatattttgttttttggttattttagaaatttttaagattttaagttttgataattttttattttcggaggtttaaatttttatttttttattttatttttaaggaaaattagttttttttttattttatgtttttttcgttgtaattttttgagttttttttagaaattttgaatagtttttaaattatttttatggaagaagtttttagatttttggtatttttagaaagatttattttttgggagtttttttgattttataaatgaatttaatgtttttaagattgtatatattataattttttaaaatttttgagttattttcgggttggtttttagtttttagttttgagttttttacgttgtgttttgaggttacgtttttaattatttttagagttataattttttttagggtttgatttttatagtttttttttaggataagttttttattaagtatttttttaatcgatagatgtagtttttagatttttagtttttatattatttttttttttgaaattttattttagtttaggaaattttttttttatttttgagggaggtttttttagttttaaagaaattttagaaaagtgttttggtttgatatgttatcgtagaggtttcggggttttaggatattttttttatttttattaagagatttttttaagggtttgggaggaagttttgtttgtgtagagaaaggttttagttttgggttttttgtatttagaggtagttttagagttggttaaaggtttggttggtagcgggtaggatttaggtaggaagggaggggttggggttcgagggtggggtagttttttcgtagtcggattggaatcgggatttttttttgggaggagacgttggaggtcgtttgagtaggagaaggagacgggggaggaggagacgggggaggaggaagagagggaggaagtagaagaggagggagagatataaataggtagtttggataataacgttttcgataattgatatatttaatatttaatggggttttgtttcgaattttgttagtgttggatggagtgtagtgttgtttttagtttttttttttaaatgaggaaattgaggtttagagaggggaagtgatttgtttagtgttatatagttaggatgtaattacgatgtgggatatgtattttatattagaaagagaggattaggagtgatttagagagaagaagattggtaggaggggtggggggtagggaaaggggggtaggggagtagttatttaaagagaaggggatagagatttagagagagagagtaatagagatttagagagatagaggggatagagatttagagaaaagggggtagagatttagtaataaggatagatatttggagagagagagaaggatagggtagggcgtagtggtttatatttgtaattttagtattttgggagatttaggcgggcggattatttgaggttaggagttcgagattagtttgattaatatagtttgattaatatatttttattaaaaatataaaattagttaggtgtggtggcgtatgtttgtaattttagttatttgggaggttgaggtaggagaattttttgaatttaggaggcggaggttgtagtgagtcgagatttcgttattgtattttagtttgtgtaataagagcgaaatttcgttttaaaaaaaaaaaaaaaaaaaaaagatttagagagatagacgggatagagatttagagaaaagggggtagagatttagtaatagggatagatatttagagagagagggatagagattgagagaggtattttaagggtagggtttcgttttgtttgtcggggtattgtagtaattattttttttttatttcgttagt

SEQ ID NO: 402 - DNA, 7969 bp, Artificial Sequence
  chemically treated genomic DNA (Homo sapiens)
attggcggggtggggagaggatagttattgtagtgtttcggtagataggacgaagttttgtttttgggatgttttttttagtttttgtttttttttttttaaatgtttgtttttgttgttgggtttttgtttttttttttttgggtttttgtttcgtttgtttttttgagttttttttttttttttttttttttgagacggagtttcgtttttgttgtataggttggagtgtaatggcgagatttcggtttattgtaattttcgttttttgggtttaagagatttttttgttttagttttttaagtagttgggattataggtatgcgttattatatttggttaattttgtatttttagtagagatgtgttggttaggttgtgttggttaggttggtttcgaatttttgattttaggtgattcgttcgtttgggttttttaaagtgttgggattatagatgtgagttattgcgttttgttttgtttttttttttttttttagatgtttgtttttgttgttgggtttttgtttttttttttttgggtttttgttttttttgtttttttgagtttttattattttttttttttgggtttttgtttttttttttttgggtagttgtttttttgtttttttttttttgttttttattttttttattagtttttttttttttgagttatttttggttttttttttttggtataaggtatatgttttatatcgtgattatattttagttgtgtgatattgaataaattattttttttttttgagttttagtttttttatttgaaaaaggaggttaagaatagtattatattttatttagtattggtaagattcggagtaaaattttattaaatattgaatgtattagttatcggaggcgttgttgtttagattgtttgtttatatttttttttttttttttgtttttttttttttttttttttttttcgtttttttttttttcgttttttttttttgtttaggcggtttttagcgtttttttttaggggaaggtttcggttttaattcggttgcggagaggttgttttattttcgggttttagtttttttttttttgtttgggttttgttcgttgttagttaagtttttggttagttttgggattgtttttgggtgtaaggggtttagggttggggtttttttttatataagtagggtttttttttaggtttttgaaggggttttttggtgggggtgaggggggtgttttggggtttcggggtttttgcggtagtatgttaggttaagatatttttttaggatttttttgaagttgggaggattttttttaggaatggggaggaggttttttgggttggggtggaattttaggaaagggggtgatgtggaggttaggggtttgaaggttgtatttgtcggttagaggggtgtttggtgaggggtttgttttggagggaggttgtaaggattaagttttgggagggattgtggttttgggggtagttaggggcgtgattttagagtatagcgtgagaagtttagggttgagaattgggagttagttcggaggtggtttaggggttttgggaggttatagtatatatagttttagaaatattgagtttatttatggggttagagaaatttttaaggaatagatttttttgggggtgttaagaatttgggggttttttttatggagatgatttgagagttatttagggtttttgagaggggtttagggagttgtagcggagaaagtatgggatggaggaggggttggttttttttgggggtggggtgggagagtggaggtttgggttttcgggaatgggggattgttaggatttggggttttggagatttttggaatggttaaggggtaggatgtttttttaaatttcgggtcggagagtaggatttttttaggattgggtagttttagaagagttttagggttagggtttgggtagaatttttagattttgggggtagttatggaaggggttaagaattaaacgtggggtcgggtacggtggtttatgtttgtaattttagtattttgggagtttaaggtaggtcgattacgaggttaggagttcgagattagtttaatatggtgaaatttcgtttttattaaaaaatataaaaattagttaggtatggtggtattcgtttgtagttttagttatttgggaggttgaggtaggagaattgtttgaatttaggaggtagaggttgtagtgagttaatatcgtattattgtattttatcgtattttagtttgggtgatagagtgagtgagattttgttttaaaaaaaaaaaaaaagaaaaaaaagaatcgaacgtggtggaattttaaaggtgttgggtattggtatttttttaggaaggtttttaatggtttagaggggaagttggggattgggatttgggggagatagggtttagggtggtggaaggtggtattaagggcgtggtgggggttttgggagtgtttagggttcgaatggggtgagtattttgtatttagtatgtttttaggaggtgtttaaagttaggttagtaggtaagcggggttttaggtattgggagagggaatagtgggtttcgggatgcgagtgtagaaggaagggtttttcgtgtaggggatggaggttttttaagagtttaggttataatttgtggggattttttaagattagagggttttataggagggttttagtgatgggttaagggggaaaaggggtttcggggatttttttaagggtttagttttgggtttcgggggatattttttcgggtgagggtttattatttggatgaattggatggttagcgcgtttttgtttacgtcgtcgtcgtttacgattattagtttgtgtgtttcgttgggcggggggttttcgggtttaggtttttcgtttcggggtcgttttcgttttgtttcggacgtcgtttcgttgtttatgtcgttatcgttgttgttgttttcgttatcgtttgcgggggagtcgggcgggattcgggggggcgggttacgttaatgaggttattgtataattatgagttttggtaaggagggttcgcgttttcggatatttaaggagggggacgggttaaagaaagggaggagttatgttaataagggaaagggaacggcgttcgttgcgaaggggaatttcgaatgaggcggggttatgttaatgagagatttgtgttttgttttgagcggcgttacgcgtttttagcgggagggcggtttgtgggcgtggttatgttaataagaatttatttttttagtagacggggcggaaagttttttaggggaggggttatgtaaataaggatttttgtgatattgttgtttggggtatcgttttcgaggttttagtatggtaggcggagttcgtcgattcgcgcgcgcggtcgtatatagggcgtttcgaggaagtagtaggttttgaggagtagttttattttttttttgggattttagttaagttttcgatttcggcgtttgggttagaagttagagttttcgttcgttaagggatttaggttttcggttttcgttgttttagttaagcggaagatagattgggaggagagtggggttttagagggggatagtagggtaacggggtagggaggggtcgtgagattattgtatttttaatttatgagttagttcgtttaagtagggatgtttgggttatgaagagtttggggttaggatttttgggttttgaaggagaaggaagtagagggtttagatttttgggtttttaggagaaaatggggttggagatgtggatttttgggttttggggaggagggtgttagggaggaaggtagataggttttttcgtattaggttcggtaaaggagggagtcgggggtttggatttttaggtttaggaattggagaggttggggatttaggattttggattcgagcgagggtattggtttggggggattcgaattcgtatgtgagagtttgagattaggattagtttgggagatcgatttttggattcgaggaaggaagaattagatttttgagtcggagggaggagggaaataggagtttggatattgttttgagtgagaggattcggaatttagatttttttgtattgaacgaggcggttatggggtcgggtttttaggttttaagtttatttttatttgtttatttttgagacggagttttcgttttgtagtttatgttggagtgtaatggcgcgattttggtttattgtaattttcgtttttcgggtttaagcgatttttttattttagtttttcgagtagttgggattataggcgttagttattacgttaggttaatttttgtatttttagtagagattgggttttattatgttggttaggttggttttgaatttttgatattagatgattcgtttgtttcggttttttaaagtgttgggattatagacgtgagttatcgcgtttggtttatttttatttttttagaggcggggtttttttatattgtttaggttggtttttaatttttaggtttaagttattttttcgttttagtttttcgagtgggattacggtgtgcgttattgtatttcgtttggttttaaatttaggggggtttagaggatttggattttgagagttttagaatgtgggtagtataatatttagtaagtcgtgtttatttcgtcggattataatttttttgcgtttgttttgtttggcgttttttacgttattttttgtttcgttatttttttcgcgcgcgcgtagggtattgtggggcgttatcgcgggttatcgcggtttcgtttattttattttttattttattagttgttttcgcgcgatagaggcggtgcgcggattacgtttttcggcgtgtatcgcgcggatttcgttttatgtgttttattggtttttgggaaatcgagtgcggttgttttttcgtcggtttttacgtcgtcgtgttcggtatttgaaatttcggtaagttcggcggcgttttagtttcgtttttttttttttttgtttacgaatttcgttttagttcgtttcgtttcgcgtcggggtcggagtcgtagttcgagcggcggggtaagatggcggcggtagttcgggtcgcggggttcgggtttattggggtgggcggggcggagttgggtcgttagttgtttcggggttttttttataagttacgggttttagagggtttttcggggcggtttcgggttcggtagttgcggcgaaatttggcgtcgagaggggggtttttttagggtttcgggacgtattcgtgggtttttgggggcgtttatggggcgttttcgagaggatttggggcgtttttgggtttagatcgagtttaaggtttgttttttattatatagttggtttggatcgtgtttgtagatattgtagattgtttttttgggttgatcggaggttagggtttggttagagggttttggggttattttgagattttgagatatgttttaggggtgaaggagggtttgtaagatttgaagagtatttttagagttatttagaggtttggggtatgttttttagggttggaaagtgtttgtatgggttggtttgaggatgtaattggtttgtataagtttggggttatttattaggtttagaaggagtgtttaagggttaagaagttatttagggttttttagggggttgggttatgtttattagggaagggcgttaaatattgagatgtattgagggtttggggtttttaaggtatgggtagtgtttaataatgggtgataggaggttgggggtagttagaaggatttggaattatttagatggttttaatgtgattgtaggaatgtagttttgatgtttggagtaaattcgaatgtttttggggttagagtagtttgtggcgaataataatacggaaagagaatgaggaaattttgtttagtttagatatatttgttttttagatagtaatttaaatgaaaaatgttttaagattttgtattattttgggggttattgagagagttagaattaatttatattagtttggaagagtttggagggttatttagatttattattatagtgttttttaaggggaaatttgggttatgttgatcgtgatttgtattaagatatatttttttattgagatttggtatagatagttataatgtatttaatattatataatataatgtattaatattaatttattttttacgaattgatatttttatttattatttgtgttgtgttgtgaagaattattttgttttatttattttttaaaataagttatttgtgaagtattaaattggtatatgattttgttgttggggaaattattgatttagataggatttagtagtatttgtagagtatttttttgtttagaagattttagtagttgagggtgtgtttgcgaagtttggtgttttttaaatgagtaagtaagtatttttgtatattgtagagggtttggggattttttagtttgtagttagtagatgttgattaagtttttgatatgtgatagttattgttgtaggtagtatgtgttttttcgggaggtgttggagagtagttttagggttaggaattggggttgagtttattgagtattggtgaaagaggttgggatgtaatagattattagggttgggtgtgttttaggaagttaggaattaggtggagttgggaggttgaatatggaggtttggtatggtttgaaaatttatatgggatttagaataggattagggttttgtttttgtaggtatgttgtgggggaagcgaggagatagatgtaggggaaatttgggcgttaagggttaatagtgttatttttttttattcgtattgagtatttgaggtgttttaaatgtgtggtagaagttaggttttgagtatttatagttattttttgagatagatgtttttatttcgtgtatttataattaagtatattgagttgtgggttagggattttgaagttttttaggaattttgagattggatattgttttatgagtagtagatttgatagttatggggaagtttatagttgaaatatttatatttttttgaagttttaattaagatatttatttgtttgatggatgattttttaattgtttgattggggaattatattaaagaatttttatgatattgtaaaggttttgtgtagatggcgataggtaaatgttttttgtgaagttttttttcggtatgtttttttgaagtttagcgtttttattttaaaaatggtatattggttttgtagattatttaatgaagtttttaatttaggtgtataaatataatttgggggtggtttttattatcgaggatagttgatgttttaggaagtcgtgtggtgtttaaggtatggtgttgaatattgtttagtatattggttttgggaaaggtgggtttataggattgtggaatatattttttgaaattatagtgtagtatatataaaaaattttggtgttggttttgttttttaggaggttagggaatgaggttttgaagtttggataggttgttggggaagttgcgggaattgaggagtgagatgttaaaagcggaggttagggaggtttttttttgatataagaggtatttgagatttagaaaaaaggaagagaattgtttttagtttttggggtgtttgtgttgggtttagcgtttatttaagtatagggtggagtgggaggaggtggaggagaggaggggtgttagaggggatgttgagggagatagtgtggggttttgaggtttttatgtttattttttatttttattttttttttcgggatttttattttaaatttttttttttggatttttaggtgattatggaggaagaagatgagtttcgagggaagatagaggagtcgggggaggatcggggcgatggttcgttagata

SEQ ID NO: 403 - DNA, 13317 bp, Artificial Sequence
  chemically treated genomic DNA (Homo sapiens)
attttgtgtttaatattttataaagttttggggatttagttgtggttaaggtagttaagagttttgtttttgtcgtgttgatattttagtgtgggtggtgggttgttagcgtaagtaaatatatatagtaatatcggtggtgatgggtgtttaggggaaaatgaagggtaagggtaaggggaggtagggtgggtatgttttgtttagggaggttaggaaggttttttaagaaagggacgtgagtagaggttgaagagagtggagaggggtttgagtttttatttgagggtgtagtgtttgtaaggttttgaggtggggcgtttttatgtattttggtagttgagggagttaggtattgttgaagtgaagtgtttttagagaagtaaagggggatgttgtaggtcgcgtagggttttggggttgttttggggattttggtttttatgttgtatgggagggttcgagcggagaaggggtgggagttgatttaggtggttacggggttttaggttgtaggaggggcgtgggtagagtgttgattttttttattttataatatttttttattttttttttgttgtatttagtagtagtttagtttttttcgttgttgagtagtgttttattgtggatttacgtgtttgtttatttatttttttgtgggtagatttttggtttgttattagtttggggttattgtgaatattgttgttgttaatattgtagtataagttttttgtatatatattaatttttttgagacgaattgttaggtcgtgggataggtatatattgagttttgattttgattgtttaatagttttttatagtagttgaattattttgtattttttattaataatgagtaagggttttggtttttttatattcgagttagtagttggttttgttagtttttaaaattcgagttattttaggtaggtggttatgatttgtatttgtttgtaattaatgagattatgtatgttttttggttgtgtgggtgtttttttttgtgaggtgtttttgttttttttattttgttttgagttaatagttgtagttttggtttaggtatttagaagatttatgtttaggaattttaggaagtaatgagtgtggtggggtcgtgtagggattttttttcgtagggcgtgttatgggggttttataggcgagtttttgtttttttgtttgagtgttttttattggtagtttttcgagtgattaggttattttttttttttgagatgtagtttcgtttttgttgtttaggttggagtgtaatggcgcgattttggttttttataatttttatttttcgggtttaagcgatttttttgttttagttttttaagtagtatgtgttattacgtttagttaattttttgtttttagtggagataagatttttttatattggttaggttggtttcgaatttttgattttaggtgattcgtttattttagttttttaaagtgttgggattataggcgtgagttatcgtgttcggtttaagttagttatttttttggttgtagtggttggtattttattattataggattgcgttacggatattttagttgaggtattatttttagtgggaggatagggtaggatttaggcgggacgtaggggattttttaatttttttttttgttttttttttagttgtgttgattttttagttgttgagatgagtttgtaaaaagtagttttgttgattttagtagcggttagggttttcgttgtttttcggttgggagattcgaggtaaatagtttttttttttttagtttttgtttttatttgggtatggttattgattgtttggtggggtgttgggagtatttaggagagattttatgggagcgtcggtattttgtttaaggttatttagttggcggtggtttttggattttggaatttagattatttttggttatatttggttgtttttgtttttttttggaataatggtagttatgtgtttggttgtttattgggcgttaggtagtaggtcgagttttgggtttatagtgggtattttagtgttgttgtattataagggttttgagaggcgatgtttttgggtcgttgtgggttagcgagaggggagatgagatatggagtttttgttttattttttttatattagttttttttttggattttgagtttttttttttagttatttgggaagtattttgaattgagtttgtattagggaaggtgtggtgtaggttcgtgtaggggacgggttttttttagttttagttatagtttagaaggtttttggtgtttttttttgtttatttttttcgtgtttttttttattaggtttttttttgttttaggtttttgtattttttgtttttttgttgaaatatatttttttatgtgtttatatagtttatttttttagttaattcgggtgtttgttcgtaagtttcgtatattaagttaatattttgtttttttattttttagtttttttattatttgattatttgtatattcgtgtatttttttgttttttatattagattgtgagttttatgaaggtagggttgtgttttagtgatattttgttgttggtattattcggggtttaggatgtattttaaaaaagattggtgttatgaagagagtttggtagtgtgtttttggttgtgtgtggttttggggtgggggttagttggggatatttggtttttttttttatgtgtttattagataagacgttttgttggtttattgtattagcgttaataggtgttgggagggttgtttcgagggtgtataaagagtatatagtgtagtttttgaggtggggaaggttttttggaggaggtattggtttagttgagattttaaggaagagagagaagaacgtttagaaggaggtgttgtttttgatggaggttagagggaagggtttgagtgatagaagcgtaatatggagagttaggtagggcggagaggttggagaggtgtaatagttaacgttatggtttttagtttttttcgagggttttttaggtgtacgttttagtttatgtatttggaacgtagggtagtagaggcgaggttttgaagggttttggatttttagttgaggagtttggtttttttgttgggaatattagggagttataaaggttttgagtaggagaaagataggtttagcgttggggatttttttagttgttgaatgtggggtgagtgggagggagtaagagtggagcgtaggaattcggggaagaggtgggggtagatcggggtagatttgattagagttaggtcgcgggtaggatggggagagatggttacgttagagtttgatatatagaatagtgggagatatagaaatatatatatatttatatattttttgagatagggttttattttgttatttaagttggagtgtagtggtgtaattaaggtttattgtagtttggattttttaggttcgagtgatttttttgtttcgaatagttgatattataggtgtatagtattatgtttggttaattttttaatttttaatttttttgtagaaaaaaattaggttgtgagataagtttttattacgttgtttaggtaggttttaaatttttaggtttaagggatttttttgttttgattttttaaagtgttgggattatagatatgagttattgtgttcggtcgagatgtggggatgttgaggattgagagtttggtagttttgtgtgtttgggttgtggggtgtcgggtatgttgttggtaaggggagttttttattgttgtttttagtttcgtattattgtttttgtagtttggagtttagaatgtgattttttatttttttgtttatttttttgttatgtttattttgttttttttttcgttttttattatttattttttttttttttgtcgggatttgggtagtttgttattgttatatgttaggtagtagcgtgttcggtttattagtttttttggggtacgagagaaagttgatgtttatggtgtttttagagttagttgttatttttttgggcgttatcgtagttttcgatttgttgttcgtaaataattttaggttgggaaaggtaaaggcgttttggtttttgtggattttggttaggttttaggttttaggtaggggtttagttggcgttgtttcgcgtttttttttttttcgttttgggaatttgagacgaagtagtggtttcggcgttttttagtttgttggttgttggtttttgaggatagaagtgaaggttttggggtagggattagggtttcggttaagtttttaggattggtttttaggttttagatcgtgtatacgtagtaggttgtttttttgtttaagatttcggattgtttgagatttgttttttttttgttatttgatggggggagggaggtcgttgaggtttagggaatggtatgggatggtatggggggacgggagtgtgtttagtttgttgaaggtggtaggttggtggttttttggtttggaaagaagggagaggggagagagagaaaagagtgtgtgtgtgtaagatggtggagggataggtagatgttggtggttttgcgtatttttttaggtattttgggttgttttatttatattgggttattttagtgttgggttatgggaatgatacggggagggtagggtacggttattttgatgtttgtttagttaggagtgattgtgggtggaggggttatttttttttagtatgggtgttttgagtttggggtttggtttgcgtttaggtcggggagttttgttttttttagattggggtcgttggggatattgttatatttttttgtttagaatgggtttttgagagcgggttttacgttatttttgttggttttattttttgttgagtgggtagaatagttagagggttttagagttcggcgtttttagggaaggggttggtgtggaattttttttcgttttgattagttttttttttgttttgtagattgtgttttgtttacggtgttttttgtatgttttgttgttttgagttgtttcgagttaggtgatagcgtattacgttgttattatgaatgaggtgtttgttattaaagaaggttggttttataagcgtggtaagaggtcgtttttgttcgttagatttttttttttacgttggttttttttggaaagttgtgttttgagaggtagaggcggagggttttattagtttgaggagttagtatttcgtagttttaggtttatagttgtttatgttttcgtttcgtggatttttttagtggttatttgggtaggagagtagggatttgattgtgtatgagtgattttatttatagttttattttatagatgaagaaattgaggtttagagaggggaagttacgttattgaattaatatagtgaggtagtatttagtatttatttagttagtaagtatttattgattgtgtgttgtgtcggatagtttcgggtttcgagatatagtggttttttgatggagtttatattttagtgggggtggggtaggtagtaaataagtagatatggaatgtcggggtggtaagtgttggggtgaaaagtgggaattgtgagtgagggataatgggttgggggcgggggggtattaagaggttgttcggaggagacggtagtggttagaggtttggagtttggaggaggtgagacgttggttgggtaagggtgttttagggagagggatagtaaggatagaggtttttaggtggggatgtgtttggtgttttttggtaatagcgtggttggagtagtgtgagttagggcgagttgggggaggtaagtagaggagtaacgcggagtttagttgtgtcgcgtttgtaggttatggaaaaggattttggttttggtattttagacgagagtagttttgtgatgtcgtgagtcgatgcgtggtttgatttatttgtattagtgggaagttgaggtttttttttagtgaagttaggatagggaagagattttttttgattttagggttgtttgttttaaagtggttgttacgtaagattgggaggtagatggggagaagcgttatttgttgagagatggttttgttttaggttagtttttgtgggtttttttttggaaagaaggtttttaggtgtggcggttggttgttttgtgtgtatttgtatttatttagtaaatacgtgttgagtagcgtttgtgggttaggcgttgttttaggttttggggtttagtagtgagttcgataggtaaatattttattttcgtgttagtattttgggcgttgatagggaggtagatagtttttaggtagatatgtatgttttacggtggcgcgagttatggagaaaaaataagtaacgtgaggatgggagggtatgaggtaggtagggcggttagagggggtttcgttgagaagggggtatttgaataaaggtttgaaggaaatcggggattgagttttatagttatgttagaggcgatagttaatgagttttgagggggtaagtgggtttgtttaaagagggggtaggaagttggcgttgtaggtatcgggaagagttacgtattttgtattgtattagtttgtagacgtagatagggagtagcgatgagggatggacgtttttttttgggagtagtttttttatttgattgagtagaggagattcgtgttttgttgttttttttggatagagatggtttttaaggttttttggtttagttttttagtttgagtttggagtttgggtttgttgatggagttttttgagttttggtagttattaaggttttaattttggttttgttgtttttttttagtgtaattgtgagtaagttatgttattttattgagttttggttttatatttataaagtgggttaataagttagatttttgatgttgttagttttataagggtaggtatttttatgaggtttttttatagtggtatttttagtacgtttaaaagtggtgggtatatagtaggtatttagtaaatggttgttgaatgaatggttggcgtggtgtgtgggtggtgtgttggggaatatagggttatgggtttttgtttcgtggtttgtacgtgcggaggttatggtttattaggttggattgtgagagttttgggatgggtgtggaattgttggaggggtaagagtttttttttggtttaggattattgatggtattaaatgagttttggttttttttgggtttttagtgttcgtatttatgttataaggggttagatgatttagttataggtttgtttttgttatttgggatggtttagttttgatatatttgttttaggtttgtattttatatatacgtttgtgtatatttgtatttttgggtttttttagtgtttatttttttgagtagtagttggtagaggtgggtaaggtgaggtgggttttgttgattattgttgttttgggatttgtattattttatcgatttttttggtggttaaaataatggtagtgttggtttattgagtatttattgtgtgttagatatttgtttttgttttaggtaagtttgattttgttgaatttttatagatgttttgtggagtatatgttattttatagattggaaagttaaggtttagtaggaagagtgatttgtttgaggttttagtaaggagtgggtagagttgaggttggatttaggttttttgatttttgaattagtgtttttaaggtttggtttacgtgttgttttttatttagtaagttgtgtttaaggttaagggtgtagtaatagtatatttaattagagttatttatgttatgtgttggttttatttttgatatagttgtagtatattattattagtagagtatttgttttttgttacgttttatgttgggttttatttgtcggtttagaggtagacggtatagtagttaagatgtgggttgtgttttttaattttggtttttttaggtaatagttgggaaggttgggtaaattaataggatttttttgtgatttagtttttttattcgtaaaataggaatataattgtgaggatatttttttttttatttgttttttgttttttttttttttttatagatatatggttttgttatattgtttaggtgggttttgaatttttagttttaagtgagttttttgttttggttttttaaagtgttgggattatagttgtgagttattgcgtttagtttttaggtttttttttttagtttgttattaaagtatgaaaggttatagataaatgtttggataataaattcgttttaattttagtgtatagtttaagaaatagaataagacggttttcggaagtttttttaagtgttttttttaagtagttatcgtttttttaatttttagtaatatagatgaggttttttttagtttttattttttaaaaaaaaaaaaacggggatgaaatttatataacgtgagattaattattttgaagtgtatgatttattggtttttagtatattataatgttgtgtaattattatttttatttagttttaaaatttttttattattttaaaataaaattttgtatttattaagtagttagtttttgtattttatgttttagtttattttgtgttgttataatatattattcgagattgggtaatttataatgaatagaaatttattttttatcgttttggaggtagggaagttcgagatttagggttggtatttttttgttatacgttttatggtgaaaggggaagggtaagagagaataagatagggttgaatttgttttgtttttttttttttttgagatggagttttgttttgttttttaggttggagtgtcgtggcgcgatttcggtttattgtaatttttgtttttttggtttaaggaatttttttgttttagttttttgagtagttgggattataggcgtgtgttattatgtttggttaatttttgtattattagtagagatggggttttattatgttggttaggttggttttgaatttttgattttaggtgatttatttgttttggttttttaaagtgttgggattataggcgtgagttattgcgttcggtcgaattcgtttttttataaggaatttattttgtgataatgttattaatttatttatgagggtggtgtttttttgatttaaatattttttatgaggttgtattggggattaagtttttaatatatgaattttgggggataatttaatttatagtattttttgttttttggtgtttgttaattattagtttattttttgtttttatgaatttatttattttggatattttatgtaaatggaattatatgtggttttttgtgattggtttttttaatttagtaatatgattttttgttttgagttagggttttgggttatcgtttaggttgtagtgtagtggtgggattttggtttatggtttattgtagttttaattttttggttttaagtgatttttttgttttagtttttagagtagttgggattataggtaggtgttattatatttggttaagtttaatgtttttgaggtttttttatgtagtagcgtatattaatatgtcgtttttttttatggatgaataatttttatgttgtagatgtattatattttgttatttgttaatttgttgatggatattgggatgatatatttttttttttttttttttttttttttttttttttgagatggaattttattttgttattaggttggagtgtagtggcgtgatttcggtttattgtagttttcgttttttgggtttaagtgatttttttgttttagttttttgagtagttgggattataggtgtgcgttattatgtttggttaatttttatatttttagtagagatggggttttattatattggttaggatggtttttattttttgattttgggattcgtttatttcggttttttaaagtgttgggattataggcgtgagttattaagttcggtttcggggtgatatattttatatttaattttttgaagaagtagttgtattattttatatttttattagtagtgtatgagggtgttagtttatatttttgttaatatttgttttttttttattatagttatttttgggtatgtaaagttgtattttattgtgtgtgtggatttttttgtttttgttttgttttgtttttttgagatagagttttgttttgttttttatgttggagtgtagtggtacgattttagtttattgtaatttttattttttgggtttatatgatttttaggttttagttttttaagtattgggattataggtatgtgttattacgttcggttaatttttgtatttttagtagagatggggtttgattatgttggttaggttggttttgaatttttgattttaagtgattcgtttgtttcgattttttaaagtgttgggattataggtgtgagttatcgcgttcggtttttatcgtgattttgatttatgtttgttagatgattaatgatgttgaatatttttttatttttttgttgattatttgtgtatttttggaggaatatttttttgagttttttgtttattttaaaattaggtagtttgtttttttgttgttgtattgtaagagttttttatgtgttttggttaatagatttttattagatttttaagtatttttatttattttgtaggttatttttttatttttttgatagtgtttttttatgtataaaggtttttaattttgatgagtttatttgaagtttttttttttgttgtttgtgtatttggtgttatttaagaatttattgttaaatttaaagtaatgagatttatttatgtatttttagattttttttgtagttttagtttttatatttaggttaatttattttgagtttatttttgtatatggtttatagtgtgaagtaggatattataaaagaatgtgatatttatttttttgaatgtggatatttagttgttttagtttttttatttgtaaaatagggataagattgtgaggataggttattttgggtatattgtttatgggttattgttttttgttttgtaaggaatagtatttaaattaataaaaaaaattgtaaggatatttttttttttaggttttttttttttcgttttgaaaaaatatagtttttttgttgaagaaattgttttttttttattgaatgattttggtatttgtgttgaaaattagttgaatgtagatatttgggtttattttttggttttgaatttttttttattggtttgtatgtttgttttgtataaattgtattgttttgattattatagttttgtatagtaaattttgaaattggaaagtatttaattttattttttttttttaatattattttggttttttggggttttttgaaattttatgtgaatgtgaggattggtttttttatttttgaaaaaagaaaaagtttgttggaattttgatagggattgtattgaatttgtatattgttttgggtagtattgttattttaataatattgttttttaatttatgtatataggatgtttttgtatttatgtagatttttaatttttttaaataatgttttgtagtatataagttttttatttttttggttaagtatttttttggaggtttttgtaaatgttttttttttttttttttaagagttagggttttgttttgttattgggttggattgtagtggtattattatagttttaattttttgagtttaggtgattttgttatttcggttttttgagtagttgggattttaggtatacgtaacgatttttggttaattaaaaaatattttttgtggagattagattttattatgttgtttaggttcgttttaaattttagatttaagtttgttttagttttttaaagtgttaggattttataggtgggagttattgtgttggtgtttaatagttatgttgaggtaaaattgatgtattatatgatttatttatttaaagtatatagtttagttggttttagtatatttagagttgtgtatttattattatatttaggtttttttttttgttttttttttttttttttcgagacggagtttcgtttttgttgtttaggttggagtgtaatggtgtgatttcggtttacggtaatttttgttttttaggtttaaggagttttttgttttagttttttaagtagtgggattataggtatgtattattatgtttggttaattttgtatttttagtagagatggggtttttttatgttggttaggttggtttttaattttcgattttaggtgattcgttcgtttcggttttttaaagtgtcgggattataggtgtgcgttatcgtgtcgggttttattttttatttttgtagatttgtttgttttgggtattttatataaatggagttataatgatacgtggttttttgtgattggttttttttatttagtataagttacggtttttttatatggtagtatgttttagtatttcgtttttttttatgattgaatagtttttcgttgtatgaatttgttatattttgtttatttattcgttgttgatggatattagggtcgtttttattcgatggttgttatgaataatgttgttgaggatatttgtgtgtaagtttttgtgtggatgtgttttattatttttttttaatttttagtagttttttgatgagtgggttcgtgtgtgtgtgtgtgtgtgtgtgtgtgtgtgtgtgtgtgtttgtgtgtatagggtgtttggatatttatggtgaagaatagttggaaagagttaaggggcgttgggagggtgtggtagtagtgttattttgtttggtatagaagtgttttggtattggagttatttgtatagttgtattggtgaattttagtttatgggatttggttttatagggttatagggtatgtgtgtttggaagtttgggttttttttgggattaggttaggagttggtatagatagtttgttttttgttatacgttgaggtaattggtgttttagggtattgttgttggtatttttttgttaggtatgatttgtggattattcgggtttagtttagtgttttagtttgcgttagtaggggttatttggagggtttttttgggagaggtattttcgtgtgtttttcgtattttttcgtttcgtggtattttttgtgagttatcgttatattgggttttttgtcgtttatttgggatattatttaattttgttttaatttttttttttttttttttgttttattttagg

SEQ ID NO: 404 - DNA, 13317 bp, Artificial Sequence
  chemically treated genomic DNA (Homo sapiens)
tttgaaatgaggtaggaagggagggagagaggttaggataaggttgagtgatgttttaggtaggcggtaggaggtttagtgtgacggtgatttataaggggtattacggggcggggaggtgcgggggatatacgagaatgttttttttagaggagttttttaggtggtttttgttgacgtaggttggggtattgggttgagttcgggtgatttataggttatgtttggtaggaaggtgttagtagtagtgttttggggtattagttgttttagcgtgtggtaaggagtaagttgtttgtgttagtttttggtttagttttaggggaggtttaggtttttaaatatatatgttttgtggttttgtaaggttaaattttatgggttgggatttattaatatagttgtgtaggtagttttaatgttaaaatatttttgtgttaggtagggtggtattgttgttatatttttttagcgttttttgattttttttaattgttttttattatgaatatttaagtattttatgtatataaatatatatatatatatatatatatatatatatatatatacgaatttatttattagagagttgttaaggattaaaaggagatggtgaaatatatttatataaaaatttatatataaatgtttttaatagtattatttataatagttatcgagtggaaacgattttaatgtttattaataacgaatggataaataaaatgtagtagatttatataacggaaaattatttagttataaaaagaaacgaagtattgagatatgttgttatgtggagggatcgtaatttatgttaagtgaaagaagttagttataaaggattacgtattattatgattttatttatataaaatgtttagaataggtaaatttatagagatgaaaagtagggttcggtacggtggcgtatatttgtaatttcggtattttgggaggtcgaggcgagcggattatttgaggtcgggagttggagattagtttgattaatatggagaaattttatttttattaaaaatataaaattagttaggtatggtggtgtatgtttataattttattatttgggaggttgaggtaggagattttttgaatttgggaggtagaggttgtcgtgagtcgagattatattattgtattttagtttgggtaataagagcgaaatttcgtttcgaaaaaaaaaaaaaaaaaataaaaaaaaaaatttgagtatggtgatggatgtataattttgaatatattaaaattaattgaattgtatgttttaaatggatgaattatgtagtatattagttttattttaatatggttattaaatattagtatagtggtttttatttgtaaaattttagtattttgggaggttgaggtaggtttaagtttggagtttgagacgagtttgggtaatatagtgagatttggtttttataaaaaatgttttttaattagttaggagtcgttgcgtgtgtttgaagttttagttatttaggaggtcgaaatggtagaattatttgagtttaagaaattgaagttatgatggtgttattgtagtttagtttagtgatagagtaagattttagtttttaaaaaaaaaaaaaaaaagtatttataaaagtttttaaaaaaatatttaattaagggggtgaagggtttgtatattataaaatattgtttaaagaaattagagatttatataaatgtaaaaatattttgtgtgtatggattagaagataatattgttaagatggtaatattatttaaagtaatatatagatttaatgtaatttttattaaaattttaataggttttttttttttttagaaatagaaaagttaatttttatatttatatggaattttaaagggttttaaagagttaaaataatattgaaaaagaaaaataaagttaaatattttttaattttaaaatttattatataaagttatagtaattaaaatagtatagtttatataggatagatatatagattaatggaagagaatttagagttaaaaaataaatttaaatatttatatttaattgatttttaatatagatgttaagattatttaatggggaaagaatagtttttttaataaagagattatatttttttaaaacgaaagaaaagaaatttagaagaaaaaatatttttataattttttttgttaatttaaatattgttttttgtagagtagggaatagtgatttataggtaatgtgtttagagtagtttatttttataattttatttttattttgtagatgaagaaattgaggtaattggatatttatatttaaaagaatggatattatatttttttgtgatattttattttatattgtaaattatatataaaaataaatttaaaatgaattgatttgaatataagagttaaaattataaaaaaagtttaagaatatatgagtaaattttattattttgaatttggtaatgaatttttagatgatattaaatgtataagtaataaaaagaaaaattttaagtgaatttattaaaattaaaaatttttgtgtatgaaaggatattgttaagaaagtaaaaagataatttatagaatgggtggaaatatttggaaatttaataagggtttattaattagaatatataaagaatttttataatgtaataataaaaagataaattgtttgattttaaaatgagtaaaggatttaaagagatatttttttaaagatatataaatggttaatagaaagatgaaaagatgtttagtattattagttatttggtaaatataaattaaaattacgatgaaggtcgggcgcggtagtttatatttgtaattttagtattttgggaggtcgaggtaggcggattatttgaggttaggagtttaaaattagtttggttaatatgattaaattttatttttattaaaaatataaaaattagtcgggcgtggtggtatatgtttatagttttagtgtttgggaggttgaggtttgagaattatgtgaatttaggaggtggaggttatagtgagttgagatcgtgttattgtattttagtatgggagatagagtaagattttgttttaaaaaaataaaataaaataaaaataaaaaaatttatatatataatgaggtataattttatatgtttaaggatggttgtaatgaaaaaaaaataagtgttggtaaggatataaattgatatttttatgtattgttggtgggaatgtaaaatggtgtagttgtttttttaaaaagttaaatatagaatatattatttcgaggtcgggtttggtggtttacgtttgtaattttagtattttgggaggtcgaggtgggcggattttaaggttaagagataaagattattttggttaatatggtgaaattttatttttattaaaaatataaaaattagttaggtatggtggcgtatatttgtagttttagttatttaggaggttgaggtaggagaattatttgaatttaggaggcggaggttgtagtgagtcgagattacgttattgtattttagtttggtgatagagtgagattttattttaaaaaaaaaaaaaaaaaaaaaaaaaaaaaaaagaatatattattttaatgtttattaataaattaatagataataaaatgtgatatatttataatatagagattatttatttataagaaggaacgatatattgatatacgttattatatagaggaattttaaaaatattaagtttagttaagtgtggtggtatttgtttgtagttttagttattttggaggttgaggtaggaggattatttgagattaggaggttgaggttgtagtgagttatgagttaaggttttattattgtattgtagtttgggcgatagtttaagattttgatttaaaataaaaaattatgttgttaagttaaagaagttagttataaaaggttatatatgattttatttatatgaaatgtttagagtaggtaaatttatagagatagaaagtaaattggtggttagtagatattaggagatagggggtgttatgaattgaattgttttttaaagtttatgtgttggaaatttgatttttaatgtagttttatgggaggtatttgggttaagggagtattatttttatgaatggattaatgatattattatagagtgggttttttataaaaggacgagttcggtcgggcgtaatggtttacgtttgtaattttagtattttgggaggttaaggtaggtggattatttgaggttaggagtttaagattagtttggttaatatggtgaaattttatttttattaataatataaaaattagttaagtatggtggtatacgtttgtaattttagttatttaggaggttgaagtaggagaattttttgaattaaggaggtagaggttgtagtgagtcgagatcgcgttacggtattttagtttgggggatagagtaagattttattttaaaaaaaaaaaaaaataagataagtttagttttgttttgtttttttttatttttttttttttattatgggacgtgtgataagaagatgttaattttgaatttcggatttttttatttttagaacggtaagaaataagtttttgtttattataaattatttagtttcgggtaatatgttatagtagtatagaatgaattaagatataggatataaaaattgattgtttaatgggtataaagttttattttggggtaatgaaaaggttttgaaattagatagaggtagtggttatataatattgtgatatattaaaggttaatgaattatatattttaaaatggttaattttacgttatgtaaattttattttcgtttttttttttttaaaggataaaaattaaaaaaaattttatttgtgttattggaggttaggagagcggtaattgtttgggaggagtatttgggagagttttcggggatcgttttattttattttttgaattgtatattgggattggggcgagtttattatttaggtatttatttgtggttttttatattttggtaataagttaagaaaagaaatttaaaagttgaacgtagtggtttataattgtaattttagtattttgggaggttaagataggagatttatttgaggttaggagtttaagatttatttgggtaatatagtaagattatatatttatgaaaaaaaaaaaaagataaaaaataggtagaaggaaaaatatttttataattgtatttttattttgcggatggggaaattgagttatagagaggttttattagtttgtttaatttttttagttgttatttgggagagttagaattggaaagtatagtttatattttgattattatatcgtttgtttttaaatcggtagatggagtttagtatggggcgtggtagagggtaggtgttttgttaatggtggtgtgttgtagttgtgttagaagtgggattagtatatggtatgagtgattttgattagatgtgttattattatatttttggttttaagtatagtttgttgggtgagaggtagtacgtgggttaggttttgagagtattagtttaggagttagagggtttgagtttaattttagttttatttattttttgttgaaattttaagtaagttattttttttattgaattttagttttttagtttgtaaggtggtatgtgttttatagggtatttataaaaatttaataaaattaggtttgtttagagtagagataggtgtttggtatatagtaagtgtttagtaaattagtattgttattattttaattattaagggggtcggtggggtggtataggttttaaaatagtagtagttagtagggtttattttattttgtttatttttgttagttgttatttagaaagatgggtattgggaaggtttaagagtgtaggtgtgtataagcgtgtgtgtagggtgtaaatttgagataggtgtgttagagttaggttattttagatgatagaggtaggtttgtggttgggttatttggttttttgtaatatgaatgcggatattgaaggtttaagaggggttaagatttatttaatgttattagtaattttagattagagagaaatttttgtttttttaatagttttatatttattttaaggtttttatagtttagtttaatgagttatggttttcgtacgtgtaggttacgggataggagtttatgattttgtgttttttagtatattatttatatattacgttaattatttatttaataattatttattgagtgtttattgtatgtttattatttttagacgtgttggggatattattgtgaagaagttttatgaaaatgtttatttttgtagagttgataatattagagatttggtttgttaatttattttatagatgtgaaattaaggtttagtgaggtgatatggtttgtttatagttgtattaagaggaagtagtagaattagggttagaattttgatagttgttaagatttaggaagttttattaataaatttagattttaggtttaggttgggggattgggttaagggattttaaaagttatttttgtttagaaagagtagtaggatacgaattttttttgtttagttaggtggggaggttgtttttagggaggggcgtttattttttatcgttgttttttgtttgcgtttgtaggttggtatagtgtaggatgcgtggtttttttcgatgtttgtagcgttagttttttgttttttttttgaataagtttatttatttttttaggatttattggttgtcgtttttggtataattgtgaggtttaattttcgattttttttaggtttttatttagatgttttttttttagcgaagttttttttggtcgttttgtttgttttatgtttttttatttttacgttgtttgttttttttttatggttcgcgttatcgtgagatatgtatgtttgtttgggagttgtttgtttttttgttagcgtttaagatattaatacgaggatgggatgtttgtttgtcgggtttattgttggattttaggatttagaatagcgtttggtttataggcgttgtttagtacgtgtttgttgaatgaatgtaagtgtatatagggtagttaatcgttatatttggggattttttttttagggggaggtttatagaagttggtttgggataaagttattttttagtaggtggcgtttttttttatttgttttttagttttgcgtggtagttattttgggataaatagttttggggttaaaaagggttttttttttgttttaattttattaaaaggggattttagttttttattagtataaatggattaggttacgtatcggtttacgatattatagggttgttttcgtttggagtgttaaagttaaggtttttttttatgatttgtaggcgcgatatagttggatttcgcgttgtttttttgtttgttttttttagttcgttttagtttatattgttttagttacgttgttattagaaaatattaggtatatttttatttgggagtttttgtttttgttgtttttttttttgggatatttttgtttagttagcgttttattttttttaggttttaggtttttgattattgtcgtttttttcgggtagttttttgatgttttttcgtttttagtttattgttttttatttatagtttttattttttattttagtatttgttatttcgatattttatgtttatttatttattgtttgttttatttttattggaatgtaagttttattaggggattattgtgtttcggagttcggggttattcggtatagtatatagttaatgaatatttgttaattgaatgaatgttgaatattgttttattgtgttagtttagtgacgtgattttttttttttgggttttagtttttttatttataaaatggggttatgaatgagattatttatgtatagttagatttttgtttttttgtttagatgattattgaaggagtttacgaaacgggggtataagtagttgtgggtttggggttgcggaatgttggttttttaggttggtaagatttttcgtttttgttttttagggtatagttttttaggaggagttagcgtgggagaaagaatttggcgggtaaaagcggttttttattacgtttgtggagttagttttttttgatgatagatattttatttatggtggtagcgtggtacgttgttatttagttcgggatagtttagggtagtaggatatgtaggaggtatcgtggatagggtatagtttgtaagataagagaggagttggttagggcgggaggggattttatattagttttttttttgaggacgtcgggttttgaggttttttggttgttttgtttatttagtaaagggtaaggttagtaagggtggcgtggagttcgtttttaaggatttattttgagtagagagatgtggtaatgtttttagcgattttaatttgggggaagtagagtttttcggtttaagcgtaggttagattttaaatttaggatatttatgttggggggaggtggtttttttatttatagttatttttgattgagtaagtattaaggtagtcgtgttttgtttttttcgtgttatttttatggtttaatattgaggtaatttagtatgaatgaggtagtttagggtatttgagggaatgcgtagagttattagtatttgtttgtttttttattattttatatatatatatttttttttttttttttttttttttttttttttaaattaggaagttattaatttgttatttttaataaattaagtatattttcgtttttttatgttattttatgttattttttgagttttagcggtttttttttttttattagatgatagagaaaagataggttttagataattcgggattttgaataagaaagtaatttattgcgtatgtacggtttggggtttagaagttagttttgggggtttgatcgaggttttgatttttattttaagatttttatttttgtttttagggattagtaattaatagattgagggacgtcgaggttattgtttcgttttaggtttttagaacggaggggaggagggcgcgaggtagcgttagttgggtttttatttggagtttggggtttggttagggtttatagagattaaggcgtttttgttttttttagtttggggttatttgcggatagtaggtcgggagttacggtggcgtttagagaagtggtagttggttttagggatattatgggtattagttttttttcgtgttttaggggagttggtgggtcggatacgttattgtttggtatgtgatagtggtaggttgtttaggtttcggtagaaagaagggaggtaagtggtaggaagcgggaggaaagataagatggatatgatagggaagtaaataagagggtgagaaattatattttgggttttaagttgtaaaggtaatgatgcgaggttgggagtagtaataaggggttttttttgttagtaatatgttcggtattttataatttaagtatataggattgttagatttttaatttttagtatttttatatttcggtcgggtatagtggtttatgtttgtaattttaatattttgggaggttaaagtaggagaattttttgagtttaggagtttgagatttgtttgggtaacgtagtgagaatttgttttataatttaatttttttttataaaaaaattaaaaattaaaaaattagttaggtatggtgttgtgtatttgtaatgttagttattcgagataggaggattattcgagtttgggaggtttaggttgtagtgagttttgattgtattattgtattttagtttaggtgatagaatgagattttgttttaaaaaatatataaatatgtatgtatttttgtattttttattgttttgtgtgttaaattttaacgtgattatttttttttattttgttcgcggtttggttttagttaagtttgtttcgatttgtttttatttttttttcgagtttttacgttttatttttgtttttttttatttattttatatttagtagttagagggatttttaacgttgaatttgttttttttttgtttagaatttttgtggttttttggtgtttttagtaaaaaagttaaattttttagttgaggatttaaggttttttaggatttcgtttttgttgttttgcgttttaggtgtatgagttgagacgtgtatttagaaagttttcgggaaaggttaaggattatgacgttgattattgtatttttttagttttttcgttttatttgattttttatgttacgtttttgttatttaagtttttttttttggtttttattagggatagtatttttttttgggcgttttttttttttttttttgaggttttagttaaattagtgttttttttaggaagttttttttattttagaggttgtattgtgtgttttttgtgtattttcggagtaatttttttaatatttattaacgttaatgtagtagattagtaaagcgttttatttaatgagtatatgaagaaagaggttaagtgtttttaattgatttttattttaggattatatatagttagggatatattattagattttttttatgatattaattttttttggggtgtattttagatttcggatggtattagtaatagaatgttattaagatatagttttgtttttatgaggtttatagtttggtgtgaggggtagaaaaatatacgaatatgtaaataattaggtggtggggaggttggagagtggaagaataggatgttagtttggtgtgcgggatttgcgagtagatattcgagttaattgagggagtgagttgtgtagatatatgaggaaatgtattttagtaggggaatagaaaatgtaaggatttgaggtaggagggggtttggtgaggagaaatacgagagaggtggataggggagaatattaagggttttttgggttatggttgggattgagagaagttcgttttttatacggatttatattatattttttttgatgtaagtttagtttaaaatattttttaaatggttgggagggagaatttagagtttaaaggaggggttgatgtggagggaatagaataggggttttatgttttattttttttttcgttggtttatagcggtttagggatatcgttttttagggtttttgtaatgtagtagtattaaagtatttattgtgggtttagggttcggtttattgtttagcgtttagtgaatagttaaatatatggttgttattattttagagagaagtaaaggtagttaggtatggttaagagtggtttgggttttagagtttaagagttatcgttagttgggtggttttgggtagggtgtcggcgtttttatggagttttttttgaatgtttttaatattttattagatagttagtgattatgtttagatgaggatagaagttgagagaagggaagttgtttatttcgggttttttagtcgagaagtagcggaggttttggtcgttgttgggattaatagagttgttttttataagtttattttagtaattaaggagttagtatagttggagggagagtagggggaggagttggaagattttttgcgtttcgtttggattttgttttgtttttttattgagggtggtgttttagttgaggtgttcgtgacgtagttttgtggtgatgaaatattagttattgtagttaagaagatggttggtttaggtcgggtacggtggtttacgtttgtaattttagtattttgggaggttgaggtgggcggattatttgaggttaggagttcgagattagtttgattaatatggagaaattttgtttttattgaaaatagaaaattagttgggcgtggtggtatatgttatttgggaggttgaggtaggagaatcgtttgaattcgggaggtggaggttgtggagagttaagatcgcgttattgtattttagtttgggtaataagagcgaaattatattttaaaaaaaaaagatggtttgattattcggggggttgttaatggaggatatttaggtagggggatagagattcgtttatggaatttttatagtacgttttgcggaggggagtttttgtacggttttattatatttattattttttaaggtttttgggtatgagttttttgagtgtttgggttagagttgtagttgttgatttaagataaggtaaaaagagtaagagtattttataggagaggatatttatataattaagaaatatatataattttattagttataggtaaatgtaaattataattatttatttgggatggttcgaattttaaaaattgataaggttaattgttggttcggatgtagaggaattagaatttttatttattattggtgggaggtgtaaaatggtttaattattgtggaaaattgttaagtagttaaaattaaagtttaatatatgtttattttacgatttagtaattcgttttaaggaaattagtgtatgtataaaagatttgtattataatgttgatagtagtaatatttatagtaattttaaattggtaatagattaggagtttatttataagagaatgaataaataaatacgtagatttatagtagaatattatttagtaacgaaaaggattaaattgttgttgaatatagtagggaaggagtgagagaatgttatagagtgaaagaagttagtattttgtttacgttttttttgtagtttggagtttcgtgattatttgagttagtttttatttttttttcgttcgaatttttttatgtaatataaaagttaaaatttttaaagtagttttaggattttacgcggtttgtaatatttttttttgtttttttgagggtattttattttagtagtgtttggtttttttagttgttaggatatatggggacgttttattttagggttttgtaggtattgtatttttaggtggaaatttaggtttttttttattttttttagtttttgtttacgttttttttttgagaagtttttttaatttttttaggtaaagtatgtttattttatttttttttatttttattttttatttttttttaagtatttattattatcgatgttattgtatgtgtttgtttacgttgatagtttattatttatattggaatgttagtacgataaaggtaggatttttggttgttttagttatagttggatttttagagttttgtagggtgttgggtatagagt

SEQ ID NO: 405 - DNA, 6015 bp, Artificial Sequence
  chemically treated genomic DNA (Homo sapiens)
ttttttgttttagttttttaaagtgttgggtttataggtaaattatgttaatgtgttttgtttttaaaaaatttatattatagtttttagtaaagggatgtataatcgtgggtgttgtttgaagttgttgtttttgaaggatttttaggttatgagggaggaaagggaggtttggtgagggtagggtatattttttgggttataaagtaaaatttttgttagtttgtgattttagtggtttgagttttttttagtagttttaggaggtaaattgaagttattattgtttttatttattattttttttggtttttattaatattagggaggtttttttgttttttttttttgttttttttttttttgagatagggttttattttgttgtttaggttggttttaaatttttgggcgtaagttattattttattttagttttttaagttgttgggattgtaggttatatattatcgtttttggttgggtagtagtttattattttaaagattttgtttttttgttttttttttatattgtgttttgttatttttgagagttaggataattatgtatatttttatatttttttatttatattttttttggggattggtatatagttggaatttattaaatgtttgggtttgaaaggaaggtattaaatttattttaatttggtagtttggtagtttgtttgttttggggtaggaatgtttgtttttatataatttttgataaatgataatttatttatggtttttaatttgtatttgaaatgtttttagaaattttttattggaattgtaaagttgaatgtttttatttttaagattatataagtattcgaattattgaagaattggttggaaaaatagaatttgaaaacgaattgaattatatgtgtggttattgttaagatttattttttaaagaggaagtttgggttttgtttatggataagagtttttagaaggttatagatgttgattttggtagttttaaataggtttttgatgattataatattgttgagattgttttggatttggaagaggattataatgtgatgacgttttttaaatattaaattgagtaaggatagttatttaagttttgattttttatagtaggaggttgtttttgagtttgagtagaagtagttataatggtcgttaggggttatattttttaaaaggttggtagaatttgaattattagattttttttaaattttagttgtgtttttttttaagttgtgagattagttttttgaattttattgttttgaaatgttttttattattgatttttttttttaattttttttgatattttgaatgtgtttttttgattgatgtttaatatatttagtatttatggtaggtgtgggttatgggtttttgttgtgttttttagtgtttttttttacgggtttttaaaaaagtataggagtggttaggtatagtggtttacgtttgtaattttagtattttgggaggttaaggcgagtggattatttgaggttaggagtttgagattagtttggttaatatggcgaaattttatttttattaaaaatataaaaattagttaggagtggtggtgtgtatttgtagttttagttattttggaggttgaggtaggagaattgtttgaatttggaggcggaggttgtaatgagtcgagatggtatcgtttttttttattttgagtgatagagtaagattttgttttaaaaaaataataatttagttggttatggtggttcgtgtttgtagttttagttatttgggtagggattgaggcgaaaggattatttgaggttaggaggtagagattgtagtgagttgagattacgttattgtattttagtatgagtgatagagtgagattttgttttaaaaaaaaaaagaaaaaaaaagggaagaaaggaaattgaattttagggaagtgtttattttttgagttaataagaggaaggaatatgggggtgaggtagagttggtaaaaggttgttttttgttttgattgtttttaaagattaagtgaagtatagtataagaagtggggaaggagtggaataaggagttagatttgtaattgtgagtagttaattgagataatttaatatttttggatttgattgtttttaaagattgagggtagtataagaagaggggaaggagtagaataaggagttagatttgaaattgtgagtagtcgattgagataatttattatttttggattagttagggttgtttataagtgttaaagttcgaataaattaaagagttggggagaaaggtttaattaatagttgagtgattgtttaatagattgttttttaggttagtgattttggtatagggtaggttgtatagttagtaatattttttattataggtttagtgatttttttgggtttaaatgtggaggttatatatttattttttagtagaggttggtttggtatttgttggtgttttaagaattatggtatggttagattttggttatttgattgtatgtgtttttttagtgggcgtgttttggtttttaattagttgtggttattgttattgttttgtttggggtaggagttgaggttaaggttaattataggttttttttaggttatttattatttagattttgtaggaggtagtataaagtatttatagtttgtggagttagaggttaattttttttttttgagtaagaagaatggaagtaaatgaaaagtgtttatagtatgtttaattgtttttgtttaggtgaagaatagtttgtttggatggagagatgttaggttatttgatatttagaaaaataggttttaaaatagtgttttttaaataatatatgtggatgtggatatttttttatagacgaggtggagtttaatttttgtttttatttttatatttttattttattattattttttgaaggtgaattagatttaatgatattttttacgattaaagtagggaaagggaaaagttataaatttatagtggggaagtttggtagatatttaattaagtgatgttatgtatatgttatgagaggggtgtattatttttttggtatttttattaaaaatttaaatttttagtgtatgattttgagataaatgttagataaatttagacgtggggtatattttataagatatttggttagaatttaagattgttgagatggtcgggtgtagtggtttatgtttataattttcgatattttgggaggttgaggcgggtagattatttgaggttagaagttcgagattagtttggtaaatatggtgaaattttatttttgttaaaaatataaaaattagttaggtattatggtatgtgtttttagttatagttatataggaggttgaggtaggagaattgtttgaatttaggaggtggaggttgtagtgagttaagatcgtattattgtattttagtttgggtaataagtaagattttattttaaaaagaaaaaaaaagattgttgaggttatgaaaaataaggaaagatttaaaaattattaatagattattaaagattaagaagatataatggttaaatgtaatatggaattttggagtgtattttggaagagaaagagaatattattggaaaaattgataaaatttgaataaaaattagtgtttaatgtattgatgttagttttttagttttgattaatgtgttagagttatgtaagatgttaatattggagaggttgagtgaaggatatatatgaagtatattttttgtaaatttaaagttatttttaaatttaaaatgtatgtaattgtattttggattaagtgtaattgattttaagtttgtgaaaatgtgtatgagtttatgtgtaaaaaaatttttgggggtgatggataggagggtatagttttttttttgttatttgtattttttaattgatttgtagtggatatgtattatttttgtaaagataaaagtagttagtttaaaaatttttatttttagttaattagttatggatattttttataaagtatttgtttagatttaatttttagtttttggagtggagtttaggggttatattaggagggtttggtaggattttgatacgagggtagtttttttttgggggagttagatttttaggagttgggttatttaggttttaaagagttgttttttaggagtttagttagtttattggtttattattggttagggtttggttttttttaggtggggttttgtagtcgtggttgtattaaatagggatttagttaggtagggtggtttatttttgtaattttagtattttaggaggttgaggcgggtggattattttaggttaggagtttaagattagtttggttaatatggtgaaattttgtttttattaaaaatataaaaattagttagcgttgtggcgtatgtttgtagttttagttatttaggaggttgaggtaggagaattgtttgaatttaggaggtagatattgtagtgagttgagatcgtgttattgtattttagtttgggtgatagagtgagattttgttttaaaataaataaataaataaataaataaataaataaatggggatttatttattttttattttagaagattttgaaatttatttattttttttatttggagtagagacgggaatgagggtttagtatagggtgggggtgaggaatgagggagaatataggttttttttggttagagagataggtatgtttttgtttaagtaaagtttttatttaaaaatttagattttttaaataggtaatttattttggaatttttgaatgtggaatttttttttattagaaatgtagttgtatagttaagtaggtgagttttgagtttttttatgttagttttagattagtagggagtgggtatataggtttttttatttttttggtgatacgatttattttcgtttttgtatttttggttttttgaggtgtttaagaagaatttttcgttttcgttatttgagtttatatagtgagtagatatacgtttatttgtttagaatagggtttggggagttgttttttagggatttagttggagggggaataaaagtttagaattttaataaaatttttttaggtttttaaggagttaggattaaattttttttagggagatttgatagttgattttgattatgattgagaaattttaaatattttatattatttagtttttttttttatagtttattttggtaagttaaataattattgaattgttttcgtggaaatattaaattgtaatttggattattagaattaaaatagaaataagatagttttaaaaataaatagttttggaatttgttagttgtaaattgtaaatttaagttatagtataaggtatatgagaagatggatttatttaattttatgataagagatttttaggatttatggttgtattttattagtgtttatgttaaagttagtagaaattagggttgtaagttaattgatgataaatttcgtaataatatttaagggaggagttggtttttagaagtttttagaaagagagatttaagagttggaagggaaggttgagaagaaagggtaggaataaggagagagataagtgaatggtggagtgaagttttagtagggaatatagagttatagttgaggtttgggagaaaagtagtaatttttttttttttgagatagagttttggtttattgtttaggttggagtgtagtggtataatttcggtttaatgtaattttcgttttttaggtttaagggatttttttgttttagttttttgagtagttgggattataggtttgtgttattacgtttggttaatttttgtatttttagtagagattgggttttattatgttggttaggttggtttcgaatttttgatttcgtgatttattcgtttcggttttttaaagtgttaggattataggcgtgagttatcgtgtttggttagtaatttttttaa

SEQ ID NO: 406 - DNA, 6015 bp, Artificial Sequence
  chemically treated genomic DNA (Homo sapiens)
ttgaaagaattgttggttaggtacggtggtttacgtttgtaattttagtattttggaaagtcgaggcgggtggattacgaggttaggggttcgagattagtttgattaatatggtgaaatttagtttttattaaaaatataaaaattagttaggcgtggtggtataggtttgtaattttagttatttaggaggttgaggtaggagaattttttgaatttgggaggcggaggttgtattgagtcgagattgtgttattgtattttagtttgggtaatagattaagattttgttttaaaaaaaaaagaattgttgttttttttttaggttttagttgtgattttgtgttttttgttggaattttattttattatttatttatttttttttttgtttttgttttttttttttagtttttttttttagtttttaaatttttttttttagaagtttttaaagattagttttttttttaagtattgttacgaagtttattattagttggtttataattttggtttttattggttttggtatgaatattggtgggatgtagttatggattttggaaattttttgttatagggttggatgggtttatttttttatatgttttgtgttatggtttgaatttgtagtttgtaattagtaagttttaaagttatttatttttgaagttgttttgtttttattttgattttggtaatttaaattgtagtttggtgtttttacggaaataatttagtgattgtttggtttgttaagatgaattgtgggggagagaattgaatgatgtaaaatatttaaagttttttagttatgattaaagttaattattaagtttttttgagaaggatttggttttagttttttaaaaatttgaggaagttttattaaaattttgggtttttgttttttttttaattaaatttttggagaatagttttttaaattttgttttgagtaaatgagcgtgtatttgtttattgtatagatttagatgacgaaggcgggaagttttttttgggtattttagggagttagagatgtagagacgggagtagatcgtgttattagggaaatgaggaggtttatgtgtttattttttgttaatttgggattggtatggagaggtttaggatttatttgtttgattgtatagttgtatttttagtgaggaaaagttttatatttaaggattttaggatgaattgtttgtttggaaaatttgaatttttaaataaaggttttgtttaagtaaagatatatttgtttttttggttagggagagtttgtatttttttttattttttatttttattttgtgttgggtttttattttcgtttttattttaggtaggaaaaataaataaattttaaagttttttagagtaagggatagatagatttttatttatttatttatttatttatttatttatttattttgagatagagttttattttgttatttaggttggagtgtaatggtacgattttagtttattataatgtttgttttttgggtttaagtaatttttttgttttagttttttaagtagttgggattataggtatgcgttataacgttggttaatttttgtatttttagtagagatagggttttattatgttggttaggttggttttgaatttttgatttaaagtgatttattcgttttagttttttaaagtgttgggattataggagtgagttattttgtttggttagatttttatttaatatagttacggttgtaaagttttatttgggaggggttaggttttgattagtagtaaattagtgaattaattgagtttttgagaaatagttttttgagatttagataatttagtttttgaggatttagtttttttagaaaaggattgttttcgtgttagggttttgttaagtttttttggtgtggtttttaggttttattttagaaattgaaagttgggtttggataggtattttgtgaaggatgtttatggttagttgattggagatgagggtttttaaattaattgtttttgtttttatagaagtgatatatgtttattgtaggttaattagaaaatatagatgataaaaaaaagattatatttttttatttattatttttaaaagtttttttgtatatgagtttatatatatttttataaatttgagattagttgtatttgatttaaagtgtaattatatgtattttaagtttggggataattttagatttatagaaaatgtattttatatatattttttatttagtttttttaatgttaatattttatataattttgatatattagttaaaattaagaaattgatattaatatattaaatattagtttttatttaagttttattagtttttttaataatgtttttttttttttttaggatgtattttaggattttatgttgtatttagttattgtgtttttttggtttttagtggtttgttgatagtttttgagtttttttttattttttatgattttaatagtttttttttttttttttgaggtggagttttgtttgttgtttaggttggagtgtagtgatgcgattttggtttattgtaatttttattttttgggtttaagtaatttttttgttttagttttttgtgtagttatgattaaaggtatatgttatgatgtttggttaatttttgtatttttagtagagatggggttttattatgtttgttaggttggtttcgaatttttgattttaagtgatttgttcgttttagttttttaaagtgtcggggattataggtatgagttattgtattcggttattttaatagttttgagttttggttaggtattttgtagaatgtattttacgtttggatttgtttaatatttgttttaagattatatattgggaatttgggtttttggtaggaatattagggaagtgatgtattttttttatgatatatatatgatattatttggttaggtgtttgttaggtttttttattataagtttgtgatttttttttttttttattttagtcgtgggaagtattattaagtttagtttatttttaaagggtggtaatgaggtgggaatatgggggtaaggataggaattaagttttatttcgtttatagaagagtgtttatatttatatgtattatttggaaggtattgttttgagatttgtttttttgagtattaagtagtttgatatttttttatttagataggttattttttatttgagtaggggtagttgagtatattgtgagtattttttatttgtttttattttttttgtttagggagaagaaattggtttttgattttataggttgtgaatgttttgtgttattttttgtagggtttgagtggtaggtggtttggaaggagtttgtagttagttttaattttaatttttgttttaggtagggtagtggtagtggttataattggttgggaattagggtacgtttattggggaggtatatgtaattaagtggttagggtttaattatgttatagtttttggggtattagtaggtgttaggttaatttttgttaaggagtgggtgtgtagtttttatatttgagtttagaggaattattagatttgtggtaagggatgttgttggttatgtagtttgttttatgttagagttattggtttaaaagatagtttgttagataattatttagttgttagttaggtttttttttttaattttttggtttgttcgggttttagtatttataaatagttttggttggtttaaaggtagtgagttattttaatcgattatttatagttttagatttaattttttgttttatttttttttttttttttatattatttttagtttttaaaaataattaggtttaaaggtattgagttattttaattgattatttatagttatagatttaattttttgttttattttttttttattttttatattatattttatttggtttttaaaaataattaaaataaaaaatagttttttgttagttttgttttatttttatattttttttttttattagtttaggaggtgggtatttttttgagatttagtttttttttttttttttttttttttttttttttttgagatagggttttattttgttatttatgttggagtgtagtggcgtgattttagtttattgtaatttttgttttttggttttaagtgattttttcgttttagtttttatttaagtagttggaattataggtacgaattattatgattagttaaattattatttttttgagatagagttttgttttgttatttaggatggaggggagcggtgttatttcggtttattgtaattttcgtttttaggtttaagtaatttttttattttagtttttaaagtagttgggattataggtgtatattattatttttggttaatttttgtatttttagtggagatggggtttcgttatgttggttaggttggttttaaatttttaattttaagtgatttattcgttttggttttttaaagtgttgggattatagacgtgagttattgtgtttggttatttttgtatttttttaggggttcgtggaaaagaatattaagagatatagtagaggtttatgatttatatttattatgggtattgggtatattgaatattaattaaaaaaatatatttaagatgttaaggaaagttaaaaaaaaaaattagtaataggaaatattttaaagtaatggaatttaaaaaattggttttatagtttaaaaagggatataattgggatttaaaaagggtttggtaatttaggttttgttaattttttgagaaatgtggtttttgacggttattgtagttgtttttgtttaggtttaagggtagttttttgttgtaaggaattaaagtttagataattgtttttatttaatttggtatttaaaagacgttattatattgtagtttttttttaagtttagaatagttttaataatattatgattattaaaagtttgtttgaggttgttagggttagtatttgtggttttttgagggtttttgtttatgagtagggtttaggttttttttttgaagggtgaattttggtaatgattatatatgtggtttaattcgtttttaaattttatttttttagttaattttttaatagttcggatgtttgtatggttttaaaaataagaatatttagttttataattttagtggaaggtttttgaagatattttaggtgtaagttaaaaattatgaatgggttgttatttattagggattgtgtaaaagtaggtatttttgttttaggataggtaggttgttagattgttaaattaaggtgggtttggtattttttttttaggtttaagtatttagtgagttttaattatatgttagtttttaagaaaggtataagtgggagggtatagaaatgtatatggttgttttggtttttagggatgataagatataatgtgaaaaaaaaataaggaaataaggtttttagggtaataaattgttgtttagttaggagcggtggtgtgtaatttgtaattttagtaatttgagaggttgaggtagaataataatttgcgtttaggagtttgagattagtttgggtaatagagtgaggttttgttttaaaaaaaaaaaaaataaaaaaaaaaaataaaaaaatttttttgatgttggtgaaagttaaggaagatggtgggtagaggtagtaatgattttagtttattttttggggttattggaggagatttaggttattgaagttataggttggtagggattttattttgtggtttagggggtgtattttatttttattaggtttttttttttttttttataatttggagattttttagaaataatagttttaggtagtatttacggttatatatttttttattaggagttgtagtatgagttttttaaaaatagggtatattggtatggtttgtttgtaaatttagtattttgggaggttgaggtaggagg

SEQ ID NO: 407 - DNA, 6192 bp, Artificial Sequence
  chemically treated genomic DNA (Homo sapiens)
ggttaaaggttagaaataaattttaatttttaagtcggatttttaagttataaggaacgttagattcggtttattttttgatagggtgaattggaaattggtttttatttggtttttaattttttttattgggtttagtggggattttgacgtcgaataggggttgtagattagtgagtgtgtatgtgtgtgtggaggggtagtaggggtcgttttttacgtggttatataagtacgtgttggggttgggtaggtgttttttcggtttgagggttttcgtatgtttaaagtttttgtgtataatcgtagatttagatgtgtttgtatttggtagaattagggtgtttaaaaaggggtgattgagggttgtagttgtagaggtggttggggattgtgtttttgtgggggcggcgtgttttagtgggaagatattttggggagttaggacgatgtcgtacgtgggtagttgtgtggataagtggttgggggtgtgtggatatcggtggttataggttgggagagtggtgtagttaagagagggagtatgagttggggttatagatagcgatagtttttgggtggtatgatttcggagggggtatgttgttttttgtgttaggtattagggatagggatattgagaagttcgatgaatggagagggcgtgtgagttgtgaatatgtgtggtcgtttttgtggtttgtgaaggtgatagttagatttttacgtgtgggttgtagatttaggggagttggtgggttatttggttatgtgtttgtgattgtagatggattatatttatgtttgtggaaagttaatttagtagttgttttgtggtttttgtagttgtgtatgggtgtgcggttgtgtattttagtagtatgagttaagtgagcgtgtgggtcgtgggatagatttcggaaaataattgtaggcgtgtaaatgtggttgtttgtagtgtatattttggagatattaattttgtttatgtttattgttgaggttggaggtatcgttttgggtatttattatttttaagttgtttttttttatttggtttgcgtggtggagtgaaggttagtgggacggatttgtagttggaaggttgggggaatgttgaaaaggttattgacggtgggtttgaggtttagggtgttcggcgggtacgggttttttagggagaaggtttgtaggatggtggtgaagaagaggaagagtttcgtttttgttaggttttttttaaggtagatacgtttttttggtgaggagagagagagagagagggttgagttagtattttttatatttaggtttacggggggaatagtaggtggaggagttaatagtaagtttagggtgtagaagggtgtttttagttggtatagatgtttggagttcgttagtatttgtttgtgatatttagggttgtagtagatatttaaggagaagggtaggaacgttttatgttttttgaatcgtttatttgtatttaggaaacggtttgggttgaatttttttgggtgtttgaagatgttggggttatgtaggatggagttaaggagggggaagattttcgtgttttgaggggaaataataatgaaattataaatttttttttattttagtttatttggttttcgagtgtggagtataagtttcgggtgttagggatattagtttataaaatttaatggtattaatatttgtggagtgttgagtggcgtgtagtggtttatgtttgtaattttagttacgtgggaggttgaggtgagagaagtatttgagtttaggagtttgagattagtttgggtaatataataagattttgtttttaggaaaaattaaaaaattagttaggtatggtggtatgagttcgttgttttagttgtttaggaggttgacgtgggaggattatttgagtttaggagtttaaggttgttgtgagttatgtttgtattattgtattttagtttgggagataaagagagattttgttaagaaagaaagagagaaagagaggaagataggaagggaggaagggaggaagggaggaaggaagaaaggaagaaagagagagagagagaaagaaaaagaaaagaaagaaagagagagagagagaaagaaagaaagaaagagagaaagaaagagagagagagaaagaaagaaagaaagaaagaaagaaagaaagaaagaaaaaaagaaagaaagaaaggtaaagaatagtagttaaggtatagtttttgagtttaaattttgaatttattatttgtaggttgggggattttggtaaattttttaaaaattttttaagtttttagtttttttatttgtaagatgggtatgataatggtatagggttgttttaaagattaaatgagataatagatatgtaaagtatttagaataatttttggtgtagagtaggtttttaagtttggatatttgttattattattattaaattgttgttgtttggtatataggatcggtttttaagagttgagttggtgtttgttttataagtattattttatagttttaagttgatattattattgtttttaatgtagaggagggatatattgaggtttagggggggaagtgatttgtttaaggttttatttataaaataggagggggtaggttaggtgtagtggtttacgtttgtaattttagtattttaggaggtcgaggtaggtagtttatgaggttaggagtttgagattagtttgattaatatggtgaaaatttatttttattaaaaagataaaaattagtcgggtgtggtggtatatatttgtaattttagttatttaggaggttgaggtaagagaattgtttgaatttgggaggcggaggttgtagtgagtcgagattacgttagtgtattttagtttgggtaatagagcgagattttatttcggaaaaaaaaaaaaaaaaaaaaagaagaagaagaaaaagaaaatagtagtatagtagtattggattttaattgttataggtttgattttgtagtgaaggtggaggagggagttgtttgtataaattgttggggtttttggggaaatatcgtttttttttggttttgtatcggagttgttttttagtgaagggtattgagattgagagagagagatagaggagagaatgtgtttgtagtaggggttaagggttaagagggttttttttagttttggatttgttttttagtttttaaattgtttttttgtatgttattttattcgattgttttaattattttggaaggaggtagaattgggagatttgtggggtagatggggtttagagatagagttaaaggggaagaaaatataaattaaaaagaaatagaaagagttaaaagatgtagaaagtatggttgggtgcggtggtttacgtttgtaattttagtattttgggaggtcgaagcgggtagattacgaggttaggagtttaagattagtttgattaatataatgaaatttcgtgtttattaaaaatataaaaaattagttgggcgtggtggtgggtatttgtaattttagttatttaggaggttgaggtaggagaattatttgaatttgggaggcggaggttgtagtgagttgagattacgttattgtattttagttcgggcgatagtgcgagattttgttttaaaaaaagaaaaaaaatatatgtagaaagggagggggtgttagagaaagaaggagaagaaagatgtaggggggtaggagtggaggaggaagatagagatagagaaagagagggagataaagatagagagagagagagagagatattaagattaagaaaaagttagggagatattgatagtaaattattcgggtttaggtttcgaggtagagaattatgggtggtagttatacgtatatttatttggggtagggtgtattttcggaagcgggtggttcgtatgagggtgcggggtatttttatgggtattagcgttagtagtcgttgcgttttatgtagaatcgcgtcggtgtaagggaggcgggtacggttttttaggtttggtgtttggttagtttttagttttcgatttagttttttacgtatttattttgtaagtaagaggagggtaggagttagacgggggtagggtttagggattttttttttagaagtttatttgtttgtatagttgtagtttggggtgaggttgataggtggggaggagtggttttttagtttttattgagtttaaagattatatattttgtgtgttgggtgttttatttatttttttttttttttattttattttattttattttattttattattattatttttttttgtaacggagttttgtttttgttgtttaggttggagtgtaatggtgcgattttggtttattataatttttgtttttcggatttaagcgattttttcgttttagttttttgagtagttgggattatacgttttgttatttaggttggagtgtagtggcgcgattttggtttgttgtaatttcgtttttcgggtttaggagatttttttattttagtttttcgagtagttgggattatagacgtttgttattatgtttagtttatttttgtatttttaatagagatagggttttattatgttagcgaggttggtttcgaatttttgattttaggtgatttatttgttttggttttttaaagtgttgggattatagatgtgagttatcgtatttggtttttttttttttttttttttttttgagatagggttttattttgttgtttaggttggtgtagtagtataatgacggtttattgtaatagtttttattttattttttgggtttaggtgatttttttattttagttttttgagtagttatgattataggtacgtattattatatttagttaatttttttttttttcgtggagtttaataatttttgaggaaagtttggtatttatggcgtggcggtgttttaggatgggtagggtttcgttggtttggtgtttggcgttgtgcggttgggcgtgtatggtttttaggggtgagtgatgggggttttttggggtagggattttttcggaggggttggggtaggggtaggaggtgggggatgatggtaggtgtggggggtttgggttggtttagggagtttttttgggattatagaaaagggattttaagggagggagatatagatttagagatattaagtgcggtagagggagagaaagattgagagaggaattgaagggtaggggggatagaagagaggattcggagagatagatagataaggagaagttgagggtaggggtgggggttggatttgagaagggggttatggggagaggggttgagttgagggtcgttaggaaggaagaaattttttcgaaggggtatcgagttaggtagtgggatgaggagggttttggagttttgggggaaaacgtttttttttgttaatattatttttttgattcgttatttgtttttattttattagtttattttatttttggggaggaggtttttattttgtttttttgtttttgtttttagttttgttatttttgtgggtttttgttttttttttttttatagtttttgtttttatttttttttgttttttgagtttttttttttttttttagtttttttttgtgattgtatttttttttcgtttttattttttttttttttttgagggttgtttttttattttttttgttttgttttgtatttgtgtttttttttgttttattttttttgtttttttttggttttttttttcgttattatttttatttttttttattattatttttattttttttttttaatttttgattttttttttttatttattagtattagcgcgatttgttaagtttttagagatttaagagaggacggagggggtaggggttggttttgttaggtagtgtagggcgtgggaggttgttagatttcgagtttttttttcgacgggatggacgttagattttagttttttgggagggttttcgttttttttttagagttttcgttttttattttattttgaggttattttgtaattatgtcggtttaagggtttggcggggttttggtcgtcggtgggtaggtaaggatagggtggaattgagggtcggaaggagttggggggtttttaagttaattttttttattttttttttagg

(The sequence listing continues in the following parts.)

1. A nucleic acid comprising a sequence at least 18 bases in length of a segment of the chemically pretreated DNA of genes associated with tumor suppressor genes and oncogenes according to one of the sequences taken from the group of Seq. ID No. 1 to Seq. ID No. 536 and sequences complementary thereto.

2. A nucleic acid comprising a sequence at least 18 bases in length of a segment of the chemically pretreated DNA of genes associated with tumor suppressor genes and oncogenes according to one of the sequences according to one of the genes BRCA2 (U43746), E2F1 (M96577), ELE1 (X71413), MN/CA9 (Z54349), PVT1 (M26714), SAC2 (AK001725), TEM8 (AK025429), TM4SF1 (X01394), TNFSF11 (AF053712), AXL (NM_{—}021913&NM_{—}001699), CCND3 (NM_{—}001760), CSF1R (NM_{—}005211), MGMT (NM_{—}002412), NOV (NM_{—}002514), SFRS8 (NM_{—}004592), TNFRSF6 (NM_{—}000043), TPD52 (NM_{—}005079), AKT1 (NM_{—}005163), BCL2 (NM_{—}000633&NM_{—}000657), CBL (NM_{—}005188), CBLC (NM_{—}012116), CRK (NM_{—}005206&NM_{—}016823), DCC (NM_{—}005215), EPHA1 (NM_{—}005232), EPHA3 (NM_{—}005233), ETS1 (NM_{—}005238), ETV5 (NM_{—}004454), ETV6 (NM_{—}001987), FGF3 (NM_{—}005247), FGF4 (NM_{—}002007), FHIT (NM_{—}002012), GLTSCR1 (NM_{—}015711), GPS1 (NM_{—}004127), GROS1(NM_{—}022356), HIC1 (NM_{—}006497), IGFBP7 (NM_{—}001553), KISS1 (NM_{—}002256), KRAS2 (NM_{—}004985), LATS1 (NM_{—}004690), LOC51213 (NM_{—}016383), MUC1 (NM_{—}002456), MUC2 (NM_{—}002457), N33 (NM_{—}006765), PTTG1IP (NM_{—}004339), SE20-4 (NM_{—}022117), SE70-2 (NM_{—}022118), SFN (NM_{—}006142), ST7 (NM_{—}013437), SUPT3H (NM_{—}003599), SUPT6H (NM_{—}003170), TEM1 (NM_{—}020404), TERT (NM_{—}003219), THRB NM_{—}000461), TIMP2 (NM_{—}003255), TMEFF1 (NM_{—}003692), TNFAIP6 (NM_{—}007115), TNFRSF10A (NM_{—}003844), TNFRSF10B (NM_{—}003842), TNFRSF10C (NM_{—}003841), TNFRSF11A (NM_{—}003840), TNFRSF1A (NM_{—}001065), TNFSF12 (NM_{—}003809), TNFSF13 (NM_{—}003808), TNFSF15 (NM_{—}005118), TNFSF18 (NM_{—}005092), TP63 (NM_{—}003722), TSSC1 (NM_{—}003310), VDR (NM_{—}000376), YES1 (NM_{—}005433), FOXG1A (NM_{—}004471), GRF2 (NM_{—}005312), HSPC070 (NM_{—}014160), RAB3A (NM_{—}002866), RAB5A (NM_{—}004162), APC (NM_{—}000038), BMI1 (NM_{—}005180), CHES1 (NM_{—}005197), SMT3H1 (NM_{—}006936), TIAM1 (NM_{—}003253), VAV1 (NM_{—}005428), MCF2 (NM_{—}005369), MSH2 (NM_{—}000251), ERBB4 (NM_{—}005235), FOXG1B (NM_{—}005249), TACSTD1 (NM_{—}002354), TRA1 (NM_{—}003299), FOXG1B (NM_{—}005249), TACSTD1 (NM_{—}002354), FLI1 (NM_{—}002017) and sequences complementary thereto.

3. An oligomer, in particular an oligonucleotide or peptide nucleic acid (PNA)-oligomer, said oligomer comprising in each case at least one base sequence having a length of at least 9 nucleotides which hybridizes to or is identical to a chemically pretreated DNA of genes associated with the cell cycle according to one of the Seq. ID No. 1 through Seq. ID No. 536 and sequences complementary thereto.

4. The oligomer as recited in claim 3; wherein the base sequence comprises at least one CpG dinucleotide.

5. The oligomer as recited in claim 4; characterized in that the cytosine of the CpG dinucleotide is located approximately in the middle third of the oligomer.

6. A set of oligomers, comprising at least two oligomers according to one of claims 3 to 5.

7. A set of oligomers as recited in claim 6, comprising oligomers for detecting the methylation state of all CpG dinucleotides from one of the sequences of Seq. ID 1 through Seq. ID 536 or to a chemically pretreated DNA of a gene according to claim 2, and sequences complementary thereto.

8. A set of at least two oligonucleotides as recited in claim 3 which can be used as primer oligonucleotides for the amplification of DNA sequences of one of Seq. ID 1 through Seq. ID 536 and sequences complementary thereto and/or to a chemically pretreated DNA of a gene according to claim 2, and sequences complementary thereto, or segments thereof.

9. A set of oligonucleotides as recited in claim 8, characterized in that at least one oligonucleotide is bound to a solid phase.

10. A set of oligomer probes for detecting the cytosine methylation state and/or single nucleotide polymorphisms (SNPs) in chemically pretreated genomic DNA according to claim 1 and/or a chemically pretreated DNA of a gene according to claim 2.

11. A method for manufacturing an arrangement of different oligomers (array) fixed to a carrier material for analyzing diseases associated with the methylation state of the CpG dinucleotides of one of the Seq. ID 1 through Seq. ID 536 and sequences complementary thereto and/or a chemically pretreated DNA of a gene according to claim 2,
wherein at least one oligomer according to one of the claims 3 through 5 is coupled to a solid phase.

12. An arrangement of different oligomers (array), obtainable according to claim 11.

13. An array of different oligonucleotide- and/or PNA-oligomer sequences as recited in claim 12, characterized in that these are arranged on a plane solid phase in the form of a rectangular or hexagonal lattice.

14. The array as recited in one of the claims 12 or 13, characterized in that the solid phase surface is composed of silicon, glass, polystyrene, aluminum, steel, iron, copper, nickel, silver, or gold.

15. A DNA- and/or PNA-array for analyzing diseases associated with the methylation state of genes, comprising at least one nucleic acid according to one of the preceeding claims.

16. A method for ascertaining genetic and/or epigenetic parameters for the diagnosis and/or therapy of existing diseases or the predisposition to specific diseases by analyzing cytosine methylations, characterized in that the following steps are carried out:
a) in a genomic DNA sample, cytosine bases which are unmethylated at the 5-position are converted, by chemical treatment, to uracil or another base which is dissimilar to cytosine in terms of hybridization behavior;
b) fragments of the chemically pretreated genomic DNA are amplified using sets of primer oligonucleotides according to claim 8 or 9 and a polymerase, the amplificates carrying a detectable label;
c) Amplificates are hybridized to a set of oligonucleotides and/or PNA probes according to the claims 6 or 7, or else to an array according to one of the claims 12 through 15;
d) the hybridized amplificates are subsequently detected.

17. The method as recited in claim 16, characterized in that the chemical treatment is carried out by means of a solution of a bisulfite, hydrogen sulfite or disulfite.

18. The method as recited in one of the claims 16 or 17, characterized in that more than ten different fragments having a length of 100-2000 base pairs are amplified.

19. The method as recited in one of the claims 16 through 18, characterized in that the amplification of several DNA segments is carried out in one reaction vessel.

20. The method as recited in one of the claims 16 through 19, characterized in that the polymerase is a heat-resistant DNA polymerase.

21. The method as recited in claim 20, characterized in that the amplification is carried out by means of the polymerase chain reaction (PCR).

22. The method as recited in one of the claims 16 through 21, characterized in that the labels of the amplificates are fluorescence labels.

23. The method as recited in one of the claims 16 through 21, characterized in that the labels of the amplificates are radionuclides.

24. The method as recited in one of the claims 16 through 21, characterized in that the labels of the amplificates are detachable molecule fragments having a typical mass which are detected in a mass spectrometer.

25. The method as recited in one of the claims 16 through 21, characterized in that the amplificates or fragments of the amplificates are detected in the mass spectrometer.

26. The method as recited in any of the claims 24 or 25, characterized in that the produced fragments have a single positive or negative net charge for better detectability in the mass spectrometer

27. The method as recited in one of the claims 24 through 26, characterized in that detection is carried out and visualized by means of matrix assisted laser desorption/ionization mass spectrometry (MALDI) or using electron spray mass spectrometry (ESI).

28. The method as recited in one of the claims 16 through 27, characterized in that the genomic DNA is obtained from cells or cellular components which contain DNA, sources of DNA comprising, for example, cell lines, biopsies, blood, sputum, stool, urine, cerebral-spinal fluid, tissue embedded in paraffin such as tissue from eyes, intestine, kidney, brain, heart, prostate, lung, breast or liver, histologic object slides, and all possible combinations thereof.

29. A kit comprising a bisulfite (=disulfite, hydrogen sulfite) reagent as well as oligonucleotides and/or PNA-oligomers according to one of the claims 3 through 5.

30. The use of a nucleic acid according to claim 1, of an oligonucleotide or PNA-oligomer according to one of the claims 3 through 5, of a kit according to claim 29, of an array according to one of the claims 12 through 15, of a set of oligonucleotides according to one of claims 6 through 9 for the diagnosis of solid tumors and cancers

31. The use of a nucleic acid according to claim 1, of an oligonucleotide or PNA-oligomer according to one of the claims 3 through 5, of a kit according to claim 29, of an array according to one of the claims 12 through 15, of a set of oligonucleotides according to one of claims 6 through 9 for the therapy of solid tumors and cancers

32. A kit, comprising a bisulfite (=disulfite, hydrogen sulfite) reagent as well as oligonucleotides and/or PNA-oligomers according to one of claims 3 through 5.
